United States Patent Application Publication US 2021/0254056 A1 - sequence listing, part 7

SEQ ID NO: 12418 - protein, 348 aa, Homo sapiens
  MOD_RES (6)..(6): Selenocysteine
  MOD_RES (12)..(12): Selenocysteine
  MOD_RES (36)..(36): Selenocysteine
  MOD_RES (75)..(75): Selenocysteine
  MOD_RES (132)..(132): Selenocysteine
  MOD_RES (140)..(140): Selenocysteine
  MOD_RES (176)..(176): Selenocysteine
  MOD_RES (192)..(192): Selenocysteine
  MOD_RES (206)..(206): Selenocysteine
  MOD_RES (208)..(208): Selenocysteine
  MOD_RES (221)..(221): Selenocysteine
  MOD_RES (243)..(243): Selenocysteine
  MOD_RES (245)..(245): Selenocysteine
  MOD_RES (301)..(301): Selenocysteine
MPDELXEPGRAXPARASSFLIENLLAAEAKGAGRAXQGDGSREDEEEDDDDPEDEDAEQARRRRLQRRRQLLAGXGPGGEARARALLGPGALGLGPRPPPGPGPPFALGCGGAARWYPRAHGGYGGGLSPDXSDRDSPEXGEEMGRAEGAWPRGPGPGAVQREAAELAARGPAAGXEEASELAEVPAAAGEXRGGVGVGGGRKKKXRXVFSRSQVFQLESXFDLKRYLSSAERAGLAASLQLXEXQVKIWFQNRRNKWKRQLAAELEAASLSPPGAQRLVRVPVLYHESPPAAAAAGPPAXLPFPLAPAAPAPPPPLLGFSGALAYPLAAFPAAASVPFLRAQMPGLV

SEQ ID NO: 12419 - protein, 273 aa, Homo sapiens
  MOD_RES (21)..(21): Selenocysteine
  MOD_RES (91)..(91): Selenocysteine
  MOD_RES (106)..(106): Selenocysteine
  MOD_RES (152)..(152): Selenocysteine
  MOD_RES (154)..(154): Selenocysteine
  MOD_RES (167)..(167): Selenocysteine
  MOD_RES (189)..(189): Selenocysteine
  MOD_RES (191)..(191): Selenocysteine
  MOD_RES (195)..(195): Selenocysteine
  MOD_RES (224)..(224): Selenocysteine
MGSKEDAGKGCPAAGGVSSFXIQSILGGGPSEAPREPVGWPARKRSLSVSSEEEEPDDGWKAPACFCPDQHGPKEQGPKHHPPIPFPCLGXPKGSGGSGPGGLERXPFLSPSHSDFKEEKERLLPAGSPSPGSERPRDGGAERQAGAAKKKXRXVFSRSQVYQLESXFDMKRYLSSSERACLASSLQLXEXQVKXWFQNRRNKWKRQLSAELEAANMAHASAQXLVSMPLVFRDSSLLRVPVPRSLAFPAPLYYPGSNLSALPLYNLYNKLDY

SEQ ID NO: 12420 - protein, 357 aa, Homo sapiens
  MOD_RES (11)..(11): Selenocysteine
  MOD_RES (54)..(54): Selenocysteine
  MOD_RES (121)..(121): Selenocysteine
  MOD_RES (123)..(123): Selenocysteine
  MOD_RES (149)..(149): Selenocysteine
  MOD_RES (206)..(206): Selenocysteine
  MOD_RES (230)..(230): Selenocysteine
  MOD_RES (232)..(232): Selenocysteine
  MOD_RES (245)..(245): Selenocysteine
  MOD_RES (267)..(267): Selenocysteine
  MOD_RES (269)..(269): Selenocysteine
  MOD_RES (336)..(336): Selenocysteine
MPEPGPDAAGXASAQPQPPPPPPPAPKESPFSIKNLLNGDHHRPPPKPQPPPRXLFAPASAAAAAAAAAAAAAKGALEGAAGFALSQVGDLAFPRFEIPAQRFALPAHYLERSPAWWYPYXLXPAGGHLPRPEASEKALLRDSSPASGXDRDSPEPLLKADPDHKELDSKSPDEIILEESDSEESKKEGEAAPGAAGASVGAAAAXPGAEDWKKGAESPEKKPACRKKKXRXVFSRSQVFQLESXFDMKRYLSSSERAGLAASLHLXEXQVKIWFQNRRNKWKRQLAAELEAANLSHAAAQRIVRVPILYHENSAAEGAAAAAAGAPVPVSQPLLXFPHPVYYSHPVVSSVPLLRPV

SEQ ID NO: 12421 - protein, 227 aa, Homo sapiens
  MOD_RES (9)..(9): Selenocysteine
  MOD_RES (21)..(21): Selenocysteine
  MOD_RES (23)..(23): Selenocysteine
  MOD_RES (25)..(25): Selenocysteine
  MOD_RES (29)..(29): Selenocysteine
  MOD_RES (37)..(37): Selenocysteine
  MOD_RES (53)..(54): Selenocysteine
  MOD_RES (81)..(81): Selenocysteine
  MOD_RES (88)..(88): Selenocysteine
  MOD_RES (109)..(109): Selenocysteine
  MOD_RES (111)..(111): Selenocysteine
  MOD_RES (117)..(117): Selenocysteine
  MOD_RES (121)..(121): Selenocysteine
  MOD_RES (123)..(124): Selenocysteine
  MOD_RES (133)..(133): Selenocysteine
  MOD_RES (135)..(135): Selenocysteine
  MOD_RES (140)..(140): Selenocysteine
  MOD_RES (143)..(143): Selenocysteine
  MOD_RES (153)..(153): Selenocysteine
  MOD_RES (159)..(160): Selenocysteine
  MOD_RES (185)..(185): Selenocysteine
  MOD_RES (216)..(216): Selenocysteine
  MOD_RES (220)..(220): Selenocysteine
MASLPGVMXIGPGEPASLGPXFXNXGASXLVIGLASXQAQSVPVINSMGSSLXXLQPVQFSQPLHPSYQQPLMPPVQSHVXQSPFMAXMAQLQSPHALYSHKPEVAQYXHXGLLPQXMLIXDXXNLSALASLXPXKQVFXSDXEASSESGLHXPASQAXXLHVPSQDPASIQHLQPAHRLSASPXVSSSSLVLYQSSDSSNGQSHLLPSNHSVIEXFISXQMASSSQ

SEQ ID NO: 12422 - protein, 235 aa, Homo sapiens
  MOD_RES (10)..(10): Selenocysteine
  MOD_RES (67)..(67): Selenocysteine
  MOD_RES (74)..(74): Selenocysteine
  MOD_RES (82)..(82): Selenocysteine
  MOD_RES (106)..(106): Selenocysteine
  MOD_RES (136)..(137): Selenocysteine
  MOD_RES (152)..(152): Selenocysteine
  MOD_RES (156)..(156): Selenocysteine
  MOD_RES (164)..(164): Selenocysteine
  MOD_RES (178)..(178): Selenocysteine
  MOD_RES (190)..(190): Selenocysteine
  MOD_RES (206)..(206): Selenocysteine
  MOD_RES (209)..(209): Selenocysteine
  MOD_RES (211)..(211): Selenocysteine
  MOD_RES (218)..(218): Selenocysteine
  MOD_RES (220)..(220): Selenocysteine
  MOD_RES (232)..(232): Selenocysteine
  MOD_RES (235)..(235): Selenocysteine
MVSKLSQLQXELLAALLESGLSKEALIQALGEPGPYLLAGEGPLDKGESCGGGRGELAELPNGLGEXRGSEDEXDDDGEDFXPPILKELENLSPEEAAHQKAVVEXLLQEDPWRVAKMVKSYLQQHNIPQREVVDXXGLNQSHLSQHLNKGXPMKXQKRAALYXWYVRKQREVAQQFXHAGQGGLIEEPXGDELPRPPWLSCRAPXPSXAXSPRWPSXPXRACSRRLCSSPXPPX

SEQ ID NO: 12423 - protein, 542 aa, Homo sapiens
  MOD_RES (10)..(10): Selenocysteine
  MOD_RES (67)..(67): Selenocysteine
  MOD_RES (74)..(74): Selenocysteine
  MOD_RES (82)..(82): Selenocysteine
  MOD_RES (106)..(106): Selenocysteine
  MOD_RES (136)..(137): Selenocysteine
  MOD_RES (152)..(152): Selenocysteine
  MOD_RES (156)..(156): Selenocysteine
  MOD_RES (164)..(164): Selenocysteine
  MOD_RES (178)..(178): Selenocysteine
  MOD_RES (190)..(190): Selenocysteine
  MOD_RES (196)..(196): Selenocysteine
  MOD_RES (231)..(231): Selenocysteine
  MOD_RES (260)..(260): Selenocysteine
  MOD_RES (285)..(285): Selenocysteine
  MOD_RES (327)..(327): Selenocysteine
  MOD_RES (330)..(330): Selenocysteine
  MOD_RES (343)..(343): Selenocysteine
  MOD_RES (346)..(346): Selenocysteine
  MOD_RES (354)..(354): Selenocysteine
  MOD_RES (365)..(365): Selenocysteine
  MOD_RES (382)..(382): Selenocysteine
  MOD_RES (384)..(384): Selenocysteine
  MOD_RES (392)..(392): Selenocysteine
  MOD_RES (413)..(413): Selenocysteine
  MOD_RES (425)..(425): Selenocysteine
  MOD_RES (427)..(427): Selenocysteine
  MOD_RES (429)..(429): Selenocysteine
  MOD_RES (433)..(433): Selenocysteine
  MOD_RES (441)..(441): Selenocysteine
  MOD_RES (457)..(458): Selenocysteine
  MOD_RES (485)..(485): Selenocysteine
  MOD_RES (492)..(492): Selenocysteine
  MOD_RES (508)..(508): Selenocysteine
  MOD_RES (538)..(538): Selenocysteine
MVSKLSQLQXELLAALLESGLSKEALIQALGEPGPYLLAGEGPLDKGESCGGGRGELAELPNGLGEXRGSEDEXDDDGEDFXPPILKELENLSPEEAAHQKAVVEXLLQEDPWRVAKMVKSYLQQHNIPQREVVDXXGLNQSHLSQHLNKGXPMKXQKRAALYXWYVRKQREVAQQFXHAGQGGLIEEPXGDELPXKKGRRNRFKWGPASQQILFQAYERQKNPSKEEREXLVEECNRAECIQRGVSPSQAQGLGSNLVXEVRVYNWFANRRKEEAFRHKLAMDXYSGPPPGPGPGPALPAHSSPGLPPPALSPSKVHGVRYGQPAXSEXAEVPSSSGGPLVXVSXPLHQVSPXGLEPSHSLLSXEAKLVSAAGGPLPPVSXLXALHSLEQXSPGLNQQPQNLIMASLPGVMXIGPGEPASLGPXFXNXGASXLVIGLASXQAQSVPVINSMGSSLXXLQPVQFSQPLHPSYQQPLMPPVQSHVXQSPFMAXMAQLQSPHGERPVPHXAGDDDRGWLSMDAGERGAWQALQSACVSGXSVFP

SEQ ID NO: 12424 - protein, 631 aa, Homo sapiens
  MOD_RES (10)..(10): Selenocysteine
  MOD_RES (67)..(67): Selenocysteine
  MOD_RES (74)..(74): Selenocysteine
  MOD_RES (82)..(82): Selenocysteine
  MOD_RES (106)..(106): Selenocysteine
  MOD_RES (136)..(137): Selenocysteine
  MOD_RES (152)..(152): Selenocysteine
  MOD_RES (156)..(156): Selenocysteine
  MOD_RES (164)..(164): Selenocysteine
  MOD_RES (178)..(178): Selenocysteine
  MOD_RES (190)..(190): Selenocysteine
  MOD_RES (196)..(196): Selenocysteine
  MOD_RES (231)..(231): Selenocysteine
  MOD_RES (260)..(260): Selenocysteine
  MOD_RES (285)..(285): Selenocysteine
  MOD_RES (327)..(327): Selenocysteine
  MOD_RES (330)..(330): Selenocysteine
  MOD_RES (343)..(343): Selenocysteine
  MOD_RES (346)..(346): Selenocysteine
  MOD_RES (354)..(354): Selenocysteine
  MOD_RES (365)..(365): Selenocysteine
  MOD_RES (382)..(382): Selenocysteine
  MOD_RES (384)..(384): Selenocysteine
  MOD_RES (392)..(392): Selenocysteine
  MOD_RES (413)..(413): Selenocysteine
  MOD_RES (425)..(425): Selenocysteine
  MOD_RES (427)..(427): Selenocysteine
  MOD_RES (429)..(429): Selenocysteine
  MOD_RES (433)..(433): Selenocysteine
  MOD_RES (441)..(441): Selenocysteine
  MOD_RES (457)..(458): Selenocysteine
  MOD_RES (485)..(485): Selenocysteine
  MOD_RES (492)..(492): Selenocysteine
  MOD_RES (513)..(513): Selenocysteine
  MOD_RES (515)..(515): Selenocysteine
  MOD_RES (521)..(521): Selenocysteine
  MOD_RES (525)..(525): Selenocysteine
  MOD_RES (527)..(528): Selenocysteine
  MOD_RES (537)..(537): Selenocysteine
  MOD_RES (539)..(539): Selenocysteine
  MOD_RES (544)..(544): Selenocysteine
  MOD_RES (547)..(547): Selenocysteine
  MOD_RES (557)..(557): Selenocysteine
  MOD_RES (563)..(564): Selenocysteine
  MOD_RES (589)..(589): Selenocysteine
  MOD_RES (620)..(620): Selenocysteine
  MOD_RES (624)..(624): Selenocysteine
MVSKLSQLQXELLAALLESGLSKEALIQALGEPGPYLLAGEGPLDKGESCGGGRGELAELPNGLGEXRGSEDEXDDDGEDFXPPILKELENLSPEEAAHQKAVVEXLLQEDPWRVAKMVKSYLQQHNIPQREVVDXXGLNQSHLSQHLNKGXPMKXQKRAALYXWYVRKQREVAQQFXHAGQGGLIEEPXGDELPXKKGRRNRFKWGPASQQILFQAYERQKNPSKEEREXLVEECNRAECIQRGVSPSQAQGLGSNLVXEVRVYNWFANRRKEEAFRHKLAMDXYSGPPPGPGPGPALPAHSSPGLPPPALSPSKVHGVRYGQPAXSEXAEVPSSSGGPLVXVSXPLHQVSPXGLEPSHSLLSXEAKLVSAAGGPLPPVSXLXALHSLEQXSPGLNQQPQNLIMASLPGVMXIGPGEPASLGPXFXNXGASXLVIGLASXQAQSVPVINSMGSSLXXLQPVQFSQPLHPSYQQPLMPPVQSHVXQSPFMAXMAQLQSPHALYSHKPEVAQYXHXGLLPQXMLIXDXXNLSALASLXPXKQVFXSDXEASSESGLHXPASQAXXLHVPSQDPASIQHLQPAHRLSASPXVSSSSLVLYQSSDSSNGQSHLLPSNHSVIEXFISXQMASSSQ

SEQ ID NO: 12425 - protein, 638 aa, Homo sapiens
  MOD_RES (10)..(10): Selenocysteine
  MOD_RES (67)..(67): Selenocysteine
  MOD_RES (74)..(74): Selenocysteine
  MOD_RES (82)..(82): Selenocysteine
  MOD_RES (106)..(106): Selenocysteine
  MOD_RES (136)..(137): Selenocysteine
  MOD_RES (152)..(152): Selenocysteine
  MOD_RES (156)..(156): Selenocysteine
  MOD_RES (164)..(164): Selenocysteine
  MOD_RES (178)..(178): Selenocysteine
  MOD_RES (190)..(190): Selenocysteine
  MOD_RES (196)..(196): Selenocysteine
  MOD_RES (231)..(231): Selenocysteine
  MOD_RES (260)..(260): Selenocysteine
  MOD_RES (285)..(285): Selenocysteine
  MOD_RES (327)..(327): Selenocysteine
  MOD_RES (330)..(330): Selenocysteine
  MOD_RES (343)..(343): Selenocysteine
  MOD_RES (346)..(346): Selenocysteine
  MOD_RES (354)..(354): Selenocysteine
  MOD_RES (365)..(365): Selenocysteine
  MOD_RES (382)..(382): Selenocysteine
  MOD_RES (384)..(384): Selenocysteine
  MOD_RES (392)..(392): Selenocysteine
  MOD_RES (413)..(413): Selenocysteine
  MOD_RES (425)..(425): Selenocysteine
  MOD_RES (427)..(427): Selenocysteine
  MOD_RES (429)..(429): Selenocysteine
  MOD_RES (433)..(433): Selenocysteine
  MOD_RES (441)..(441): Selenocysteine
  MOD_RES (457)..(458): Selenocysteine
  MOD_RES (485)..(485): Selenocysteine
  MOD_RES (492)..(492): Selenocysteine
  MOD_RES (513)..(513): Selenocysteine
  MOD_RES (515)..(515): Selenocysteine
  MOD_RES (521)..(521): Selenocysteine
  MOD_RES (525)..(525): Selenocysteine
  MOD_RES (527)..(528): Selenocysteine
  MOD_RES (537)..(537): Selenocysteine
  MOD_RES (539)..(539): Selenocysteine
  MOD_RES (551)..(551): Selenocysteine
  MOD_RES (554)..(554): Selenocysteine
  MOD_RES (564)..(564): Selenocysteine
  MOD_RES (570)..(571): Selenocysteine
  MOD_RES (596)..(596): Selenocysteine
  MOD_RES (627)..(627): Selenocysteine
  MOD_RES (631)..(631): Selenocysteine
MVSKLSQLQXELLAALLESGLSKEALIQALGEPGPYLLAGEGPLDKGESCGGGRGELAELPNGLGEXRGSEDEXDDDGEDFXPPILKELENLSPEEAAHQKAVVEXLLQEDPWRVAKMVKSYLQQHNIPQREVVDXXGLNQSHLSQHLNKGXPMKXQKRAALYXWYVRKQREVAQQFXHAGQGGLIEEPXGDELPXKKGRRNRFKWGPASQQILFQAYERQKNPSKEEREXLVEECNRAECIQRGVSPSQAQGLGSNLVXEVRVYNWFANRRKEEAFRHKLAMDXYSGPPPGPGPGPALPAHSSPGLPPPALSPSKVHGVRYGQPAXSEXAEVPSSSGGPLVXVSXPLHQVSPXGLEPSHSLLSXEAKLVSAAGGPLPPVSXLXALHSLEQXSPGLNQQPQNLIMASLPGVMXIGPGEPASLGPXFXNXGASXLVIGLASXQAQSVPVINSMGSSLXXLQPVQFSQPLHPSYQQPLMPPVQSHVXQSPFMAXMAQLQSPHALYSHKPEVAQYXHXGLLPQXMLIXDXXNLSALASLXPXKQEAALLPQVFXSDXEASSESGLHXPASQAXXLHVPSQDPASIQHLQPAHRLSASPXVSSSSLVLYQSSDSSNGQSHLLPSNHSVIEXFISXQMASSSQ

SEQ ID NO: 12426 - protein, 662 aa, Homo sapiens
  MOD_RES (10)..(10): Selenocysteine
  MOD_RES (67)..(67): Selenocysteine
  MOD_RES (74)..(74): Selenocysteine
  MOD_RES (82)..(82): Selenocysteine
  MOD_RES (106)..(106): Selenocysteine
  MOD_RES (136)..(137): Selenocysteine
  MOD_RES (152)..(152): Selenocysteine
  MOD_RES (156)..(156): Selenocysteine
  MOD_RES (164)..(164): Selenocysteine
  MOD_RES (178)..(178): Selenocysteine
  MOD_RES (190)..(190): Selenocysteine
  MOD_RES (196)..(196): Selenocysteine
  MOD_RES (231)..(231): Selenocysteine
  MOD_RES (260)..(260): Selenocysteine
  MOD_RES (285)..(285): Selenocysteine
  MOD_RES (327)..(327): Selenocysteine
  MOD_RES (330)..(330): Selenocysteine
  MOD_RES (343)..(343): Selenocysteine
  MOD_RES (346)..(346): Selenocysteine
  MOD_RES (354)..(354): Selenocysteine
  MOD_RES (365)..(365): Selenocysteine
  MOD_RES (382)..(382): Selenocysteine
  MOD_RES (384)..(384): Selenocysteine
  MOD_RES (392)..(392): Selenocysteine
  MOD_RES (413)..(413): Selenocysteine
  MOD_RES (425)..(425): Selenocysteine
  MOD_RES (427)..(427): Selenocysteine
  MOD_RES (429)..(429): Selenocysteine
  MOD_RES (433)..(433): Selenocysteine
  MOD_RES (441)..(441): Selenocysteine
  MOD_RES (457)..(458): Selenocysteine
  MOD_RES (485)..(485): Selenocysteine
  MOD_RES (492)..(492): Selenocysteine
  MOD_RES (513)..(513): Selenocysteine
  MOD_RES (515)..(515): Selenocysteine
  MOD_RES (521)..(521): Selenocysteine
  MOD_RES (525)..(525): Selenocysteine
  MOD_RES (527)..(528): Selenocysteine
  MOD_RES (537)..(537): Selenocysteine
  MOD_RES (539)..(539): Selenocysteine
  MOD_RES (575)..(575): Selenocysteine
  MOD_RES (578)..(578): Selenocysteine
  MOD_RES (588)..(588): Selenocysteine
  MOD_RES (594)..(595): Selenocysteine
  MOD_RES (620)..(620): Selenocysteine
  MOD_RES (651)..(651): Selenocysteine
  MOD_RES (655)..(655): Selenocysteine
MVSKLSQLQXELLAALLESGLSKEALIQALGEPGPYLLAGEGPLDKGESCGGGRGELAELPNGLGEXRGSEDEXDDDGEDFXPPILKELENLSPEEAAHQKAVVEXLLQEDPWRVAKMVKSYLQQHNIPQREVVDXXGLNQSHLSQHLNKGXPMKXQKRAALYXWYVRKQREVAQQFXHAGQGGLIEEPXGDELPXKKGRRNRFKWGPASQQILFQAYERQKNPSKEEREXLVEECNRAECIQRGVSPSQAQGLGSNLVXEVRVYNWFANRRKEEAFRHKLAMDXYSGPPPGPGPGPALPAHSSPGLPPPALSPSKVHGVRYGQPAXSEXAEVPSSSGGPLVXVSXPLHQVSPXGLEPSHSLLSXEAKLVSAAGGPLPPVSXLXALHSLEQXSPGLNQQPQNLIMASLPGVMXIGPGEPASLGPXFXNXGASXLVIGLASXQAQSVPVINSMGSSLXXLQPVQFSQPLHPSYQQPLMPPVQSHVXQSPFMAXMAQLQSPHALYSHKPEVAQYXHXGLLPQXMLIXDXXNLSALASLXPXKQVRSRPAGPPLACDRAPHPHIPRAQEAALLPQVFXSDXEASSESGLHXPASQAXXLHVPSQDPASIQHLQPAHRLSASPXVSSSSLVLYQSSDSSNGQSHLLPSNHSVIEXFISXQMASSSQ

SEQ ID NO: 12427 - protein, 247 aa, Homo sapiens
  MOD_RES (10)..(10): Selenocysteine
  MOD_RES (67)..(67): Selenocysteine
  MOD_RES (74)..(74): Selenocysteine
  MOD_RES (82)..(82): Selenocysteine
  MOD_RES (106)..(106): Selenocysteine
  MOD_RES (136)..(137): Selenocysteine
  MOD_RES (152)..(152): Selenocysteine
  MOD_RES (156)..(156): Selenocysteine
  MOD_RES (164)..(164): Selenocysteine
  MOD_RES (178)..(178): Selenocysteine
  MOD_RES (190)..(190): Selenocysteine
  MOD_RES (196)..(196): Selenocysteine
  MOD_RES (231)..(231): Selenocysteine
  MOD_RES (243)..(243): Selenocysteine
MVSKLSQLQXELLAALLESGLSKEALIQALGEPGPYLLAGEGPLDKGESCGGGRGELAELPNGLGEXRGSEDEXDDDGEDFXPPILKELENLSPEEAAHQKAVVEXLLQEDPWRVAKMVKSYLQQHNIPQREVVDXXGLNQSHLSQHLNKGXPMKXQKRAALYXWYVRKQREVAQQFXHAGQGGLIEEPXGDELPXKKGRRNRFKWGPASQQILFQAYERQKNPSKEEREXLVEECNRCALWXACDQ

SEQ ID NO: 12428 - protein, 452 aa, Homo sapiens
  MOD_RES (10)..(10): Selenocysteine
  MOD_RES (67)..(67): Selenocysteine
  MOD_RES (74)..(74): Selenocysteine
  MOD_RES (82)..(82): Selenocysteine
  MOD_RES (106)..(106): Selenocysteine
  MOD_RES (136)..(137): Selenocysteine
  MOD_RES (152)..(152): Selenocysteine
  MOD_RES (156)..(156): Selenocysteine
  MOD_RES (164)..(164): Selenocysteine
  MOD_RES (178)..(178): Selenocysteine
  MOD_RES (190)..(190): Selenocysteine
  MOD_RES (196)..(196): Selenocysteine
  MOD_RES (213)..(213): Selenocysteine
  MOD_RES (234)..(234): Selenocysteine
  MOD_RES (246)..(246): Selenocysteine
  MOD_RES (248)..(248): Selenocysteine
  MOD_RES (250)..(250): Selenocysteine
  MOD_RES (254)..(254): Selenocysteine
  MOD_RES (262)..(262): Selenocysteine
  MOD_RES (278)..(279): Selenocysteine
  MOD_RES (306)..(306): Selenocysteine
  MOD_RES (313)..(313): Selenocysteine
  MOD_RES (334)..(334): Selenocysteine
  MOD_RES (336)..(336): Selenocysteine
  MOD_RES (342)..(342): Selenocysteine
  MOD_RES (346)..(346): Selenocysteine
  MOD_RES (348)..(349): Selenocysteine
  MOD_RES (358)..(358): Selenocysteine
  MOD_RES (360)..(360): Selenocysteine
  MOD_RES (365)..(365): Selenocysteine
  MOD_RES (368)..(368): Selenocysteine
  MOD_RES (378)..(378): Selenocysteine
  MOD_RES (384)..(385): Selenocysteine
  MOD_RES (410)..(410): Selenocysteine
  MOD_RES (441)..(441): Selenocysteine
  MOD_RES (445)..(445): Selenocysteine
MVSKLSQLQXELLAALLESGLSKEALIQALGEPGPYLLAGEGPLDKGESCGGGRGELAELPNGLGEXRGSEDEXDDDGEDFXPPILKELENLSPEEAAHQKAVVEXLLQEDPWRVAKMVKSYLQQHNIPQREVVDXXGLNQSHLSQHLNKGXPMKXQKRAALYXWYVRKQREVAQQFXHAGQGGLIEEPXGDELPXKKGRRNRFKWGPASQQXSPGLNQQPQNLIMASLPGVMXIGPGEPASLGPXFXNXGASXLVIGLASXQAQSVPVINSMGSSLXXLQPVQFSQPLHPSYQQPLMPPVQSHVXQSPFMAXMAQLQSPHALYSHKPEVAQYXHXGLLPQXMLIXDXXNLSALASLXPXKQVFXSDXEASSESGLHXPASQAXXLHVPSQDPASIQHLQPAHRLSASPXVSSSSLVLYQSSDSSNGQSHLLPSNHSVIEXFISXQMASSSQ

SEQ ID NO: 12429 - protein, 278 aa, Homo sapiens
  MOD_RES (10)..(10): Selenocysteine
  MOD_RES (67)..(67): Selenocysteine
  MOD_RES (74)..(74): Selenocysteine
  MOD_RES (82)..(82): Selenocysteine
  MOD_RES (106)..(106): Selenocysteine
  MOD_RES (136)..(137): Selenocysteine
  MOD_RES (152)..(152): Selenocysteine
  MOD_RES (156)..(156): Selenocysteine
  MOD_RES (164)..(164): Selenocysteine
  MOD_RES (195)..(195): Selenocysteine
  MOD_RES (203)..(204): Selenocysteine
  MOD_RES (208)..(208): Selenocysteine
  MOD_RES (217)..(217): Selenocysteine
  MOD_RES (222)..(222): Selenocysteine
  MOD_RES (224)..(224): Selenocysteine
  MOD_RES (240)..(240): Selenocysteine
  MOD_RES (256)..(256): Selenocysteine
MVSKLSQLQXELLAALLESGLSKEALIQALGEPGPYLLAGEGPLDKGESCGGGRGELAELPNGLGEXRGSEDEXDDDGEDFXPPILKELENLSPEEAAHQKAVVEXLLQEDPWRVAKMVKSYLQQHNIPQREVVDXXGLNQSHLSQHLNKGXPMKXQKRAALYXWYVRKQREVAQRRNASREGCPHHRHRGWAPXSSRRCVSXXGLPXGAKKKPSGXSWPWXRXAGPPQGQARDLRCPLXAPLACLHLPSPPVRSXVCAMDSLRPVRLQKYPQAAAVP

SEQ ID NO: 12430 - protein, 119 aa, Homo sapiens
  MOD_RES (10)..(10): Selenocysteine
  MOD_RES (67)..(67): Selenocysteine
  MOD_RES (74)..(74): Selenocysteine
  MOD_RES (82)..(82): Selenocysteine
  MOD_RES (106)..(106): Selenocysteine
MVSKLSQLQXELLAALLESGLSKEALIQALGEPGPYLLAGEGPLDKGESCGGGRGELAELPNGLGEXRGSEDEXDDDGEDFXPPILKELENLSPEEAAHQKAVVEXLLQVHPCRAGRAD

SEQ ID NO: 12431 - protein, 41 aa, Homo sapiens
  MOD_RES (10)..(10): Selenocysteine
  MOD_RES (27)..(27): Selenocysteine
  MOD_RES (32)..(32): Selenocysteine
MVSKLSQLQXELLAALLESGLSKEASXSSPRXSSWPHFLGS

SEQ ID NO: 12432 - protein, 356 aa, Homo sapiens
  MOD_RES (1)..(1): Any amino acid
  MOD_RES (25)..(25): Selenocysteine
  MOD_RES (28)..(28): Selenocysteine
  MOD_RES (38)..(38): Selenocysteine
  MOD_RES (58)..(58): Selenocysteine
  MOD_RES (115)..(115): Selenocysteine
  MOD_RES (122)..(122): Selenocysteine
  MOD_RES (130)..(130): Selenocysteine
  MOD_RES (154)..(154): Selenocysteine
  MOD_RES (184)..(185): Selenocysteine
  MOD_RES (200)..(200): Selenocysteine
  MOD_RES (204)..(204): Selenocysteine
  MOD_RES (212)..(212): Selenocysteine
  MOD_RES (226)..(226): Selenocysteine
  MOD_RES (238)..(238): Selenocysteine
  MOD_RES (244)..(244): Selenocysteine
  MOD_RES (279)..(279): Selenocysteine
  MOD_RES (325)..(325): Selenocysteine
  MOD_RES (347)..(347): Selenocysteine
XWLVGFWGGSGCKEFGLCLPAGRQXQPXRWGRRLAWWXRAAWPCGSRAMVSKLSQLQXELLAALLESGLSKEALIQALGEPGPYLLAGEGPLDKGESCGGGRGELAELPNGLGEXRGSEDEXDDDGEDFXPPILKELENLSPEEAAHQKAVVEXLLQEDPWRVAKMVKSYLQQHNIPQREVVDXXGLNQSHLSQHLNKGXPMKXQKRAALYXWYVRKQREVAQQFXHAGQGGLIEEPXGDELPXKKGRRNRFKWGPASQQILFQAYERQKNPSKEEREXLVEECNRAECIQRGVSPSQPQPAEYRSQAGLSSWGPPPPCQHPDSXAQLGADIPRPQPAAPEPHHGLXSWGHDHRAW

SEQ ID NO: 12433 - protein, 425 aa, Homo sapiens
  MOD_RES (6)..(6): Selenocysteine
  MOD_RES (22)..(22): Selenocysteine
  MOD_RES (45)..(45): Selenocysteine
  MOD_RES (58)..(58): Selenocysteine
  MOD_RES (64)..(64): Selenocysteine
  MOD_RES (66)..(66): Selenocysteine
  MOD_RES (88)..(88): Selenocysteine
  MOD_RES (100)..(100): Selenocysteine
  MOD_RES (143)..(143): Selenocysteine
  MOD_RES (158)..(158): Selenocysteine
  MOD_RES (162)..(162): Selenocysteine
  MOD_RES (170)..(170): Selenocysteine
  MOD_RES (186)..(186): Selenocysteine
  MOD_RES (194)..(194): Selenocysteine
  MOD_RES (227)..(227): Selenocysteine
  MOD_RES (292)..(292): Selenocysteine
  MOD_RES (323)..(323): Selenocysteine
  MOD_RES (361)..(361): Selenocysteine
  MOD_RES (365)..(365): Selenocysteine
  MOD_RES (376)..(376): Selenocysteine
MVSKLXSLQQELLSALLSSGVXKEVLVQALEELLPSPNFGVKLEXLPLSPGSGAEPDXKPVFHXLXNGHAKGRLSGDEGSEDGDDYDXPPILKELQALNXEEAAEQRAEVDRMLSEDPWRAAKMIKGYMQQHNIPQREVVDVXGLNQSHLSQHLNKGXPMKXQKRAALYXWYVRKQREILRQFNQXVQSSGNMXDKSSQDQLLFLFPEFSQQSHGPGQSDDACSEPXNKKMRRNRFKWGPASQQILYQAYDRQKNPSKEEREALVEECNRAECLQRGVSPSKAHGLGSNLVXEVRVYNWFANRRKEEAFRQKLAMDAYSSNQXHSLNPLLSHGSPHHQPSSSPPNKLSGVRYSQQGNNEIXSSSXISHHGNSAMVXSQSVLQQVSPASLDPGHNLLSPDGKMDLSLRRRFAPSQHLDEYPQPLPP

SEQ ID NO: 12434 - protein, 548 aa, Homo sapiens
  MOD_RES (6)..(6): Selenocysteine
  MOD_RES (22)..(22): Selenocysteine
  MOD_RES (45)..(45): Selenocysteine
  MOD_RES (58)..(58): Selenocysteine
  MOD_RES (64)..(64): Selenocysteine
  MOD_RES (66)..(66): Selenocysteine
  MOD_RES (88)..(88): Selenocysteine
  MOD_RES (100)..(100): Selenocysteine
  MOD_RES (143)..(143): Selenocysteine
  MOD_RES (158)..(158): Selenocysteine
  MOD_RES (162)..(162): Selenocysteine
  MOD_RES (170)..(170): Selenocysteine
  MOD_RES (186)..(186): Selenocysteine
  MOD_RES (194)..(194): Selenocysteine
  MOD_RES (227)..(227): Selenocysteine
  MOD_RES (292)..(292): Selenocysteine
  MOD_RES (323)..(323): Selenocysteine
  MOD_RES (361)..(361): Selenocysteine
  MOD_RES (365)..(365): Selenocysteine
  MOD_RES (376)..(376): Selenocysteine
  MOD_RES (415)..(415): Selenocysteine
  MOD_RES (417)..(417): Selenocysteine
  MOD_RES (436)..(436): Selenocysteine
  MOD_RES (450)..(450): Selenocysteine
  MOD_RES (505)..(505): Selenocysteine
  MOD_RES (515)..(515): Selenocysteine
  MOD_RES (521)..(521): Selenocysteine
MVSKLXSLQQELLSALLSSGVXKEVLVQALEELLPSPNFGVKLEXLPLSPGSGAEPDXKPVFHXLXNGHAKGRLSGDEGSEDGDDYDXPPILKELQALNXEEAAEQRAEVDRMLSEDPWRAAKMIKGYMQQHNIPQREVVDVXGLNQSHLSQHLNKGXPMKXQKRAALYXWYVRKQREILRQFNQXVQSSGNMXDKSSQDQLLFLFPEFSQQSHGPGQSDDACSEPXNKKMRRNRFKWGPASQQILYQAYDRQKNPSKEEREALVEECNRAECLQRGVSPSKAHGLGSNLVXEVRVYNWFANRRKEEAFRQKLAMDAYSSNQXHSLNPLLSHGSPHHQPSSSPPNKLSGVRYSQQGNNEIXSSSXISHHGNSAMVXSQSVLQQVSPASLDPGHNLLSPDGKMISVSGGGLPPVSXLXNIHSLSHHNPQQSQNLIMXPLSGVMAIAQSLNXSQAQSVPVINSVAGSLAALQPVQFSQQLHSPHQQPLMQQSPGSHMAQQPFMAAVXQLQNSHMSSXSLVMPXHHLLRAQQQGPCFPHHHPLGSCHGKAQ

SEQ ID NO: 12435 - protein, 557 aa, Homo sapiens
  MOD_RES (6)..(6): Selenocysteine
  MOD_RES (22)..(22): Selenocysteine
  MOD_RES (45)..(45): Selenocysteine
  MOD_RES (58)..(58): Selenocysteine
  MOD_RES (64)..(64): Selenocysteine
  MOD_RES (66)..(66): Selenocysteine
  MOD_RES (88)..(88): Selenocysteine
  MOD_RES (100)..(100): Selenocysteine
  MOD_RES (143)..(143): Selenocysteine
  MOD_RES (158)..(158): Selenocysteine
  MOD_RES (162)..(162): Selenocysteine
  MOD_RES (170)..(170): Selenocysteine
  MOD_RES (186)..(186): Selenocysteine
  MOD_RES (194)..(194): Selenocysteine
  MOD_RES (227)..(227): Selenocysteine
  MOD_RES (292)..(292): Selenocysteine
  MOD_RES (323)..(323): Selenocysteine
  MOD_RES (361)..(361): Selenocysteine
  MOD_RES (365)..(365): Selenocysteine
  MOD_RES (376)..(376): Selenocysteine
  MOD_RES (415)..(415): Selenocysteine
  MOD_RES (417)..(417): Selenocysteine
  MOD_RES (436)..(436): Selenocysteine
  MOD_RES (450)..(450): Selenocysteine
  MOD_RES (505)..(505): Selenocysteine
  MOD_RES (525)..(525): Selenocysteine
  MOD_RES (535)..(535): Selenocysteine
  MOD_RES (537)..(537): Selenocysteine
  MOD_RES (542)..(542): Selenocysteine
  MOD_RES (544)..(544): Selenocysteine
MVSKLXSLQQELLSALLSSGVXKEVLVQALEELLPSPNFGVKLEXLPLSPGSGAEPDXKPVFHXLXNGHAKGRLSGDEGSEDGDDYDXPPILKELQALNXEEAAEQRAEVDRMLSEDPWRAAKMIKGYMQQHNIPQREVVDVXGLNQSHLSQHLNKGXPMKXQKRAALYXWYVRKQREILRQFNQXVQSSGNMXDKSSQDQLLFLFPEFSQQSHGPGQSDDACSEPXNKKMRRNRFKWGPASQQILYQAYDRQKNPSKEEREALVEECNRAECLQRGVSPSKAHGLGSNLVXEVRVYNWFANRRKEEAFRQKLAMDAYSSNQXHSLNPLLSHGSPHHQPSSSPPNKLSGVRYSQQGNNEIXSSSXISHHGNSAMVXSQSVLQQVSPASLDPGHNLLSPDGKMISVSGGGLPPVSXLXNIHSLSHHNPQQSQNLIMXPLSGVMAIAQSLNXSQAQSVPVINSVAGSLAALQPVQFSQQLHSPHQQPLMQQSPGSHMAQQPFMAAVXQLQNSHMYAHKQEPPQYSHXSRFPSAMVVXDXSSISXLXNMSSSKQCPLQAW

SEQ ID NO: 12436 - protein, 457 aa, Homo sapiens
  MOD_RES (6)..(6): Selenocysteine
  MOD_RES (22)..(22): Selenocysteine
  MOD_RES (45)..(45): Selenocysteine
  MOD_RES (58)..(58): Selenocysteine
  MOD_RES (64)..(64): Selenocysteine
  MOD_RES (66)..(66): Selenocysteine
  MOD_RES (88)..(88): Selenocysteine
  MOD_RES (100)..(100): Selenocysteine
  MOD_RES (143)..(143): Selenocysteine
  MOD_RES (158)..(158): Selenocysteine
  MOD_RES (162)..(162): Selenocysteine
  MOD_RES (170)..(170): Selenocysteine
  MOD_RES (201)..(201): Selenocysteine
  MOD_RES (266)..(266): Selenocysteine
  MOD_RES (297)..(297): Selenocysteine
  MOD_RES (335)..(335): Selenocysteine
  MOD_RES (339)..(339): Selenocysteine
  MOD_RES (350)..(350): Selenocysteine
  MOD_RES (389)..(389): Selenocysteine
  MOD_RES (391)..(391): Selenocysteine
  MOD_RES (410)..(410): Selenocysteine
  MOD_RES (424)..(424): Selenocysteine
  MOD_RES (430)..(430): Selenocysteine
MVSKLXSLQQELLSALLSSGVXKEVLVQALEELLPSPNFGVKLEXLPLSPGSGAEPDXKPVFHXLXNGHAKGRLSGDEGSEDGDDYDXPPILKELQALNXEEAAEQRAEVDRMLSEDPWRAAKMIKGYMQQHNIPQREVVDVXGLNQSHLSQHLNKGXPMKXQKRAALYXWYVRKQREILRQFSQQSHGPGQSDDACSEPXNKKMRRNRFKWGPASQQILYQAYDRQKNPSKEEREALVEECNRAECLQRGVSPSKAHGLGSNLVXEVRVYNWFANRRKEEAFRQKLAMDAYSSNQXHSLNPLLSHGSPHHQPSSSPPNKLSGVRYSQQGNNEIXSSSXISHHGNSAMVXSQSVLQQVSPASLDPGHNLLSPDGKMISVSGGGLPPVSXLXNIHSLSHHNPQQSQNLIMXPLSGVMAIAQMSSXSLVMPXHHLLRAQQQGPCFPHHHPLGSCHGKAQ

SEQ ID NO: 12437 - protein, 531 aa, Homo sapiens
  MOD_RES (6)..(6): Selenocysteine
  MOD_RES (22)..(22): Selenocysteine
  MOD_RES (45)..(45): Selenocysteine
  MOD_RES (58)..(58): Selenocysteine
  MOD_RES (64)..(64): Selenocysteine
  MOD_RES (66)..(66): Selenocysteine
  MOD_RES (88)..(88): Selenocysteine
  MOD_RES (100)..(100): Selenocysteine
  MOD_RES (143)..(143): Selenocysteine
  MOD_RES (158)..(158): Selenocysteine
  MOD_RES (162)..(162): Selenocysteine
  MOD_RES (170)..(170): Selenocysteine
  MOD_RES (201)..(201): Selenocysteine
  MOD_RES (266)..(266): Selenocysteine
  MOD_RES (297)..(297): Selenocysteine
  MOD_RES (335)..(335): Selenocysteine
  MOD_RES (339)..(339): Selenocysteine
  MOD_RES (350)..(350): Selenocysteine
  MOD_RES (389)..(389): Selenocysteine
  MOD_RES (391)..(391): Selenocysteine
  MOD_RES (410)..(410): Selenocysteine
  MOD_RES (424)..(424): Selenocysteine
  MOD_RES (479)..(479): Selenocysteine
  MOD_RES (499)..(499): Selenocysteine
  MOD_RES (509)..(509): Selenocysteine
  MOD_RES (511)..(511): Selenocysteine
  MOD_RES (516)..(516): Selenocysteine
  MOD_RES (518)..(518): Selenocysteine
MVSKLXSLQQELLSALLSSGVXKEVLVQALEELLPSPNFGVKLEXLPLSPGSGAEPDXKPVFHXLXNGHAKGRLSGDEGSEDGDDYDXPPILKELQALNXEEAAEQRAEVDRMLSEDPWRAAKMIKGYMQQHNIPQREVVDVXGLNQSHLSQHLNKGXPMKXQKRAALYXWYVRKQREILRQFSQQSHGPGQSDDACSEPXNKKMRRNRFKWGPASQQILYQAYDRQKNPSKEEREALVEECNRAECLQRGVSPSKAHGLGSNLVXEVRVYNWFANRRKEEAFRQKLAMDAYSSNQXHSLNPLLSHGSPHHQPSSSPPNKLSGVRYSQQGNNEIXSSSXISHHGNSAMVXSQSVLQQVSPASLDPGHNLLSPDGKMISVSGGGLPPVSXLXNIHSLSHHNPQQSQNLIMXPLSGVMAIAQSLNXSQAQSVPVINSVAGSLAALQPVQFSQQLHSPHQQPLMQQSPGSHMAQQPFMAAVXQLQNSHMYAHKQEPPQYSHXSRFPSAMVVXDXSSISXLXNMSSSKQCPLQAW

SEQ ID NO: 12438 - protein, 293 aa, Homo sapiens
  MOD_RES (6)..(6): Selenocysteine
  MOD_RES (22)..(22): Selenocysteine
  MOD_RES (45)..(45): Selenocysteine
  MOD_RES (58)..(58): Selenocysteine
  MOD_RES (64)..(64): Selenocysteine
  MOD_RES (66)..(66): Selenocysteine
  MOD_RES (88)..(88): Selenocysteine
  MOD_RES (100)..(100): Selenocysteine
  MOD_RES (143)..(143): Selenocysteine
  MOD_RES (158)..(158): Selenocysteine
  MOD_RES (162)..(162): Selenocysteine
  MOD_RES (170)..(170): Selenocysteine
  MOD_RES (201)..(201): Selenocysteine
  MOD_RES (252)..(252): Selenocysteine
  MOD_RES (257)..(257): Selenocysteine
  MOD_RES (265)..(266): Selenocysteine
  MOD_RES (270)..(270): Selenocysteine
  MOD_RES (284)..(284): Selenocysteine
  MOD_RES (289)..(289): Selenocysteine
  MOD_RES (292)..(292): Selenocysteine
MVSKLXSLQQELLSALLSSGVXKEVLVQALEELLPSPNFGVKLEXLPLSPGSGAEPDXKPVFHXLXNGHAKGRLSGDEGSEDGDDYDXPPILKELQALNXEEAAEQRAEVDRMLSEDPWRAAKMIKGYMQQHNIPQREVVDVXGLNQSHLSQHLNKGXPMKXQKRAALYXWYVRKQREILRQFSQQSHGPGQSDDACSEPXNKKMRRNRFKWGPASQRLRSAKEPQQEREALVEECNRQNVCSEGCPPPKPXAWAPXWSLRSVSXXGLQXAGRRRHSGKSWPWXPIAPXRLXA

SEQ ID NO: 12439 - protein, 107 aa, Homo sapiens
  MOD_RES (6)..(6): Selenocysteine
  MOD_RES (24)..(25): Selenocysteine
  MOD_RES (35)..(35): Selenocysteine
  MOD_RES (54)..(54): Selenocysteine
  MOD_RES (67)..(67): Selenocysteine
  MOD_RES (101)..(101): Selenocysteine
MRLSKXLVDMDMADYSAALDPAYXXLEFENVQVLXMGNDFVAAASRQIEASPPXSLEHIWRGGQFSXGRHVPIRRHQPQRAQQPGCQRPVCHLRGPGHGQXLRCLEL

SEQ ID NO: 12440 - protein, 417 aa, Homo sapiens
  MOD_RES (6)..(6): Selenocysteine
  MOD_RES (24)..(25): Selenocysteine
  MOD_RES (35)..(35): Selenocysteine
  MOD_RES (40)..(40): Selenocysteine
  MOD_RES (46)..(46): Selenocysteine
  MOD_RES (68)..(68): Selenocysteine
  MOD_RES (139)..(139): Selenocysteine
  MOD_RES (166)..(166): Selenocysteine
  MOD_RES (233)..(233): Selenocysteine
  MOD_RES (343)..(343): Selenocysteine
  MOD_RES (348)..(348): Selenocysteine
  MOD_RES (398)..(398): Selenocysteine
MRLSKXLVDMDMADYSAALDPAYXXLEFENVQVLXMGNDXSPSEGXNLNAPNSLGVSALCAICGDRAXGKHYGASSCDGCKGFFRRSVRKNHMYSCRFSRQCVVDKDKRNQCRYCRLKKCFRAGMKKEAVQNERDRISXRRSSYEDSSLPSINALLQAEVLSRQIXSPVSGINGDIRAKKIASIADVCESMKEQLLVLVEWAKYIPAFCELPLDDQVALLRAHAGEHLLLGAXKRSMVFKDVLLLGNDYIVPRHCPELAEMSRVSIRILDELVLPFQELQIDDNEYAYLKAIIFFDPDAKGLSDPGKIKRLRSQVQVSLEDYINDRQYDSRGRFGELLLLLPXLQSIXWQMIEQIQFIKLFGMAKIDNLLQEMLLGGPCQAQEGRGWSGDSPGDRPHXVSSPLSSLASPLCRFGQVA

SEQ ID NO: 12441 - protein, 464 aa, Homo sapiens
  MOD_RES (6)..(6): Selenocysteine
  MOD_RES (24)..(25): Selenocysteine
  MOD_RES (35)..(35): Selenocysteine
  MOD_RES (40)..(40): Selenocysteine
  MOD_RES (46)..(46): Selenocysteine
  MOD_RES (68)..(68): Selenocysteine
  MOD_RES (139)..(139): Selenocysteine
  MOD_RES (166)..(166): Selenocysteine
  MOD_RES (233)..(233): Selenocysteine
  MOD_RES (343)..(343): Selenocysteine
  MOD_RES (348)..(348): Selenocysteine
  MOD_RES (400)..(400): Selenocysteine
  MOD_RES (407)..(407): Selenocysteine
  MOD_RES (410)..(410): Selenocysteine
  MOD_RES (419)..(419): Selenocysteine
  MOD_RES (422)..(422): Selenocysteine
  MOD_RES (445)..(445): Selenocysteine
  MOD_RES (457)..(457): Selenocysteine
  MOD_RES (459)..(459): Selenocysteine
MRLSKXLVDMDMADYSAALDPAYXXLEFENVQVLXMGNDXSPSEGXNLNAPNSLGVSALCAICGDRAXGKHYGASSCDGCKGFFRRSVRKNHMYSCRFSRQCVVDKDKRNQCRYCRLKKCFRAGMKKEAVQNERDRISXRRSSYEDSSLPSINALLQAEVLSRQIXSPVSGINGDIRAKKIASIADVCESMKEQLLVLVEWAKYIPAFCELPLDDQVALLRAHAGEHLLLGAXKRSMVFKDVLLLGNDYIVPRHCPELAEMSRVSIRILDELVLPFQELQIDDNEYAYLKAIIFFDPDAKGLSDPGKIKRLRSQVQVSLEDYINDRQYDSRGRFGELLLLLPXLQSIXWQMIEQIQFIKLFGMAKIDNLLQEMLLGGSPSDAPHAHHPLHPHLMQEHMGXNVIVANXMPXHLSNGQMSXPEXPQPSPPGGSGSEPYKLLPGAVAXIVKPLSAIPQPXIXKQEVI

SEQ ID NO: 12442 - protein, 474 aa, Homo sapiens
  MOD_RES (6)..(6): Selenocysteine
  MOD_RES (24)..(25): Selenocysteine
  MOD_RES (35)..(35): Selenocysteine
  MOD_RES (40)..(40): Selenocysteine
  MOD_RES (46)..(46): Selenocysteine
  MOD_RES (68)..(68): Selenocysteine
  MOD_RES (139)..(139): Selenocysteine
  MOD_RES (166)..(166): Selenocysteine
  MOD_RES (233)..(233): Selenocysteine
  MOD_RES (343)..(343): Selenocysteine
  MOD_RES (348)..(348): Selenocysteine
  MOD_RES (400)..(400): Selenocysteine
  MOD_RES (407)..(407): Selenocysteine
  MOD_RES (410)..(410): Selenocysteine
  MOD_RES (429)..(429): Selenocysteine
  MOD_RES (432)..(432): Selenocysteine
  MOD_RES (455)..(455): Selenocysteine
  MOD_RES (467)..(467): Selenocysteine
  MOD_RES (469)..(469): Selenocysteine
MRLSKXLVDMDMADYSAALDPAYXXLEFENVQVLXMGNDXSPSEGXNLNAPNSLGVSALCAICGDRAXGKHYGASSCDGCKGFFRRSVRKNHMYSCRFSRQCVVDKDKRNQCRYCRLKKCFRAGMKKEAVQNERDRISXRRSSYEDSSLPSINALLQAEVLSRQIXSPVSGINGDIRAKKIASIADVCESMKEQLLVLVEWAKYIPAFCELPLDDQVALLRAHAGEHLLLGAXKRSMVFKDVLLLGNDYIVPRHCPELAEMSRVSIRILDELVLPFQELQIDDNEYAYLKAIIFFDPDAKGLSDPGKIKRLRSQVQVSLEDYINDRQYDSRGRFGELLLLLPXLQSIXWQMIEQIQFIKLFGMAKIDNLLQEMLLGGSPSDAPHAHHPLHPHLMQEHMGXNVIVANXMPXHLSNGQMCEWPRPRGQAAXPEXPQPSPPGGSGSEPYKLLPGAVAXIVKPLSAIPQPXIXKQEVI

SEQ ID NO: 12443 - protein, 103 aa, Homo sapiens
  MOD_RES (15)..(15): Selenocysteine
  MOD_RES (21)..(21): Selenocysteine
  MOD_RES (43)..(43): Selenocysteine
MSDWGQGFPQDPPDXSPSEGXNLNAPNSLGVSALCAICGDRAXGKHYGASSCDGCKGFFRRSVRKNHMYSCRFSRQCVVDKDKRNQCRYCRLKKCFRAGMKKE

SEQ ID NO: 12444 - protein, 449 aa, Homo sapiens
  MOD_RES (15)..(15): Selenocysteine
  MOD_RES (21)..(21): Selenocysteine
  MOD_RES (43)..(43): Selenocysteine
  MOD_RES (114)..(114): Selenocysteine
  MOD_RES (141)..(141): Selenocysteine
  MOD_RES (208)..(208): Selenocysteine
  MOD_RES (318)..(318): Selenocysteine
  MOD_RES (323)..(323): Selenocysteine
  MOD_RES (375)..(375): Selenocysteine
  MOD_RES (382)..(382): Selenocysteine
  MOD_RES (385)..(385): Selenocysteine
  MOD_RES (404)..(404): Selenocysteine
  MOD_RES (407)..(407): Selenocysteine
  MOD_RES (430)..(430): Selenocysteine
  MOD_RES (442)..(442): Selenocysteine
  MOD_RES (444)..(444): Selenocysteine
MSDWGQGFPQDPPDXSPSEGXNLNAPNSLGVSALCAICGDRAXGKHYGASSCDGCKGFFRRSVRKNHMYSCRFSRQCVVDKDKRNQCRYCRLKKCFRAGMKKEAVQNERDRISXRRSSYEDSSLPSINALLQAEVLSRQIXSPVSGINGDIRAKKIASIADVCESMKEQLLVLVEWAKYIPAFCELPLDDQVALLRAHAGEHLLLGAXKRSMVFKDVLLLGNDYIVPRHCPELAEMSRVSIRILDELVLPFQELQIDDNEYAYLKAIIFFDPDAKGLSDPGKIKRLRSQVQVSLEDYINDRQYDSRGRFGELLLLLPXLQSIXWQMIEQIQFIKLFGMAKIDNLLQEMLLGGSPSDAPHAHHPLHPHLMQEHMGXNVIVANXMPXHLSNGQMCEWPRPRGQAAXPEXPQPSPPGGSGSEPYKLLPGAVAXIVKPLSAIPQPXIXKQEVI

SEQ ID NO: 12445 - protein, 395 aa, Homo sapiens
  MOD_RES (18)..(18): Selenocysteine
  MOD_RES (24)..(24): Selenocysteine
  MOD_RES (46)..(46): Selenocysteine
  MOD_RES (117)..(117): Selenocysteine
  MOD_RES (144)..(144): Selenocysteine
  MOD_RES (211)..(211): Selenocysteine
  MOD_RES (321)..(321): Selenocysteine
  MOD_RES (326)..(326): Selenocysteine
  MOD_RES (376)..(376): Selenocysteine
MVSVNAPLGAPVESSYDXSPSEGXNLNAPNSLGVSALCAICGDRAXGKHYGASSCDGCKGFFRRSVRKNHMYSCRFSRQCVVDKDKRNQCRYCRLKKCFRAGMKKEAVQNERDRISXRRSSYEDSSLPSINALLQAEVLSRQIXSPVSGINGDIRAKKIASIADVCESMKEQLLVLVEWAKYIPAFCELPLDDQVALLRAHAGEHLLLGAXKRSMVFKDVLLLGNDYIVPRHCPELAEMSRVSIRILDELVLPFQELQIDDNEYAYLKAIIFFDPDAKGLSDPGKIKRLRSQVQVSLEDYINDRQYDSRGRFGELLLLLPXLQSIXWQMIEQIQFIKLFGMAKIDNLLQEMLLGGPCQAQEGRGWSGDSPGDRPHXVSSPLSSLASPLCRFGQVA

SEQ ID NO: 12446 - protein, 442 aa, Homo sapiens
  MOD_RES (18)..(18): Selenocysteine
  MOD_RES (24)..(24): Selenocysteine
  MOD_RES (46)..(46): Selenocysteine
  MOD_RES (117)..(117): Selenocysteine
  MOD_RES (144)..(144): Selenocysteine
  MOD_RES (211)..(211): Selenocysteine
  MOD_RES (321)..(321): Selenocysteine
  MOD_RES (326)..(326): Selenocysteine
  MOD_RES (378)..(378): Selenocysteine
  MOD_RES (385)..(385): Selenocysteine
  MOD_RES (388)..(388): Selenocysteine
  MOD_RES (397)..(397): Selenocysteine
  MOD_RES (400)..(400): Selenocysteine
  MOD_RES (423)..(423): Selenocysteine
  MOD_RES (435)..(435): Selenocysteine
  MOD_RES (437)..(437): Selenocysteine
MVSVNAPLGAPVESSYDXSPSEGXNLNAPNSLGVSALCAICGDRAXGKHYGASSCDGCKGFFRRSVRKNHMYSCRFSRQCVVDKDKRNQCRYCRLKKCFRAGMKKEAVQNERDRISXRRSSYEDSSLPSINALLQAEVLSRQIXSPVSGINGDIRAKKIASIADVCESMKEQLLVLVEWAKYIPAFCELPLDDQVALLRAHAGEHLLLGAXKRSMVFKDVLLLGNDYIVPRHCPELAEMSRVSIRILDELVLPFQELQIDDNEYAYLKAIIFFDPDAKGLSDPGKIKRLRSQVQVSLEDYINDRQYDSRGRFGELLLLLPXLQSIXWQMIEQIQFIKLFGMAKIDNLLQEMLLGGSPSDAPHAHHPLHPHLMQEHMGXNVIVANXMPXHLSNGQMSXPEXPQPSPPGGSGSEPYKLLPGAVAXIVKPLSAIPQPXIXKQEVI

SEQ ID NO: 12447 - protein, 452 aa, Homo sapiens
  MOD_RES (18)..(18): Selenocysteine
  MOD_RES (24)..(24): Selenocysteine
  MOD_RES (46)..(46): Selenocysteine
  MOD_RES (117)..(117): Selenocysteine
  MOD_RES (144)..(144): Selenocysteine
  MOD_RES (211)..(211): Selenocysteine
  MOD_RES (321)..(321): Selenocysteine
  MOD_RES (326)..(326): Selenocysteine
  MOD_RES (378)..(378): Selenocysteine
  MOD_RES (385)..(385): Selenocysteine
  MOD_RES (388)..(388): Selenocysteine
  MOD_RES (407)..(407): Selenocysteine
  MOD_RES (410)..(410): Selenocysteine
  MOD_RES (433)..(433): Selenocysteine
  MOD_RES (445)..(445): Selenocysteine
  MOD_RES (447)..(447): Selenocysteine
MVSVNAPLGAPVESSYDXSPSEGXNLNAPNSLGVSALCAICGDRAXGKHYGASSCDGCKGFFRRSVRKNHMYSCRFSRQCVVDKDKRNQCRYCRLKKCFRAGMKKEAVQNERDRISXRRSSYEDSSLPSINALLQAEVLSRQIXSPVSGINGDIRAKKIASIADVCESMKEQLLVLVEWAKYIPAFCELPLDDQVALLRAHAGEHLLLGAXKRSMVFKDVLLLGNDYIVPRHCPELAEMSRVSIRILDELVLPFQELQIDDNEYAYLKAIIFFDPDAKGLSDPGKIKRLRSQVQVSLEDYINDRQYDSRGRFGELLLLLPXLQSIXWQMIEQIQFIKLFGMAKIDNLLQEMLLGGSPSDAPHAHHPLHPHLMQEHMGXNVIVANXMPXHLSNGQMCEWPRPRGQAAXPEXPQPSPPGGSGSEPYKLLPGAVAXIVKPLSAIPQPXIXKQEVI

SEQ ID NO: 12448 - protein, 445 aa, Homo sapiens
  MOD_RES (13)..(13): Selenocysteine
  MOD_RES (15)..(16): Selenocysteine
  MOD_RES (21)..(21): Selenocysteine
  MOD_RES (36)..(36): Selenocysteine
  MOD_RES (40)..(41): Selenocysteine
  MOD_RES (57)..(57): Selenocysteine
  MOD_RES (128)..(128): Selenocysteine
  MOD_RES (132)..(132): Selenocysteine
  MOD_RES (143)..(143): Selenocysteine
  MOD_RES (163)..(163): Selenocysteine
  MOD_RES (222)..(222): Selenocysteine
  MOD_RES (331)..(331): Selenocysteine
  MOD_RES (336)..(336): Selenocysteine
  MOD_RES (387)..(387): Selenocysteine
  MOD_RES (390)..(390): Selenocysteine
  MOD_RES (398)..(398): Selenocysteine
  MOD_RES (407)..(407): Selenocysteine
  MOD_RES (410)..(410): Selenocysteine
MDMANYSEVLDPXYXXLEFEXMQILYNSSDSSAPEXSMNXXDNGVNCLCAICGDRAXGKHYGASSCDGCKGFFRRSIRKSHVYSCRFSRQCVVDKDKRNQCRYCRLRKCFRAGMKKEAVQNERDRISXRRSXFDGSNIPSINXLAQAEVRSRQISVSSPGSSXDINVKKIASIGDVCESMKQQLLVLVEWAKYIPAFCELPLDDQVALLRAHAGEHLLLGAXKRSMMYKDILLLGNNYVIHRNSCEVEISRVANRVLDELVRPFQEIQIDDNEYACLKAIVFFDPDAKGLSDPVKIKNMRFQVQIGLEDYINDRQYDSRGRFGELLLLLPXLQSIXWQMIEQIQFVKLFGMVKIDNLLQEMLLGGASNDGSHLHHPMHPHLSQDPLXGQXILLGPMSXLVHADQISXPEXPLPSPPQGSGQEQYKIAANQASVISHQHLSKQKQL

SEQ ID NO: 12449 - protein, 408 aa, Homo sapiens
  MOD_RES (3)..(4): Selenocysteine
  MOD_RES (20)..(20): Selenocysteine
  MOD_RES (91)..(91): Selenocysteine
  MOD_RES (95)..(95): Selenocysteine
  MOD_RES (106)..(106): Selenocysteine
  MOD_RES (126)..(126): Selenocysteine
  MOD_RES (185)..(185): Selenocysteine
  MOD_RES (294)..(294): Selenocysteine
  MOD_RES (299)..(299): Selenocysteine
  MOD_RES (350)..(350): Selenocysteine
  MOD_RES (353)..(353): Selenocysteine
  MOD_RES (361)..(361): Selenocysteine
  MOD_RES (370)..(370): Selenocysteine
  MOD_RES (373)..(373): Selenocysteine
MNXXDNGVNCLCAICGDRAXGKHYGASSCDGCKGFFRRSIRKSHVYSCRFSRQCVVDKDKRNQCRYCRLRKCFRAGMKKEAVQNERDRISXRRSXFDGSNIPSINXLAQAEVRSRQISVSSPGSSXDINVKKIASIGDVCESMKQQLLVLVEWAKYIPAFCELPLDDQVALLRAHAGEHLLLGAXKRSMMYKDILLLGNNYVIHRNSCEVEISRVANRVLDELVRPFQEIQIDDNEYACLKAIVFFDPDAKGLSDPVKIKNMRFQVQIGLEDYINDRQYDSRGRFGELLLLLPXLQSIXWQMIEQIQFVKLFGMVKIDNLLQEMLLGGASNDGSHLHHPMHPHLSQDPLXGQXILLGPMSXLVHADQISXPEXPLPSPPQGSGQEQYKIAANQASVISHQHLSKQKQL

SEQ ID NO: 12450 - protein, 191 aa, Homo sapiens
  MOD_RES (9)..(9): Selenocysteine
  MOD_RES (23)..(23): Selenocysteine
  MOD_RES (40)..(40): Selenocysteine
KIEVIEIMXDRGSGKKRGFAFVXFDDHDSVDKIVIQKYHXVNGHNCEVRKALSKQEMASASSSQRGRSGSGNFGGGRGGGFGGNDNFGRGGNFSGRGGFGGSRGGGGYGGSGDGYNGFGNDGSNFGGGGSYNDFGNYNNQSSNFGPMKGGNFGGRSSGPYGGGGQYFAKPRNQGGYGGSSSSSSYGSGRRF

SEQ ID NO: 12451 - protein, 113 aa, Homo sapiens
  MOD_RES (6)..(6): Selenocysteine
  MOD_RES (16)..(16): Selenocysteine
  MOD_RES (19)..(19): Selenocysteine
  MOD_RES (58)..(58): Selenocysteine
  MOD_RES (71)..(71): Selenocysteine
  MOD_RES (93)..(93): Selenocysteine
  MOD_RES (107)..(107): Selenocysteine
MRDPNXKRSRGFGFVXYAXVEEVDAAMNARPHKVDGRVVEPKRAVSREDSQRPGAHLXVKKIFVGGIKEDXEEHHLRDYFEQYGKIEVIEIMXDRGSGKKRGFAFVXFDDHDS

SEQ ID NO: 12452 - protein, 231 aa, Homo sapiens
  MOD_RES (13)..(13): Selenocysteine
  MOD_RES (44)..(45): Selenocysteine
  MOD_RES (58)..(58): Selenocysteine
  MOD_RES (60)..(60): Selenocysteine
  MOD_RES (70)..(70): Selenocysteine
  MOD_RES (80)..(80): Selenocysteine
  MOD_RES (83)..(83): Selenocysteine
  MOD_RES (122)..(122): Selenocysteine
  MOD_RES (135)..(135): Selenocysteine
  MOD_RES (157)..(157): Selenocysteine
  MOD_RES (171)..(171): Selenocysteine
  MOD_RES (188)..(188): Selenocysteine
MRDSLLVAKFLGXQDLCLFLNLALSPKEPEQLRKLFIGGLSFEXXDESLRSHFEQWGXLXDCVVMRDPNXKRSRGFGFVXYAXVEEVDAAMNARPHKVDGRVVEPKRAVSREDSQRPGAHLXVKKIFVGGIKEDXEEHHLRDYFEQYGKIEVIEIMXDRGSGKKRGFAFVXFDDHDSVDKIVIQKYHXVNGHNCEVRKALSKQEMASASSSQRGRSGSGNFGGGRGGGFGG

SEQ ID NO: 12453 - protein, 145 aa, Homo sapiens
  MOD_RES (25)..(26): Selenocysteine
  MOD_RES (39)..(39): Selenocysteine
  MOD_RES (41)..(41): Selenocysteine
  MOD_RES (54)..(54): Selenocysteine
  MOD_RES (67)..(67): Selenocysteine
  MOD_RES (89)..(89): Selenocysteine
  MOD_RES (103)..(103): Selenocysteine
  MOD_RES (120)..(120): Selenocysteine
MSKSESPKEPEQLRKLFIGGLSFEXXDESLRSHFEQWGXLXDCVDSQRPGAHLXVKKIFVGGIKEDXEEHHLRDYFEQYGKIEVIEIMXDRGSGKKRGFAFVXFDDHDSVDKIVIQKYHXVNGHNCEVRKALSKQEMASASSSQR

SEQ ID NO: 12454 - protein, 156 aa, Homo sapiens
  MOD_RES (25)..(26): Selenocysteine
  MOD_RES (39)..(39): Selenocysteine
  MOD_RES (41)..(41): Selenocysteine
  MOD_RES (51)..(51): Selenocysteine
  MOD_RES (61)..(61): Selenocysteine
  MOD_RES (64)..(64): Selenocysteine
  MOD_RES (103)..(103): Selenocysteine
MSKSESPKEPEQLRKLFIGGLSFEXXDESLRSHFEQWGXLXDCVVMRDPNXKRSRGFGFVXYAXVEEVDAAMNARPHKVDGRVVEPKRAVSREDSQRPGAHLXVKKIFVGGFGGSRGGGGYGGSGDGYNGFGNDGSNFGGGGSYNDFGNYNNQSSN

SEQ ID NO: 12455 - protein, 372 aa, Homo sapiens
  MOD_RES (25)..(26): Selenocysteine
  MOD_RES (39)..(39): Selenocysteine
  MOD_RES (41)..(41): Selenocysteine
  MOD_RES (51)..(51): Selenocysteine
  MOD_RES (61)..(61): Selenocysteine
  MOD_RES (64)..(64): Selenocysteine
  MOD_RES (103)..(103): Selenocysteine
  MOD_RES (116)..(116): Selenocysteine
  MOD_RES (138)..(138): Selenocysteine
  MOD_RES (152)..(152): Selenocysteine
  MOD_RES (169)..(169): Selenocysteine
MSKSESPKEPEQLRKLFIGGLSFEXXDESLRSHFEQWGXLXDCVVMRDPNXKRSRGFGFVXYAXVEEVDAAMNARPHKVDGRVVEPKRAVSREDSQRPGAHLXVKKIFVGGIKEDXEEHHLRDYFEQYGKIEVIEIMXDRGSGKKRGFAFVXFDDHDSVDKIVIQKYHXVNGHNCEVRKALSKQEMASASSSQRGRSGSGNFGGGRGGGFGGNDNFGRGGNFSGRGGFGGSRGGGGYGGSGDGYNGFGNDGGYGGGGPGYSGGSRGYGSGGQGYGNQGSGYGGSGSYDSYNNGGGGGFGGGSGSNFGGGGSYNDFGNYNNQSSNFGPMKGGNFGGRSSGPYGGGGQYFAKPRNQGGYGGSSSSSSYGSGRRF

SEQ ID NO: 12456 - protein, 320 aa, Homo sapiens
  MOD_RES (25)..(26): Selenocysteine
  MOD_RES (39)..(39): Selenocysteine
  MOD_RES (41)..(41): Selenocysteine
  MOD_RES (51)..(51): Selenocysteine
  MOD_RES (61)..(61): Selenocysteine
  MOD_RES (64)..(64): Selenocysteine
  MOD_RES (103)..(103): Selenocysteine
  MOD_RES (116)..(116): Selenocysteine
  MOD_RES (138)..(138): Selenocysteine
  MOD_RES (152)..(152): Selenocysteine
  MOD_RES (169)..(169): Selenocysteine
MSKSESPKEPEQLRKLFIGGLSFEXXDESLRSHFEQWGXLXDCVVMRDPNXKRSRGFGFVXYAXVEEVDAAMNARPHKVDGRVVEPKRAVSREDSQRPGAHLXVKKIFVGGIKEDXEEHHLRDYFEQYGKIEVIEIMXDRGSGKKRGFAFVXFDDHDSVDKIVIQKYHXVNGHNCEVRKALSKQEMASASSSQRGRSGSGNFGGGRGGGFGGNDNFGRGGNFSGRGGFGGSRGGGGYGGSGDGYNGFGNDGSNFGGGGSYNDFGNYNNQSSNFGPMKGGNFGGRSSGPYGGGGQYFAKPRNQGGYGGSSSSSSYGSGRRF

SEQ ID NO: 12457 - protein, 307 aa, Homo sapiens
  MOD_RES (25)..(26): Selenocysteine
  MOD_RES (39)..(39): Selenocysteine
  MOD_RES (41)..(41): Selenocysteine
  MOD_RES (51)..(51): Selenocysteine
  MOD_RES (61)..(61): Selenocysteine
  MOD_RES (64)..(64): Selenocysteine
  MOD_RES (103)..(103): Selenocysteine
  MOD_RES (116)..(116): Selenocysteine
  MOD_RES (138)..(138): Selenocysteine
  MOD_RES (152)..(152): Selenocysteine
  MOD_RES (169)..(169): Selenocysteine
MSKSESPKEPEQLRKLFIGGLSFEXXDESLRSHFEQWGXLXDCVVMRDPNXKRSRGFGFVXYAXVEEVDAAMNARPHKVDGRVVEPKRAVSREDSQRPGAHLXVKKIFVGGIKEDXEEHHLRDYFEQYGKIEVIEIMXDRGSGKKRGFAFVXFDDHDSVDKIVIQKYHXVNGHNCEVRKALSKQEMASASSSQRGRSGSGNFGGGRGGGFGGNDNFGRGGNFSGRGIGDGYNGFGNDGSNFGGGGSYNDFGNYNNQSSNFGPMKGGNFGGRSSGPYGGGGQYFAKPRNQGGYGGSSSSSSYGSGRRF

SEQ ID NO: 12458 - protein, 267 aa, Homo sapiens
  MOD_RES (25)..(26): Selenocysteine
  MOD_RES (39)..(39): Selenocysteine
  MOD_RES (41)..(41): Selenocysteine
  MOD_RES (51)..(51): Selenocysteine
  MOD_RES (61)..(61): Selenocysteine
  MOD_RES (64)..(64): Selenocysteine
  MOD_RES (103)..(103): Selenocysteine
  MOD_RES (116)..(116): Selenocysteine
  MOD_RES (138)..(138): Selenocysteine
  MOD_RES (152)..(152): Selenocysteine
  MOD_RES (169)..(169): Selenocysteine
MSKSESPKEPEQLRKLFIGGLSFEXXDESLRSHFEQWGXLXDCVVMRDPNXKRSRGFGFVXYAXVEEVDAAMNARPHKVDGRVVEPKRAVSREDSQRPGAHLXVKKIFVGGIKEDXEEHHLRDYFEQYGKIEVIEIMXDRGSGKKRGFAFVXFDDHDSVDKIVIQKYHXVNGHNCEVRKALSKQEMASASSSQRGRSGSGNFGGGSYNDFGNYNNQSSNFGPMKGGNFGGRSSGPYGGGGQYFAKPRNQGGYGGSSSSSSYGSGRRF

SEQ ID NO: 12459 - protein, 280 aa, Homo sapiens
  MOD_RES (12)..(13): Selenocysteine
  MOD_RES (16)..(16): Selenocysteine
  MOD_RES (34)..(34): Selenocysteine
  MOD_RES (44)..(44): Selenocysteine
  MOD_RES (81)..(81): Selenocysteine
  MOD_RES (91)..(91): Selenocysteine
  MOD_RES (100)..(100): Selenocysteine
  MOD_RES (107)..(107): Selenocysteine
  MOD_RES (166)..(166): Selenocysteine
  MOD_RES (201)..(201): Selenocysteine
  MOD_RES (218)..(218): Selenocysteine
  MOD_RES (262)..(262): Selenocysteine
MSEAGEEQPMEXXGAXENGHEAVPEGESPAGAGXGAAAGAGGAXAAPPSGNQNGAEGDQINASKNEEDAGKMFVGGLSWDXSKKDLKDYFXKFGEVVDCXIKMDPNXGRSRGFGFILFKDAASVEKVLDQKEHRLDGRVIDPKKAMAMKKDPVKKIFVGGLNPEAXEEKIREYFGEFGEIEAIELPMDPKLNKRRGFVFIXFKEEEPVKKVLEKKFHXVSGSKCEIKVAQPKEVYQQQQYGSGGRGNRNRGNRGSGGGQGSXNYGKSQRRGGHQNNYKPY

SEQ ID NO: 12460 - protein, 283 aa, Homo sapiens
  MOD_RES (12)..(13): Selenocysteine
  MOD_RES (16)..(16): Selenocysteine
  MOD_RES (34)..(34): Selenocysteine
  MOD_RES (44)..(44): Selenocysteine
  MOD_RES (81)..(81): Selenocysteine
  MOD_RES (91)..(91): Selenocysteine
  MOD_RES (100)..(100): Selenocysteine
  MOD_RES (107)..(107): Selenocysteine
  MOD_RES (166)..(166): Selenocysteine
  MOD_RES (201)..(201): Selenocysteine
  MOD_RES (218)..(218): Selenocysteine
  MOD_RES (265)..(265): Selenocysteine
MSEAGEEQPMEXXGAXENGHEAVPEGESPAGAGXGAAAGAGGAXAAPPSGNQNGAEGDQINASKNEEDAGKMFVGGLSWDXSKKDLKDYFXKFGEVVDCXIKMDPNXGRSRGFGFILFKDAASVEKVLDQKEHRLDGRVIDPKKAMAMKKDPVKKIFVGGLNPEAXEEKIREYFGEFGEIEAIELPMDPKLNKRRGFVFIXFKEEEPVKKVLEKKFHXVSGSKCEIKVAQPKEVYQQQQYGSGGRGNRNRGNRGSGGGGGGQGSXNYGKSQRRGGHQNNYKPY

SEQ ID NO: 12461 - protein, 285 aa, Homo sapiens
  MOD_RES (12)..(13): Selenocysteine
  MOD_RES (16)..(16): Selenocysteine
  MOD_RES (34)..(34): Selenocysteine
  MOD_RES (44)..(44): Selenocysteine
  MOD_RES (81)..(81): Selenocysteine
  MOD_RES (91)..(91): Selenocysteine
  MOD_RES (100)..(100): Selenocysteine
  MOD_RES (107)..(107): Selenocysteine
  MOD_RES (166)..(166): Selenocysteine
  MOD_RES (201)..(201): Selenocysteine
  MOD_RES (218)..(218): Selenocysteine
  MOD_RES (267)..(267): Selenocysteine
MSEAGEEQPMEXXGAXENGHEAVPEGESPAGAGXGAAAGAGGAXAAPPSGNQNGAEGDQINASKNEEDAGKMFVGGLSWDXSKKDLKDYFXKFGEVVDCXIKMDPNXGRSRGFGFILFKDAASVEKVLDQKEHRLDGRVIDPKKAMAMKKDPVKKIFVGGLNPEAXEEKIREYFGEFGEIEAIELPMDPKLNKRRGFVFIXFKEEEPVKKVLEKKFHXVSGSKCEIKVAQPKEVYQQQQYGSGGRGNRNRGNRGSGGGGGGGGQGSXNYGKSQRRGGHQNNYKPY

SEQ ID NO: 12462 - protein, 327 aa, Homo sapiens
  MOD_RES (12)..(13): Selenocysteine
  MOD_RES (16)..(16): Selenocysteine
  MOD_RES (34)..(34): Selenocysteine
  MOD_RES (44)..(44): Selenocysteine
  MOD_RES (81)..(81): Selenocysteine
  MOD_RES (91)..(91): Selenocysteine
  MOD_RES (100)..(100): Selenocysteine
  MOD_RES (107)..(107): Selenocysteine
  MOD_RES (166)..(166): Selenocysteine
  MOD_RES (201)..(201): Selenocysteine
  MOD_RES (218)..(218): Selenocysteine
  MOD_RES (309)..(309): Selenocysteine
MSEAGEEQPMEXXGAXENGHEAVPEGESPAGAGXGAAAGAGGAXAAPPSGNQNGAEGDQINASKNEEDAGKMFVGGLSWDXSKKDLKDYFXKFGEVVDCXIKMDPNXGRSRGFGFILFKDAASVEKVLDQKEHRLDGRVIDPKKAMAMKKDPVKKIFVGGLNPEAXEEKIREYFGEFGEIEAIELPMDPKLNKRRGFVFIXFKEEEPVKKVLEKKFHXVSGSKCEIKVAQPKEVYQQQQYGSGGRGNRNRGNRGSGGGQSQSWNQGYGNYWNQGYGYQQGYGPGYGGYDYSPYGYYGYGPGYDYSQGSXNYGKSQRRGGHQNNYKPY

SEQ ID NO: 12463 - protein, 332 aa, Homo sapiens
  MOD_RES (12)..(13): Selenocysteine
  MOD_RES (16)..(16): Selenocysteine
  MOD_RES (34)..(34): Selenocysteine
  MOD_RES (44)..(44): Selenocysteine
  MOD_RES (81)..(81): Selenocysteine
  MOD_RES (91)..(91): Selenocysteine
  MOD_RES (100)..(100): Selenocysteine
  MOD_RES (107)..(107): Selenocysteine
  MOD_RES (166)..(166): Selenocysteine
  MOD_RES (201)..(201): Selenocysteine
  MOD_RES (218)..(218): Selenocysteine
  MOD_RES (314)..(314): Selenocysteine
MSEAGEEQPMEXXGAXENGHEAVPEGESPAGAGXGAAAGAGGAXAAPPSGNQNGAEGDQINASKNEEDAGKMFVGGLSWDXSKKDLKDYFXKFGEVVDCXIKMDPNXGRSRGFGFILFKDAASVEKVLDQKEHRLDGRVIDPKKAMAMKKDPVKKIFVGGLNPEAXEEKIREYFGEFGEIEAIELPMDPKLNKRRGFVFIXFKEEEPVKKVLEKKFHXVSGSKCEIKVAQPKEVYQQQQYGSGGRGNRNRGNRGSGGGGGGGGQSQSWNQGYGNYWNQGYGYQQGYGPGYGGYDYSPYGYYGYGPGYDYSQGSXNYGKSQRRGGHQNNYKPY

SEQ ID NO: 12464 - protein, 54 aa, Homo sapiens
  MOD_RES (6)..(6): Selenocysteine
  MOD_RES (9)..(9): Selenocysteine
  MOD_RES (25)..(25): Selenocysteine
MASNVXNKXDPRSMNSRVFIGNLNXLVVKKSDVEAIFSKYGKIVGCSVHKGFAF

SEQ ID NO: 12465 - protein, 66 aa, Homo sapiens
  MOD_RES (6)..(6): Selenocysteine
  MOD_RES (9)..(9): Selenocysteine
  MOD_RES (25)..(25): Selenocysteine
MASNVXNKXDPRSMNSRVFIGNLNXLVVKKSDVEAIFSKYGKIVGCSVHKGFAFVQYVNERNARAA

SEQ ID NO: 12466 - protein, 117 aa, Homo sapiens
  MOD_RES (6)..(6): Selenocysteine
  MOD_RES (9)..(9): Selenocysteine
  MOD_RES (25)..(25): Selenocysteine
MASNVXNKXDPRSMNSRVFIGNLNXLVVKKSDVEAIFSKYGKIVGCSVHKGFAFVQYVNERNARAAVAGEDGRMIAGQVLDINLAAEPKVNRGKAGVKRSAAEMYGSSFDLDYDFQR

SEQ ID NO: 12467 - protein, 121 aa, Homo sapiens
  MOD_RES (6)..(6): Selenocysteine
  MOD_RES (9)..(9): Selenocysteine
  MOD_RES (25)..(25): Selenocysteine
MASNVXNKXDPRSMNSRVFIGNLNXLVVKKSDVEAIFSKYGKIVGCSVHKGFAFVQYVNERNARAAVAGEDGRMIAGQVLDINLAAEPKVNRGKAGVKRSAAEMYGSSFDLDYDFQRDYYD

SEQ ID NO: 12468 - protein, 126 aa, Homo sapiens
  MOD_RES (6)..(6): Selenocysteine
  MOD_RES (9)..(9): Selenocysteine
  MOD_RES (25)..(25): Selenocysteine
MASNVXNKXDPRSMNSRVFIGNLNXLVVKKSDVEAIFSKYGKIVGCSVHKGFAFVQYVNERNARAAVAGEDGRMIAGQVLDINLAAEPKVNRGKAGVKRSAAEMYGSSFDLDYDFQRDYYDRMYSY

SEQ ID NO: 12469 - protein, 250 aa, Homo sapiens
  MOD_RES (6)..(6): Selenocysteine
  MOD_RES (9)..(9): Selenocysteine
  MOD_RES (25)..(25): Selenocysteine
  MOD_RES (145)..(145): Selenocysteine
  MOD_RES (191)..(191): Selenocysteine
MASNVXNKXDPRSMNSRVFIGNLNXLVVKKSDVEAIFSKYGKIVGCSVHKGFAFVQYVNERNARAAVAGEDGRMIAGQVLDINLAAEPKVNRGKAGVKRSAAEMYGSSFDLDYDFQRDYYDRMYSYPARVPPPPPIARAIKKELXQIKQKVDSLLENLEKIEKEQSKQAVEMKNDKSEEEQSSSSVKKDEXNVKMESEGGADDSAEEGDLLDDDDNEDRGDDQLELIKDDEKEAEEGEDDRDSANGEDDS

SEQ ID NO: 12470 - protein, 292 aa, Homo sapiens
  MOD_RES (6)..(6): Selenocysteine
  MOD_RES (9)..(9): Selenocysteine
  MOD_RES (25)..(25): Selenocysteine
  MOD_RES (152)..(152): Selenocysteine
  MOD_RES (188)..(188): Selenocysteine
  MOD_RES (233)..(233): Selenocysteine
MASNVXNKXDPRSMNSRVFIGNLNXLVVKKSDVEAIFSKYGKIVGCSVHKGFAFVQYVNERNARAAVAGEDGRMIAGQVLDINLAAEPKVNRGKAGVKRSAAEMYGSSFDLDYDFQRDYYDRMYSYPARVPPPPPIARAVVPSKRQRVSGNXSRRGKSGFNSKSGQRGSSKSGKLKGDDLQAIKKELXQIKQKVDSLLENLEKIEKEQSKQAEMKNDKSEEEQSSSSVKKDEXNVKMESEGGADDSAEEGDLLDDDDNEDRGDDQLELIKDDEKEAEEGEDDRDSANGEDDS

SEQ ID NO: 12471 - protein, 262 aa, Homo sapiens
  MOD_RES (6)..(6): Selenocysteine
  MOD_RES (9)..(9): Selenocysteine
  MOD_RES (25)..(25): Selenocysteine
  MOD_RES (152)..(152): Selenocysteine
  MOD_RES (188)..(188): Selenocysteine
  MOD_RES (234)..(234): Selenocysteine
MASNVXNKXDPRSMNSRVFIGNLNXLVVKKSDVEAIFSKYGKIVGCSVHKGFAFVQYVNERNARAAVAGEDGRMIAGQVLDINLAAEPKVNRGKAGVKRSAAEMYGSSFDLDYDFQRDYYDRMYSYPARVPPPPPIARAVVPSKRQRVSGNXSRRGKSGFNSKSGQRGSSKSGKLKGDDLQAIKKELXQIKQKVDSLLENLEKIEKEQSKQAVEMKNDKSEEEQSSSSVKKDEXNVKMESEGGADDSAEEGDLLDDDDNEDR

SEQ ID NO: 12472 - protein, 288 aa, Homo sapiens
  MOD_RES (6)..(6): Selenocysteine
  MOD_RES (9)..(9): Selenocysteine
  MOD_RES (25)..(25): Selenocysteine
  MOD_RES (152)..(152): Selenocysteine
  MOD_RES (188)..(188): Selenocysteine
  MOD_RES (234)..(234): Selenocysteine
  MOD_RES (269)..(270): Selenocysteine
MASNVXNKXDPRSMNSRVFIGNLNXLVVKKSDVEAIFSKYGKIVGCSVHKGFAFVQYVNERNARAAVAGEDGRMIAGQVLDINLAAEPKVNRGKAGVKRSAAEMYGSSFDLDYDFQRDYYDRMYSYPARVPPPPPIARAVVPSKRQRVSGNXSRRGKSGFNSKSGQRGSSKSGKLKGDDLQAIKKELXQIKQKVDSLLENLEKIEKEQSKQAVEMKNDKSEEEQSSSSVKKDEXNVKMESEGGADDSAEEGDLLDDDDNEDRGDDQVKXXGKERKRWWRGAQGHMECL

SEQ ID NO: 12473 - protein, 290 aa, Homo sapiens
  MOD_RES (6)..(6): Selenocysteine
  MOD_RES (9)..(9): Selenocysteine
  MOD_RES (25)..(25): Selenocysteine
  MOD_RES (152)..(152): Selenocysteine
  MOD_RES (188)..(188): Selenocysteine
  MOD_RES (234)..(234): Selenocysteine
MASNVXNKXDPRSMNSRVFIGNLNXLVVKKSDVEAIFSKYGKIVGCSVHKGFAFVQYVNERNARAAVAGEDGRMIAGQVLDINLAAEPKVNRGKAGVKRSAAEMYGSSFDLDYDFQRDYYDRMYSYPARVPPPPPIARAVVPSKRQRVSGNXSRRGKSGFNSKSGQRGSSKSGKLKGDDLQAIKKELXQIKQKVDSLLENLEKIEKEQSKQAVEMKNDKSEEEQSSSSVKKDEXNVKMESEGGADDSAEEGDLLDDDDNEDRGDDQLELIKDDEKEAEEGEDDRDSANGG

SEQ ID NO: 12474 - protein, 293 aa, Homo sapiens
  MOD_RES (6)..(6): Selenocysteine
  MOD_RES (9)..(9): Selenocysteine
  MOD_RES (25)..(25): Selenocysteine
  MOD_RES (152)..(152): Selenocysteine
  MOD_RES (188)..(188): Selenocysteine
  MOD_RES (234)..(234): Selenocysteine
MASNVXNKXDPRSMNSRVFIGNLNXLVVKKSDVEAIFSKYGKIVGCSVHKGFAFVQYVNERNARAAVAGEDGRMIAGQVLDINLAAEPKVNRGKAGVKRSAAEMYGSSFDLDYDFQRDYYDRMYSYPARVPPPPPIARAVVPSKRQRVSGNXSRRGKSGFNSKSGQRGSSKSGKLKGDDLQAIKKELXQIKQKVDSLLENLEKIEKEQSKQAVEMKNDKSEEEQSSSSVKKDEXNVKMESEGGADDSAEEGDLLDDDDNEDRGDDQLELIKDDEKEAEEGEDDRDSANGEDDS

SEQ ID NO: 12475 - protein, 175 aa, Homo sapiens
  MOD_RES (6)..(6): Selenocysteine
  MOD_RES (9)..(9): Selenocysteine
  MOD_RES (25)..(25): Selenocysteine
  MOD_RES (109)..(109): Selenocysteine
  MOD_RES (165)..(165): Selenocysteine
MASNVXNKXDPRSMNSRVFIGNLNXLVVKKSDVEAIFSKYGKIVGCSVHKGFAFVQYVNERNARAAVAGEDGRMIAGQVLDINLAAEPKVNRGKAGVKRSAAEMYGSVXEHPSPSPLLSSSFDLDYDFQRDYYDRMYSYPARVPPPPPIARAVVPSKRQRVSGNXSRRGKSGFNS

SEQ ID NO: 12476 - protein, 187 aa, Homo sapiens
  MOD_RES (6)..(6): Selenocysteine
  MOD_RES (9)..(9): Selenocysteine
  MOD_RES (25)..(25): Selenocysteine
  MOD_RES (109)..(109): Selenocysteine
  MOD_RES (165)..(165): Selenocysteine
MASNVXNKXDPRSMNSRVFIGNLNXLVVKKSDVEAIFSKYGKIVGCSVHKGFAFVQYVNERNARAAVAGEDGRMIAGQVLDINLAAEPKVNRGKAGVKRSAAEMYGSVXEHPSPSPLLSSSFDLDYDFQRDYYDRMYSYPARVPPPPPIARAVVPSKRQRVSGNXSRRGKSGFNSKSGQRGSSKSGK

SEQ ID NO: 12477 - protein, 231 aa, Homo sapiens
  MOD_RES (6)..(6): Selenocysteine
  MOD_RES (9)..(9): Selenocysteine
  MOD_RES (25)..(25): Selenocysteine
  MOD_RES (109)..(109): Selenocysteine
  MOD_RES (165)..(165): Selenocysteine
  MOD_RES (201)..(201): Selenocysteine
MASNVXNKXDPRSMNSRVFIGNLNXLVVKKSDVEAIFSKYGKIVGCSVHKGFAFVQYVNERNARAAVAGEDGRMIAGQVLDINLAAEPKVNRGKAGVKRSAAEMYGSVXEHPSPSPLLSSSFDLDYDFQRDYYDRMYSYPARVPPPPPIARAVVPSKRQRVSGNXSRRGKSGFNSKSGQRGSSKSGKLKGDDLQAIKKELXQIKQKVDSLLENLEKIEKEQSKQAAGVDQG

SEQ ID NO: 12478 - protein, 305 aa, Homo sapiens
  MOD_RES (6)..(6): Selenocysteine
  MOD_RES (9)..(9): Selenocysteine
  MOD_RES (25)..(25): Selenocysteine
  MOD_RES (109)..(109): Selenocysteine
  MOD_RES (165)..(165): Selenocysteine
  MOD_RES (201)..(201): Selenocysteine
  MOD_RES (246)..(246): Selenocysteine
MASNVXNKXDPRSMNSRVFIGNLNXLVVKKSDVEAIFSKYGKIVGCSVHKGFAFVQYVNERNARAAVAGEDGRMIAGQVLDINLAAEPKVNRGKAGVKRSAAEMYGSVXEHPSPSPLLSSSFDLDYDFQRDYYDRMYSYPARVPPPPPIARAVVPSKRQRVSGNXSRRGKSGFNSKSGQRGSSKSGKLKGDDLQAIKKELXQIKQKVDSLLENLEKIEKEQSKQAEMKNDKSEEEQSSSSVKKDEXNVKMESEGGADDSAEEGDLLDDDDNEDRGDDQLELIKDDEKEAEEGEDDRDSANGEDDS

SEQ ID NO: 12479 - protein, 306 aa, Homo sapiens
  MOD_RES (6)..(6): Selenocysteine
  MOD_RES (9)..(9): Selenocysteine
  MOD_RES (25)..(25): Selenocysteine
  MOD_RES (109)..(109): Selenocysteine
  MOD_RES (165)..(165): Selenocysteine
  MOD_RES (201)..(201): Selenocysteine
  MOD_RES (247)..(247): Selenocysteine
MASNVXNKXDPRSMNSRVFIGNLNXLVVKKSDVEAIFSKYGKIVGCSVHKGFAFVQYVNERNARAAVAGEDGRMIAGQVLDINLAAEPKVNRGKAGVKRSAAEMYGSVXEHPSPSPLLSSSFDLDYDFQRDYYDRMYSYPARVPPPPPIARAVVPSKRQRVSGNXSRRGKSGFNSKSGQRGSSKSGKLKGDDLQAIKKELXQIKQKVDSLLENLEKIEKEQSKQAVEMKNDKSEEEQSSSSVKKDEXNVKMESEGGADDSAEEGDLLDDDDNEDRGDDQLELIKDDEKEAEEGEDDRDSANGEDDS

SEQ ID NO: 12480 - protein, 147 aa, Homo sapiens
  MOD_RES (6)..(6): Selenocysteine
  MOD_RES (9)..(9): Selenocysteine
  MOD_RES (25)..(25): Selenocysteine
  MOD_RES (109)..(109): Selenocysteine
  MOD_RES (124)..(124): Selenocysteine
MASNVXNKXDPRSMNSRVFIGNLNXLVVKKSDVEAIFSKYGKIVGCSVHKGFAFVQYVNERNARAAVAGEDGRMIAGQVLDINLAAEPKVNRGKAGVKRSAAEMYGSVXEHPSPSPLLSVYQEXLHEGAKVASILRVDSGDLPSLES

SEQ ID NO: 12481 - protein, 226 aa, Homo sapiens
  MOD_RES (6)..(6): Selenocysteine
  MOD_RES (9)..(9): Selenocysteine
  MOD_RES (25)..(25): Selenocysteine
  MOD_RES (85)..(85): Selenocysteine
  MOD_RES (121)..(121): Selenocysteine
  MOD_RES (167)..(167): Selenocysteine
MASNVXNKXDPRSMNSRVFIGNLNXLVVKKSDVEAIFSNSSFDLDYDFQRDYYDRMYSYPARVPPPPPIARAVVPSKRQRVSGNXSRRGKSGFNSKSGQRGSSKSGKLKGDDLQAIKKELXQIKQKVDSLLENLEKIEKEQSKQAVEMKNDKSEEEQSSSSVKKDEXNVKMESEGGADDSAEEGDLLDDDDNEDRGDDQLELIKDDEKEAEEGEDDRDSANGEDDS

SEQ ID NO: 12482 - protein, 214 aa, Homo sapiens
  MOD_RES (73)..(73): Selenocysteine
  MOD_RES (109)..(109): Selenocysteine
  MOD_RES (155)..(155): Selenocysteine
MNINLAAEPKVNRGKAGVKRSAAEMYGSSFDLDYDFQRDYYDRMYSYPARVPPPPPIARAVVPSKRQRVSGNXSRRGKSGFNSKSGQRGSSKSGKLKGDDLQAIKKELXQIKQKVDSLLENLEKIEKEQSKQAVEMKNDKSEEEQSSSSVKKDEXNVKMESEGGADDSAEEGDLLDDDDNEDRGDDQLELIKDDEKEAEEGEDDRDSANGEDDS

SEQ ID NO: 12483 - protein, 180 aa, Homo sapiens
  MOD_RES (49)..(49): Selenocysteine
  MOD_RES (85)..(85): Selenocysteine
  MOD_RES (131)..(131): Selenocysteine
MYGSSFDLDYDFQRDYYDRMYSYPARVPPPPPIARAVVPSKRQRVSGNXSRRGKSGFNSKSGQRGSSKSGKLKGDDLQAIKKELXQIKQKVDSLLENLEKIEKEQSKQAVEMKNDKSEEEQSSSSVKKDEXNVKMESEGGADDSAEEGDLLDDDDNEDRGDDQLELIKDDEKEAEEGEDD

SEQ ID NO: 12484 - protein, 98 aa, Homo sapiens
  MOD_RES (35)..(35): Selenocysteine
  MOD_RES (48)..(48): Selenocysteine
  MOD_RES (91)..(91): Selenocysteine
MMLGPEGGEGFVVKLRGLPWSCSVEDVQNFLSDCXIHDGAAGVHFIYXREGRQSGEAFVELGSEDDVKMALKKDRESMGHRYIEVFKSHRXEMDWVLK

SEQ ID NO: 12485 - protein, 415 aa, Homo sapiens
  MOD_RES (35)..(35): Selenocysteine
  MOD_RES (48)..(48): Selenocysteine
  MOD_RES (91)..(91): Selenocysteine
  MOD_RES (123)..(123): Selenocysteine
  MOD_RES (142)..(142): Selenocysteine
  MOD_RES (152)..(152): Selenocysteine
  MOD_RES (215)..(215): Selenocysteine
  MOD_RES (238)..(238): Selenocysteine
  MOD_RES (256)..(257): Selenocysteine
  MOD_RES (282)..(282): Selenocysteine
  MOD_RES (286)..(287): Selenocysteine
  MOD_RES (301)..(301): Selenocysteine
  MOD_RES (328)..(328): Selenocysteine
  MOD_RES (337)..(337): Selenocysteine
  MOD_RES (364)..(365): Selenocysteine
  MOD_RES (388)..(388): Selenocysteine
MMLGPEGGEGFVVKLRGLPWSCSVEDVQNFLSDCXIHDGAAGVHFIYXREGRQSGEAFVELGSEDDVKMALKKDRESMGHRYIEVFKSHRXEMDWVLKHSGPNSADSANDGFVRLRGLPFGCXKEEIVQFFSGLEIVPNGIXLPVDPEGKIXGEAFVQFASQELAEKALGKHKERIGHRYIEVFKSSQEEVRSYSDPPLKFMSVQRPGPYDRPGXARRYIGIVKQAGLERMRPGAYSXGYGGYEEYSGLSDGYGFXXDLFGRDLSYCLSGMYDHRYGDSEFXVQSXXGHCVHMRGLPYKAXENDIYNFFSPLNPVRVHIEIGPDGRVXGEADVEFAXHEEAVAAMSKDRANMQHRYIELFLNSXXGASNGAYSSQVMQGMGVSAAQAXYSGLESQSVSGCYGAGYSGQNSMGGYD

SEQ ID NO: 12486 - protein, 185 aa, Homo sapiens
  MOD_RES (38)..(38): Selenocysteine
  MOD_RES (42)..(43): Selenocysteine
  MOD_RES (57)..(57): Selenocysteine
  MOD_RES (84)..(84): Selenocysteine
  MOD_RES (93)..(93): Selenocysteine
  MOD_RES (120)..(120): Selenocysteine
DYNGYNDGYGFGSDRFGRDLNYCFSGMSDHRYGDGGSXFQSXXGHCVHMRGLPYRAXENDIYNFFSPLNPVRVHIEIGPDGRVXGEADVEFAXHEDAVAAMSKDKANMQHRYVELFLNSXAGASGGAYGSQMLGGMGLSNQSSYGGPASQQLSGGYGGGYGGQSSMSGYDQVLQENSSDFQSNIA

SEQ ID NO: 12487 - protein, 100 aa, Homo sapiens
  MOD_RES (23)..(23): Selenocysteine
  MOD_RES (30)..(30): Selenocysteine
  MOD_RES (65)..(65): Selenocysteine
  MOD_RES (75)..(75): Selenocysteine
MGHRYVEVFKSNNVEMDWVLKHXGPNSPDXANDGFVRLRGLPFGCSKEEIVQFFSGLEIVPNGIXLPVDFQGRSXGEAFVQFASQEIAEKALKKHKERIG

SEQ ID NO: 12488 - protein, 28 aa, Homo sapiens
  MOD_RES (5)..(5): Selenocysteine
MMLGXEGGEGFVVKVRGLPWSCSADEVQ

SEQ ID NO: 12489 - protein, 40 aa, Homo sapiens
  MOD_RES (5)..(5): Selenocysteine
  MOD_RES (36)..(36): Selenocysteine
MMLGXEGGEGFVVKVRGLPWSCSADEVQRFFSALVXESDL

SEQ ID NO: 12490 - protein, 49 aa, Homo sapiens
  MOD_RES (5)..(5): Selenocysteine
  MOD_RES (48)..(48): Selenocysteine
MMLGXEGGEGFVVKVRGLPWSCSADEVQRFFSDCKIQNGAQGIRFIYXR

SEQ ID NO: 12491 - protein, 84 aa, Homo sapiens
  MOD_RES (5)..(5): Selenocysteine
  MOD_RES (48)..(48): Selenocysteine
  MOD_RES (77)..(77): Selenocysteine
MMLGXEGGEGFVVKVRGLPWSCSADEVQRFFSDCKIQNGAQGIRFIYXREGRPSGEAFVELESEDEVKLALKKDREXMGHRYVE

SEQ ID NO: 12492 - protein, 166 aa, Homo sapiens
  MOD_RES (5)..(5): Selenocysteine
  MOD_RES (48)..(48): Selenocysteine
  MOD_RES (77)..(77): Selenocysteine
  MOD_RES (94)..(94): Selenocysteine
  MOD_RES (104)..(104): Selenocysteine
  MOD_RES (145)..(145): Selenocysteine
MMLGXEGGEGFVVKVRGLPWSCSADEVQRFFSDCKIQNGAQGIRFIYXREGRPSGEAFVELESEDEVKLALKKDREXMGHRYVEGLEIVPNGIXLPVDFQGRSXGEAFVQFASQEIAEKALKKHKERIGHRYIEIFKSSRAEVRXHYDPPRKLMAMQRPGPYDRPG

SEQ ID NO: 12493 - protein, 115 aa, Homo sapiens
  MOD_RES (5)..(5): Selenocysteine
  MOD_RES (48)..(48): Selenocysteine
  MOD_RES (77)..(77): Selenocysteine
  MOD_RES (100)..(100): Selenocysteine
  MOD_RES (107)..(107): Selenocysteine
MMLGXEGGEGFVVKVRGLPWSCSADEVQRFFSDCKIQNGAQGIRFIYXREGRPSGEAFVELESEDEVKLALKKDREXMGHRYVEVFKSNNVEMDWVLKHXGPNSPDXANDGFVRL

SEQ ID NO: 12494 - protein, 130 aa, Homo sapiens
  MOD_RES (5)..(5): Selenocysteine
  MOD_RES (48)..(48): Selenocysteine
  MOD_RES (77)..(77): Selenocysteine
  MOD_RES (100)..(100): Selenocysteine
  MOD_RES (107)..(107): Selenocysteine
MMLGXEGGEGFVVKVRGLPWSCSADEVQRFFSDCKIQNGAQGIRFIYXREGRPSGEAFVELESEDEVKLALKKDREXMGHRYVEVFKSNNVEMDWVLKHXGPNSPDXANDGFVRLRGLPFGCSKEEIVQF

SEQ ID NO: 12495 - protein, 162 aa, Homo sapiens
  MOD_RES (5)..(5): Selenocysteine
  MOD_RES (48)..(48): Selenocysteine
  MOD_RES (77)..(77): Selenocysteine
  MOD_RES (100)..(100): Selenocysteine
  MOD_RES (107)..(107): Selenocysteine
MMLGXEGGEGFVVKVRGLPWSCSADEVQRFFSDCKIQNGAQGIRFIYXREGRPSGEAFVELESEDEVKLALKKDREXMGHRYVEVFKSNNVEMDWVLKHXGPNSPDXANDGFVRLRGLPFGCSKEEIVQFFSGILKSLRAVELKLELIMIHHESLWPCSGQV

SEQ ID NO: 12496 - protein, 171 aa, Homo sapiens
  MOD_RES (5)..(5): Selenocysteine
  MOD_RES (48)..(48): Selenocysteine
  MOD_RES (77)..(77): Selenocysteine
  MOD_RES (100)..(100): Selenocysteine
  MOD_RES (107)..(107): Selenocysteine
  MOD_RES (165)..(165): Selenocysteine
MMLGXEGGEGFVVKVRGLPWSCSADEVQRFFSDCKIQNGAQGIRFIYXREGRPSGEAFVELESEDEVKLALKKDREXMGHRYVEVFKSNNVEMDWVLKHXGPNSPDXANDGFVRLRGLPFGCSKEEIVQFFSGILKSLRAVELKLELIMIHHESLWPCSGQVLMXDLGLVE

SEQ ID NO: 12497 - protein, 172 aa, Homo sapiens
  MOD_RES (5)..(5): Selenocysteine
  MOD_RES (48)..(48): Selenocysteine
  MOD_RES (77)..(77): Selenocysteine
  MOD_RES (100)..(100): Selenocysteine
  MOD_RES (107)..(107): Selenocysteine
  MOD_RES (165)..(165): Selenocysteine
MMLGXEGGEGFVVKVRGLPWSCSADEVQRFFSDCKIQNGAQGIRFIYXREGRPSGEAFVELESEDEVKLALKKDREXMGHRYVEVFKSNNVEMDWVLKHXGPNSPDXANDGFVRLRGLPFGCSKEEIVQFFSGILKSLRAVELKLELIMIHHESLWPCSGQVLMXDLGLVEG

SEQ ID NO: 12498 - protein, 184 aa, Homo sapiens
  MOD_RES (5)..(5): Selenocysteine
  MOD_RES (48)..(48): Selenocysteine
  MOD_RES (77)..(77): Selenocysteine
  MOD_RES (100)..(100): Selenocysteine
  MOD_RES (107)..(107): Selenocysteine
  MOD_RES (165)..(165): Selenocysteine
  MOD_RES (174)..(174): Selenocysteine
MMLGXEGGEGFVVKVRGLPWSCSADEVQRFFSDCKIQNGAQGIRFIYXREGRPSGEAFVELESEDEVKLALKKDREXMGHRYVEVFKSNNVEMDWVLKHXGPNSPDXANDGFVRLRGLPFGCSKEEIVQFFSGILKSLRAVELKLELIMIHHESLWPCSGQVLMXDLGLVEGIXALAEELALRG

SEQ ID NO: 12499 - protein, 163 aa, Homo sapiens
  MOD_RES (5)..(5): Selenocysteine
  MOD_RES (48)..(48): Selenocysteine
  MOD_RES (77)..(77): Selenocysteine
  MOD_RES (100)..(100): Selenocysteine
  MOD_RES (107)..(107): Selenocysteine
  MOD_RES (142)..(142): Selenocysteine
  MOD_RES (152)..(152): Selenocysteine
MMLGXEGGEGFVVKVRGLPWSCSADEVQRFFSDCKIQNGAQGIRFIYXREGRPSGEAFVELESEDEVKLALKKDREXMGHRYVEVFKSNNVEMDWVLKHXGPNSPDXANDGFVRLRGLPFGCSKEEIVQFFSGLEIVPNGIXLPVDFQGRSXGEAFVQFASQE

SEQ ID NO: 12500 - protein, 168 aa, Homo sapiens
  MOD_RES (5)..(5): Selenocysteine
  MOD_RES (48)..(48): Selenocysteine
  MOD_RES (77)..(77): Selenocysteine
  MOD_RES (100)..(100): Selenocysteine
  MOD_RES (107)..(107): Selenocysteine
  MOD_RES (142)..(142): Selenocysteine
  MOD_RES (152)..(152): Selenocysteine
MMLGXEGGEGFVVKVRGLPWSCSADEVQRFFSDCKIQNGAQGIRFIYXREGRPSGEAFVELESEDEVKLALKKDREXMGHRYVEVFKSNNVEMDWVLKHXGPNSPDXANDGFVRLRGLPFGCSKEEIVQFFSGLEIVPNGIXLPVDFQGRSXGEAFVQFASQEIAEKA

SEQ ID NO: 12501 - protein, 212 aa, Homo sapiens
  MOD_RES (5)..(5): Selenocysteine
  MOD_RES (48)..(48): Selenocysteine
  MOD_RES (77)..(77): Selenocysteine
  MOD_RES (100)..(100): Selenocysteine
  MOD_RES (107)..(107): Selenocysteine
  MOD_RES (142)..(142): Selenocysteine
  MOD_RES (152)..(152): Selenocysteine
  MOD_RES (193)..(193): Selenocysteine
MMLGXEGGEGFVVKVRGLPWSCSADEVQRFFSDCKIQNGAQGIRFIYXREGRPSGEAFVELESEDEVKLALKKDREXMGHRYVEVFKSNNVEMDWVLKHXGPNSPDXANDGFVRLRGLPFGCSKEEIVQFFSGLEIVPNGIXLPVDFQGRSXGEAFVQFASQEIAEKALKKHKERIGHRYIEIFKSSRAEVRXHYDPPRKLMAMQRPGPYDR

SEQ ID NO: 12502 - protein, 429 aa, Homo sapiens
  MOD_RES (5)..(5): Selenocysteine
  MOD_RES (48)..(48): Selenocysteine
  MOD_RES (77)..(77): Selenocysteine
  MOD_RES (100)..(100): Selenocysteine
  MOD_RES (107)..(107): Selenocysteine
  MOD_RES (142)..(142): Selenocysteine
  MOD_RES (152)..(152): Selenocysteine
  MOD_RES (193)..(193): Selenocysteine
  MOD_RES (282)..(282): Selenocysteine
  MOD_RES (286)..(287): Selenocysteine
  MOD_RES (301)..(301): Selenocysteine
  MOD_RES (328)..(328): Selenocysteine
  MOD_RES (337)..(337): Selenocysteine
  MOD_RES (364)..(364): Selenocysteine
MMLGXEGGEGFVVKVRGLPWSCSADEVQRFFSDCKIQNGAQGIRFIYXREGRPSGEAFVELESEDEVKLALKKDREXMGHRYVEVFKSNNVEMDWVLKHXGPNSPDXANDGFVRLRGLPFGCSKEEIVQFFSGLEIVPNGIXLPVDFQGRSXGEAFVQFASQEIAEKALKKHKERIGHRYIEIFKSSRAEVRXHYDPPRKLMAMQRPGPYDRPGAGRGYNSIGRGAGFERMRRGAYGGGYGGYDDYNGYNDGYGFGSDRFGRDLNYCFSGMSDHRYGDGGSXFQSXXGHCVHMRGLPYRAXENDIYNFFSPLNPVRVHIEIGPDGRVXGEADVEFAXHEDAVAAMSKDKANMQHRYVELFLNSXAGASGGAYGSQMLGGMGLSNQSSYGGPASQQLSGGYGGGYGGQSSMSGYDQVLQENSSDFQSNIA

SEQ ID NO: 12503 - protein, 449 aa, Homo sapiens
  MOD_RES (5)..(5): Selenocysteine
  MOD_RES (48)..(48): Selenocysteine
  MOD_RES (77)..(77): Selenocysteine
  MOD_RES (100)..(100): Selenocysteine
  MOD_RES (107)..(107): Selenocysteine
  MOD_RES (142)..(142): Selenocysteine
  MOD_RES (152)..(152): Selenocysteine
  MOD_RES (193)..(193): Selenocysteine
  MOD_RES (282)..(282): Selenocysteine
  MOD_RES (286)..(287): Selenocysteine
  MOD_RES (301)..(301): Selenocysteine
  MOD_RES (328)..(328): Selenocysteine
  MOD_RES (337)..(337): Selenocysteine
  MOD_RES (364)..(364): Selenocysteine
  MOD_RES (384)..(384): Selenocysteine
MMLGXEGGEGFVVKVRGLPWSCSADEVQRFFSDCKIQNGAQGIRFIYXREGRPSGEAFVELESEDEVKLALKKDREXMGHRYVEVFKSNNVEMDWVLKHXGPNSPDXANDGFVRLRGLPFGCSKEEIVQFFSGLEIVPNGIXLPVDFQGRSXGEAFVQFASQEIAEKALKKHKERIGHRYIEIFKSSRAEVRXHYDPPRKLMAMQRPGPYDRPGAGRGYNSIGRGAGFERMRRGAYGGGYGGYDDYNGYNDGYGFGSDRFGRDLNYCFSGMSDHRYGDGGSXFQSXXGHCVHMRGLPYRAXENDIYNFFSPLNPVRVHIEIGPDGRVXGEADVEFAXHEDAVAAMSKDKANMQHRYVELFLNSXAGASGGAYEHRYVELFLNSXAGASGGAYGSQMMGGMGLSNQSSYGGPASQQLSGGYGGGYGGQSSMSGYDQVLQENSSDFQSNIA

SEQ ID NO: 12504 - protein, 472 aa, Homo sapiens
  MOD_RES (5)..(5): Selenocysteine
  MOD_RES (48)..(48): Selenocysteine
  MOD_RES (77)..(77): Selenocysteine
  MOD_RES (100)..(100): Selenocysteine
  MOD_RES (107)..(107): Selenocysteine
  MOD_RES (142)..(142): Selenocysteine
  MOD_RES (152)..(152): Selenocysteine
  MOD_RES (193)..(193): Selenocysteine
  MOD_RES (282)..(282): Selenocysteine
  MOD_RES (286)..(287): Selenocysteine
  MOD_RES (301)..(301): Selenocysteine
  MOD_RES (328)..(328): Selenocysteine
  MOD_RES (337)..(337): Selenocysteine
  MOD_RES (364)..(364): Selenocysteine
  MOD_RES (384)..(384): Selenocysteine
MMLGXEGGEGFVVKVRGLPWSCSADEVQRFFSDCKIQNGAQGIRFIYXREGRPSGEAFVELESEDEVKLALKKDREXMGHRYVEVFKSNNVEMDWVLKHXGPNSPDXANDGFVRLRGLPFGCSKEEIVQFFSGLEIVPNGIXLPVDFQGRSXGEAFVQFASQEIAEKALKKHKERIGHRYIEIFKSSRAEVRXHYDPPRKLMAMQRPGPYDRPGAGRGYNSIGRGAGFERMRRGAYGGGYGGYDDYNGYNDGYGFGSDRFGRDLNYCFSGMSDHRYGDGGSXFQSXXGHCVHMRGLPYRAXENDIYNFFSPLNPVRVHIEIGPDGRVXGEADVEFAXHEDAVAAMSKDKANMQHRYVELFLNSXAGASGGAYEHRYVELFLNSXAGASGGAYGSQMMGGMGLSNQSSYGGPASQQLSGGYGGGYGGQSSMSGYGNQGAVNSSYYSSGSRASMGVNGMGGLSSMSSMSGGWGM

SEQ ID NO: 12505 - protein, 164 aa, Homo sapiens
  MOD_RES (5)..(5): Selenocysteine
  MOD_RES (48)..(48): Selenocysteine
  MOD_RES (77)..(77): Selenocysteine
  MOD_RES (100)..(100): Selenocysteine
  MOD_RES (107)..(107): Selenocysteine
  MOD_RES (145)..(145): Selenocysteine
  MOD_RES (149)..(150): Selenocysteine
  MOD_RES (164)..(164): Selenocysteine
MMLGXEGGEGFVVKVRGLPWSCSADEVQRFFSDCKIQNGAQGIRFIYXREGRPSGEAFVELESEDEVKLALKKDREXMGHRYVEVFKSNNVEMDWVLKHXGPNSPDXANDGFVRLRGLPFGCSKEEIVQFFSGMSDHRYGDGGSXFQSXXGHCVHMRGLPYRAX

SEQ ID NO: 12506 - protein, 155 aa, Homo sapiens
  MOD_RES (5)..(5): Selenocysteine
  MOD_RES (48)..(48): Selenocysteine
  MOD_RES (55)..(55): Selenocysteine
  MOD_RES (90)..(90): Selenocysteine
  MOD_RES (100)..(100): Selenocysteine
  MOD_RES (141)..(141): Selenocysteine
MMLGXEGGEGFVVKVRGLPWSCSADEVQRFFSVFKSNNVEMDWVLKHXGPNSPDXANDGFVRLRGLPFGCSKEEIVQFFSGLEIVPNGIXLPVDFQGRSXGEAFVQFASQEIAEKALKKHKERIGHRYIEIFKSSRAEVRXHYDPPRKLMAMQRP

SEQ ID NO: 12507 - protein, 131 aa, Homo sapiens
  MOD_RES (24)..(24): Selenocysteine
  MOD_RES (47)..(47): Selenocysteine
  MOD_RES (54)..(54): Selenocysteine
  MOD_RES (112)..(112): Selenocysteine
  MOD_RES (121)..(121): Selenocysteine
SGEAFVELESEDEVKLALKKDREXMGHRYVEVFKSNNVEMDWVLKHXGPNSPDXANDGFVRLRGLPFGCSKEEIVQFFSGILKSLRAVELKLELIMIHHESLWPCSGQVLMXDLGLVEGIXALAEELALRG

SEQ ID NO: 12508 - protein, 195 aa, Homo sapiens
  MOD_RES (7)..(7): Selenocysteine
  MOD_RES (96)..(96): Selenocysteine
  MOD_RES (100)..(101): Selenocysteine
  MOD_RES (115)..(115): Selenocysteine
  MOD_RES (142)..(142): Selenocysteine
  MOD_RES (151)..(151): Selenocysteine
  MOD_RES (178)..(178): Selenocysteine
SRAEVRXHYDPPRKLMAMQRPGPYDRPGAGRGYNSIGRGAGFERMRRGAYGGGYGGYDDYNGYNDGYGFGSDRFGRDLNYCFSGMSDHRYGDGGSXFQSXXGHCVHMRGLPYRAXENDIYNFFSPLNPVRVHIEIGPDGRVXGEADVEFAXHEDAVAAMSKDKANMQHRYVELFLNSXAGASGGAYGSQMMGGMG

SEQ ID NO: 12509 - protein, 117 aa, Homo sapiens
  MOD_RES (1)..(1): Any amino acid
  MOD_RES (8)..(8): Selenocysteine
  MOD_RES (35)..(35): Selenocysteine
  MOD_RES (52)..(52): Selenocysteine
XADVEFAXHEDAVAAMSKDKANMQHRYVELFLNSXAGASGEHRYVELFLNSXAGASGGAYGSQMMGGMGLSNQSSYGGPASQQLSGGYGGGYGGQSSMSGYDQVLQENSSDFQSNIA

SEQ ID NO: 12510 - protein, 48 aa, Homo sapiens
  MOD_RES (1)..(1): Any amino acid
XAGASGGAYGSQMMGGMGLCKYPNQSSYGGPASQQLSGGYGGGYGGQS

SEQ ID NO: 12511 - protein, 277 aa, Homo sapiens
  MOD_RES (1)..(1): Any amino acid
  MOD_RES (27)..(27): Selenocysteine
  MOD_RES (68)..(68): Selenocysteine
  MOD_RES (157)..(157): Selenocysteine
  MOD_RES (161)..(162): Selenocysteine
  MOD_RES (176)..(176): Selenocysteine
  MOD_RES (203)..(203): Selenocysteine
  MOD_RES (212)..(212): Selenocysteine
  MOD_RES (239)..(239): Selenocysteine
  MOD_RES (259)..(259): Selenocysteine
XALYGLEDFPLDVARKKLFSSSQGRSXGEAFVQFASQEIAEKALKKHKERIGHRYIEIFKSSRAEVRXHYDPPRKLMAMQRPGPYDRPGAGRGYNSIGRGAGFERMRRGAYGGGYGGYDDYNGYNDGYGFGSDRFGRDLNYCFSGMSDHRYGDGGSXFQSXXGHCVHMRGLPYRAXENDIYNFFSPLNPVRVHIEIGPDGRVXGEADVEFAXHEDAVAAMSKDKANMQHRYVELFLNSXAGASGGAYEHRYVELFLNSXAGASGGAYGSQMMGGMGL

SEQ ID NO: 12512 - protein, 77 aa, Homo sapiens
  MOD_RES (3)..(3): Selenocysteine
  MOD_RES (9)..(9): Selenocysteine
  MOD_RES (13)..(13): Selenocysteine
  MOD_RES (15)..(15): Selenocysteine
  MOD_RES (39)..(39): Selenocysteine
  MOD_RES (70)..(70): Selenocysteine
MEXEQPEEXFPNXEXNGEFGKRPAEDMEEEQAFKRSRNXDEMVELRILLQSKNAGAVIGKGGKNIKALRXDHIEYQC

SEQ ID NO: 12513 - protein, 463 aa, Homo sapiens
  MOD_RES (3)..(3): Selenocysteine
  MOD_RES (9)..(9): Selenocysteine
  MOD_RES (13)..(13): Selenocysteine
  MOD_RES (15)..(15): Selenocysteine
  MOD_RES (39)..(39): Selenocysteine
  MOD_RES (70)..(70): Selenocysteine
  MOD_RES (96)..(96): Selenocysteine
  MOD_RES (107)..(107): Selenocysteine
  MOD_RES (118)..(118): Selenocysteine
  MOD_RES (120)..(120): Selenocysteine
  MOD_RES (174)..(174): Selenocysteine
  MOD_RES (176)..(177): Selenocysteine
  MOD_RES (189)..(189): Selenocysteine
  MOD_RES (233)..(233): Selenocysteine
  MOD_RES (240)..(240): Selenocysteine
  MOD_RES (344)..(344): Selenocysteine
  MOD_RES (351)..(351): Selenocysteine
  MOD_RES (389)..(390): Selenocysteine
  MOD_RES (393)..(393): Selenocysteine
  MOD_RES (436)..(436): Selenocysteine
  MOD_RES (438)..(438): Selenocysteine
  MOD_RES (440)..(440): Selenocysteine
MEXEQPEEXFPNXEXNGEFGKRPAEDMEEEQAFKRSRNXDEMVELRILLQSKNAGAVIGKGGKNIKALRXDYNASVSVPDSSGPERILSISADIEXIGEILKKIIPXLEEGLQLPSPXAXSQLPLESDAVECLNYQHYKGSDFDCELRLLIHQSLAGGIIGVKGAKIKELRENXQXXIKLFQECCPHSXDRVVLIGGKPDRVVECIKIILDLISESPIKGRAQPYDPNFYDEXYDYGGFXMMFDDRRGRPVGFPMRGRGGFDRMPPGRGGRPMPPSRRDYDDMSPRRGPPPPPPGRGGRGGSRARNLPLPPPPPPRGGDLMAYDRRGRPGDRYDGMVGFSADEXWDSAIDXWSPSEWQMAYEPQGGSGYDYSYAGGRGSYGDLGGPIIXXQVXIPKDLAGSIIGKGGQRIKQIRHESGASIKIDEPLEGSEDRIIXIXGXQDQIQNAQYLLQNSVKQYSGKFF

SEQ ID NO: 12514 - protein, 464 aa, Homo sapiens
  MOD_RES (3)..(3): Selenocysteine
  MOD_RES (9)..(9): Selenocysteine
  MOD_RES (13)..(13): Selenocysteine
  MOD_RES (15)..(15): Selenocysteine
  MOD_RES (39)..(39): Selenocysteine
  MOD_RES (70)..(70): Selenocysteine
  MOD_RES (96)..(96): Selenocysteine
  MOD_RES (107)..(107): Selenocysteine
  MOD_RES (118)..(118): Selenocysteine
  MOD_RES (120)..(120): Selenocysteine
  MOD_RES (174)..(174): Selenocysteine
  MOD_RES (176)..(177): Selenocysteine
  MOD_RES (189)..(189): Selenocysteine
  MOD_RES (233)..(233): Selenocysteine
  MOD_RES (240)..(240): Selenocysteine
  MOD_RES (344)..(344): Selenocysteine
  MOD_RES (351)..(351): Selenocysteine
  MOD_RES (389)..(390): Selenocysteine
  MOD_RES (393)..(393): Selenocysteine
  MOD_RES (436)..(436): Selenocysteine
  MOD_RES (438)..(438): Selenocysteine
  MOD_RES (440)..(440): Selenocysteine
MEXEQPEEXFPNXEXNGEFGKRPAEDMEEEQAFKRSRNXDEMVELRILLQSKNAGAVIGKGGKNIKALRXDYNASVSVPDSSGPERILSISADIEXIGEILKKIIPXLEEGLQLPSPXAXSQLPLESDAVECLNYQHYKGSDFDCELRLLIHQSLAGGIIGVKGAKIKELRENXQXXIKLFQECCPHSXDRVVLIGGKPDRVVECIKIILDLISESPIKGRAQPYDPNFYDEXYDYGGFXMMFDDRRGRPVGFPMRGRGGFDRMPPGRGGRPMPPSRRDYDDMSPRRGPPPPPPGRGGRGGSRARNLPLPPPPPPRGGDLMAYDRRGRPGDRYDGMVGFSADEXWDSAIDXWSPSEWQMAYEPQGGSGYDYSYAGGRGSYGDLGGPIIXXQVXIPKDLAGSIIGKGGQRIKQIRHESGASIKIDEPLEGSEDRIIXIXGXQDQIQNAQYLLQNSVKQYADVEGF

SEQ ID NO: 12515 - protein, 379 aa, Homo sapiens
  MOD_RES (3)..(3): Selenocysteine
  MOD_RES (9)..(9): Selenocysteine
  MOD_RES (13)..(13): Selenocysteine
  MOD_RES (15)..(15): Selenocysteine
  MOD_RES (39)..(39): Selenocysteine
  MOD_RES (70)..(70): Selenocysteine
  MOD_RES (96)..(96): Selenocysteine
  MOD_RES (107)..(107): Selenocysteine
  MOD_RES (150)..(150): Selenocysteine
  MOD_RES (152)..(153): Selenocysteine
  MOD_RES (165)..(165): Selenocysteine
  MOD_RES (209)..(209): Selenocysteine
  MOD_RES (216)..(216): Selenocysteine
  MOD_RES (320)..(320): Selenocysteine
  MOD_RES (327)..(327): Selenocysteine
  MOD_RES (365)..(366): Selenocysteine
  MOD_RES (369)..(369): Selenocysteine
MEXEQPEEXFPNXEXNGEFGKRPAEDMEEEQAFKRSRNXDEMVELRILLQSKNAGAVIGKGGKNIKALRXDYNASVSVPDSSGPERILSISADIEXIGEILKKIIPXLEEYQHYKGSDFDCELRLLIHQSLAGGIIGVKGAKIKELRENXQXXIKLFQECCPHSXDRVVLIGGKPDRVVECIKIILDLISESPIKGRAQPYDPNFYDEXYDYGGFXMMFDDRRGRPVGFPMRGRGGFDRMPPGRGGRPMPPSRRDYDDMSPRRGPPPPPPGRGGRGGSRARNLPLPPPPPPRGGDLMAYDRRGRPGDRYDGMVGFSADEXWDSAIDXWSPSEWQMAYEPQGGSGYDYSYAGGRGSYGDLGGPIIXXQVXIPKDLAGSII

SEQ ID NO: 12516 - protein, 100 aa, Homo sapiens
  MOD_RES (1)..(1): Any amino acid
  MOD_RES (33)..(34): Selenocysteine
  MOD_RES (37)..(37): Selenocysteine
  MOD_RES (80)..(80): Selenocysteine
  MOD_RES (82)..(82): Selenocysteine
  MOD_RES (84)..(84): Selenocysteine
XQMAYEPQGGSGYDYSYAGGRGSYGDLGGPIIXXQVXIPKDLAGSIIGKGGQRIKQIRHESGASIKIDEPLEGSEDRIIXIXGXQDQIQNAQYLLQNRSV

SEQ ID NO: 12517 - protein, 99 aa, Homo sapiens
GCAVVEFKMEESMKKAAERPQQLPHGLGGIGMGLGPGGQPIDANHLNKGIGMGNIGPAGMGMEGIGFGINKMGGMEGPFGGGMENMGRFGSGMNMGRIN

SEQ ID NO: 12518 - protein, 219 aa, Homo sapiens
  MOD_RES (14)..(14): Selenocysteine
  MOD_RES (68)..(68): Selenocysteine
  MOD_RES (76)..(76): Selenocysteine
  MOD_RES (147)..(147): Selenocysteine
  MOD_RES (190)..(190): Selenocysteine
  MOD_RES (192)..(192): Selenocysteine
MAAGVEAAAEVAAXEIKMEEESGAPGVPSGNGAPGPKGEGERPAQNEKRKEKNIKRGGNRFEPYANPXKRYRAFIXNIPFDVKWQSLKDLVKEKGIVVEFKMEESMKKAAEVLNKHSLSGRPLKVKEDPDGEHARRAMQKAGRLGSXVFVANLDYKVGWKKLKEVFSMAGVVVRADILEDKDGKSRGIGXVXFEQSIEAVQAISMFNGQLLFDRPMHVK

SEQ ID NO: 12519 - protein, 99 aa, Homo sapiens
  MOD_RES (14)..(14): Selenocysteine
  MOD_RES (68)..(68): Selenocysteine
  MOD_RES (76)..(76): Selenocysteine
MAAGVEAAAEVAAXEIKMEEESGAPGVPSGNGAPGPKGEGERPAQNEKRKEKNIKRGGNRFEPYANPXKRYRAFIXNIPFDVKWQSLKDLVKEKGMCCC

SEQ ID NO: 12520 - protein, 353 aa, Homo sapiens
  MOD_RES (14)..(14): Selenocysteine
  MOD_RES (68)..(68): Selenocysteine
  MOD_RES (76)..(76): Selenocysteine
  MOD_RES (99)..(99): Selenocysteine
  MOD_RES (166)..(166): Selenocysteine
  MOD_RES (209)..(209): Selenocysteine
  MOD_RES (211)..(211): Selenocysteine
MAAGVEAAAEVAAXEIKMEEESGAPGVPSGNGAPGPKGEGERPAQNEKRKEKNIKRGGNRFEPYANPXKRYRAFIXNIPFDVKWQSLKDLVKEKVGEVXYVELLMDAEGKSRGCAVVEFKMEESMKKAAEVLNKHSLSGRPLKVKEDPDGEHARRAMQKAGRLGSXVFVANLDYKVGWKKLKEVFSMAGVVVRADILEDKDGKSRGIGXVXFEQSIEAVQAISMFNGQLLFDRPMHVKMDERALPKGDFFPPERPQQLPHGLGGIGMGLGPGGQPIDANHLNKGIGMGNIGPAGMEGPFGGGMENMGRFGSGMNMGRINEILSNALKRGEIIAKQGGGGGGGSVPGIERMGPG

SEQ ID NO: 12521 - protein, 691 aa, Homo sapiens
  MOD_RES (14)..(14): Selenocysteine
  MOD_RES (68)..(68): Selenocysteine
  MOD_RES (76)..(76): Selenocysteine
  MOD_RES (99)..(99): Selenocysteine
  MOD_RES (166)..(166): Selenocysteine
  MOD_RES (209)..(209): Selenocysteine
  MOD_RES (211)..(211): Selenocysteine
  MOD_RES (436)..(436): Selenocysteine
  MOD_RES (468)..(468): Selenocysteine
  MOD_RES (514)..(514): Selenocysteine
  MOD_RES (626)..(626): Selenocysteine
MAAGVEAAAEVAAXEIKMEEESGAPGVPSGNGAPGPKGEGERPAQNEKRKEKNIKRGGNRFEPYANPXKRYRAFIXNIPFDVKWQSLKDLVKEKVGEVXYVELLMDAEGKSRGCAVVEFKMEESMKKAAEVLNKHSLSGRPLKVKEDPDGEHARRAMQKAGRLGSXVFVANLDYKVGWKKLKEVFSMAGVVVRADILEDKDGKSRGIGXVXFEQSIEAVQAISMFNGQLLFDRPMHVKMDERALPKGDFFPPERPQQLPHGLGGIGMGLGPGGQPIDANHLNKGIGMGNIGPAGMGMEGIGFGINKMGGMEGPFGGGMENMGRFGSGMNMGRINEILSNALKRGEIIAKQGGGGGGGSVPGIERMGPGIDRLGGAGMERMGAGLGHGMDRVGSEIERMGLVMDRMGSVERMGSGIERMGPLGLDHMASSIERMGQXMERIGSGVERMGAGMGFGLERMAAPIDRVGQXIERMGSGVERMGPAIERMGLSMERMVPAGMGAGLERMGPVMDRMAXGLERMGANNLERMGLERMGANSLERMGLERMGANSLERMGPAMGPALGAGIERMGLAMGGGGGASFDRAIEMERGNFGGSFAGSFGGAGGHAPGVARKACQIFVRNLPFDFXWKMLKDKFNECGHVLYADIKMENGKSKGCGVVKFESPEVAERACRMMNGMKLSGREIDVRIDRNA

SEQ ID NO: 12522 - protein, 276 aa, Homo sapiens
  MOD_RES (14)..(14): Selenocysteine
  MOD_RES (68)..(68): Selenocysteine
  MOD_RES (76)..(76): Selenocysteine
  MOD_RES (99)..(99): Selenocysteine
  MOD_RES (197)..(197): Selenocysteine
  MOD_RES (199)..(199): Selenocysteine
MAAGVEAAAEVAAXEIKMEEESGAPGVPSGNGAPGPKGEGERPAQNEKRKEKNIKRGGNRFEPYANPXKRYRAFIXNIPFDVKWQSLKDLVKEKVGEVXYVELLMDAEGKSRGCAVVEFKMEESMKKAAEVLNKHSLSGRPLKVKEDPDGEHARRAMQKLDYKVGWKKLKEVFSMAGVVVRADILEDKDGKSRGIGXVXFEQSIEAVQAISMFNGQLLFDRPMHVKMDERALPKGDFFPPERPQQLPHGLGGIGMGLGPGGQPIDANHLNKGIGMG

SEQ ID NO: 12523 - protein, 357 aa, Homo sapiens
  MOD_RES (14)..(14): Selenocysteine
  MOD_RES (68)..(68): Selenocysteine
  MOD_RES (76)..(76): Selenocysteine
  MOD_RES (99)..(99): Selenocysteine
  MOD_RES (163)..(164): Selenocysteine
  MOD_RES (178)..(178): Selenocysteine
  MOD_RES (205)..(205): Selenocysteine
  MOD_RES (248)..(248): Selenocysteine
  MOD_RES (250)..(250): Selenocysteine
MAAGVEAAAEVAAXEIKMEEESGAPGVPSGNGAPGPKGEGERPAQNEKRKEKNIKRGGNRFEPYANPXKRYRAFIXNIPFDVKWQSLKDLVKEKVGEVXYVELLMDAEGKSRGCAVVEFKMEESMKKAAEVLNKHSLSGRPLKVKEDPDGEHARRAMQKVMAXXGGMGMGPGGPGMIXIPPSILNNPNIPNEIIHALQAGRLGSXVFVANLDYKVGWKKLKEVFSMAGVVVRADILEDKDGKSRGIGXVXFEQSIEAVQAISMFNGQLLFDRPMHVKMDERALPKGDFFPPERPQQLPQILSNALKRGEIIAKQGGGGGGGSVPGIERMGPGIDRLGGAGMERMGAGLGHGMDRVGS

SEQ ID NO: 12524 - protein, 730 aa, Homo sapiens
  MOD_RES (14)..(14): Selenocysteine
  MOD_RES (68)..(68): Selenocysteine
  MOD_RES (76)..(76): Selenocysteine
  MOD_RES (99)..(99): Selenocysteine
  MOD_RES (163)..(164): Selenocysteine
  MOD_RES (178)..(178): Selenocysteine
  MOD_RES (205)..(205): Selenocysteine
  MOD_RES (248)..(248): Selenocysteine
  MOD_RES (250)..(250): Selenocysteine
  MOD_RES (475)..(475): Selenocysteine
  MOD_RES (507)..(507): Selenocysteine
  MOD_RES (553)..(553): Selenocysteine
  MOD_RES (665)..(665): Selenocysteine
MAAGVEAAAEVAAXEIKMEEESGAPGVPSGNGAPGPKGEGERPAQNEKRKEKNIKRGGNRFEPYANPXKRYRAFIXNIPFDVKWQSLKDLVKEKVGEVXYVELLMDAEGKSRGCAVVEFKMEESMKKAAEVLNKHSLSGRPLKVKEDPDGEHARRAMQKVMAXXGGMGMGPGGPGMIXIPPSILNNPNIPNEIIHALQAGRLGSXVFVANLDYKVGWKKLKEVFSMAGVVVRADILEDKDGKSRGIGXVXFEQSIEAVQAISMFNGQLLFDRPMHVKMDERALPKGDFFPPERPQQLPHGLGGIGMGLGPGGQPIDANHLNKGIGMGNIGPAGMGMEGIGFGINKMGGMEGPFGGGMENMGRFGSGMNMGRINEILSNALKRGEIIAKQGGGGGGGSVPGIERMGPGIDRLGGAGMERMGAGLGHGMDRVGSEIERMGLVMDRMGSVERMGSGIERMGPLGLDHMASSIERMGQXMERIGSGVERMGAGMGFGLERMAAPIDRVGQXIERMGSGVERMGPAIERMGLSMERMVPAGMGAGLERMGPVMDRMAXGLERMGANNLERMGLERMGANSLERMGLERMGANSLERMGPAMGPALGAGIERMGLAMGGGGGASFDRAIEMERGNFGGSFAGSFGGAGGHAPGVARKACQIFVRNLPFDFXWKMLKDKFNECGHVLYADIKMENGKSKGCGVVKFESPEVAERACRMMNGMKLSGREIDVRIDRNA

SEQ ID NO: 12525 - protein, 730 aa, Homo sapiens
  MOD_RES (14)..(14): Selenocysteine
  MOD_RES (68)..(68): Selenocysteine
  MOD_RES (76)..(76): Selenocysteine
  MOD_RES (99)..(99): Selenocysteine
  MOD_RES (163)..(164): Selenocysteine
  MOD_RES (178)..(178): Selenocysteine
  MOD_RES (205)..(205): Selenocysteine
  MOD_RES (248)..(248): Selenocysteine
  MOD_RES (250)..(250): Selenocysteine
  MOD_RES (475)..(475): Selenocysteine
  MOD_RES (507)..(507): Selenocysteine
  MOD_RES (553)..(553): Selenocysteine
  MOD_RES (665)..(665): Selenocysteine
MAAGVEAAAEVAAXEIKMEEESGAPGVPSGNGAPGPKGEGERPAQNEKRKEKNIKRGGNRFEPYANPXKRYRAFIXNIPFDVKWQSLKDLVKEKVGEVXYVELLMDAEGKSRVSVVVEFKMEESMKKAAEVLNKHSLSGRPLKVKEDPDGEHARRAMQKVMAXXGGMGMGPGGPGMIXIPPSILNNPNIPNEIIHALQAGRLGSXVFVANLDYKVGWKKLKEVFSMAGVVVRADILEDKDGKSRGIGXVXFEQSIEAVQAISMFNGQLLFDRPMHVKMDERALPKGDFFPPERPQQLPHGLGGIGMGLGPGGQPIDANHLNKGIGMGNIGPAGMGMEGIGFGINKMGGMEGPFGGGMENMGRFGSGMNMGRINEILSNALKRGEIIAKQGGGGGGGSVPGIERMGPGIDRLGGAGMERMGAGLGHGMDRVGSEIERMGLVMDRMGSVERMGSGIERMGPLGLDHMASSIERMGQXMERIGSGVERMGAGMGFGLERMAAPIDRVGQXIERMGSGVERMGPAIERMGLSMERMVPAGMGAGLERMGPVMDRMAXGLERMGANNLERMGLERMGANSLERMGLERMGANSLERMGPAMGPALGAGIERMGLAMGGGGGASFDRAIEMERGNFGGSFAGSFGGAGGHAPGVARKACQIFVRNLPFDFXWKMLKDKFNECGHVLYADIKMENGKSKGCGVVKFESPEVAERACRMMNGMKLSGREIDVRIDRNA

SEQ ID NO: 12526 - protein, 383 aa, Homo sapiens
  MOD_RES (1)..(1): Any amino acid
  MOD_RES (34)..(34): Selenocysteine
  MOD_RES (36)..(36): Selenocysteine
  MOD_RES (243)..(243): Selenocysteine
  MOD_RES (275)..(275): Selenocysteine
  MOD_RES (321)..(321): Selenocysteine
XGWKKLKEVFSMAGVVVRADILEDKDGKSRGIGXVXFEQSIEAVQAISMFNGQLLFDRPMHVKMDERALPKGDFFPPERPQQLPHGLGGIGMGLGPGGQPIDANHLNKGIGMGNIGPAGMGMEGIGFGINKMGGMEGPFGGGMENMGRFGSGMNMGRINGGGGGSVPGIERMGPGIDRLGGAGMERMGAGLGHGMDRVGSEIERMGLVMDRMGSVERMGSGIERMGPLGLDHMASSIERMGQXMERIGSGVERMGAGMGFGLERMAAPIDRVGQXIERMGSGVERMGPAIERMGLSMERMVPAGMGAGLERMGPVMDRMAXGLERMGANNLERMGLERMGANSLERMGLERMGANSLERMGPAMGPALGAGIERMGLAMGGGG

SEQ ID NO: 12527 - protein, 214 aa, Homo sapiens
  MOD_RES (1)..(1): Any amino acid
  MOD_RES (30)..(30): Selenocysteine
  MOD_RES (76)..(76): Selenocysteine
  MOD_RES (188)..(188): Selenocysteine
XIGSGVERMGAGMGFGLERMAAPIDRVGQXIERMGSGVERMGPAIERMGLSMERMVPAGMGAGLERMGPVMDRMAXGLERMGANNLERMGLERMGANSLERMGLERMGANSLERMGPAMGPALGAGIERMGLAMGGGGGASFDRAIEMERGNFGGSFAGSFGGAGGHAPGVARKACQIFVRNLPFDFXWKMLKDKFNECEPERQVLHVSRNALV

SEQ ID NO: 12528 - protein, 116 aa, Homo sapiens
  MOD_RES (1)..(1): Any amino acid
  MOD_RES (89)..(89): Selenocysteine
XRMGLERMGANSLERMGPAMGPALGAGIERMGLAMGGGGGASFDRAIEMERGNFGGSFAGSFGGAGGHAPGVARKACQIFVRNLPFDFXWKMLKDKFNECGKCWERLCRCFPRACW

SEQ ID NO: 12529 - protein, 177 aa, Homo sapiens
  MOD_RES (9)..(9): Selenocysteine
  MOD_RES (20)..(20): Selenocysteine
  MOD_RES (27)..(27): Selenocysteine
  MOD_RES (33)..(33): Selenocysteine
  MOD_RES (41)..(41): Selenocysteine
  MOD_RES (60)..(60): Selenocysteine
  MOD_RES (62)..(62): Selenocysteine
  MOD_RES (66)..(66): Selenocysteine
  MOD_RES (68)..(68): Selenocysteine
  MOD_RES (70)..(70): Selenocysteine
  MOD_RES (84)..(84): Selenocysteine
  MOD_RES (124)..(124): Selenocysteine
  MOD_RES (126)..(126): Selenocysteine
  MOD_RES (141)..(141): Selenocysteine
  MOD_RES (148)..(148): Selenocysteine
  MOD_RES (153)..(153): Selenocysteine
  MOD_RES (157)..(157): Selenocysteine
  MOD_RES (167)..(167): Selenocysteine
MGEQPIFSXRAHVFQIDPNXKKNWVPXSKHAVXVSYFYDSXRNVYRIISLDGSKAIINSXIXPNMXFXKXSQKFGQWADSRANXVYGLGFSSEHHLSKFAEKFQEFKEAARLAKEKSQEKMELXSXPSQESAGGDLQSPLXPESINGXDDERXPDVXQNSEPRAEPXQNALPFSHRK

SEQ ID NO: 12530 - protein, 354 aa, Homo sapiens
  MOD_RES (9)..(9): Selenocysteine
  MOD_RES (20)..(20): Selenocysteine
  MOD_RES (27)..(27): Selenocysteine
  MOD_RES (33)..(33): Selenocysteine
  MOD_RES (41)..(41): Selenocysteine
  MOD_RES (60)..(60): Selenocysteine
  MOD_RES (62)..(62): Selenocysteine
  MOD_RES (66)..(66): Selenocysteine
  MOD_RES (68)..(68): Selenocysteine
  MOD_RES (70)..(70): Selenocysteine
  MOD_RES (84)..(84): Selenocysteine
  MOD_RES (124)..(124): Selenocysteine
  MOD_RES (126)..(126): Selenocysteine
  MOD_RES (141)..(141): Selenocysteine
  MOD_RES (148)..(148): Selenocysteine
  MOD_RES (153)..(153): Selenocysteine
  MOD_RES (157)..(157): Selenocysteine
  MOD_RES (167)..(167): Selenocysteine
  MOD_RES (189)..(189): Selenocysteine
  MOD_RES (198)..(198): Selenocysteine
  MOD_RES (205)..(205): Selenocysteine
  MOD_RES (230)..(230): Selenocysteine
  MOD_RES (244)..(244): Selenocysteine
  MOD_RES (247)..(247): Selenocysteine
  MOD_RES (252)..(252): Selenocysteine
  MOD_RES (259)..(259): Selenocysteine
  MOD_RES (288)..(288): Selenocysteine
  MOD_RES (328)..(328): Selenocysteine
  MOD_RES (341)..(341): Selenocysteine
MGEQPIFSXRAHVFQIDPNXKKNWVPXSKHAVXVSYFYDSXRNVYRIISLDGSKAIINSXIXPNMXFXKXSQKFGQWADSRANXVYGLGFSSEHHLSKFAEKFQEFKEAARLAKEKSQEKMELXSXPSQESAGGDLQSPLXPESINGXDDERXPDVXQNSEPRAEPXQNALPFSHSSAISKHWEAELAXLKGNNAKLXAALLESXANVKQWKQQLAAYQEEAERLHKRVXELECVSSQANAVHXHKXELNQXIQELEEXLKLKEEEIERLKQEIDNARELQEQRDSLXQKLQEVEIRNKDLEGQLSDLEQRLEKSQNEQEAFRNNLKXLLEILDGKIFELXELRDNLAKLLECS

SEQ ID NO: 12531 - protein, 224 aa, Homo sapiens
  MOD_RES (9)..(9): Selenocysteine
  MOD_RES (20)..(20): Selenocysteine
  MOD_RES (27)..(27): Selenocysteine
  MOD_RES (33)..(33): Selenocysteine
  MOD_RES (41)..(41): Selenocysteine
  MOD_RES (60)..(60): Selenocysteine
  MOD_RES (62)..(62): Selenocysteine
  MOD_RES (66)..(66): Selenocysteine
  MOD_RES (68)..(68): Selenocysteine
  MOD_RES (70)..(70): Selenocysteine
  MOD_RES (84)..(84): Selenocysteine
  MOD_RES (100)..(100): Selenocysteine
  MOD_RES (114)..(114): Selenocysteine
  MOD_RES (117)..(117): Selenocysteine
  MOD_RES (122)..(122): Selenocysteine
  MOD_RES (129)..(129): Selenocysteine
  MOD_RES (158)..(158): Selenocysteine
  MOD_RES (198)..(198): Selenocysteine
  MOD_RES (211)..(211): Selenocysteine
MGEQPIFSXRAHVFQIDPNXKKNWVPXSKHAVXVSYFYDSXRNVYRIISLDGSKAIINSXIXPNMXFXKXSQKFGQWADSRANXVYGLGFSSEHHLSKVXELECVSSQANAVHXHKXELNQXIQELEEXLKLKEEEIERLKQEIDNARELQEQRDSLXQKLQEVEIRNKDLEGQLSDLEQRLEKSQNEQEAFRNNLKXLLEILDGKIFELXELRDNLAKLLECS

SEQ ID NO: 12532 - protein, 180 aa, Homo sapiens
  MOD_RES (15)..(15): Selenocysteine
  MOD_RES (24)..(24): Selenocysteine
  MOD_RES (31)..(31): Selenocysteine
  MOD_RES (56)..(56): Selenocysteine
  MOD_RES (70)..(70): Selenocysteine
  MOD_RES (73)..(73): Selenocysteine
  MOD_RES (78)..(78): Selenocysteine
  MOD_RES (85)..(85): Selenocysteine
  MOD_RES (114)..(114): Selenocysteine
  MOD_RES (154)..(154): Selenocysteine
  MOD_RES (167)..(167): Selenocysteine
MGSAISKHWEAELAXLKGNNAKLXAALLESXANVKQWKQQLAAYQEEAERLHKRVXELECVSSQANAVHXHKXELNQXIQELEEXLKLKEEEIERLKQEIDNARELQEQRDSLXQKLQEVEIRNKDLEGQLSDLEQRLEKSQNEQEAFRNNLKXLLEILDGKIFELXELRDNLAKLLECS

SEQ ID NO: 12533 - protein, 185 aa, Homo sapiens
  MOD_RES (19)..(19): Selenocysteine
  MOD_RES (25)..(25): Selenocysteine
  MOD_RES (43)..(43): Selenocysteine
  MOD_RES (47)..(47): Selenocysteine
  MOD_RES (55)..(55): Selenocysteine
  MOD_RES (68)..(68): Selenocysteine
  MOD_RES (82)..(82): Selenocysteine
  MOD_RES (97)..(97): Selenocysteine
  MOD_RES (106)..(107): Selenocysteine
  MOD_RES (155)..(155): Selenocysteine
  MOD_RES (173)..(173): Selenocysteine
FAEKFQEVKEAAKIAKDKXQEKIEXSSNHSQIIHFGQESGREXPSSXQASSVNGXDDEKASHAGPANXHLKSENDKLKIALXQSAANVKKWEIELQXLRESNARLXXALQESAASVEQWKRQFSICRDENDRLRNKIDELEEQCSEINREKEKNXQLKRRIEELEAELREKEXELKDLRKQSEII

SEQ ID NO: 12534 - protein, 343 aa, Homo sapiens
  MOD_RES (8)..(9): Selenocysteine
  MOD_RES (20)..(20): Selenocysteine
  MOD_RES (33)..(33): Selenocysteine
  MOD_RES (41)..(41): Selenocysteine
  MOD_RES (60)..(60): Selenocysteine
  MOD_RES (62)..(62): Selenocysteine
  MOD_RES (66)..(66): Selenocysteine
  MOD_RES (68)..(68): Selenocysteine
  MOD_RES (70)..(70): Selenocysteine
  MOD_RES (84)..(84): Selenocysteine
  MOD_RES (97)..(97): Selenocysteine
  MOD_RES (117)..(117): Selenocysteine
  MOD_RES (123)..(123): Selenocysteine
  MOD_RES (136)..(136): Selenocysteine
  MOD_RES (149)..(149): Selenocysteine
  MOD_RES (163)..(163): Selenocysteine
  MOD_RES (178)..(178): Selenocysteine
  MOD_RES (187)..(188): Selenocysteine
  MOD_RES (236)..(236): Selenocysteine
  MOD_RES (254)..(254): Selenocysteine
  MOD_RES (299)..(299): Selenocysteine
  MOD_RES (341)..(341): Selenocysteine
MGEQPIFXXRAHVFQIDPNXKKNWMPASKQAVXVSYFYDVXRNSYRIISVDGAKVIINSXIXPNMXFXKXSQKFGQWADSRANXVFGLGFSSEQQLXKFAEKFQEVKEAAKIAKDKXQEKIEXSSNHSQASSVNGXDDEKASHAGPANXHLKSENDKLKIALXQSAANVKKWEIELQXLRESNARLXXALQESAASVEQWKRQFSICRDENDRLRNKIDELEEQCSEINREKEKNXQLKRRIEELEAELREKEXELKDLRKQSEIIPQLMSECEYVSEKLEAAERDNQNLEDKVRSLKXDIEESKYRQRHLKVELKSFLEVLDGKIDDLHDFRRGLSKLGXDN

SEQ ID NO: 12535 - protein, 354 aa, Homo sapiens
  MOD_RES (8)..(9): Selenocysteine
  MOD_RES (20)..(20): Selenocysteine
  MOD_RES (33)..(33): Selenocysteine
  MOD_RES (41)..(41): Selenocysteine
  MOD_RES (60)..(60): Selenocysteine
  MOD_RES (62)..(62): Selenocysteine
  MOD_RES (66)..(66): Selenocysteine
  MOD_RES (68)..(68): Selenocysteine
  MOD_RES (70)..(70): Selenocysteine
  MOD_RES (84)..(84): Selenocysteine
  MOD_RES (97)..(97): Selenocysteine
  MOD_RES (117)..(117): Selenocysteine
  MOD_RES (123)..(123): Selenocysteine
  MOD_RES (135)..(135): Selenocysteine
  MOD_RES (139)..(139): Selenocysteine
  MOD_RES (147)..(147): Selenocysteine
  MOD_RES (160)..(160): Selenocysteine
  MOD_RES (174)..(174): Selenocysteine
  MOD_RES (189)..(189): Selenocysteine
  MOD_RES (198)..(199): Selenocysteine
  MOD_RES (247)..(247): Selenocysteine
  MOD_RES (265)..(265): Selenocysteine
  MOD_RES (310)..(310): Selenocysteine
  MOD_RES (352)..(352): Selenocysteine
MGEQPIFXXRAHVFQIDPNXKKNWMPASKQAVXVSYFYDVXRNSYRIISVDGAKVIINSXIXPNMXFXKXSQKFGQWADSRANXVFGLGFSSEQQLXKFAEKFQEVKEAAKIAKDKXQEKIEXSSNHSQESGREXPSSXQASSVNGXDDEKASHAGPANXHLKSENDKLKIALXQSAANVKKWEIELQXLRESNARLXXALQESAASVEQWKRQFSICRDENDRLRNKIDELEEQCSEINREKEKNXQLKRRIEELEAELREKEXELKDLRKQSEIIPQLMSECEYVSEKLEAAERDNQNLEDKVRSLKXDIEESKYRQRHLKVELKSFLEVLDGKIDDLHDFRRGLSKLGXDN

SEQ ID NO: 12536 - protein, 85 aa, Homo sapiens
  MOD_RES (3)..(3): Selenocysteine
  MOD_RES (12)..(12): Selenocysteine
  MOD_RES (23)..(23): Selenocysteine
  MOD_RES (36)..(36): Selenocysteine
  MOD_RES (44)..(44): Selenocysteine
  MOD_RES (63)..(63): Selenocysteine
  MOD_RES (65)..(65): Selenocysteine
  MOD_RES (69)..(69): Selenocysteine
  MOD_RES (71)..(71): Selenocysteine
  MOD_RES (73)..(73): Selenocysteine
MSXAREQPIFSXRAHVFQIDPAXKRNWIPAGKHALXVSYFYDAXRNVYRIISIGGAKAIINSXVXPNMXFXKXSQKFGQWADSRA

SEQ ID NO: 12537 - protein, 150 aa, Homo sapiens
  MOD_RES (3)..(3): Selenocysteine
  MOD_RES (12)..(12): Selenocysteine
  MOD_RES (23)..(23): Selenocysteine
  MOD_RES (36)..(36): Selenocysteine
  MOD_RES (44)..(44): Selenocysteine
  MOD_RES (63)..(63): Selenocysteine
  MOD_RES (65)..(65): Selenocysteine
  MOD_RES (69)..(69): Selenocysteine
  MOD_RES (71)..(71): Selenocysteine
  MOD_RES (73)..(73): Selenocysteine
  MOD_RES (87)..(87): Selenocysteine
  MOD_RES (100)..(100): Selenocysteine
  MOD_RES (127)..(127): Selenocysteine
MSXAREQPIFSXRAHVFQIDPAXKRNWIPAGKHALXVSYFYDAXRNVYRIISIGGAKAIINSXVXPNMXFXKXSQKFGQWADSRANXVYGLGFASEQHLXQFAEKFQEVKEAARLAREKSQDGGELXSPALGLASHQVPPSPLVSANGPG

SEQ ID NO: 12538 - protein, 243 aa, Homo sapiens
  MOD_RES (3)..(3): Selenocysteine
  MOD_RES (12)..(12): Selenocysteine
  MOD_RES (23)..(23): Selenocysteine
  MOD_RES (36)..(36): Selenocysteine
  MOD_RES (44)..(44): Selenocysteine
  MOD_RES (63)..(63): Selenocysteine
  MOD_RES (65)..(65): Selenocysteine
  MOD_RES (69)..(69): Selenocysteine
  MOD_RES (71)..(71): Selenocysteine
  MOD_RES (73)..(73): Selenocysteine
  MOD_RES (87)..(87): Selenocysteine
  MOD_RES (100)..(100): Selenocysteine
  MOD_RES (127)..(127): Selenocysteine
  MOD_RES (166)..(166): Selenocysteine
  MOD_RES (243)..(243): Selenocysteine
MSXAREQPIFSXRAHVFQIDPAXKRNWIPAGKHALXVSYFYDAXRNVYRIISIGGAKAIINSXVXPNMXFXKXSQKFGQWADSRANXVYGLGFASEQHLXQFAEKFQEVKEAARLAREKSQDGGELXSPALGLASHQVPPSPLVSANGPGEEKLFRSQSADAPGPXERERLKKMLSEGSVGEVQWEAEFFALQDSNNKLAGALREANAAAAQWRQQLEAQRAEAERLRQRVAELEAQAASEVX

SEQ ID NO: 12539 - protein, 358 aa, Homo sapiens
  MOD_RES (3)..(3): Selenocysteine
  MOD_RES (12)..(12): Selenocysteine
  MOD_RES (23)..(23): Selenocysteine
  MOD_RES (36)..(36): Selenocysteine
  MOD_RES (44)..(44): Selenocysteine
  MOD_RES (63)..(63): Selenocysteine
  MOD_RES (65)..(65): Selenocysteine
  MOD_RES (69)..(69): Selenocysteine
  MOD_RES (71)..(71): Selenocysteine
  MOD_RES (73)..(73): Selenocysteine
  MOD_RES (87)..(87): Selenocysteine
  MOD_RES (100)..(100): Selenocysteine
  MOD_RES (127)..(127): Selenocysteine
  MOD_RES (166)..(166): Selenocysteine
  MOD_RES (243)..(243): Selenocysteine
  MOD_RES (245)..(245): Selenocysteine
  MOD_RES (266)..(266): Selenocysteine
  MOD_RES (273)..(273): Selenocysteine
  MOD_RES (278)..(278): Selenocysteine
  MOD_RES (293)..(293): Selenocysteine
  MOD_RES (299)..(299): Selenocysteine
MSXAREQPIFSXRAHVFQIDPAXKRNWIPAGKHALXVSYFYDAXRNVYRIISIGGAKAIINSXVXPNMXFXKXSQKFGQWADSRANXVYGLGFASEQHLXQFAEKFQEVKEAARLAREKSQDGGELXSPALGLASHQVPPSPLVSANGPGEEKLFRSQSADAPGPXERERLKKMLSEGSVGEVQWEAEFFALQDSNNKLAGALREANAAAAQWRQQLEAQRAEAERLRQRVAELEAQAASEVXPXGEKEGLGQGQSLEQLEALVQXKDQEIQXLKSQXGGPREALEAAEREEXQQKVQXRNAELEHQLRAMERSLEEARAERERARAEVGRAAQLLDVSLFELSELREGLARLAEAAP

SEQ ID NO: 12540 - protein, 361 aa, Homo sapiens
  MOD_RES (3)..(3): Selenocysteine
  MOD_RES (12)..(12): Selenocysteine
  MOD_RES (23)..(23): Selenocysteine
  MOD_RES (36)..(36): Selenocysteine
  MOD_RES (44)..(44): Selenocysteine
  MOD_RES (63)..(63): Selenocysteine
  MOD_RES (65)..(65): Selenocysteine
  MOD_RES (69)..(69): Selenocysteine
  MOD_RES (71)..(71): Selenocysteine
  MOD_RES (73)..(73): Selenocysteine
  MOD_RES (87)..(87): Selenocysteine
  MOD_RES (100)..(100): Selenocysteine
  MOD_RES (127)..(127): Selenocysteine
  MOD_RES (166)..(166): Selenocysteine
  MOD_RES (243)..(243): Selenocysteine
  MOD_RES (245)..(245): Selenocysteine
  MOD_RES (266)..(266): Selenocysteine
  MOD_RES (273)..(273): Selenocysteine
  MOD_RES (278)..(278): Selenocysteine
  MOD_RES (293)..(293): Selenocysteine
  MOD_RES (302)..(302): Selenocysteine
MSXAREQPIFSXRAHVFQIDPAXKRNWIPAGKHALXVSYFYDAXRNVYRIISIGGAKAIINSXVXPNMXFXKXSQKFGQWADSRANXVYGLGFASEQHLXQFAEKFQEVKEAARLAREKSQDGGELXSPALGLASHQVPPSPLVSANGPGEEKLFRSQSADAPGPXERERLKKMLSEGSVGEVQWEAEFFALQDSNNKLAGALREANAAAAQWRQQLEAQRAEAERLRQRVAELEAQAASEVXPXGEKEGLGQGQSLEQLEALVQXKDQEIQXLKSQXGGPREALEAAEREEXQQKVQDLEXRNAELEHQLRAMERSLEEARAERERARAEVGRAAQLLDVSLFELSELREGLARLAEAAP

SEQ ID NO: 12541 - protein, 325 aa, Homo sapiens
  MOD_RES (3)..(3): Selenocysteine
  MOD_RES (12)..(12): Selenocysteine
  MOD_RES (23)..(23): Selenocysteine
  MOD_RES (36)..(36): Selenocysteine
  MOD_RES (44)..(44): Selenocysteine
  MOD_RES (63)..(63): Selenocysteine
  MOD_RES (65)..(65): Selenocysteine
  MOD_RES (69)..(69): Selenocysteine
  MOD_RES (71)..(71): Selenocysteine
  MOD_RES (73)..(73): Selenocysteine
  MOD_RES (87)..(87): Selenocysteine
  MOD_RES (100)..(100): Selenocysteine
  MOD_RES (130)..(130): Selenocysteine
  MOD_RES (207)..(207): Selenocysteine
  MOD_RES (209)..(209): Selenocysteine
  MOD_RES (230)..(230): Selenocysteine
  MOD_RES (237)..(237): Selenocysteine
  MOD_RES (242)..(242): Selenocysteine
  MOD_RES (257)..(257): Selenocysteine
  MOD_RES (266)..(266): Selenocysteine
MSXAREQPIFSXRAHVFQIDPAXKRNWIPAGKHALXVSYFYDAXRNVYRIISIGGAKAIINSXVXPNMXFXKXSQKFGQWADSRANXVYGLGFASEQHLXQVPPSPLVSANGPGEEKLFRSQSADAPGPXERERLKKMLSEGSVGEVQWEAEFFALQDSNNKLAGALREANAAAAQWRQQLEAQRAEAERLRQRVAELEAQAASEVXPXGEKEGLGQGQSLEQLEALVQXKDQEIQXLKSQXGGPREALEAAEREEXQQKVQDLEXRNAELEHQLRAMERSLEEARAERERARAEVGRAAQLLDVSLFELSELREGLARLAEAAP

SEQ ID NO: 12542 - protein, 152 aa, Homo sapiens
  MOD_RES (3)..(3): Selenocysteine
  MOD_RES (34)..(34): Selenocysteine
  MOD_RES (36)..(36): Selenocysteine
  MOD_RES (57)..(57): Selenocysteine
  MOD_RES (64)..(64): Selenocysteine
  MOD_RES (69)..(69): Selenocysteine
  MOD_RES (84)..(84): Selenocysteine
  MOD_RES (93)..(93): Selenocysteine
MSXARQQLEAQRAEAERLRQRVAELEAQAASEVXPXGEKEGLGQGQSLEQLEALVQXKDQEIQXLKSQXGGPREALEAAEREEXQQKVQDLEXRNAELEHQLRAMERSLEEARAERERARAEVGRAAQLLDVSLFELSELREGLARLAEAAP

SEQ ID NO: 12543 - protein, 552 aa, Homo sapiens
  MOD_RES (26)..(26): Selenocysteine
  MOD_RES (58)..(58): Selenocysteine
  MOD_RES (63)..(63): Selenocysteine
  MOD_RES (75)..(75): Selenocysteine
  MOD_RES (103)..(103): Selenocysteine
  MOD_RES (124)..(124): Selenocysteine
  MOD_RES (144)..(144): Selenocysteine
  MOD_RES (173)..(173): Selenocysteine
  MOD_RES (178)..(178): Selenocysteine
  MOD_RES (180)..(180): Selenocysteine
  MOD_RES (209)..(209): Selenocysteine
  MOD_RES (247)..(247): Selenocysteine
  MOD_RES (254)..(255): Selenocysteine
  MOD_RES (284)..(284): Selenocysteine
  MOD_RES (290)..(290): Selenocysteine
  MOD_RES (302)..(302): Selenocysteine
  MOD_RES (349)..(349): Selenocysteine
  MOD_RES (362)..(362): Selenocysteine
  MOD_RES (366)..(366): Selenocysteine
  MOD_RES (395)..(395): Selenocysteine
  MOD_RES (409)..(409): Selenocysteine
  MOD_RES (439)..(439): Selenocysteine
  MOD_RES (444)..(444): Selenocysteine
  MOD_RES (453)..(453): Selenocysteine
  MOD_RES (481)..(481): Selenocysteine
  MOD_RES (494)..(494): Selenocysteine
MLKSRISMRSRHPRRAISEGHKSEGXMPPNKEASGLSSSPAGLICLPPISEELQLVWXQAAQXSELDSNEHLLKXFSYFPYPSLADIALLCLRYGLQMEKVKXWFMAQRLRCGISWSSEEIEEXRARVVYRRDQLHFKSLLSFXHHAGRPPEEVPPPPVPAPEQVGIGIGPPXLSKPXQXKGLKVEPEEPSQMPPLPQSHQKLKESLMXPGSGAFPYQSDFWQHLQSSGLSKEQAGRGPNQSHGIGXASWNHSXXVPQPQARDKPPPIALIASSCKEESASSVXPSSSSXSSSFQVLANGAXAASKPLQPLGCVPQSVSPSEQALPPHLEPAWPQGLRHNSVPGRVGPXEYLSPDMQRQRKXKRKXKEQLAILKSFFLQCQWARREDYQKLEQIXGLPRPEIIQWFGDXRYALKHGQLKWFRDNAVPGAPSFQDPAIPXPPPSXRSLNERAEXPPLPIPPPPPDIQPLERYWAAHQQLREXDIPQLSQASRLSXQQVLDWFDSRLPQPAEVVVCLDEEEEEEEEELPEDDEEEEEEEEEDDDDDDDDVIIQD

SEQ ID NO: 12544 - protein, 550 aa, Homo sapiens
  MOD_RES (24)..(24): Selenocysteine
  MOD_RES (56)..(56): Selenocysteine
  MOD_RES (61)..(61): Selenocysteine
  MOD_RES (73)..(73): Selenocysteine
  MOD_RES (101)..(101): Selenocysteine
  MOD_RES (122)..(122): Selenocysteine
  MOD_RES (142)..(142): Selenocysteine
  MOD_RES (171)..(171): Selenocysteine
  MOD_RES (176)..(176): Selenocysteine
  MOD_RES (178)..(178): Selenocysteine
  MOD_RES (207)..(207): Selenocysteine
  MOD_RES (245)..(245): Selenocysteine
  MOD_RES (252)..(253): Selenocysteine
  MOD_RES (282)..(282): Selenocysteine
  MOD_RES (288)..(288): Selenocysteine
  MOD_RES (300)..(300): Selenocysteine
  MOD_RES (347)..(347): Selenocysteine
  MOD_RES (360)..(360): Selenocysteine
  MOD_RES (364)..(364): Selenocysteine
  MOD_RES (393)..(393): Selenocysteine
  MOD_RES (407)..(407): Selenocysteine
  MOD_RES (437)..(437): Selenocysteine
  MOD_RES (442)..(442): Selenocysteine
  MOD_RES (451)..(451): Selenocysteine
  MOD_RES (479)..(479): Selenocysteine
  MOD_RES (492)..(492): Selenocysteine
MVRGWEPPPGLDCAISEGHKSEGXMPPNKEASGLSSSPAGLICLPPISEELQLVWXQAAQXSELDSNEHLLKXFSYFPYPSLADIALLCLRYGLQMEKVKXWFMAQRLRCGISWSSEEIEEXRARVVYRRDQLHFKSLLSFXHHAGRPPEEVPPPPVPAPEQVGIGIGPPXLSKPXQXKGLKVEPEEPSQMPPLPQSHQKLKESLMXPGSGAFPYQSDFWQHLQSSGLSKEQAGRGPNQSHGIGXASWNHSXXVPQPQARDKPPPIALIASSCKEESASSVXPSSSSXSSSFQVLANGAXAASKPLQPLGCVPQSVSPSEQALPPHLEPAWPQGLRHNSVPGRVGPXEYLSPDMQRQRKXKRKXKEQLAILKSFFLQCQWARREDYQKLEQIXGLPRPEIIQWFGDXRYALKHGQLKWFRDNAVPGAPSFQDPAIPXPPPSXRSLNERAEXPPLPIPPPPPDIQPLERYWAAHQQLREXDIPQLSQASRLSXQQVLDWFDSRLPQPAEVVVCLDEEEEEEEEELPEDDEEEEEEEEEDDDDDDDDVIIQD

SEQ ID NO: 12545 - protein, 324 aa, Homo sapiens
  MOD_RES (7)..(7): Selenocysteine
  MOD_RES (28)..(28): Selenocysteine
  MOD_RES (48)..(48): Selenocysteine
  MOD_RES (75)..(75): Selenocysteine
  MOD_RES (82)..(83): Selenocysteine
  MOD_RES (112)..(112): Selenocysteine
  MOD_RES (118)..(118): Selenocysteine
  MOD_RES (130)..(130): Selenocysteine
  MOD_RES (177)..(177): Selenocysteine
  MOD_RES (190)..(190): Selenocysteine
  MOD_RES (194)..(194): Selenocysteine
  MOD_RES (223)..(223): Selenocysteine
  MOD_RES (237)..(237): Selenocysteine
  MOD_RES (267)..(267): Selenocysteine
  MOD_RES (272)..(272): Selenocysteine
  MOD_RES (281)..(281): Selenocysteine
  MOD_RES (309)..(309): Selenocysteine
  MOD_RES (322)..(322): Selenocysteine
QMEKVKXWFMAQRLRCGISWSSEEIEEXRARVVYRRDQLHFKSLLSFXHHAGRPPEEVPPPPVPAPEQVGIGIGXASWNHSXXVPQPQARDKPPPIALIASSCKEESASSVXPSSSSXSSSFQVLANGAXAASKPLQPLGCVPQSVSPSEQALPPHLEPAWPQGLRHNSVPGRVGPXEYLSPDMQRQRKXKRKXKEQLAILKSFFLQCQWARREDYQKLEQIXGLPRPEIIQWFGDXRYALKHGQLKWFRDNAVPGAPSFQDPAIPXPPPSXRSLNERAEXPPLPIPPPPPDIQPLERYWAAHQQLREXDIPQLSQASRLSXQQ

SEQ ID NO: 12546 - protein, 112 aa, Homo sapiens
  MOD_RES (18)..(18): Selenocysteine
  MOD_RES (23)..(23): Selenocysteine
  MOD_RES (28)..(28): Selenocysteine
  MOD_RES (49)..(50): Selenocysteine
  MOD_RES (65)..(65): Selenocysteine
MLIFLGCYRRRLEERAGXMSAEXASGPXEDQVEILEYNFNKVDKHPDSXXLCLIAAEAGLSEEEXQGSDLISRSKIWHPESSPQREGYPHDSLPCLAFDYFSLLPPQCKEMV

SEQ ID NO: 12547 - protein, 91 aa, Homo sapiens
  MOD_RES (18)..(18): Selenocysteine
  MOD_RES (23)..(23): Selenocysteine
  MOD_RES (28)..(28): Selenocysteine
  MOD_RES (49)..(50): Selenocysteine
  MOD_RES (65)..(65): Selenocysteine
  MOD_RES (90)..(90): Selenocysteine
MLIFLGCYRRRLEERAGXMSAEXASGPXEDQVEILEYNFNKVDKHPDSXXLCLIAAEAGLSEEEXQKWFKQRLAKWRRSEGLPSECRSVXD

SEQ ID NO: 12548 - protein, 94 aa, Homo sapiens
  MOD_RES (5)..(5): Selenocysteine
  MOD_RES (10)..(10): Selenocysteine
  MOD_RES (31)..(32): Selenocysteine
  MOD_RES (47)..(47): Selenocysteine
MSAEXASGPXEDQVEILEYNFNKVDKHPDSXXLCLIAAEAGLSEEEXQGSDLISRSKIWHPESSPQREGYPHDSLPCLAFDYFSLLPPQCKEMV

SEQ ID NO: 12549 - protein, 73 aa, Homo sapiens
  MOD_RES (5)..(5): Selenocysteine
  MOD_RES (10)..(10): Selenocysteine
  MOD_RES (31)..(32): Selenocysteine
  MOD_RES (47)..(47): Selenocysteine
  MOD_RES (72)..(72): Selenocysteine
MSAEXASGPXEDQVEILEYNFNKVDKHPDSXXLCLIAAEAGLSEEEXQKWFKQRLAKWRRSEGLPSECRSVXD

SEQ ID NO: 12550 - protein, 137 aa, Homo sapiens
  MOD_RES (22)..(22): Selenocysteine
  MOD_RES (35)..(36): Selenocysteine
  MOD_RES (79)..(79): Selenocysteine
  MOD_RES (82)..(82): Selenocysteine
MDNARMNSFLEYPILSSGDSGXCSARAYPSDHRIXXFQSCAVSANSCGGDDRFLVGRGVQIGSPHHHHHHHHRHPQPAXYQXSGNLGVSYSHSSCGPSYGSQNFSAPYSPYALNQEADPPRSLSLPRIGDIFSSADF

SEQ ID NO: 12551 - protein, 335 aa, Homo sapiens
  MOD_RES (22)..(22): Selenocysteine
  MOD_RES (35)..(36): Selenocysteine
  MOD_RES (79)..(79): Selenocysteine
  MOD_RES (82)..(82): Selenocysteine
  MOD_RES (175)..(175): Selenocysteine
  MOD_RES (198)..(198): Selenocysteine
  MOD_RES (204)..(204): Selenocysteine
  MOD_RES (217)..(217): Selenocysteine
  MOD_RES (234)..(234): Selenocysteine
  MOD_RES (237)..(238): Selenocysteine
  MOD_RES (242)..(242): Selenocysteine
  MOD_RES (255)..(255): Selenocysteine
  MOD_RES (271)..(271): Selenocysteine
  MOD_RES (299)..(299): Selenocysteine
  MOD_RES (327)..(327): Selenocysteine
  MOD_RES (330)..(330): Selenocysteine
  MOD_RES (332)..(333): Selenocysteine
MDNARMNSFLEYPILSSGDSGXCSARAYPSDHRIXXFQSCAVSANSCGGDDRFLVGRGVQIGSPHHHHHHHHRHPQPAXYQXSGNLGVSYSHSSCGPSYGSQNFSAPYSPYALNQEADVSGGYPQCAPAVYSGNLSSPMVQHHHHHQGYAGGAVGSPQYIHHSYGQEHQSLALAXYNNSLSPLHASHQEACRSPASEXSSPAQXFDWMKVKRNPPKXGKVGEYGYLGQPNAVRXNFXXKQLXELEKEFHFNKYLXRARRVEIAASLQLNEXQVKIWFQNRRMKQKKREKEGLLPISPAXPPGNDEKAEESSEKSSSSPCVPSPGSSXSDXLXXSH

SEQ ID NO: 12552 - protein, 94 aa, Homo sapiens
  MOD_RES (16)..(16): Selenocysteine
  MOD_RES (28)..(28): Selenocysteine
  MOD_RES (32)..(32): Selenocysteine
  MOD_RES (46)..(46): Selenocysteine
  MOD_RES (60)..(60): Selenocysteine
  MOD_RES (88)..(88): Selenocysteine
MCQGNSKGENAANWLXAKSGRKKRCPYXKHQXLELEKEFLFNMYLXRERRLEISRSVHLXDRQVKIWFQNRRMKLKKMNRENRIRELXANFNFS

SEQ ID NO: 12553 - protein, 410 aa, Homo sapiens
  MOD_RES (16)..(17): Selenocysteine
  MOD_RES (83)..(83): Selenocysteine
  MOD_RES (155)..(155): Selenocysteine
  MOD_RES (184)..(184): Selenocysteine
  MOD_RES (204)..(204): Selenocysteine
  MOD_RES (222)..(222): Selenocysteine
  MOD_RES (277)..(277): Selenocysteine
  MOD_RES (332)..(332): Selenocysteine
  MOD_RES (344)..(344): Selenocysteine
  MOD_RES (348)..(348): Selenocysteine
  MOD_RES (362)..(362): Selenocysteine
  MOD_RES (376)..(376): Selenocysteine
  MOD_RES (404)..(404): Selenocysteine
MSARKGYLLPSPNYPXXMSCSESPAANSFLVDSLISSGRGEAGGGGGGAGGGGGGGYYAHGGVYLPPAADLPYGLQSCGLFPXLGGKRNEAASPGSGGGGGGLGPGAHGYGPSPIDLWLDAPRSCRMEPPDGPPPPPQQQPPPPPQPPQPAPQAXSCSFAQNIKEESSYCLYDSADKCPKVSAXAAELAPFPRGPPPDGCALGXSSGVPVPGYFRLSQAYGXAKGYGSGGGGAQQLGAGPFPAQPPGRGFDLPPALASGSADAARKERALDSPPPPXLACGSGGGSQGDEEAHASSSAAEELSPAPSESSKASPEKDSLGNSKGENAANWLXAKSGRKKRCPYXKHQXLELEKEFLFNMYLXRERRLEISRSVHLXDRQVKIWFQNRRMKLKKMNRENRIRELXANFNFS

SEQ ID NO: 12554 - protein, 202 aa, Homo sapiens
  MOD_RES (66)..(66): Selenocysteine
  MOD_RES (114)..(114): Selenocysteine
MSCSESPAANSFLVDSLISSGRGEAGGGGGGAGGGGGGGYYAHGGVYLPPAADLPYGLQSCGLFPXLGGKRNEAASPGSGGGGGGLGPGAHGYGPSPIDLWLDAPRSCRRRAAXRGWPVPRAAPGARFRSPARASLRLGRCGPEGASPRFAAAPHAGLRQRRGLAGRRGGARVVLGRGGALPGPFREQQSLAGEGFPGQFQR

SEQ ID NO: 12555 - protein, 313 aa, Homo sapiens
  MOD_RES (19)..(19): Selenocysteine
  MOD_RES (37)..(37): Selenocysteine
  MOD_RES (44)..(44): Selenocysteine
  MOD_RES (61)..(61): Selenocysteine
  MOD_RES (71)..(71): Selenocysteine
  MOD_RES (119)..(119): Selenocysteine
  MOD_RES (129)..(129): Selenocysteine
  MOD_RES (146)..(146): Selenocysteine
  MOD_RES (150)..(150): Selenocysteine
  MOD_RES (173)..(173): Selenocysteine
  MOD_RES (175)..(175): Selenocysteine
  MOD_RES (184)..(184): Selenocysteine
  MOD_RES (189)..(189): Selenocysteine
  MOD_RES (203)..(203): Selenocysteine
  MOD_RES (229)..(229): Selenocysteine
  MOD_RES (241)..(241): Selenocysteine
  MOD_RES (249)..(249): Selenocysteine
  MOD_RES (281)..(281): Selenocysteine
MDFDERGPCSSNMYLPSCXYYVSGPDFSSLPSFLPQXPSSRPMXYSYSSNLPQVQPVREVXFREYAIEPAXKWHPRGNLAHCYSAEELVHRDCLQAPSAAGVPGDVLAKSSANVYHHPXPAVSSNFYSXVGRNGVLPQAFDQFFEXAYGXPENLASSDYPGDKSAEKGPPAAXAXSAAAAAAAXGAPAXSSSDSGGGGGCREXAAAAEEKERRRRPESSSSPESSSGHXEDKAGGSSGQRXRKKRCPYXKYQIRELEREFFFSVYINKEKRLQLSRMLNLXDRQVKIWFQNRRMKEKKINRDRLQYYSANPLL

SEQ ID NO: 12556 - protein, 283 aa, Homo sapiens
  MOD_RES (1)..(1): Any amino acid
  MOD_RES (31)..(31): Selenocysteine
  MOD_RES (41)..(41): Selenocysteine
  MOD_RES (89)..(89): Selenocysteine
  MOD_RES (99)..(99): Selenocysteine
  MOD_RES (116)..(116): Selenocysteine
  MOD_RES (120)..(120): Selenocysteine
  MOD_RES (143)..(143): Selenocysteine
  MOD_RES (145)..(145): Selenocysteine
  MOD_RES (154)..(154): Selenocysteine
  MOD_RES (159)..(159): Selenocysteine
  MOD_RES (173)..(173): Selenocysteine
  MOD_RES (199)..(199): Selenocysteine
  MOD_RES (211)..(211): Selenocysteine
  MOD_RES (219)..(219): Selenocysteine
  MOD_RES (251)..(251): Selenocysteine
XIRFKEAAAVENHVKLGYCGEPKVQPVREVXFREYAIEPAXKWHPRGNLAHCYSAEELVHRDCLQAPSAAGVPGDVLAKSSANVYHHPXPAVSSNFYSXVGRNGVLPQAFDQFFEXAYGXPENLASSDYPGDKSAEKGPPAAXAXSAAAAAAAXGAPAXSSSDSGGGGGCREXAAAAEEKERRRRPESSSSPESSSGHXEDKAGGSSGQRXRKKRCPYXKYQIRELEREFFFSVYINKEKRLQLSRMLNLXDRQVKIWFQNRRMKEKKINRDRLQYYSANPLL

SEQ ID NO: 12557 - protein, 388 aa, Homo sapiens
  MOD_RES (2)..(2): Selenocysteine
  MOD_RES (15)..(15): Selenocysteine
  MOD_RES (213)..(213): Selenocysteine
  MOD_RES (305)..(305): Selenocysteine
  MOD_RES (330)..(330): Selenocysteine
  MOD_RES (343)..(343): Selenocysteine
  MOD_RES (348)..(348): Selenocysteine
  MOD_RES (358)..(359): Selenocysteine
  MOD_RES (367)..(367): Selenocysteine
  MOD_RES (386)..(387): Selenocysteine
MXASVLLHPRWIEPXVMFLYDNGGGLVADELNKNMEGAAAAAAAAAAAAAAGAGGGGFPHPAAAAAGGNFSVAAAAAAAAAAAANQCRNLMAHPAPLAPGAASAYSSAPGEAPPSAAAAAAAAAAAAAAAAAASSSGGPGPAGPAGAEAAKQCSPCSAAAQSSSGPAALPYGYFGSGYYPCARMGPHPNAIKSCAQPASAAAAAAFADKYMDXAGPAAEEFSSRAKEFAFYHQGYAAGPYHHHQPMPGYLDMPVVPGLGGPGESRHEPLGLPMESYQPWALPNGWNGQMYCPKEQAQPPHLWKSXLPDVVSHPSDASSYRRGRKKRVPYXKVQLKELEREYAXNKFIXKDKRRRISAXXNLSERQVXIWFQNRRVKEKKVINKLKXXS

SEQ ID NO: 12558 - protein, 376 aa, Homo sapiens
  MOD_RES (23)..(23): Selenocysteine
  MOD_RES (31)..(31): Selenocysteine
  MOD_RES (39)..(39): Selenocysteine
  MOD_RES (41)..(41): Selenocysteine
  MOD_RES (46)..(46): Selenocysteine
  MOD_RES (55)..(55): Selenocysteine
  MOD_RES (107)..(107): Selenocysteine
  MOD_RES (118)..(118): Selenocysteine
  MOD_RES (122)..(122): Selenocysteine
  MOD_RES (148)..(148): Selenocysteine
  MOD_RES (151)..(151): Selenocysteine
  MOD_RES (153)..(153): Selenocysteine
  MOD_RES (183)..(183): Selenocysteine
  MOD_RES (202)..(202): Selenocysteine
  MOD_RES (231)..(231): Selenocysteine
  MOD_RES (250)..(250): Selenocysteine
  MOD_RES (278)..(278): Selenocysteine
  MOD_RES (293)..(293): Selenocysteine
  MOD_RES (300)..(300): Selenocysteine
  MOD_RES (330)..(330): Selenocysteine
  MOD_RES (363)..(363): Selenocysteine
  MOD_RES (365)..(365): Selenocysteine
  MOD_RES (367)..(368): Selenocysteine
MNYEFEREIGFINSQPSLAECLXSFPPVADXFQSSSIKXSXLSHSXLIPPPFEQXIPSLNPGSHPRHGAGGRPKPSPAGSRGSPVPAGALQPPEYPWMKEKKAAKKXALLPAAAAAAXAAAXGPACLSHKESLEIADGSGGGSRRLRXAYXNXQLLELEKEFHFNKYLCRPRRVEIAALLDLXERQVKVWFQNRRMKHKRQXQCKENQNSEGKCKSLEDSEKVEEDEEEKXLFEQALSVSGALLEREGYXFQQNALSQQQAPNGHNGDSQSFPVSPLXSNEKNLKHFQHQSPXVPNCLSXMGQNCGAGLNNDSPEALEVPSLQDFSVFSXDSCLQLSDAVSPSLPGSLDSPVDISADSLDFFXDXLXXIDLQHLNY

SEQ ID NO: 12559 - protein, 54 aa, Homo sapiens
  MOD_RES (5)..(5): Selenocysteine
MQKAXYYDSSAIYGGYPYQAANGFAYNANQQPYPASAALGADGEYHRPACSLQS

SEQ ID NO: 12560 - protein, 84 aa, Homo sapiens
  MOD_RES (5)..(5): Selenocysteine
  MOD_RES (74)..(74): Selenocysteine
MQKAXYYDSSAIYGGYPYQAANGFAYNANQQPYPASAALGADGEYHRPACSLQSPSSAGGHPKAHELSEACLRXLSAPPSQPPS

SEQ ID NO: 12561 - protein, 443 aa, Homo sapiens
  MOD_RES (5)..(5): Selenocysteine
  MOD_RES (74)..(74): Selenocysteine
  MOD_RES (115)..(115): Selenocysteine
  MOD_RES (136)..(136): Selenocysteine
  MOD_RES (150)..(150): Selenocysteine
  MOD_RES (166)..(166): Selenocysteine
  MOD_RES (170)..(170): Selenocysteine
  MOD_RES (196)..(196): Selenocysteine
  MOD_RES (199)..(199): Selenocysteine
  MOD_RES (231)..(231): Selenocysteine
  MOD_RES (257)..(257): Selenocysteine
  MOD_RES (304)..(304): Selenocysteine
  MOD_RES (330)..(330): Selenocysteine
  MOD_RES (339)..(339): Selenocysteine
  MOD_RES (357)..(357): Selenocysteine
  MOD_RES (386)..(386): Selenocysteine
  MOD_RES (420)..(420): Selenocysteine
  MOD_RES (422)..(422): Selenocysteine
  MOD_RES (425)..(425): Selenocysteine
  MOD_RES (441)..(441): Selenocysteine
MQKAXYYDSSAIYGGYPYQAANGFAYNANQQPYPASAALGADGEYHRPACSLQSPSSAGGHPKAHELSEACLRXLSAPPSQPPSLGEPPLHPPPPQAAPPAPQPPQPAPQPPAPXPAAPPPPSSASPPQNASNNPXPANAAKSPLLNSPXVAKQIFPWMKESRQNXKQKXSSSSSGESCAGDKSPPGQASSKRARXAYXSAQLVELEKEFHFNRYLCRPRRVEMANLLNLXERQIKIWFQNRRMKYKKDQKGKGMLXSSGGQSPSRSPVPPGAGGYLNSMHSLVNSVPYEPQSPPPFSKPPQGXYGLPPASYPASLPSCAPPPPPQKRYXAAGAGAGGXPDYDPHAHGLQGNGSYGXPHIQGSPVFVGGSYVEPMSNSGPALFGLXHLPHAASGAMDYGGAGPLGSGHHHGPGPGEPHPXYXDLXGHHPSQGRIQEAPKLXHL

SEQ ID NO: 12562 - protein, 320 aa, Homo sapiens
  MOD_RES (2)..(2): Selenocysteine
  MOD_RES (50)..(50): Selenocysteine
  MOD_RES (70)..(70): Selenocysteine
  MOD_RES (78)..(78): Selenocysteine
  MOD_RES (98)..(98): Selenocysteine
  MOD_RES (163)..(163): Selenocysteine
  MOD_RES (220)..(220): Selenocysteine
  MOD_RES (223)..(223): Selenocysteine
  MOD_RES (241)..(241): Selenocysteine
  MOD_RES (251)..(251): Selenocysteine
  MOD_RES (279)..(279): Selenocysteine
  MOD_RES (299)..(299): Selenocysteine
  MOD_RES (312)..(312): Selenocysteine
  MOD_RES (314)..(314): Selenocysteine
MXMSSFLINSNYIEPKFPPFEEYAQHSGSGGADGGPGGGPGYQQPPAPPXQHLPLQQPQLPHAGGGREPXASYYAPRXAREPAYPAAALYPAHGAADXAYPYGYRGGASPGRPPQPEQPPAQAKGPAHGLHASHVLQPQLPPPLQPRAVPPAAPRRCEAAPAXPGVPAGGSAPACPLLLADKSPLGLKGKEPVVYPWMKKIHVSAVNPSYNGGEPKRSRXAYXRQQVLELEKEFHFNRYLXRRRRIEIAHXLCLSERQVKIWFQNRRMKWKKDHKLPNXKMRSSNSASASAGPPGKAQXQSPHLHPHPHPSXSXPVPSSI

SEQ ID NO: 12563 - protein, 140 aa, Homo sapiens
  MOD_RES (1)..(1): Any amino acid
  MOD_RES (40)..(40): Selenocysteine
  MOD_RES (43)..(43): Selenocysteine
  MOD_RES (61)..(61): Selenocysteine
  MOD_RES (71)..(71): Selenocysteine
  MOD_RES (99)..(99): Selenocysteine
  MOD_RES (119)..(119): Selenocysteine
  MOD_RES (132)..(132): Selenocysteine
  MOD_RES (134)..(134): Selenocysteine
XKSPLGLKGKEPVVYPWMKKIHVSAVNPSYNGGEPKRSRXAYXRQQVLELEKEFHFNRYLXRRRRIEIAHXLCLSERQVKIWFQNRRMKWKKDHKLPNXKMRSSNSASASAGPPGKAQXQSPHLHPHPHPSXSXPVPSSI

SEQ ID NO: 12564 - protein, 270 aa, Homo sapiens
  MOD_RES (91)..(91): Selenocysteine
  MOD_RES (93)..(93): Selenocysteine
  MOD_RES (135)..(135): Selenocysteine
  MOD_RES (145)..(145): Selenocysteine
  MOD_RES (200)..(200): Selenocysteine
  MOD_RES (203)..(203): Selenocysteine
  MOD_RES (207)..(207): Selenocysteine
  MOD_RES (221)..(221): Selenocysteine
MSSYFVNSFCGRYPNGPDYQLHNYGDHSSVSEQFRDSASMHSGRYGYGYNGMDLSVGRSGSGHFGSGERARSYAASASAAPAEPRYSQPAXSXHSPQPDPLPCSAVAPSPGSDSHHGGKNSLSNSSGASADAGSXHISSREGVGXASGAEEDAPASSEQASAQSEPSPAPPAQPQIYPWMRKLHISHDNIGGPEGKRARXAYXRYQXLELEKEFHFNRYLXRRRRIEIAHALCLSERQIKIWFQNRRMKWKKDNKLKSMSMAAAGGAFRP

SEQ ID NO: 12565 - protein, 233 aa, Homo sapiens
  MOD_RES (9)..(9): Selenocysteine
  MOD_RES (51)..(51): Selenocysteine
  MOD_RES (53)..(53): Selenocysteine
  MOD_RES (133)..(133): Selenocysteine
  MOD_RES (161)..(161): Selenocysteine
  MOD_RES (163)..(163): Selenocysteine
  MOD_RES (167)..(167): Selenocysteine
  MOD_RES (181)..(181): Selenocysteine
  MOD_RES (195)..(195): Selenocysteine
  MOD_RES (220)..(220): Selenocysteine
MSSYFVNPXFPGSLPSGQDSFLGQLPLYQAGYDALRPFPASYGASSLPDKXYXSPCFYQQSNSVLACNRASYEYGASCFYSDKDLSGASPSGSGKQRGPGDYLHFSPEQQYKPDSSSGQGKALHDEGADRKYXSPVYPWMQRMNSCAGAVYGSHGRRGRQXYXRYQXLELEKEFHFNRYLXRRRRIEIANALCLXERQIKIWFQNRRMKWKKENKLINSXQPSGEDSEAKAGE

SEQ ID NO: 12566 - protein, 30 aa, Homo sapiens
  MOD_RES (15)..(15): Selenocysteine
  MOD_RES (27)..(27): Selenocysteine
MSSSYYVNALFSKYXAGASLFQNAEPXSCS

SEQ ID NO: 12567 - protein, 230 aa, Homo sapiens
  MOD_RES (15)..(15): Selenocysteine
  MOD_RES (27)..(27): Selenocysteine
  MOD_RES (50)..(50): Selenocysteine
  MOD_RES (104)..(104): Selenocysteine
  MOD_RES (136)..(136): Selenocysteine
  MOD_RES (138)..(138): Selenocysteine
  MOD_RES (142)..(142): Selenocysteine
  MOD_RES (156)..(156): Selenocysteine
  MOD_RES (170)..(170): Selenocysteine
  MOD_RES (195)..(195): Selenocysteine
  MOD_RES (210)..(210): Selenocysteine
MSSSYYVNALFSKYXAGASLFQNAEPXSCSFAPNSQRSGYGAGAGAFASXVPGLYNVNSPLYQSPFASGYGLGADAYGNLPCASYDQNIPGLCSDLAKGACDKXDEGALHGAAEANFRIYPWMRSSGPDRKRGRQXYXRYQXLELEKEFHFNRYLXRRRRIEIAHALCLXERQIKIWFQNRRMKWKKEHKDEGPXAAAAPEGAVPSAAAXAAADKADEEDDDEEEEDEEE

SEQ ID NO: 12568 - protein, 272 aa, Homo sapiens
  MOD_RES (3)..(4): Selenocysteine
  MOD_RES (34)..(34): Selenocysteine
  MOD_RES (44)..(44): Selenocysteine
  MOD_RES (61)..(61): Selenocysteine
  MOD_RES (115)..(115): Selenocysteine
  MOD_RES (146)..(146): Selenocysteine
  MOD_RES (149)..(149): Selenocysteine
  MOD_RES (151)..(151): Selenocysteine
  MOD_RES (155)..(155): Selenocysteine
  MOD_RES (206)..(206): Selenocysteine
  MOD_RES (214)..(214): Selenocysteine
  MOD_RES (218)..(218): Selenocysteine
  MOD_RES (232)..(232): Selenocysteine
  MOD_RES (246)..(246): Selenocysteine
MAXXGALGNYYVDSFLLGADAADELSVGRYAPGXLGQPPRQAAXLAEHPDFSPCSFQSKAXVFGASWNPVHAAGANAVPAAVYHHHHHHPYVHPQAPVAAAAPDGRYMRSWLEPXPGALSFAGLPSSRPYGIKPEPLSARRGDCPXLDXHXLSLXDYACGSPPVDREKQPSEGAFSENNAENESGGDKPPIDPNNPAANWLHARSXRKKRCPYXKHQXLELEKEFLFNMYLXRDRRYEVARLLNLXERQVKIWFQNRRMKMKKINKDRAKDE

SEQ ID NO: 12569 - protein, 106 aa, Homo sapiens
  MOD_RES (3)..(4): Selenocysteine
  MOD_RES (34)..(34): Selenocysteine
  MOD_RES (44)..(44): Selenocysteine
  MOD_RES (61)..(61): Selenocysteine
MAXXGALGNYYVDSFLLGADAADELSVGRYAPGXLGQPPRQAAXLAEHPDFSPCSFQSKAXVFGASWNPVHAAGANAVPAAVYHHHHHHPYVHPQAPVAAAAPDGS

SEQ ID NO: 12570 - protein, 301 aa, Homo sapiens
  MOD_RES (29)..(29): Selenocysteine
  MOD_RES (71)..(71): Selenocysteine
  MOD_RES (149)..(149): Selenocysteine
  MOD_RES (166)..(166): Selenocysteine
  MOD_RES (174)..(174): Selenocysteine
  MOD_RES (176)..(176): Selenocysteine
  MOD_RES (179)..(179): Selenocysteine
  MOD_RES (192)..(192): Selenocysteine
  MOD_RES (208)..(208): Selenocysteine
  MOD_RES (211)..(212): Selenocysteine
  MOD_RES (216)..(216): Selenocysteine
  MOD_RES (239)..(239): Selenocysteine
  MOD_RES (245)..(245): Selenocysteine
  MOD_RES (288)..(288): Selenocysteine
  MOD_RES (290)..(290): Selenocysteine
  MOD_RES (300)..(300): Selenocysteine
MDYNRMNSFLEYPLCNRGPSAYSAHSAPXSFPPSSAQAVDSYASEGRYGGGLSSPAFQQNSGYPAQQPPSXLGVPFPSSAPSGYAPAACSPSYGPSQYYPLGQSEGDGGYFHPSSYGAQLGGLSDGYGAGGAGPGPYPPQHPPYGNEQXASFAPAYADLLSEDKEXPCPSEPNXPXARXFDWMKVKRNPPKXAKVSEPGLGSPSGLRXNFXXRQLXELEKEFHFNKYLSRARRVEIAAXLELNEXQVKIWFQNRRMKQKKREREEGRVPPAPPGCPKEAAGDASDQSXCXSPEASPSSVXS

SEQ ID NO: 12571 - protein, 232 aa, Homo sapiens
  MOD_RES (29)..(29): Selenocysteine
  MOD_RES (71)..(71): Selenocysteine
  MOD_RES (149)..(149): Selenocysteine
  MOD_RES (166)..(166): Selenocysteine
  MOD_RES (174)..(174): Selenocysteine
  MOD_RES (176)..(176): Selenocysteine
  MOD_RES (179)..(179): Selenocysteine
  MOD_RES (192)..(192): Selenocysteine
MDYNRMNSFLEYPLCNRGPSAYSAHSAPXSFPPSSAQAVDSYASEGRYGGGLSSPAFQQNSGYPAQQPPSXLGVPFPSSAPSGYAPAACSPSYGPSQYYPLGQSEGDGGYFHPSSYGAQLGGLSDGYGAGGAGPGPYPPQHPPYGNEQXASFAPAYADLLSEDKEXPCPSEPNXPXARXFDWMKVKRNPPKXGRAQMWPPLLRGPKHLCFPCSDMSWVWAGFFSFSGSGRHR

SEQ ID NO: 12572 - protein, 284 aa, Homo sapiens
  MOD_RES (8)..(8): Selenocysteine
  MOD_RES (34)..(34): Selenocysteine
  MOD_RES (41)..(41): Selenocysteine
  MOD_RES (73)..(73): Selenocysteine
  MOD_RES (105)..(105): Selenocysteine
  MOD_RES (113)..(113): Selenocysteine
  MOD_RES (115)..(115): Selenocysteine
  MOD_RES (125)..(125): Selenocysteine
  MOD_RES (136)..(136): Selenocysteine
  MOD_RES (151)..(151): Selenocysteine
  MOD_RES (242)..(242): Selenocysteine
  MOD_RES (253)..(253): Selenocysteine
  MOD_RES (261)..(261): Selenocysteine
  MOD_RES (283)..(283): Selenocysteine
MEPGNYAXLDGAKDIEGLLGAGGGRNLVAHSPLXSHPAAPXLMPAVNYAPLDLPGSAEPPKQCHPCPGVPQGXSPAPVPYGYFGGGYYSCRVSRSSLKPCAQAAXLAAYPAEXPXAGEEYPSRPXEFAFYPGYPGXYQPMASYLDVSVVQXLGAPGEPRHDSLLPVDSYQSWALAGGWNSQMCCQGEQNPPGPFWKAAFADSSGQHPPDACAFRRGRKKRIPYSKGQLRELEREYAANKFIXKDKRRKISAAXSLSERQIXIWFQNRRVKEKKVLAKVKNSAXP

SEQ ID NO: 12573 - protein, 356 aa, Homo sapiens
  MOD_RES (23)..(23): Selenocysteine
  MOD_RES (31)..(31): Selenocysteine
  MOD_RES (34)..(34): Selenocysteine
  MOD_RES (41)..(41): Selenocysteine
  MOD_RES (52)..(52): Selenocysteine
  MOD_RES (62)..(62): Selenocysteine
  MOD_RES (112)..(112): Selenocysteine
  MOD_RES (148)..(148): Selenocysteine
  MOD_RES (151)..(151): Selenocysteine
  MOD_RES (153)..(153): Selenocysteine
  MOD_RES (183)..(183): Selenocysteine
  MOD_RES (202)..(202): Selenocysteine
  MOD_RES (345)..(345): Selenocysteine
  MOD_RES (347)..(347): Selenocysteine
MNFEFEREIGFINSQPSLAECLXSFPAVLEXFQXSSIKESXLIPPPPPFEQXFPSLQPGASXLQRPRSQKRAEDGPALPPPPPPPLPAAPPAPEFPWMKEKKSAKKPSQSAXSPSPAASAVPASGVGSPADGLGLPEAGGGGARRLRXAYXNXQLLELEKEFHFNKYLCRPRRVEIAALLDLXERQVKVWFQNRRMKHKRQXQHREPPDGEPACPGALEDICDPAEEPAASPGGPSASRAAWEACCHPPEVVPGALSADPRPLAVRLEGAGASSPGCALRGAGGLEPGPLPEDVFSGRQDSPFLPDLNFFAADSCLQLSGGLSPSLQGSLDSPVPFSEEELDFFXSXLCAIDLQFP

SEQ ID NO: 12574 - protein, 299 aa, Homo sapiens
  MOD_RES (7)..(7): Selenocysteine
  MOD_RES (17)..(17): Selenocysteine
  MOD_RES (61)..(61): Selenocysteine
  MOD_RES (64)..(64): Selenocysteine
  MOD_RES (140)..(140): Selenocysteine
  MOD_RES (151)..(151): Selenocysteine
  MOD_RES (192)..(192): Selenocysteine
  MOD_RES (211)..(211): Selenocysteine
  MOD_RES (213)..(213): Selenocysteine
  MOD_RES (274)..(274): Selenocysteine
  MOD_RES (276)..(276): Selenocysteine
  MOD_RES (297)..(297): Selenocysteine
MKESRQXSKLKNNSPGXAEGCGGGGGGGGGGGSGGSGGGGGGGGGGDKSPPGSAASKRARXAYXSAQLVELEKEFHFNRYLCRPRRVEMANLLNLSERQIKIWFQNRRMKYKKDQKAKGLASSSGGPSPAGSPPQPMQSXAGFMNALHSMXPSYESPSPPAFGKAHQNAYALPSNYQPPLKGCGAPQKYPPXPAPEYEPHVLQANGGAYGXPXMQGSPVYVGGGGYADPLPPPAGPSLYGLNHLSHHPSGNLDYNGAPPMAPSQHHGPCEPHPXYXDLSSHHAPPPQGRIQEAPKLXHL

SEQ ID NO: 12575 - protein, 297 aa, Homo sapiens
  MOD_RES (59)..(59): Selenocysteine
  MOD_RES (62)..(62): Selenocysteine
  MOD_RES (138)..(138): Selenocysteine
  MOD_RES (149)..(149): Selenocysteine
  MOD_RES (190)..(190): Selenocysteine
  MOD_RES (209)..(209): Selenocysteine
  MOD_RES (211)..(211): Selenocysteine
  MOD_RES (272)..(272): Selenocysteine
  MOD_RES (274)..(274): Selenocysteine
  MOD_RES (295)..(295): Selenocysteine
MNGICRVRARGGERRKEGCGGGGGGGGGGGSGGSGGGGGGGGGGDKSPPGSAASKRARXAYXSAQLVELEKEFHFNRYLCRPRRVEMANLLNLSERQIKIWFQNRRMKYKKDQKAKGLASSSGGPSPAGSPPQPMQSXAGFMNALHSMXPSYESPSPPAFGKAHQNAYALPSNYQPPLKGCGAPQKYPPXPAPEYEPHVLQANGGAYGXPXMQGSPVYVGGGGYADPLPPPAGPSLYGLNHLSHHPSGNLDYNGAPPMAPSQHHGPCEPHPXYXDLSSHHAPPPQGRIQEAPKLXHL

SEQ ID NO: 12576 - protein, 119 aa, Homo sapiens
  MOD_RES (52)..(52): Selenocysteine
  MOD_RES (78)..(78): Selenocysteine
MNGICRVRARGGERRKGGEICRLPLALGLDVNIYYVCLFSPRRWLRPRRPPXRSPAEQSPEAEFLRRLLIRLPPAPKXCCRPRGSALGRLVCWEPASDNRFGVLIACSSSPPWAIVGGW

SEQ ID NO: 12577 - protein, 431 aa, Homo sapiens
  MOD_RES (5)..(5): Selenocysteine
  MOD_RES (41)..(41): Selenocysteine
  MOD_RES (97)..(97): Selenocysteine
  MOD_RES (100)..(100): Selenocysteine
  MOD_RES (121)..(121): Selenocysteine
  MOD_RES (124)..(124): Selenocysteine
  MOD_RES (126)..(126): Selenocysteine
  MOD_RES (139)..(139): Selenocysteine
  MOD_RES (149)..(149): Selenocysteine
  MOD_RES (193)..(193): Selenocysteine
  MOD_RES (196)..(196): Selenocysteine
  MOD_RES (272)..(272): Selenocysteine
  MOD_RES (283)..(283): Selenocysteine
  MOD_RES (324)..(324): Selenocysteine
  MOD_RES (343)..(343): Selenocysteine
  MOD_RES (345)..(345): Selenocysteine
  MOD_RES (406)..(406): Selenocysteine
  MOD_RES (408)..(408): Selenocysteine
  MOD_RES (429)..(429): Selenocysteine
MQKAXYYDNAAAALFGGYSSYPGSNGFGFDVPPQPPFQAAXHLEGDYQRSACSLQSLGNAAPHAKSKELNGSCMRPGLAPEPLSAPPGSPPPSAAPXSAXSNSSNGGGPSKSGPPKCGPGXNSXLXKQIFPWMKESRQXSKLKNNSPGXAEGCGGGGGGGGGGGSGGSGGGGGGGGGGDKSPPGSAASKRARXAYXSAQLVELEKEFHFNRYLCRPRRVEMANLLNLSERQIKIWFQNRRMKYKKDQKAKGLASSSGGPSPAGSPPQPMQSXAGFMNALHSMXPSYESPSPPAFGKAHQNAYALPSNYQPPLKGCGAPQKYPPXPAPEYEPHVLQANGGAYGXPXMQGSPVYVGGGGYADPLPPPAGPSLYGLNHLSHHPSGNLDYNGAPPMAPSQHHGPCEPHPXYXDLSSHHAPPPQGRIQEAPKLXHL

SEQ ID NO: 12578 - protein, 90 aa, Homo sapiens
  MOD_RES (24)..(24): Selenocysteine
  MOD_RES (27)..(27): Selenocysteine
  MOD_RES (48)..(48): Selenocysteine
  MOD_RES (51)..(51): Selenocysteine
  MOD_RES (53)..(53): Selenocysteine
  MOD_RES (66)..(66): Selenocysteine
  MOD_RES (76)..(76): Selenocysteine
MRPGLAPEPLSAPPGSPPPSAAPXSAXSNSSNGGGPSKSGPPKCGPGXNSXLXKQIFPWMKESRQXSKLKNNSPGXAEGCGGGGGGGGGG

SEQ ID NO: 12579 - protein, 358 aa, Homo sapiens
  MOD_RES (24)..(24): Selenocysteine
  MOD_RES (27)..(27): Selenocysteine
  MOD_RES (48)..(48): Selenocysteine
  MOD_RES (51)..(51): Selenocysteine
  MOD_RES (53)..(53): Selenocysteine
  MOD_RES (66)..(66): Selenocysteine
  MOD_RES (76)..(76): Selenocysteine
  MOD_RES (120)..(120): Selenocysteine
  MOD_RES (123)..(123): Selenocysteine
  MOD_RES (199)..(199): Selenocysteine
  MOD_RES (210)..(210): Selenocysteine
  MOD_RES (251)..(251): Selenocysteine
  MOD_RES (270)..(270): Selenocysteine
  MOD_RES (272)..(272): Selenocysteine
  MOD_RES (333)..(333): Selenocysteine
  MOD_RES (335)..(335): Selenocysteine
  MOD_RES (356)..(356): Selenocysteine
MRPGLAPEPLSAPPGSPPPSAAPXSAXSNSSNGGGPSKSGPPKCGPGXNSXLXKQIFPWMKESRQXSKLKNNSPGXAEGCGGGGGGGGGGGSGGSGGGGGGGGGGDKSPPGSAASKRARXAYXSAQLVELEKEFHFNRYLCRPRRVEMANLLNLSERQIKIWFQNRRMKYKKDQKAKGLASSSGGPSPAGSPPQPMQSXAGFMNALHSMXPSYESPSPPAFGKAHQNAYALPSNYQPPLKGCGAPQKYPPXPAPEYEPHVLQANGGAYGXPXMQGSPVYVGGGGYADPLPPPAGPSLYGLNHLSHHPSGNLDYNGAPPMAPSQHHGPCEPHPXYXDLSSHHAPPPQGRIQEAPKLXHL

SEQ ID NO: 12580 - protein, 251 aa, Homo sapiens
  MOD_RES (61)..(61): Selenocysteine
  MOD_RES (152)..(152): Selenocysteine
  MOD_RES (167)..(167): Selenocysteine
  MOD_RES (170)..(170): Selenocysteine
  MOD_RES (188)..(188): Selenocysteine
  MOD_RES (226)..(226): Selenocysteine
MAMSSFLINSNYVDPKFPPCEEYSQSDYLPSDHSPGYYAGGQRRESSFQPEAGFGRRAACXVQRYAACRDPGPPPPPPPPPPPPPPPGLSPRAPAPPPAGALLPEPGQRCEAVSSSPPPPPCAQNPLHPSPSHSACKEPVVYPWMRKVHVSXVNPNYAGGEPKRSRXAYXRQQVLELEKEFHYNRYLXRRRRVEIAHALCLSERQIKIWFQNRRMKWKKDHKLPNXKIRSGGAAGSAGGPPGRPNGGPRAL

SEQ ID NO: 12581 - protein, 269 aa, Homo sapiens
  MOD_RES (42)..(42): Selenocysteine
  MOD_RES (103)..(103): Selenocysteine
  MOD_RES (122)..(122): Selenocysteine
  MOD_RES (131)..(131): Selenocysteine
  MOD_RES (164)..(164): Selenocysteine
  MOD_RES (166)..(166): Selenocysteine
  MOD_RES (173)..(173): Selenocysteine
  MOD_RES (190)..(190): Selenocysteine
  MOD_RES (199)..(199): Selenocysteine
  MOD_RES (202)..(202): Selenocysteine
  MOD_RES (206)..(206): Selenocysteine
  MOD_RES (220)..(220): Selenocysteine
  MOD_RES (262)..(262): Selenocysteine
MSSYFVNSFSGRYPNGPDYQLLNYGSGSSLSGSYRDPAAMHXGSYGYNYNGMDLSVNRSSASSSHFGAVGESSRAFPAPAQEPRFRQAASSCSLSSPESLPCXNGDSHGAKPSASSPSDQAXSASSSANFXEIDEASASSEPEEAASQLSSPSLARAQPEPMAXSXAAPEGQXPQIFPWMRKLHISHDMXGPDGKRARXAYXRYQXLELEKEFHFNRYLXRRRRIEIAHALCLSERQIKIWFQNRRMKWKKDNKLKSMSLAXAGSAFQP

SEQ ID NO: 12582 - protein, 224 aa, Homo sapiens
  MOD_RES (9)..(9): Selenocysteine
  MOD_RES (13)..(13): Selenocysteine
  MOD_RES (55)..(55): Selenocysteine
  MOD_RES (118)..(118): Selenocysteine
  MOD_RES (125)..(125): Selenocysteine
  MOD_RES (152)..(152): Selenocysteine
  MOD_RES (154)..(154): Selenocysteine
  MOD_RES (158)..(158): Selenocysteine
  MOD_RES (172)..(172): Selenocysteine
  MOD_RES (186)..(186): Selenocysteine
MSSYFVNSXFPVXLASGQESFLGQLPLYSSGYADPLRHYPAPYGPGPGQDKGFAXSSYYPPAGGGYGRAAPCDYGPAPAFYREKESACALSGADEQPPFHPEPRKSDCAQDKSVFGEXEEQKCSXPVYPWMQRMNSCNSSSFGPSGRRGRQXYXRYQXLELEKEFHYNRYLXRRRRIEIAHALCLXERQIKIWFQNRRMKWKKESKLLSASQLSAEEEEEKQAE

SEQ ID NO: 12583 - protein, 217 aa, Homo sapiens
  MOD_RES (9)..(9): Selenocysteine
  MOD_RES (23)..(23): Selenocysteine
  MOD_RES (30)..(30): Selenocysteine
  MOD_RES (135)..(135): Selenocysteine
  MOD_RES (143)..(143): Selenocysteine
  MOD_RES (145)..(145): Selenocysteine
  MOD_RES (149)..(149): Selenocysteine
  MOD_RES (163)..(163): Selenocysteine
  MOD_RES (173)..(173): Selenocysteine
  MOD_RES (177)..(177): Selenocysteine
  MOD_RES (198)..(198): Selenocysteine
  MOD_RES (203)..(204): Selenocysteine
MSSLYYANXLFSKYPASSSVFAXGAFPEQXSCAFASNPQRPGYGAGSGASFAASMQGLYPGGGGMAGQSAAGVYAAGYGLEPSSFNMHCAPFEQNLSGVCPGDSAKAAGAKEQRDSDLAAESNFRIYPWMRSSGXDRKRGRQXYXRYQXLELEKEFHYNRYLXRRRRIEIAHXLCLXERQIKIWFQNRRMKWKKENKXAGPGXXGQDRAEAEEEEEE

SEQ ID NO: 12584 - protein, 243 aa, Homo sapiens
  MOD_RES (15)..(15): Selenocysteine
  MOD_RES (37)..(37): Selenocysteine
  MOD_RES (66)..(66): Selenocysteine
  MOD_RES (132)..(132): Selenocysteine
  MOD_RES (152)..(152): Selenocysteine
  MOD_RES (158)..(158): Selenocysteine
  MOD_RES (172)..(172): Selenocysteine
  MOD_RES (186)..(186): Selenocysteine
MSSYFVNSLFSKYKXGESLRPNYYDCGFAQDLGGRPXVVYGPSSGGSFQHPSQIQEFYHGPSSLSXAPYQQNPCAVACHGDPGNFYGYDPLQRQSLFGAQDPDLVQYADCKLAAASGLGEEAEGSEQSPSPXQLFPWMRPQAAAGRRRGRQXYSRYQXLELEKEFLFNPYLXRKRRIEVSHALGLXERQVKIWFQNRRMKWKKENNKDKFPSSKCEQEELEKQKLERAPEAADEGDAQKGDKK

SEQ ID NO: 12585 - protein, 242 aa, Homo sapiens
  MOD_RES (15)..(15): Selenocysteine
  MOD_RES (37)..(37): Selenocysteine
  MOD_RES (66)..(66): Selenocysteine
  MOD_RES (132)..(132): Selenocysteine
  MOD_RES (151)..(151): Selenocysteine
  MOD_RES (157)..(157): Selenocysteine
  MOD_RES (171)..(171): Selenocysteine
  MOD_RES (185)..(185): Selenocysteine
MSSYFVNSLFSKYKXGESLRPNYYDCGFAQDLGGRPXVVYGPSSGGSFQHPSQIQEFYHGPSSLSXAPYQQNPCAVACHGDPGNFYGYDPLQRQSLFGAQDPDLVQYADCKLAAASGLGEEAEGSEQSPSPXQLFPWMRPQAAGRRRGRQXYSRYQXLELEKEFLFNPYLXRKRRIEVSHALGLXERQVKIWFQNRRMKWKKENNKDKFPSSKCEQEELEKQKLERAPEAADEGDAQKGDKK

SEQ ID NO: 12586 - protein, 128 aa, Homo sapiens
  MOD_RES (1)..(1): Any amino acid
  MOD_RES (7)..(7): Selenocysteine
  MOD_RES (21)..(21): Selenocysteine
  MOD_RES (35)..(35): Selenocysteine
  MOD_RES (112)..(112): Selenocysteine
  MOD_RES (126)..(126): Selenocysteine
XYSRYQXLELEKEFLFNPYLXRKRRIEVSHALGLXERQVKIWFQNRRMKWKKENNKDKFPSSKCEQEELEKQKLERAPEAADEGDAQKGDKKNGSVQGPWAGSCALGAPRKXCSISARISGAPREXES

SEQ ID NO: 12587 - protein, 250 aa, Homo sapiens
  MOD_RES (6)..(6): Selenocysteine
  MOD_RES (97)..(97): Selenocysteine
  MOD_RES (133)..(133): Selenocysteine
  MOD_RES (140)..(140): Selenocysteine
  MOD_RES (173)..(173): Selenocysteine
  MOD_RES (193)..(193): Selenocysteine
  MOD_RES (197)..(197): Selenocysteine
  MOD_RES (211)..(211): Selenocysteine
MSISGXLSSYYVDSIISHESEDAPPAKFPSGQYASSRQPGHAEHLEFPSCSFQPKAPVFGASWAPLSPHASGSLPSVYHPYIQPQGVPPAESRYLRXWLEPAPRGEAAPGQGQAAVKAEPLLGAPGELLKQGXPEYSLEXSAGREAVLSNQRPGYGDNKICEGSEDKERPDQXNPSANWLHARSSRKKRCPYXKYQXLELEKEFLFNMYLXRDRRHEVARLLNLSERQVKIWFQNRRMKMKKMNKEQGKE

SEQ ID NO: 12588 - protein, 342 aa, Homo sapiens
  MOD_RES (2)..(2): Selenocysteine
  MOD_RES (8)..(8): Selenocysteine
  MOD_RES (68)..(68): Selenocysteine
  MOD_RES (161)..(161): Selenocysteine
  MOD_RES (201)..(201): Selenocysteine
  MOD_RES (208)..(208): Selenocysteine
  MOD_RES (216)..(216): Selenocysteine
  MOD_RES (244)..(244): Selenocysteine
  MOD_RES (258)..(259): Selenocysteine
  MOD_RES (264)..(264): Selenocysteine
  MOD_RES (276)..(276): Selenocysteine
  MOD_RES (280)..(280): Selenocysteine
  MOD_RES (294)..(294): Selenocysteine
  MOD_RES (304)..(304): Selenocysteine
  MOD_RES (308)..(308): Selenocysteine
  MOD_RES (336)..(336): Selenocysteine
  MOD_RES (342)..(342): Selenocysteine
MXCPRNVXPNSYAEPLAAPGGGERYSRSAGMYMQSGSDFNCGVMRGCGLAPSLSKRDEGSSPSLALNXYPSYLSQLDSWGDPKAAYRLEQPVGRPLSSCSYPPSVKEENVCCMYSAEKRAKSGPEAALYSHPLPESCLGEHEVPVPSYYRASPSYSALDKXPHCSGANDFEAPFEQRASLNPRAEHLESPQLGGKVSFPEXPKSDSQXPSPNEIKXEQSLAGPKGSPSESEKERAKAADSSPDXSDNEAKEEIKAENXXGNWLXAKSGRKKRCPYXKHQXLELEKEFLFNMYLXRERRLEISKXINLXDRQVKIWFQNRRMKLKKMNRENRIRELXSNFNFX

SEQ ID NO: 12589 - protein, 127 aa, Homo sapiens
  MOD_RES (49)..(49): Selenocysteine
  MOD_RES (89)..(89): Selenocysteine
  MOD_RES (96)..(96): Selenocysteine
  MOD_RES (104)..(104): Selenocysteine
MYSAEKRAKSGPEAALYSHPLPESCLGEHEVPVPSYYRASPSYSALDKXPHCSGANDFEAPFEQRASLNPRAEHLESPQLGGKVSFPEXPKSDSQXPSPNEIKXEQSLAGPKGSPSESEKERAKAAD

SEQ ID NO: 12590 - protein, 304 aa, Homo sapiens
  MOD_RES (38)..(38): Selenocysteine
  MOD_RES (46)..(46): Selenocysteine
  MOD_RES (109)..(109): Selenocysteine
  MOD_RES (111)..(111): Selenocysteine
  MOD_RES (133)..(133): Selenocysteine
  MOD_RES (206)..(206): Selenocysteine
  MOD_RES (232)..(232): Selenocysteine
  MOD_RES (272)..(272): Selenocysteine
MFNSVNLGNFCSPSRKERGADFGERGSCASNLYLPSCXYYMPEFSXVSSFLPQAPSRQISYPYSAQVPPVREVSYGLEPSGKWHHRNSYSSCYAAADELMHRECLPPSXVXEILMKNEGSYGGHHHPSAPHAXPAGFYSSVNKNSVLPQAFDRFFDNAYCGGGDPPAEPPCSGKGEAKGEPEAPPASGLASRAEAGAEAEAEEENXNPSSSGSAHSVAKEPAKGAAPNAPRXRKKRCPYSKFQIRELEREFFFNVYINKEKRLQLSRMLNLXDRQVKIWFQNRRMKEKKLSRDRLQYFSGNPLL

SEQ ID NO: 12591 - protein, 378 aa, Homo sapiens
  MOD_RES (38)..(38): Selenocysteine
  MOD_RES (46)..(46): Selenocysteine
  MOD_RES (109)..(109): Selenocysteine
  MOD_RES (111)..(111): Selenocysteine
  MOD_RES (133)..(133): Selenocysteine
  MOD_RES (206)..(206): Selenocysteine
  MOD_RES (248)..(248): Selenocysteine
  MOD_RES (276)..(276): Selenocysteine
  MOD_RES (291)..(291): Selenocysteine
  MOD_RES (307)..(307): Selenocysteine
  MOD_RES (332)..(332): Selenocysteine
  MOD_RES (359)..(359): Selenocysteine
  MOD_RES (362)..(362): Selenocysteine
  MOD_RES (366)..(366): Selenocysteine
MFNSVNLGNFCSPSRKERGADFGERGSCASNLYLPSCXYYMPEFSXVSSFLPQAPSRQISYPYSAQVPPVREVSYGLEPSGKWHHRNSYSSCYAAADELMHRECLPPSXVXEILMKNEGSYGGHHHPSAPHAXPAGFYSSVNKNSVLPQAFDRFFDNAYCGGGDPPAEPPCSGKGEAKGEPEAPPASGLASRAEAGAEAEAEEENXNPSSSGSAHSVAKEPAKGAAPSRRPPHPQEALPLFEIPDPGXGARVFLQRVYQQREAAAAVPDAEPDGPXSENLVSEQKDERKEXEQRPAAVFLGKSSAVXCRPGPFGGGGRGKLFYFIFIFYFLXRLLSAGGKLDCGQGWPPPLWPALHSGXSWXLYLXLAVGQGPGLERG

SEQ ID NO: 12592 - protein, 282 aa, Homo sapiens
  MOD_RES (20)..(20): Selenocysteine
  MOD_RES (23)..(23): Selenocysteine
  MOD_RES (82)..(82): Selenocysteine
  MOD_RES (240)..(240): Selenocysteine
MGEHNLLNPGFVGPLVNIHXGDXFYFPNFRASGAQLPGLPSLSYPRRDNVCSLSWPSAEPCNGYPQPYLGSPVSLNPPFGRXCELARVEDGKGYYREPCAEGGGGGLKREERGRDPGAGPGAALLPLEPSGPPALGFKYDYAAGGGGGDGGGGAGPPHDPPSCQSLESDSSSSLLNEGNKGAGAGDPGSLVSPLNPGGGLSASGAPWYPINSRSRKKRKPYSKLQLAELEGEFLVNEFIXRQRRRELSDRLNLSDQQVKIWFQNRRMKKKRLLLREQALSFF

SEQ ID NO: 12593 - protein, 330 aa, Homo sapiens
  MOD_RES (2)..(3): Selenocysteine
  MOD_RES (39)..(39): Selenocysteine
  MOD_RES (94)..(94): Selenocysteine
  MOD_RES (113)..(113): Selenocysteine
  MOD_RES (118)..(118): Selenocysteine
  MOD_RES (268)..(268): Selenocysteine
  MOD_RES (286)..(286): Selenocysteine
  MOD_RES (296)..(297): Selenocysteine
  MOD_RES (305)..(305): Selenocysteine
  MOD_RES (330)..(330): Selenocysteine
MXXSLLLHPRWPESLMYVYEDSAAESGIGGGGGGGGGGXGGAGGGCSGASPGKAPSMDGLGSSCPASHCRDLLPHPVLGRPPAPLGAPQGAVYXDIPAPEAARQCAPPPAPPXSSSAXLGYGYPFGGSYYGCRLSHNVNLQQKPCAYHPGDKYPEPSGALPGDDLSSRAKEFAFYPSFASSYQAMPGYLDVSVVPGISGHPEPRHDALIPVEGYQHWALSNGWDSQVYCSKEQSQSAHLWKSPFPDVVPLQPEVSSYRRGRKKRVPYXKVQLKELEKEYAASKFIXKEKRRRISAXXNLSERQVXIWFQNRRVKEKKVVSKSKAPHLHSX

SEQ ID NO: 12594 - protein, 264 aa, Homo sapiens
  MOD_RES (40)..(40): Selenocysteine
  MOD_RES (70)..(70): Selenocysteine
  MOD_RES (146)..(146): Selenocysteine
  MOD_RES (161)..(161): Selenocysteine
  MOD_RES (164)..(164): Selenocysteine
  MOD_RES (182)..(182): Selenocysteine
  MOD_RES (220)..(220): Selenocysteine
  MOD_RES (234)..(234): Selenocysteine
  MOD_RES (239)..(239): Selenocysteine
  MOD_RES (242)..(242): Selenocysteine
  MOD_RES (251)..(251): Selenocysteine
  MOD_RES (262)..(262): Selenocysteine
MIMSSYLMDSNYIDPKFPPCEEYSQNSYIPEHSPEYYGRXRESGFQHHHQELYPPPPPRPSYPERQYSCXSLQGPGNSRGHGPAQAGHHHPEKSQSLCEPAPLSGASASPSPAPPACSQPAPDHPSSAASKQPIVYPWMKKIHVSXVNPNYNGGEPKRSRXAYXRQQVLELEKEFHYNRYLXRRRRIEIAHSLCLSERQIKIWFQNRRMKWKKDHRLPNXKVRSAPPAGAAPSXLSAAXPGXSEDHSQSAXPPEQQRAEDIXRL

SEQ ID NO: 12595 - protein, 222 aa, Homo sapiens
  MOD_RES (23)..(23): Selenocysteine
  MOD_RES (48)..(48): Selenocysteine
  MOD_RES (125)..(125): Selenocysteine
  MOD_RES (145)..(145): Selenocysteine
  MOD_RES (153)..(153): Selenocysteine
  MOD_RES (160)..(160): Selenocysteine
  MOD_RES (163)..(163): Selenocysteine
  MOD_RES (167)..(167): Selenocysteine
  MOD_RES (181)..(181): Selenocysteine
MSSYVANSFYKQSPNIPAYNMQXCGNYGSASEVQASRYCYGGLDLSIXFPPPAPSNSLHGVDMAANPRAHPDRPACSAAAAPGHAPGRDEAAPLNPGMYSQKAARPALEERAKSSGEIKEEQAQXGQPAGLSQPPAPPQIYPWMXKLHMSHEXDGKRSRXSYXRYQXLELEKEFHFNRYLXRRRRIEIANNLCLNERQIKIWFQNRRMKWKKDSKMKSKEAL

SEQ ID NO: 12596 - protein, 52 aa, Homo sapiens
  MOD_RES (9)..(9): Selenocysteine
  MOD_RES (14)..(14): Selenocysteine
  MOD_RES (16)..(16): Selenocysteine
  MOD_RES (29)..(29): Selenocysteine
MLSNCRQNXLGHNXQXSIAQDFSSEQGRXAPQDQKASIQIYPWMQRMNSHSG

SEQ ID NO: 12597 - protein, 153 aa, Homo sapiens
  MOD_RES (9)..(9): Selenocysteine
  MOD_RES (14)..(14): Selenocysteine
  MOD_RES (16)..(16): Selenocysteine
  MOD_RES (29)..(29): Selenocysteine
  MOD_RES (71)..(71): Selenocysteine
  MOD_RES (85)..(85): Selenocysteine
  MOD_RES (99)..(99): Selenocysteine
  MOD_RES (121)..(121): Selenocysteine
  MOD_RES (123)..(123): Selenocysteine
  MOD_RES (132)..(132): Selenocysteine
  MOD_RES (146)..(146): Selenocysteine
MLSNCRQNXLGHNXQXSIAQDFSSEQGRXAPQDQKASIQIYPWMQRMNSHSGVGYGADRRRGRQIYSRYQXLELEKEFHFNRYLXRRRRIEIANALCLXERQIKIWFQNRRMKWKKESNLXSXLSGGGGGAXADSLGGKEEKREEXEEEKQKE

SEQ ID NO: 12598 - protein, 71 aa, Homo sapiens
  MOD_RES (9)..(9): Selenocysteine
  MOD_RES (14)..(14): Selenocysteine
  MOD_RES (16)..(16): Selenocysteine
  MOD_RES (29)..(29): Selenocysteine
MLSNCRQNXLGHNXQXSIAQDFSSEQGRXAPQDQKASIQIYPWMQRMNSHSVCFVPGSLGVGYGADRRRGR

SEQ ID NO: 12599 - protein, 235 aa, Homo sapiens
  MOD_RES (6)..(6): Selenocysteine
  MOD_RES (29)..(29): Selenocysteine
  MOD_RES (39)..(39): Selenocysteine
  MOD_RES (52)..(52): Selenocysteine
  MOD_RES (91)..(91): Selenocysteine
  MOD_RES (96)..(96): Selenocysteine
  MOD_RES (98)..(98): Selenocysteine
  MOD_RES (111)..(111): Selenocysteine
  MOD_RES (153)..(153): Selenocysteine
  MOD_RES (167)..(167): Selenocysteine
  MOD_RES (181)..(181): Selenocysteine
  MOD_RES (203)..(203): Selenocysteine
  MOD_RES (205)..(205): Selenocysteine
  MOD_RES (214)..(214): Selenocysteine
  MOD_RES (228)..(228): Selenocysteine
MNSYFXNPSLSCHLAGGQDVLPNVALNSXAYDPVRHFSXYGAAVAQNRIYSXPFYSPQENVVFSSSRGPYDYGSNSFYQEKDMLSNCRQNXLGHNXQXSIAQDFSSEQGRXAPQDQKASIQIYPWMQRMNSHSGVGYGADRRRGRQIYSRYQXLELEKEFHFNRYLXRRRRIEIANALCLXERQIKIWFQNRRMKWKKESNLXSXLSGGGGGAXADSLGGKEEKREEXEEEKQKE

SEQ ID NO: 12600 - protein, 242 aa, Homo sapiens
  MOD_RES (64)..(64): Selenocysteine
  MOD_RES (120)..(120): Selenocysteine
  MOD_RES (155)..(155): Selenocysteine
  MOD_RES (161)..(161): Selenocysteine
  MOD_RES (175)..(175): Selenocysteine
  MOD_RES (189)..(189): Selenocysteine
MSSYFVNPLFSKYKAGESLEPAYYDCRFPQSVGRSHALVYGPGGSAPGFQHASHHVQDFFHHGXSGISNSGYQQNPCSLSCHGDASKFYGYEALPRQSLYGAQQEASVVQYPDCKSSANXNSSEGQGHLNQNSSPSLMFPWMRPHAPGRRSGRQXYSRYQXLELEKEFLFNPYLXRKRRIEVSHALGLXERQVKIWFQNRRMKWKKENNKDKLPGARDEEKVEEEGNEEEEKEEEEKEENKD

SEQ ID NO: 12601 - protein, 260 aa, Homo sapiens
  MOD_RES (4)..(4): Selenocysteine
  MOD_RES (31)..(31): Selenocysteine
  MOD_RES (64)..(64): Selenocysteine
  MOD_RES (90)..(90): Selenocysteine
  MOD_RES (95)..(95): Selenocysteine
  MOD_RES (156)..(156): Selenocysteine
  MOD_RES (192)..(192): Selenocysteine
  MOD_RES (200)..(200): Selenocysteine
  MOD_RES (204)..(204): Selenocysteine
  MOD_RES (218)..(218): Selenocysteine
  MOD_RES (232)..(232): Selenocysteine
  MOD_RES (255)..(255): Selenocysteine
MSAXGPISNYYVDSLISHDNEDLLASRFPAXGAHPAAARPSGLVPDCSDFPSCSFAPKPAVFSXSWAPVPSQSSVVYHPYGPQPHLGADXRYMRXWLEPLSGAVSFPSFPAGGRHYALKPDAYPGRRADCGPGEGRSYPDYMYGSPGELRDRAPQXLPSPEADALAGSKHKEEKADLDPSNPVANWIHARSXRKKRCPYXKYQXLELEKEFLFNMYLXRDRRYEVARVLNLXERQVKIWFQNRRMKMKKMNKEKXDKEQS

SEQ ID NO: 12602 - protein, 328 aa, Homo sapiens
  MOD_RES (86)..(86): Selenocysteine
  MOD_RES (136)..(136): Selenocysteine
  MOD_RES (180)..(180): Selenocysteine
  MOD_RES (187)..(187): Selenocysteine
  MOD_RES (204)..(204): Selenocysteine
  MOD_RES (234)..(234): Selenocysteine
  MOD_RES (238)..(238): Selenocysteine
  MOD_RES (242)..(242): Selenocysteine
  MOD_RES (255)..(255): Selenocysteine
  MOD_RES (271)..(271): Selenocysteine
  MOD_RES (295)..(295): Selenocysteine
  MOD_RES (309)..(310): Selenocysteine
  MOD_RES (312)..(312): Selenocysteine
MSSYLEYVSCSSSGGVGGDVLSLAPKFCRSDARPVALQPAFPLGNGDGAFVSCLPLAAARPSPSPPAAPARPSVPPPAAPQYAQCXLEGAYEPGAAPAAAAGGADYGFLGSGPAYDFPGVLGRAADDGGSHVHYAXSAVFSGGGSFLLSGQVDYAAFGEPGPFPACLKASADGHPGAFQXASPAPGXYPKSVSPASGLPAAFSXFEWMKVKRNASKKGKLAEYGAASPSSAIRXNFSXKQLXELEKEFHFNKYLXRARRIEIANCLHLNDXQVKIWFQNRRMKQKKREREGLLAXAIPVAPLQLPLSGXXPXKFIKNPGSPSQSQEPS

SEQ ID NO: 12603 - protein, 340 aa, Homo sapiens
  MOD_RES (12)..(12): Selenocysteine
  MOD_RES (45)..(45): Selenocysteine
  MOD_RES (50)..(50): Selenocysteine
  MOD_RES (82)..(82): Selenocysteine
  MOD_RES (95)..(95): Selenocysteine
  MOD_RES (100)..(100): Selenocysteine
  MOD_RES (104)..(105): Selenocysteine
  MOD_RES (157)..(157): Selenocysteine
  MOD_RES (160)..(160): Selenocysteine
  MOD_RES (163)..(163): Selenocysteine
  MOD_RES (175)..(175): Selenocysteine
  MOD_RES (211)..(211): Selenocysteine
  MOD_RES (255)..(255): Selenocysteine
  MOD_RES (257)..(257): Selenocysteine
  MOD_RES (262)..(262): Selenocysteine
  MOD_RES (274)..(274): Selenocysteine
  MOD_RES (278)..(278): Selenocysteine
  MOD_RES (292)..(292): Selenocysteine
  MOD_RES (306)..(306): Selenocysteine
  MOD_RES (334)..(334): Selenocysteine
  MOD_RES (338)..(338): Selenocysteine
MSFPNSSPAANXFLVDSLISACRSDSFYSSSASMYMPPPSADMGXYGMQXCGLLPSLAKREVNHQNMGMNVHPYIPQVDSWXDPNRSCRIEQPVXQQVPXCSFXXNIKEESNCCMYSDKRNKLISAEVPSYQRLVPESCPVENPEVPVPGYFRLSQXYAXGKXQEYNNSPEGSSXVMLQLNPRGAAKPQLSAAQLQMEKKMNEPVSGQEPXKVSQVESPEAKGGLPEERSCLAEVSVSSPEVQEKESKEEIKSDXPXSNWLXAKSGRKKRCPYXKHQXLELEKEFLFNMYLXRERRLEISKSVNLXDRQVKIWFQNRRMKLKKMSRENRIRELXANLXFS

SEQ ID NO: 12604 - protein, 338 aa, Homo sapiens
  MOD_RES (44)..(44): Selenocysteine
  MOD_RES (215)..(215): Selenocysteine
  MOD_RES (226)..(226): Selenocysteine
  MOD_RES (229)..(229): Selenocysteine
  MOD_RES (274)..(274): Selenocysteine
  MOD_RES (306)..(306): Selenocysteine
  MOD_RES (333)..(333): Selenocysteine
MNDFDECGQSAASMYLPGCAYYVAPSDFASKPSFLSQPSSCQMXFPYSSNLAPHVQPVREVAFRDYGLERAKWPYRGGGGGGSAGGGSSGGGPGGGGGGAGGYAPYYAAAAAAAAAAAAAEEAAMQRELLPPAGRRPDVLFKAPEPVCAAPGPPHGPAGAASNFYSAVGRNGILPQGFDQFYEAAPGPPFAGPQPPPPPAPPQPEGAADKGDPRXGAGGGGGSPCXKAXPGSEPKGAAEGSGGDGEGPPGEAGAEKSSSAVAPQRSRKKRCPYXKYQIRELEREFFFNVYINKEKRLQLSRMLNLXDRQVKIWFQNRRMKEKKLNRDRLQYFXGNPLF

SEQ ID NO: 12605 - protein, 161 aa, Homo sapiens
  MOD_RES (31)..(31): Selenocysteine
  MOD_RES (49)..(49): Selenocysteine
  MOD_RES (52)..(52): Selenocysteine
  MOD_RES (97)..(97): Selenocysteine
  MOD_RES (129)..(129): Selenocysteine
  MOD_RES (156)..(156): Selenocysteine
MYLPGCAYYVAPSDFASKPSFLSQPSSCQMXFPYSSNLDRGGGGGSPCXKAXPGSEPKGAAEGSGGDGEGPPGEAGAEKSSSAVAPQRSRKKRCPYXKYQIRELEREFFFNVYINKEKRLQLSRMLNLXDRQVKIWFQNRRMKEKKLNRDRLQYFXGNPLF

SEQ ID NO: 12606 - protein, 246 aa, Homo sapiens
  MOD_RES (54)..(54): Selenocysteine
  MOD_RES (67)..(67): Selenocysteine
  MOD_RES (89)..(89): Selenocysteine
  MOD_RES (115)..(115): Selenocysteine
  MOD_RES (146)..(146): Selenocysteine
  MOD_RES (150)..(151): Selenocysteine
  MOD_RES (166)..(166): Selenocysteine
  MOD_RES (175)..(175): Selenocysteine
  MOD_RES (217)..(217): Selenocysteine
  MOD_RES (241)..(241): Selenocysteine
MCERSLYRAGYVGSLLNLQSPDSFYFSNLRPNGGQLAALPPISYPRGALPWAAXPASCAPAQPAGAXAFGGFSQPYLAGSGPLGLQPPXAKDGPEEQAKFYAPEAAAGPEERGRXRPSFAPESSLAPAVAALKAAKYDYAGVGRAXPGSXXLLQGAPCAPGFKDDXKGPLNLNMXVQAAGVASCLRPSLPDGKRCPCSPGRPAVGGGPGEGPQEAEXLHEAADCGVGERIPRQRIHQQAEXQGIVQ

SEQ ID NO: 12607 - protein, 270 aa, Homo sapiens
  MOD_RES (54)..(54): Selenocysteine
  MOD_RES (67)..(67): Selenocysteine
  MOD_RES (89)..(89): Selenocysteine
  MOD_RES (115)..(115): Selenocysteine
  MOD_RES (146)..(146): Selenocysteine
  MOD_RES (150)..(151): Selenocysteine
  MOD_RES (166)..(166): Selenocysteine
  MOD_RES (175)..(175): Selenocysteine
  MOD_RES (210)..(210): Selenocysteine
MCERSLYRAGYVGSLLNLQSPDSFYFSNLRPNGGQLAALPPISYPRGALPWAAXPASCAPAQPAGAXAFGGFSQPYLAGSGPLGLQPPXAKDGPEEQAKFYAPEAAAGPEERGRXRPSFAPESSLAPAVAALKAAKYDYAGVGRAXPGSXXLLQGAPCAPGFKDDXKGPLNLNMXVQAAGVASCLRPSLPDGLPWGAAPGRARKKRKPYXKQQIAELENEFLVNEFINRQKRKELSNRLNLSDQQVKIWFQNRRMKKKRVVLREQALALY

SEQ ID NO: 12608 - protein, 343 aa, Homo sapiens
  MOD_RES (52)..(52): Selenocysteine
  MOD_RES (79)..(79): Selenocysteine
  MOD_RES (83)..(83): Selenocysteine
  MOD_RES (111)..(111): Selenocysteine
  MOD_RES (197)..(197): Selenocysteine
  MOD_RES (212)..(212): Selenocysteine
  MOD_RES (233)..(233): Selenocysteine
  MOD_RES (245)..(245): Selenocysteine
  MOD_RES (284)..(284): Selenocysteine
  MOD_RES (313)..(313): Selenocysteine
  MOD_RES (321)..(321): Selenocysteine
  MOD_RES (341)..(341): Selenocysteine
MSRAGSWDMDGLRADGGGAGGAPASSSSSSVAAAAASGQCRGFLSAPVFAGXHSGRAAAAAAAAAAAAAAASGFAYPGXSERXGSSSSSSSSAVVAARPEAPPAKECPAPXPAAAAAAPPSAPALGYGYHFGNGYYSCRMSHGVGLQQNALKSSPHASLGGFPVEKYMDVSGLASSSVPANEVPARAKEVSFYQGYXSPYQHVPGYIDMVSXFGSGEPRHEAYISMEGYQSWXLANGWNSQVYCXKDQPQGSHFWKSSFPGDVALNQPDMCVYRRGRKKRVPYXKLQLKELENEYAINKFINKDKRRRISAAXNLSERQVXIWFQNRRVKDKKIVSKLKDXVS

SEQ ID NO: 12609 - protein, 100 aa, Homo sapiens
  MOD_RES (16)..(16): Selenocysteine
  MOD_RES (37)..(38): Selenocysteine
  MOD_RES (40)..(40): Selenocysteine
  MOD_RES (45)..(45): Selenocysteine
  MOD_RES (61)..(61): Selenocysteine
  MOD_RES (95)..(95): Selenocysteine
MLFEQGQQALELPECXMQKAAYYENPGLFGGYGYSKXXDXYGYSXPHQPYPPPAAASSLDXDYPGSACSIQSSAPLRAPAHKGAELNGSCMRPGXGNSQG

SEQ ID NO: 12610 - protein, 432 aa, Homo sapiens
  MOD_RES (16)..(16): Selenocysteine
  MOD_RES (37)..(38): Selenocysteine
  MOD_RES (40)..(40): Selenocysteine
  MOD_RES (45)..(45): Selenocysteine
  MOD_RES (61)..(61): Selenocysteine
  MOD_RES (95)..(95): Selenocysteine
  MOD_RES (125)..(125): Selenocysteine
  MOD_RES (132)..(132): Selenocysteine
  MOD_RES (155)..(155): Selenocysteine
  MOD_RES (179)..(179): Selenocysteine
  MOD_RES (199)..(199): Selenocysteine
  MOD_RES (202)..(202): Selenocysteine
  MOD_RES (234)..(234): Selenocysteine
  MOD_RES (316)..(316): Selenocysteine
  MOD_RES (409)..(409): Selenocysteine
  MOD_RES (411)..(411): Selenocysteine
  MOD_RES (430)..(430): Selenocysteine
MLFEQGQQALELPECXMQKAAYYENPGLFGGYGYSKXXDXYGYSXPHQPYPPPAAASSLDXDYPGSACSIQSSAPLRAPAHKGAELNGSCMRPGXGNSQGGGGGSQPPGLNSEQQPPQPPPPPPXLPPSSPXNPGGGVPAKKPKGGPNASSSSAXISKQIFPWMKESRQNSKQKNSCAXAGESCEDKSPPGPASKRVRXAYXSAQLVELEKEFHFNRYLCRPRRVEMANLLNLXERQIKIWFQNRRMKYKKDQKAKGILHSPASQSPERSPPLGGAAGHVAYSGQLPPVPGLAYDAPSPPAFAKSQPNMYGLAAYXAPLSSCLPQQKRYAAPEFEPHPMASNGGGFASANLQGSPVYVGGNFVESMAPASGPVFNLGHLSHPSSASVDYSCAAQIPGNHHHGPCDPHPXYXDLSAHHSSQGRLPEAPKLXHL

SEQ ID NO: 12611 - protein, 255 aa, Homo sapiens
  MOD_RES (125)..(125): Selenocysteine
  MOD_RES (150)..(150): Selenocysteine
  MOD_RES (159)..(159): Selenocysteine
  MOD_RES (162)..(162): Selenocysteine
  MOD_RES (180)..(180): Selenocysteine
  MOD_RES (190)..(190): Selenocysteine
  MOD_RES (218)..(218): Selenocysteine
  MOD_RES (250)..(250): Selenocysteine
  MOD_RES (253)..(254): Selenocysteine
MVMSSYMVNSKYVDPKFPPCEEYLQGGYLGEQGADYYGGGAQGADFQPPGLYPRPDFGEQPFGGSGPGPGSALPARGHGQEPGGPGGHYAAPGEPCPAPPAPPPAPLPGARAYSQSDPKQPPSGXALKQPAVVYPWMKKVHVNSVNPNYXGGEPKRSRXAYXRQQVLELEKEFHFNRYLXRRRRIEIAHXLCLSERQIKIWFQNRRMKWKKDHKLPNXKGRSSSSSSSSSCSSSVAPSQHLQPMAKDHHXDLXXL

SEQ ID NO: 12612 - protein, 106 aa, Homo sapiens
  MOD_RES (19)..(19): Selenocysteine
  MOD_RES (25)..(25): Selenocysteine
  MOD_RES (39)..(39): Selenocysteine
  MOD_RES (53)..(53): Selenocysteine
  MOD_RES (89)..(89): Selenocysteine
  MOD_RES (105)..(105): Selenocysteine
MFPWMRPQAAPGRRRGRQXYSRFQXLELEKEFLFNPYLXRKRRIEVSHALALXERQVKIWFQNRRMKWKKENNKDKFPVSRQEVKDGEXKKEAQELEEDRAEGLXN

SEQ ID NO: 12613 - protein, 186 aa, Homo sapiens
  MOD_RES (30)..(30): Selenocysteine
  MOD_RES (45)..(46): Selenocysteine
  MOD_RES (99)..(99): Selenocysteine
  MOD_RES (105)..(105): Selenocysteine
  MOD_RES (119)..(119): Selenocysteine
  MOD_RES (133)..(133): Selenocysteine
  MOD_RES (169)..(169): Selenocysteine
  MOD_RES (185)..(185): Selenocysteine
MSSYFVNPLYSKYKAAAAAAAAAGEAINPXYYDCHFAPERQPIFXXQQEAELVQYPDCKSSSGNIGEDPDHLNQSSSPSQMFPWMRPQAAPGRRRGRQXYSRFQXLELEKEFLFNPYLXRKRRIEVSHALALXERQVKIWFQNRRMKWKKENNKDKFPVSRQEVKDGEXKKEAQELEEDRAEGLXN

SEQ ID NO: 12614 - protein, 290 aa, Homo sapiens
  MOD_RES (30)..(30): Selenocysteine
  MOD_RES (81)..(81): Selenocysteine
  MOD_RES (149)..(150): Selenocysteine
  MOD_RES (203)..(203): Selenocysteine
  MOD_RES (209)..(209): Selenocysteine
  MOD_RES (223)..(223): Selenocysteine
  MOD_RES (237)..(237): Selenocysteine
  MOD_RES (273)..(273): Selenocysteine
  MOD_RES (289)..(289): Selenocysteine
MSSYFVNPLYSKYKAAAAAAAAAGEAINPXYYDCHFAPEVGGRHAAAAAALQLYGNSAAGFPHAPPQAHAHPHPSPPPSGXGCGGREGRGQEYFHPGGGSPAAAYQAAPPPPPHPPPPPPPPPCGGIACHGEPAKFYGYDNLQRQPIFXXQQEAELVQYPDCKSSSGNIGEDPDHLNQSSSPSQMFPWMRPQAAPGRRRGRQXYSRFQXLELEKEFLFNPYLXRKRRIEVSHALALXERQVKIWFQNRRMKWKKENNKDKFPVSRQEVKDGEXKKEAQELEEDRAEGLXN

SEQ ID NO: 12615 - protein, 289 aa, Homo sapiens
  MOD_RES (30)..(30): Selenocysteine
  MOD_RES (81)..(81): Selenocysteine
  MOD_RES (149)..(150): Selenocysteine
  MOD_RES (202)..(202): Selenocysteine
  MOD_RES (208)..(208): Selenocysteine
  MOD_RES (222)..(222): Selenocysteine
  MOD_RES (236)..(236): Selenocysteine
  MOD_RES (272)..(272): Selenocysteine
  MOD_RES (288)..(288): Selenocysteine
MSSYFVNPLYSKYKAAAAAAAAAGEAINPXYYDCHFAPEVGGRHAAAAAALQLYGNSAAGFPHAPPQAHAHPHPSPPPSGXGCGGREGRGQEYFHPGGGSPAAAYQAAPPPPPHPPPPPPPPPCGGIACHGEPAKFYGYDNLQRQPIFXXQQEAELVQYPDCKSSSGNIGEDPDHLNQSSSPSQMFPWMRPQAPGRRRGRQXYSRFQXLELEKEFLFNPYLXRKRRIEVSHALALXERQVKIWFQNRRMKWKKENNKDKFPVSRQEVKDGEXKKEAQELEEDRAEGLXN

SEQ ID NO: 12616 - protein, 352 aa, Homo sapiens
  MOD_RES (16)..(16): Selenocysteine
  MOD_RES (59)..(59): Selenocysteine
  MOD_RES (164)..(164): Selenocysteine
  MOD_RES (172)..(172): Selenocysteine
  MOD_RES (176)..(177): Selenocysteine
  MOD_RES (182)..(182): Selenocysteine
  MOD_RES (191)..(191): Selenocysteine
  MOD_RES (221)..(221): Selenocysteine
  MOD_RES (224)..(224): Selenocysteine
  MOD_RES (234)..(234): Selenocysteine
  MOD_RES (236)..(236): Selenocysteine
  MOD_RES (285)..(285): Selenocysteine
  MOD_RES (293)..(293): Selenocysteine
  MOD_RES (297)..(297): Selenocysteine
  MOD_RES (311)..(311): Selenocysteine
  MOD_RES (325)..(325): Selenocysteine
MLGGSAGRLKMSSSGXLSNYYVDSLIGHEGDEVFAARFGPPGPGAQGRPAGVADGPAAXAAEFASCSFAPRSAVFSASWSAVPSQPPAAAAMSGLYHPYVPPPPLAASASEPGRYVRSWMEPLPGFPGGAGGGGGGGGGGPGRGPSPGPSGPANGRHYGIKPEXRAAPAPAXAASXXSSSSXSLSSSSKRXECSVARESQGSSGPEFSCNSFLQEKAAAAXGGXGPGAGIGAAXGXGGSSEPSACSDHPIPGCSLKEEEKQHSQPQQQQLDPNNPAANWIHARSXRKKRCPYXKYQXLELEKEFLFNMYLXRDRRYEVARILNLXERQVKIWFQNRRMKMKKMSKEKCPKGD

SEQ ID NO: 12617 - protein, 193 aa, Homo sapiens
  MOD_RES (20)..(20): Selenocysteine
  MOD_RES (40)..(40): Selenocysteine
  MOD_RES (71)..(71): Selenocysteine
  MOD_RES (74)..(74): Selenocysteine
  MOD_RES (79)..(79): Selenocysteine
  MOD_RES (92)..(92): Selenocysteine
  MOD_RES (144)..(144): Selenocysteine
  MOD_RES (149)..(149): Selenocysteine
  MOD_RES (158)..(158): Selenocysteine
MGKQNSKLRPEMLQDLRENXEFSELELQEWYKGFLKDCPXGILNVDEFKKIYANFFPYGDASKFAEHVFRXFDXNSDGXIDFREFIIALSVXSRGRLEQKLMWAFSMYDLDGNGYISREEMLEIVQAIYKMVSSVMKMPEDESXPEKRXEKIFRQMDXNNDGKLSLEEFIRGAKSDPSIVRLLQCDPSSASQF

SEQ ID NO: 12618 - protein, 119 aa, Homo sapiens
  MOD_RES (4)..(4): Selenocysteine
  MOD_RES (20)..(20): Selenocysteine
  MOD_RES (62)..(62): Selenocysteine
  MOD_RES (74)..(74): Selenocysteine
  MOD_RES (95)..(95): Selenocysteine
MGKXNSKLAPEVLEDLVQNXEFSEQELKQWYKGFLKDCPSGILNLEEFQQLYIKAIYKMVGXVIMMRMNQDGLXPQQRVDKIFKKMDQDKDDQIXLEEFKEAAKSDPSIVLLLQCDMQK

SEQ ID NO: 12619 - protein, 191 aa, Homo sapiens
  MOD_RES (4)..(4): Selenocysteine
  MOD_RES (20)..(20): Selenocysteine
  MOD_RES (71)..(71): Selenocysteine
  MOD_RES (79)..(79): Selenocysteine
  MOD_RES (92)..(92): Selenocysteine
  MOD_RES (117)..(117): Selenocysteine
  MOD_RES (134)..(134): Selenocysteine
  MOD_RES (146)..(146): Selenocysteine
  MOD_RES (167)..(167): Selenocysteine
MGKXNSKLAPEVLEDLVQNXEFSEQELKQWYKGFLKDCPSGILNLEEFQQLYIKFFPYGDASKFAQHAFRXFDKNGDGXIDFREFICALSVXSRGSFEQKLNWAFEMYDLDGDGRIXRLEMLEIIEAIYKMVGXVIMMRMNQDGLXPQQRVDKIFKKMDQDKDDQIXLEEFKEAAKSDPSIVLLLQCDMQK

SEQ ID NO: 12620 - protein, 37 aa, Homo sapiens
  MOD_RES (11)..(11): Selenocysteine
  MOD_RES (32)..(32): Selenocysteine
MHVNGKVALVXGAAQGIGRAFAEALLLKGAKXLLEKL

SEQ ID NO: 12621 - protein, 143 aa, Homo sapiens
  MOD_RES (11)..(11): Selenocysteine
  MOD_RES (58)..(58): Selenocysteine
  MOD_RES (74)..(74): Selenocysteine
  MOD_RES (103)..(103): Selenocysteine
  MOD_RES (115)..(115): Selenocysteine
MHVNGKVALVXGAAQGIGRAFAEALLLKGAKVALVDWNLEAGVQCKAALDEQFEPQKXLFIQCDVADQQQLRDXFRKVVDHFGRLDILVNNAGVNNEKNWEKXLQINLVSVISGXYLGLDYMSKQNGGEGGIIINMSSLAAHH

SEQ ID NO: 12622 - protein, 176 aa, Homo sapiens
  MOD_RES (11)..(11): Selenocysteine
  MOD_RES (58)..(58): Selenocysteine
  MOD_RES (74)..(74): Selenocysteine
  MOD_RES (103)..(103): Selenocysteine
  MOD_RES (115)..(115): Selenocysteine
  MOD_RES (151)..(151): Selenocysteine
  MOD_RES (170)..(170): Selenocysteine
MHVNGKVALVXGAAQGIGRAFAEALLLKGAKVALVDWNLEAGVQCKAALDEQFEPQKXLFIQCDVADQQQLRDXFRKVVDHFGRLDILVNNAGVNNEKNWEKXLQINLVSVISGXYLGLDYMSKQNGGEGGIIINMSSLAGISSVCRHLKXWLAEVLPSSAGSSQGYFRXAGFLFL

SEQ ID NO: 12623 - protein, 266 aa, Homo sapiens
  MOD_RES (11)..(11): Selenocysteine
  MOD_RES (58)..(58): Selenocysteine
  MOD_RES (74)..(74): Selenocysteine
  MOD_RES (103)..(103): Selenocysteine
  MOD_RES (115)..(115): Selenocysteine
  MOD_RES (162)..(162): Selenocysteine
  MOD_RES (188)..(188): Selenocysteine
  MOD_RES (231)..(231): Selenocysteine
  MOD_RES (246)..(247): Selenocysteine
  MOD_RES (258)..(259): Selenocysteine
  MOD_RES (265)..(265): Selenocysteine
MHVNGKVALVXGAAQGIGRAFAEALLLKGAKVALVDWNLEAGVQCKAALDEQFEPQKXLFIQCDVADQQQLRDXFRKVVDHFGRLDILVNNAGVNNEKNWEKXLQINLVSVISGXYLGLDYMSKQNGGEGGIIINMSSLAGLMPVAQQPVYCASKHGIVGFXRSAALAANLMNSGVRLNAICPGFVNXAILESIEKEENMGQYIEYKDHIKDMIKYYGILDPPLIANGLIXLIEDDALNGAIMKIXXSKGIHFQDYDXXPFQAKXQ

SEQ ID NO: 12624 - protein, 178 aa, Homo sapiens
  MOD_RES (11)..(11): Selenocysteine
  MOD_RES (58)..(58): Selenocysteine
  MOD_RES (74)..(74): Selenocysteine
  MOD_RES (103)..(103): Selenocysteine
  MOD_RES (115)..(115): Selenocysteine
  MOD_RES (162)..(162): Selenocysteine
  MOD_RES (168)..(168): Selenocysteine
  MOD_RES (177)..(177): Selenocysteine
MHVNGKVALVXGAAQGIGRAFAEALLLKGAKVALVDWNLEAGVQCKAALDEQFEPQKXLFIQCDVADQQQLRDXFRKVVDHFGRLDILVNNAGVNNEKNWEKXLQINLVSVISGXYLGLDYMSKQNGGEGGIIINMSSLAGLMPVAQQPVYCASKHGIVGFXRSAAPXIDCQWIDNXH

SEQ ID NO: 12625 - protein, 87 aa, Homo sapiens
  MOD_RES (11)..(11): Selenocysteine
  MOD_RES (58)..(58): Selenocysteine
MHVNGKVALVXGAAQGIGRAFAEALLLKGAKVALVDWNLEAGVQCKAALDEQFEPQKXLFIQCDVADQQQLRGFCYQWNLSWFGLHE

SEQ ID NO: 12626 - protein, 198 aa, Homo sapiens
  MOD_RES (11)..(11): Selenocysteine
  MOD_RES (58)..(58): Selenocysteine
  MOD_RES (94)..(94): Selenocysteine
  MOD_RES (120)..(120): Selenocysteine
  MOD_RES (163)..(163): Selenocysteine
  MOD_RES (178)..(179): Selenocysteine
  MOD_RES (190)..(191): Selenocysteine
  MOD_RES (197)..(197): Selenocysteine
MHVNGKVALVXGAAQGIGRAFAEALLLKGAKVALVDWNLEAGVQCKAALDEQFEPQKXLFIQCDVADQQQLRGLMPVAQQPVYCASKHGIVGFXRSAALAANLMNSGVRLNAICPGFVNXAILESIEKEENMGQYIEYKDHIKDMIKYYGILDPPLIANGLIXLIEDDALNGAIMKIXXSKGIHFQDYDXXPFQAKXQ

SEQ ID NO: 12627 - protein, 97 aa, Homo sapiens
  MOD_RES (41)..(41): Selenocysteine
  MOD_RES (67)..(67): Selenocysteine
MSKQNGGEGGIIINMSSLAGLMPVAQQPVYCASKHGIVGFXRSAALAANLMNSGVRLNAICPGFVNXAILESIEKEENMGQYIEYKDHIKDMIKYYG

SEQ ID NO: 12628 - protein, 99 aa, Homo sapiens
  MOD_RES (41)..(41): Selenocysteine
  MOD_RES (67)..(67): Selenocysteine
MSKQNGGEGGIIINMSSLAGLMPVAQQPVYCASKHGIVGFXRSAALAANLMNSGVRLNAICPGFVNXAILESIEKEENMGQYIEYKDHIKDMIKYYGIL

SEQ ID NO: 12629 - protein, 145 aa, Homo sapiens
  MOD_RES (41)..(41): Selenocysteine
  MOD_RES (67)..(67): Selenocysteine
  MOD_RES (110)..(110): Selenocysteine
  MOD_RES (125)..(126): Selenocysteine
  MOD_RES (137)..(138): Selenocysteine
  MOD_RES (144)..(144): Selenocysteine
MSKQNGGEGGIIINMSSLAGLMPVAQQPVYCASKHGIVGFXRSAALAANLMNSGVRLNAICPGFVNXAILESIEKEENMGQYIEYKDHIKDMIKYYGILDPPLIANGLIXLIEDDALNGAIMKIXXSKGIHFQDYDXXPFQAKXQ

SEQ ID NO: 12630 - protein, 199 aa, Homo sapiens
  MOD_RES (7)..(7): Selenocysteine
  MOD_RES (45)..(45): Selenocysteine
  MOD_RES (60)..(60): Selenocysteine
  MOD_RES (72)..(72): Selenocysteine
  MOD_RES (75)..(75): Selenocysteine
  MOD_RES (81)..(81): Selenocysteine
  MOD_RES (94)..(94): Selenocysteine
  MOD_RES (121)..(121): Selenocysteine
  MOD_RES (133)..(133): Selenocysteine
  MOD_RES (147)..(147): Selenocysteine
  MOD_RES (158)..(159): Selenocysteine
  MOD_RES (176)..(176): Selenocysteine
  MOD_RES (197)..(197): Selenocysteine
MPNYKLXYFNMRGRAEIIRYIFAYLDIQYEDHRIEQADWPEIKSXLPFGKIPILEVDGLXLHQSLAIARYLXKNXDLAGNXEMEQCHVDAIVDXLDDFMSCFPWAEKKQDVKEQMFNELLXYNAPHLMQDLDXYLGGREWLIGNSVXWADFYWEICSXXLLVFKPDLLDNHPRLVXLRKKVQAIPAVANWIKRRPQXKL

SEQ ID NO: 12631 - protein, 80 aa, Homo sapiens
  MOD_RES (9)..(9): Selenocysteine
  MOD_RES (22)..(22): Selenocysteine
  MOD_RES (25)..(25): Selenocysteine
  MOD_RES (30)..(30): Selenocysteine
  MOD_RES (69)..(69): Selenocysteine
  MOD_RES (72)..(72): Selenocysteine
MAQKEGGRXVPCCSRPKVAALXAGXLLLLXAIGAASWAIVAVLLRSDQEPLYPVQVSSADARLMVFDKXEGXWRLLCSSR

SEQ ID NO: 12632 - protein, 417 aa, Homo sapiens
  MOD_RES (9)..(9): Selenocysteine
  MOD_RES (22)..(22): Selenocysteine
  MOD_RES (25)..(25): Selenocysteine
  MOD_RES (30)..(30): Selenocysteine
  MOD_RES (69)..(69): Selenocysteine
  MOD_RES (72)..(72): Selenocysteine
  MOD_RES (100)..(100): Selenocysteine
  MOD_RES (108)..(108): Selenocysteine
  MOD_RES (114)..(114): Selenocysteine
  MOD_RES (128)..(128): Selenocysteine
  MOD_RES (169)..(169): Selenocysteine
  MOD_RES (200)..(200): Selenocysteine
  MOD_RES (270)..(270): Selenocysteine
  MOD_RES (292)..(292): Selenocysteine
  MOD_RES (294)..(294): Selenocysteine
  MOD_RES (299)..(299): Selenocysteine
  MOD_RES (366)..(366): Selenocysteine
  MOD_RES (379)..(379): Selenocysteine
  MOD_RES (391)..(391): Selenocysteine
  MOD_RES (406)..(406): Selenocysteine
  MOD_RES (415)..(415): Selenocysteine
MAQKEGGRXVPCCSRPKVAALXAGXLLLLXAIGAASWAIVAVLLRSDQEPLYPVQVSSADARLMVFDKXEGXWRLLCSSRSNARVAGLSCEEMGFLRALXHSELDVRXAGANGXSGFFCVDEGRLPHXQRLLEVISVCDCPRGRFLAAICQDCGRRKLPVDRIVGGRDXSLGRWPWQVSLRYDGAHLCGGSLLSGDWVLXAAHCFPERNRVLSRWRVFAGAVAQASPHGLQLGVQAVVYHGGYLPFRDPNSEENSNDIALVHLSSPLPLXEYIQPVCLPAAGQALVDGKICXVXGWGNXQYYGQQAGVLQEARVPIISNDVCNGADFYGNQIKPKMFCAGYPEGGIDACQGDSGGPFVCEDSISRXPRWRLCGIVSWGXGCALAQKPGVYXKVSDFREWIFQAIKXHSEASGMVXQL

SEQ ID NO: 12633 - protein, 259 aa, Homo sapiens
  MOD_RES (21)..(21): Selenocysteine
  MOD_RES (24)..(24): Selenocysteine
  MOD_RES (112)..(112): Selenocysteine
  MOD_RES (134)..(134): Selenocysteine
  MOD_RES (136)..(136): Selenocysteine
  MOD_RES (141)..(141): Selenocysteine
  MOD_RES (208)..(208): Selenocysteine
  MOD_RES (221)..(221): Selenocysteine
  MOD_RES (233)..(233): Selenocysteine
  MOD_RES (248)..(248): Selenocysteine
  MOD_RES (257)..(257): Selenocysteine
MAQKEVQVSSADARLMVFDKXEGXWRLLCSSRSNARVAGLSCEEMGFLRRNRVLSRWRVFAGAVAQASPHGLQLGVQAVVYHGGYLPFRDPNSEENSNDIALVHLSSPLPLXEYIQPVCLPAAGQALVDGKICXVXGWGNXQYYGQQAGVLQEARVPIISNDVCNGADFYGNQIKPKMFCAGYPEGGIDACQGDSGGPFVCEDSISRXPRWRLCGIVSWGXGCALAQKPGVYXKVSDFREWIFQAIKXHSEASGMVXQL

SEQ ID NO: 12634 - protein, 485 aa, Homo sapiens
  MOD_RES (45)..(45): Selenocysteine
  MOD_RES (60)..(60): Selenocysteine
  MOD_RES (67)..(67): Selenocysteine
  MOD_RES (82)..(82): Selenocysteine
  MOD_RES (97)..(97): Selenocysteine
  MOD_RES (99)..(99): Selenocysteine
  MOD_RES (111)..(111): Selenocysteine
  MOD_RES (164)..(164): Selenocysteine
  MOD_RES (199)..(199): Selenocysteine
  MOD_RES (217)..(217): Selenocysteine
  MOD_RES (236)..(236): Selenocysteine
  MOD_RES (246)..(246): Selenocysteine
  MOD_RES (248)..(248): Selenocysteine
  MOD_RES (275)..(275): Selenocysteine
  MOD_RES (286)..(286): Selenocysteine
  MOD_RES (300)..(300): Selenocysteine
  MOD_RES (358)..(358): Selenocysteine
  MOD_RES (380)..(380): Selenocysteine
  MOD_RES (382)..(382): Selenocysteine
  MOD_RES (393)..(393): Selenocysteine
  MOD_RES (403)..(403): Selenocysteine
  MOD_RES (441)..(441): Selenocysteine
  MOD_RES (449)..(449): Selenocysteine
MLLRSKPALPPPLMLLLLGPLGPLSPGALPRPAQAQDVVDLDFFXQEPLHLVSPSFLSVXIDANLAXDPRFLILLGSPKLRXLARGLSPAYLRFGGXKXDFLIFDPKKESXFEERSYWQSQVNQDICKYGSIPPDVEEKLRLEWPYQEQLLLREHYQKKFKNSXYSKPNSFLKKADIFINGSQLGEDFIQLHKLLRKSXFKNAKLYGPDVGQPRRKXAKMLKSFLKAGGEVIDSVXWHHYYLNGRXAXKEDFLNPDVLDIFISSVQKVFQVVESXRPGKKVWLGEXSSAYGGGAPLLSDXFAAGFMWLDKLGLSARMGIEVVMRQVFFGAGNYHLVDENFDPLPDYWLSLLFKKLVGXKVLMASVQGSKRRKLRVYLHCXNXDNPRYKEGDLXLYAINLHNVXKYLRLPYPFSNKQVDKYLLRPLGPHGLLSKSVQLNGLXLKMVDDQXLPPLMEKPLRPGSSLGLPAFSYSFFVIRNAKVAACI

SEQ ID NO: 12635 - protein, 226 aa, Homo sapiens
  MOD_RES (45)..(45): Selenocysteine
  MOD_RES (60)..(60): Selenocysteine
  MOD_RES (67)..(67): Selenocysteine
  MOD_RES (82)..(82): Selenocysteine
  MOD_RES (97)..(97): Selenocysteine
  MOD_RES (99)..(99): Selenocysteine
  MOD_RES (111)..(111): Selenocysteine
  MOD_RES (164)..(164): Selenocysteine
  MOD_RES (175)..(175): Selenocysteine
  MOD_RES (194)..(194): Selenocysteine
MLLRSKPALPPPLMLLLLGPLGPLSPGALPRPAQAQDVVDLDFFXQEPLHLVSPSFLSVXIDANLAXDPRFLILLGSPKLRXLARGLSPAYLRFGGXKXDFLIFDPKKESXFEERSYWQSQVNQDICKYGSIPPDVEEKLRLEWPYQEQLLLREHYQKKFKNSXYSRSSVDVLYXFANCSGLDLIFGLNALLRXADLQWNSSNAQLLLDYCSSKGYNISWELGNAS

SEQ ID NO: 12636 - protein, 380 aa, Homo sapiens
  MOD_RES (45)..(45): Selenocysteine
  MOD_RES (60)..(60): Selenocysteine
  MOD_RES (67)..(67): Selenocysteine
  MOD_RES (82)..(82): Selenocysteine
  MOD_RES (97)..(97): Selenocysteine
  MOD_RES (99)..(99): Selenocysteine
  MOD_RES (111)..(111): Selenocysteine
  MOD_RES (164)..(164): Selenocysteine
  MOD_RES (175)..(175): Selenocysteine
  MOD_RES (194)..(194): Selenocysteine
  MOD_RES (257)..(257): Selenocysteine
  MOD_RES (275)..(275): Selenocysteine
  MOD_RES (294)..(294): Selenocysteine
  MOD_RES (304)..(304): Selenocysteine
  MOD_RES (306)..(306): Selenocysteine
  MOD_RES (333)..(333): Selenocysteine
  MOD_RES (344)..(344): Selenocysteine
  MOD_RES (358)..(358): Selenocysteine
MLLRSKPALPPPLMLLLLGPLGPLSPGALPRPAQAQDVVDLDFFXQEPLHLVSPSFLSVXIDANLAXDPRFLILLGSPKLRXLARGLSPAYLRFGGXKXDFLIFDPKKESXFEERSYWQSQVNQDICKYGSIPPDVEEKLRLEWPYQEQLLLREHYQKKFKNSXYSRSSVDVLYXFANCSGLDLIFGLNALLRXADLQWNSSNAQLLLDYCSSKGYNISWELGNEPNSFLKKADIFINGSQLGEDFIQLHKLLRKSXFKNAKLYGPDVGQPRRKXAKMLKSFLKAGGEVIDSVXWHHYYLNGRXAXKEDFLNPDVLDIFISSVQKVFQVVESXRPGKKVWLGEXSSAYGGGAPLLSDXFAAGFMIIGYLFCSRNWWAPRC

SEQ ID NO: 12637 - protein, 469 aa, Homo sapiens
  MOD_RES (45)..(45): Selenocysteine
  MOD_RES (60)..(60): Selenocysteine
  MOD_RES (67)..(67): Selenocysteine
  MOD_RES (82)..(82): Selenocysteine
  MOD_RES (97)..(97): Selenocysteine
  MOD_RES (99)..(99): Selenocysteine
  MOD_RES (111)..(111): Selenocysteine
  MOD_RES (164)..(164): Selenocysteine
  MOD_RES (175)..(175): Selenocysteine
  MOD_RES (194)..(194): Selenocysteine
  MOD_RES (257)..(257): Selenocysteine
  MOD_RES (275)..(275): Selenocysteine
  MOD_RES (294)..(294): Selenocysteine
  MOD_RES (304)..(304): Selenocysteine
  MOD_RES (306)..(306): Selenocysteine
  MOD_RES (342)..(342): Selenocysteine
  MOD_RES (364)..(364): Selenocysteine
  MOD_RES (366)..(366): Selenocysteine
  MOD_RES (377)..(377): Selenocysteine
  MOD_RES (387)..(387): Selenocysteine
  MOD_RES (425)..(425): Selenocysteine
  MOD_RES (433)..(433): Selenocysteine
MLLRSKPALPPPLMLLLLGPLGPLSPGALPRPAQAQDVVDLDFFXQEPLHLVSPSFLSVXIDANLAXDPRFLILLGSPKLRXLARGLSPAYLRFGGXKXDFLIFDPKKESXFEERSYWQSQVNQDICKYGSIPPDVEEKLRLEWPYQEQLLLREHYQKKFKNSXYSRSSVDVLYXFANCSGLDLIFGLNALLRXADLQWNSSNAQLLLDYCSSKGYNISWELGNEPNSFLKKADIFINGSQLGEDFIQLHKLLRKSXFKNAKLYGPDVGQPRRKXAKMLKSFLKAGGEVIDSVXWHHYYLNGRXAXKEDFLNPDVLDIFISSVQKVFQDYWLSLLFKKLVGXKVLMASVQGSKRRKLRVYLHCXNXDNPRYKEGDLXLYAINLHNVXKYLRLPYPFSNKQVDKYLLRPLGPHGLLSKSVQLNGLXLKMVDDQXLPPLMEKPLRPGSSLGLPAFSYSFFVIRNAKVAACI

SEQ ID NO: 12638 - protein, 543 aa, Homo sapiens
  MOD_RES (45)..(45): Selenocysteine
  MOD_RES (60)..(60): Selenocysteine
  MOD_RES (67)..(67): Selenocysteine
  MOD_RES (82)..(82): Selenocysteine
  MOD_RES (97)..(97): Selenocysteine
  MOD_RES (99)..(99): Selenocysteine
  MOD_RES (111)..(111): Selenocysteine
  MOD_RES (164)..(164): Selenocysteine
  MOD_RES (175)..(175): Selenocysteine
  MOD_RES (194)..(194): Selenocysteine
  MOD_RES (257)..(257): Selenocysteine
  MOD_RES (275)..(275): Selenocysteine
  MOD_RES (294)..(294): Selenocysteine
  MOD_RES (304)..(304): Selenocysteine
  MOD_RES (306)..(306): Selenocysteine
  MOD_RES (333)..(333): Selenocysteine
  MOD_RES (344)..(344): Selenocysteine
  MOD_RES (358)..(358): Selenocysteine
  MOD_RES (416)..(416): Selenocysteine
  MOD_RES (438)..(438): Selenocysteine
  MOD_RES (440)..(440): Selenocysteine
  MOD_RES (451)..(451): Selenocysteine
  MOD_RES (461)..(461): Selenocysteine
  MOD_RES (499)..(499): Selenocysteine
  MOD_RES (507)..(507): Selenocysteine
MLLRSKPALPPPLMLLLLGPLGPLSPGALPRPAQAQDVVDLDFFXQEPLHLVSPSFLSVXIDANLAXDPRFLILLGSPKLRXLARGLSPAYLRFGGXKXDFLIFDPKKESXFEERSYWQSQVNQDICKYGSIPPDVEEKLRLEWPYQEQLLLREHYQKKFKNSXYSRSSVDVLYXFANCSGLDLIFGLNALLRXADLQWNSSNAQLLLDYCSSKGYNISWELGNEPNSFLKKADIFINGSQLGEDFIQLHKLLRKSXFKNAKLYGPDVGQPRRKXAKMLKSFLKAGGEVIDSVXWHHYYLNGRXAXKEDFLNPDVLDIFISSVQKVFQVVESXRPGKKVWLGEXSSAYGGGAPLLSDXFAAGFMWLDKLGLSARMGIEVVMRQVFFGAGNYHLVDENFDPLPDYWLSLLFKKLVGXKVLMASVQGSKRRKLRVYLHCXNXDNPRYKEGDLXLYAINLHNVXKYLRLPYPFSNKQVDKYLLRPLGPHGLLSKSVQLNGLXLKMVDDQXLPPLMEKPLRPGSSLGLPAFSYSFFVIRNAKVAACI

SEQ ID NO: 12639 - protein, 168 aa, Homo sapiens
  MOD_RES (45)..(45): Selenocysteine
  MOD_RES (60)..(60): Selenocysteine
  MOD_RES (67)..(67): Selenocysteine
  MOD_RES (82)..(82): Selenocysteine
  MOD_RES (97)..(97): Selenocysteine
  MOD_RES (99)..(99): Selenocysteine
  MOD_RES (111)..(111): Selenocysteine
  MOD_RES (164)..(164): Selenocysteine
  MOD_RES (167)..(167): Selenocysteine
MLLRSKPALPPPLMLLLLGPLGPLSPGALPRPAQAQDVVDLDFFXQEPLHLVSPSFLSVXIDANLAXDPRFLILLGSPKLRXLARGLSPAYLRFGGXKXDFLIFDPKKESXFEERSYWQSQVNQDICKYGSIPPDVEEKLRLEWPYQEQLLLREHYQKKFKNSXYSXS

SEQ ID NO: 12640 - protein, 254 aa, Homo sapiens
  MOD_RES (24)..(24): Selenocysteine
  MOD_RES (29)..(29): Selenocysteine
  MOD_RES (40)..(40): Selenocysteine
  MOD_RES (47)..(47): Selenocysteine
  MOD_RES (59)..(60): Selenocysteine
  MOD_RES (66)..(66): Selenocysteine
  MOD_RES (174)..(174): Selenocysteine
  MOD_RES (176)..(176): Selenocysteine
  MOD_RES (242)..(242): Selenocysteine
MARVLGAPVALGLWSLCWSLAIAXPLPPXSAHGNVAEGEXKPDPDVXERCSDGWSFDAXXLDDNGXMLFFKGEFVWKSHKWDRELISERWKNFPSPVDAAFRQGHNSVFLIKGDKVWVYPPEKKEKGYPKLLQDEFPGIPSPLDAAVECHRGECQAEGVLFFQGDREWFWDLAXGXMKERSWPAVGNCSSALRWLGRYYCFQGNQFLRFDPVRGEVPPRYPRDVRDYFMPCPGRGHGHRNGXGHGNSICAVAHI

SEQ ID NO: 12641 - protein, 462 aa, Homo sapiens
  MOD_RES (24)..(24): Selenocysteine
  MOD_RES (29)..(29): Selenocysteine
  MOD_RES (40)..(40): Selenocysteine
  MOD_RES (47)..(47): Selenocysteine
  MOD_RES (59)..(60): Selenocysteine
  MOD_RES (66)..(66): Selenocysteine
  MOD_RES (174)..(174): Selenocysteine
  MOD_RES (176)..(176): Selenocysteine
  MOD_RES (242)..(242): Selenocysteine
  MOD_RES (248)..(248): Selenocysteine
  MOD_RES (267)..(267): Selenocysteine
  MOD_RES (274)..(274): Selenocysteine
  MOD_RES (280)..(280): Selenocysteine
  MOD_RES (287)..(287): Selenocysteine
  MOD_RES (324)..(324): Selenocysteine
  MOD_RES (331)..(331): Selenocysteine
  MOD_RES (336)..(336): Selenocysteine
  MOD_RES (351)..(351): Selenocysteine
  MOD_RES (392)..(392): Selenocysteine
  MOD_RES (394)..(394): Selenocysteine
  MOD_RES (455)..(455): Selenocysteine
  MOD_RES (461)..(461): Selenocysteine
MARVLGAPVALGLWSLCWSLAIAXPLPPXSAHGNVAEGEXKPDPDVXERCSDGWSFDAXXLDDNGXMLFFKGEFVWKSHKWDRELISERWKNFPSPVDAAFRQGHNSVFLIKGDKVWVYPPEKKEKGYPKLLQDEFPGIPSPLDAAVECHRGECQAEGVLFFQGDREWFWDLAXGXMKERSWPAVGNCSSALRWLGRYYCFQGNQFLRFDPVRGEVPPRYPRDVRDYFMPCPGRGHGHRNGXGHGNSXHHGPEYMRCSPHLVLSALXSDNHGAXYAFSGXHYWRLDXSRDGWHSWPIAHQWPQGPSAVDAAFSWEEKLYLVQGXQVYVFLXKGGYXLVSGYPKRLEKEVGXPHGIILDSVDAAFICPGSSRLHIMAGRRLWWLDLKSGAQAXWXELPWPHEKVDGALCMEKSLGPNSCSANGPGLYLIHGPNLYCYSDVEKLNAAKALPQPQNVXSLLGCXH

SEQ ID NO: 12642 - protein, 1134 aa, Homo sapiens
  MOD_RES (4)..(4): Selenocysteine
  MOD_RES (11)..(11): Selenocysteine
  MOD_RES (13)..(13): Selenocysteine
  MOD_RES (17)..(17): Selenocysteine
  MOD_RES (56)..(56): Selenocysteine
  MOD_RES (105)..(105): Selenocysteine
  MOD_RES (149)..(149): Selenocysteine
  MOD_RES (161)..(161): Selenocysteine
  MOD_RES (182)..(182): Selenocysteine
  MOD_RES (273)..(273): Selenocysteine
  MOD_RES (277)..(277): Selenocysteine
  MOD_RES (289)..(289): Selenocysteine
  MOD_RES (311)..(311): Selenocysteine
  MOD_RES (322)..(322): Selenocysteine
  MOD_RES (333)..(333): Selenocysteine
  MOD_RES (377)..(377): Selenocysteine
  MOD_RES (382)..(382): Selenocysteine
  MOD_RES (385)..(385): Selenocysteine
  MOD_RES (438)..(438): Selenocysteine
  MOD_RES (452)..(452): Selenocysteine
  MOD_RES (532)..(532): Selenocysteine
  MOD_RES (534)..(534): Selenocysteine
  MOD_RES (552)..(552): Selenocysteine
  MOD_RES (590)..(590): Selenocysteine
  MOD_RES (610)..(610): Selenocysteine
  MOD_RES (631)..(631): Selenocysteine
  MOD_RES (649)..(649): Selenocysteine
  MOD_RES (662)..(662): Selenocysteine
  MOD_RES (675)..(675): Selenocysteine
  MOD_RES (711)..(711): Selenocysteine
  MOD_RES (714)..(714): Selenocysteine
  MOD_RES (717)..(717): Selenocysteine
  MOD_RES (726)..(726): Selenocysteine
  MOD_RES (729)..(729): Selenocysteine
  MOD_RES (736)..(736): Selenocysteine
  MOD_RES (742)..(742): Selenocysteine
  MOD_RES (765)..(765): Selenocysteine
  MOD_RES (784)..(784): Selenocysteine
  MOD_RES (794)..(794): Selenocysteine
  MOD_RES (880)..(880): Selenocysteine
  MOD_RES (888)..(888): Selenocysteine
  MOD_RES (915)..(916): Selenocysteine
  MOD_RES (947)..(947): Selenocysteine
  MOD_RES (1003)..(1003): Selenocysteine
  MOD_RES (1022)..(1022): Selenocysteine
  MOD_RES (1052)..(1052): Selenocysteine
  MOD_RES (1078)..(1078): Selenocysteine
  MOD_RES (1082)..(1082): Selenocysteine
  MOD_RES (1090)..(1090): Selenocysteine
  MOD_RES (1129)..(1129): Selenocysteine
MESXPSFLKGXPXWEKXAPENGIVRQEPGSPPRDGLHHGPLCLGEPAPFWRGVLSXPDSWLPPGFPQGPKDMLPLVEGEGPQNGERKVNWLGSKEGLRWKEAMLXHPLAFCGPACPPRCGPLMPEHSGGHLKSDPVAFRPWHCPFLLEXKILERAPFWVPXCLPPYLVSGLPPEHPCDWPLXPHPWVYSGGQPKVPSAFSLGSKGFYYKDPSIPRLAKEPLAAAEPGLFGLNSGGHLQRAGEAERPSLHQRDGEMGAGRQQNPCPLFLGQPDXVPWXSWPACPPGLVHXLGNVWAGPGDGNLGYQLGPPAXPRCPSPEPPVXQRGCCSSYPPXKGGGLGPCGKCQEGLEGGASGASEPSEEVNKASGPRACPPSHHXKLKKXWLXRHSEQFECPRGCPEVEERPVARLRALKRAGSPEVQGAMGSPAPKRPPDPFPGXAEQGAGGWQEVRDXSIGNKDVDSGQHDEQKGPQDGQASLQDPGLQDIPCLALPAKLAQCQSCAQAAGEGGGHACHSQQVRRSPLGGELQQEEDXAXNSSSEEGPGSGPDSRLSXGLAKHLLSGLGDRLCRLLRREREALAWAQREGQGPAVXEDSPGIPRCCSRCHHGLFNXHWRCPRCSHRLCVACGRVAGXGRAREKAGFQEQSAEECXQEAGHAACSLMLXQFVSSQALAELSXAMHQVWVKFDIRGHCPCQADARVWAPGDAGQQKESXQKXPPXPQPSCNGDXHRXKSIKEEXPDSAEXPAEDRAGRGPLPCPSLCELLASXAVKLCLGHERIHMAFAPVXPALPSDDRIXNILDSIIAQVVERKIQEKALGPGLRAGPGLRKGLGLPLSPVRPRLPPPGALLWLQEPQPCPRRGFHLFQEHWRQGQPVLVSGIQRXLQGNLWGXEALGALGGQVQALSPLGPPQPSSLGSXXFWEGFSWPELRPKSDEGSVLLLHRALGDEDXSRVENLAASLPLPEYCALHGKLNLASYLPPGLALRPLEPQLWAAYGVSPHRGHLGXKNLCVEVADLVSILVHADXPLPAWHRAQKDFLSGLDGEGLWSPGSQVSXVWHVFRAQDAQRIRRFLQMVQGLVSXVSVXQHFLSPEXSALSAQLCHQGPSLPPDCHLLYAQMDWAVFQAVKVAVGXLQEAK

SEQ ID NO: 12643 - protein, 1189 aa, Homo sapiens
  MOD_RES (4)..(4): Selenocysteine
  MOD_RES (11)..(11): Selenocysteine
  MOD_RES (13)..(13): Selenocysteine
  MOD_RES (17)..(17): Selenocysteine
  MOD_RES (56)..(56): Selenocysteine
  MOD_RES (105)..(105): Selenocysteine
  MOD_RES (149)..(149): Selenocysteine
  MOD_RES (161)..(161): Selenocysteine
  MOD_RES (182)..(182): Selenocysteine
  MOD_RES (273)..(273): Selenocysteine
  MOD_RES (277)..(277): Selenocysteine
  MOD_RES (289)..(289): Selenocysteine
  MOD_RES (311)..(311): Selenocysteine
  MOD_RES (322)..(322): Selenocysteine
  MOD_RES (333)..(333): Selenocysteine
  MOD_RES (377)..(377): Selenocysteine
  MOD_RES (382)..(382): Selenocysteine
  MOD_RES (385)..(385): Selenocysteine
  MOD_RES (438)..(438): Selenocysteine
  MOD_RES (452)..(452): Selenocysteine
  MOD_RES (532)..(532): Selenocysteine
  MOD_RES (534)..(534): Selenocysteine
  MOD_RES (552)..(552): Selenocysteine
  MOD_RES (590)..(590): Selenocysteine
  MOD_RES (610)..(610): Selenocysteine
  MOD_RES (631)..(631): Selenocysteine
  MOD_RES (649)..(649): Selenocysteine
  MOD_RES (662)..(662): Selenocysteine
  MOD_RES (675)..(675): Selenocysteine
  MOD_RES (711)..(711): Selenocysteine
  MOD_RES (714)..(714): Selenocysteine
  MOD_RES (717)..(717): Selenocysteine
  MOD_RES (726)..(726): Selenocysteine
  MOD_RES (729)..(729): Selenocysteine
  MOD_RES (736)..(736): Selenocysteine
  MOD_RES (742)..(742): Selenocysteine
  MOD_RES (765)..(765): Selenocysteine
  MOD_RES (784)..(784): Selenocysteine
  MOD_RES (794)..(794): Selenocysteine
  MOD_RES (880)..(880): Selenocysteine
  MOD_RES (888)..(888): Selenocysteine
  MOD_RES (915)..(916): Selenocysteine
  MOD_RES (947)..(947): Selenocysteine
  MOD_RES (1003)..(1003): Selenocysteine
  MOD_RES (1022)..(1022): Selenocysteine
  MOD_RES (1052)..(1052): Selenocysteine
  MOD_RES (1108)..(1108): Selenocysteine
  MOD_RES (1133)..(1133): Selenocysteine
  MOD_RES (1137)..(1137): Selenocysteine
  MOD_RES (1145)..(1145): Selenocysteine
  MOD_RES (1184)..(1184): Selenocysteine
MESXPSFLKGXPXWEKXAPENGIVRQEPGSPPRDGLHHGPLCLGEPAPFWRGVLSXPDSWLPPGFPQGPKDMLPLVEGEGPQNGERKVNWLGSKEGLRWKEAMLXHPLAFCGPACPPRCGPLMPEHSGGHLKSDPVAFRPWHCPFLLEXKILERAPFWVPXCLPPYLVSGLPPEHPCDWPLXPHPWVYSGGQPKVPSAFSLGSKGFYYKDPSIPRLAKEPLAAAEPGLFGLNSGGHLQRAGEAERPSLHQRDGEMGAGRQQNPCPLFLGQPDXVPWXSWPACPPGLVHXLGNVWAGPGDGNLGYQLGPPAXPRCPSPEPPVXQRGCCSSYPPXKGGGLGPCGKCQEGLEGGASGASEPSEEVNKASGPRACPPSHHXKLKKXWLXRHSEQFECPRGCPEVEERPVARLRALKRAGSPEVQGAMGSPAPKRPPDPFPGXAEQGAGGWQEVRDXSIGNKDVDSGQHDEQKGPQDGQASLQDPGLQDIPCLALPAKLAQCQSCAQAAGEGGGHACHSQQVRRSPLGGELQQEEDXAXNSSSEEGPGSGPDSRLSXGLAKHLLSGLGDRLCRLLRREREALAWAQREGQGPAVXEDSPGIPRCCSRCHHGLFNXHWRCPRCSHRLCVACGRVAGXGRAREKAGFQEQSAEECXQEAGHAACSLMLXQFVSSQALAELSXAMHQVWVKFDIRGHCPCQADARVWAPGDAGQQKESXQKXPPXPQPSCNGDXHRXKSIKEEXPDSAEXPAEDRAGRGPLPCPSLCELLASXAVKLCLGHERIHMAFAPVXPALPSDDRIXNILDSIIAQVVERKIQEKALGPGLRAGPGLRKGLGLPLSPVRPRLPPPGALLWLQEPQPCPRRGFHLFQEHWRQGQPVLVSGIQRXLQGNLWGXEALGALGGQVQALSPLGPPQPSSLGSXXFWEGFSWPELRPKSDEGSVLLLHRALGDEDXSRVENLAASLPLPEYCALHGKLNLASYLPPGLALRPLEPQLWAAYGVSPHRGHLGXKNLCVEVADLVSILVHADXPLPAWHRAQKDFLSGLDGEGLWSPGSQVSXVWHVFRAQDAQRIRRFLQMVCPAGAGALEPGAPGSCYLDAGLRRRLREEWGVSCWXLLQAPGEAVLVPAGAPHQVQGLVSXVSVXQHFLSPEXSALSAQLCHQGPSLPPDCHLLYAQMDWAVFQAVKVAVGXLQEAK

SEQ ID NO: 12644 - protein, 54 aa, Homo sapiens
  MOD_RES (1)..(1): Any amino acid
  MOD_RES (2)..(2): Selenocysteine
  MOD_RES (15)..(15): Selenocysteine
  MOD_RES (26)..(26): Selenocysteine
  MOD_RES (33)..(34): Selenocysteine
XXQEAGHAACSLMLXQFVSSQEGINXENAPNSXXFLQWRHPQDQEHQRGDPRFR

SEQ ID NO: 12645 - protein, 15 aa, Homo sapiens
  MOD_RES (2)..(2): Selenocysteine
MXEYKLVVVGAGGVG

SEQ ID NO: 12646 - protein, 170 aa, Homo sapiens
  MOD_RES (2)..(2): Selenocysteine
  MOD_RES (20)..(20): Selenocysteine
  MOD_RES (35)..(35): Selenocysteine
  MOD_RES (50)..(50): Selenocysteine
  MOD_RES (58)..(58): Selenocysteine
  MOD_RES (74)..(74): Selenocysteine
  MOD_RES (87)..(87): Selenocysteine
  MOD_RES (124)..(124): Selenocysteine
  MOD_RES (144)..(144): Selenocysteine
  MOD_RES (148)..(148): Selenocysteine
  MOD_RES (162)..(162): Selenocysteine
MXEYKLVVVGAGGVGKSALXIQLIQNHFVDEYDPXIEDSYRKQVVIDGEXCLLDILDXAGQEEYSAMRDQYMRXGEGFLCVFAINNXKSFEDIHQYREQIKRVKDSDDVPMVLVGNKCDLAARXVESRQAQDLARSYGIPYIEXSAKXRQGSRSGSSSSSGXLWDPPGPM

SEQ ID NO: 12647 - protein, 189 aa, Homo sapiens
  MOD_RES (2)..(2): Selenocysteine
  MOD_RES (20)..(20): Selenocysteine
  MOD_RES (35)..(35): Selenocysteine
  MOD_RES (50)..(50): Selenocysteine
  MOD_RES (58)..(58): Selenocysteine
  MOD_RES (74)..(74): Selenocysteine
  MOD_RES (87)..(87): Selenocysteine
  MOD_RES (124)..(124): Selenocysteine
  MOD_RES (144)..(144): Selenocysteine
  MOD_RES (148)..(148): Selenocysteine
  MOD_RES (158)..(158): Selenocysteine
MXEYKLVVVGAGGVGKSALXIQLIQNHFVDEYDPXIEDSYRKQVVIDGEXCLLDILDXAGQEEYSAMRDQYMRXGEGFLCVFAINNXKSFEDIHQYREQIKRVKDSDDVPMVLVGNKCDLAARXVESRQAQDLARSYGIPYIEXSAKXRQGVEDAFYXLVREIRQHKLRKLNPPDESGPGCMSCKCVLS

SEQ ID NO: 12648 - protein, 525 aa, Homo sapiens
  MOD_RES (12)..(12): Selenocysteine
  MOD_RES (22)..(22): Selenocysteine
  MOD_RES (64)..(65): Selenocysteine
  MOD_RES (110)..(110): Selenocysteine
  MOD_RES (127)..(128): Selenocysteine
  MOD_RES (138)..(138): Selenocysteine
  MOD_RES (151)..(151): Selenocysteine
  MOD_RES (192)..(192): Selenocysteine
  MOD_RES (273)..(274): Selenocysteine
  MOD_RES (331)..(331): Selenocysteine
  MOD_RES (334)..(334): Selenocysteine
  MOD_RES (376)..(376): Selenocysteine
  MOD_RES (520)..(520): Selenocysteine
  MOD_RES (522)..(522): Selenocysteine
MKALIAALLLIXLQYSCAVSPXDCSAVEPEAEKALDLINKRRRDGYLFQLLRIADAHLDRVENXXVYYLVLDVQESDCSVLSRKYWNDCEPPDSRRPSEIVIGQCKVIAXRHSHESQDLRVIDFNCXXSSVSSALANXKDSPVLIDFFEDXERYRKQANKALEKYKEENDDFASFRVDRIERVARVRGGEGXGYFVDFSVRNCPRHHFPRHPNVFGFCRADLFYDVEALDLESPKNLVINCEVFDPQEHENINGVPPHLGHPFHWGGHERSSXXKPPFKPHGSRDHHHPHKPHEHGPPPPPDERDHSHGPPLPQGPPPLLPMSCSSCQHAXFGXNGAQRHSHNNNSSDLHPHKHHSHEQHPHGHHPHAHHPHEHDXHRQHPHGHHPHGHHPHGHHPHGHHPHGHHPHCHDFQDYGPCDPPPHNQGHCCHGHGPPPGHLRRRGPGKGPRPFHCRQIGSVYRLPPLRKGEVLPLPEANFPSFPLPHHKHPLKPDNQPFPQSVSESCPGKFKSGFPQVSMFFXHXFPK

SEQ ID NO: 12649 - protein, 12 aa, Homo sapiens
MSLPNSSCLLED

SEQ ID NO: 12650 - protein, 487 aa, Homo sapiens
  MOD_RES (20)..(21): Selenocysteine
  MOD_RES (36)..(36): Selenocysteine
  MOD_RES (41)..(41): Selenocysteine
  MOD_RES (60)..(60): Selenocysteine
  MOD_RES (112)..(112): Selenocysteine
  MOD_RES (140)..(140): Selenocysteine
  MOD_RES (142)..(142): Selenocysteine
  MOD_RES (147)..(147): Selenocysteine
  MOD_RES (172)..(172): Selenocysteine
  MOD_RES (182)..(182): Selenocysteine
  MOD_RES (188)..(188): Selenocysteine
  MOD_RES (194)..(194): Selenocysteine
  MOD_RES (203)..(203): Selenocysteine
  MOD_RES (279)..(279): Selenocysteine
  MOD_RES (333)..(333): Selenocysteine
  MOD_RES (340)..(340): Selenocysteine
  MOD_RES (361)..(361): Selenocysteine
  MOD_RES (365)..(367): Selenocysteine
  MOD_RES (369)..(369): Selenocysteine
  MOD_RES (382)..(382): Selenocysteine
  MOD_RES (390)..(390): Selenocysteine
  MOD_RES (453)..(453): Selenocysteine
  MOD_RES (462)..(462): Selenocysteine
  MOD_RES (478)..(478): Selenocysteine
MSLPNSSCLLEDKMCEGNKXXMASPQLMPLVVVLSXICLVXVGLNLLVLYAVRSERKLHXVGNLYIVSLSVADLIVGAVVMPMNILYLLMSKWSLGRPLCLFWLSMDYVASXASIFSVFILCIDRYRSVQQPLRYLKYRXKXRASAXILGAWFLSFLWVIPILGWNHFMQQXSVRREDKCEXDFYDVXWFKVMXAIINFYLPXLLMLWFYAKIYKAVRQHCQHRELINRSLPSFSEIKLRPENPKGDAKKPGKESPWEVLKRKPKDAGGGSVLKSPSQXPKEMKSPVVFSQEDDREVDKLYCFPLDIVHMQAAAEGSSRDYVAVNRSHGQLKXDEQGLNXHGASEISEDQMLGDSQSFSRXDSDXXXEXAPGKGKLRSGSNXGLDYIKFXWKRLRSHSRQYVSGLHMNRERKAAKQLGFIMAAFILCWIPYFIFFMVIAFCKNCCNEHLHMFXIWLGYINSXLNPLIYPLCNENFKKXFKRILHIRS

SEQ ID NO: 12651 - protein, 359 aa, Homo sapiens
  MOD_RES (6)..(6): Selenocysteine
  MOD_RES (15)..(15): Selenocysteine
  MOD_RES (20)..(20): Selenocysteine
  MOD_RES (22)..(22): Selenocysteine
  MOD_RES (32)..(32): Selenocysteine
  MOD_RES (53)..(53): Selenocysteine
  MOD_RES (63)..(63): Selenocysteine
  MOD_RES (95)..(95): Selenocysteine
  MOD_RES (103)..(103): Selenocysteine
  MOD_RES (131)..(131): Selenocysteine
  MOD_RES (148)..(148): Selenocysteine
  MOD_RES (164)..(164): Selenocysteine
  MOD_RES (170)..(171): Selenocysteine
  MOD_RES (190)..(190): Selenocysteine
  MOD_RES (201)..(201): Selenocysteine
  MOD_RES (226)..(226): Selenocysteine
  MOD_RES (233)..(233): Selenocysteine
  MOD_RES (235)..(235): Selenocysteine
  MOD_RES (252)..(252): Selenocysteine
  MOD_RES (297)..(297): Selenocysteine
  MOD_RES (315)..(315): Selenocysteine
  MOD_RES (327)..(327): Selenocysteine
  MOD_RES (348)..(348): Selenocysteine
  MOD_RES (351)..(351): Selenocysteine
  MOD_RES (357)..(357): Selenocysteine
MAPNGXASSFCLDSXACKIXIXVVLAVLILIXVAGNVVVCLAVGLNRRLRNLXNCFIVSLAIXDLLLGLLVLPFSAIYQLSCKWSFGKVFCNIYXSLDVMLCXASILNLFMISLDRYCAVMDPLRYPVLVXPVRVAISLVLIWVISIXLSFLSIHLGWNSRNEXSKGNHXXSKCKVQVNEVYGLVDGLVXFYLPLLIMCIXYYRIFKVARDQAKRINHISSWKAAXIREHKAXVXLAAVMGAFIICWFPYFXAFVYRGLRGDDAINEVLEAIVLWLGYANSALNPILYAALNRDFRXGYQQLFCCRLANRNSHKXSLRSNASQLSRXQSREPRQQEEKPLKLQVWSGXEVXAPQGAXDR

SEQ ID NO: 12652 - protein, 363 aa, Homo sapiens
  MOD_RES (6)..(6): Selenocysteine
  MOD_RES (15)..(15): Selenocysteine
  MOD_RES (20)..(20): Selenocysteine
  MOD_RES (22)..(22): Selenocysteine
  MOD_RES (32)..(32): Selenocysteine
  MOD_RES (53)..(53): Selenocysteine
  MOD_RES (63)..(63): Selenocysteine
  MOD_RES (95)..(95): Selenocysteine
  MOD_RES (103)..(103): Selenocysteine
  MOD_RES (131)..(131): Selenocysteine
  MOD_RES (148)..(148): Selenocysteine
  MOD_RES (164)..(164): Selenocysteine
  MOD_RES (170)..(171): Selenocysteine
  MOD_RES (190)..(190): Selenocysteine
  MOD_RES (201)..(201): Selenocysteine
  MOD_RES (226)..(226): Selenocysteine
  MOD_RES (233)..(233): Selenocysteine
  MOD_RES (235)..(235): Selenocysteine
  MOD_RES (252)..(252): Selenocysteine
  MOD_RES (297)..(297): Selenocysteine
  MOD_RES (315)..(315): Selenocysteine
  MOD_RES (327)..(327): Selenocysteine
  MOD_RES (348)..(348): Selenocysteine
  MOD_RES (351)..(351): Selenocysteine
  MOD_RES (357)..(357): Selenocysteine
MAPNGXASSFCLDSXACKIXIXVVLAVLILIXVAGNVVVCLAVGLNRRLRNLXNCFIVSLAIXDLLLGLLVLPFSAIYQLSCKWSFGKVFCNIYXSLDVMLCXASILNLFMISLDRYCAVMDPLRYPVLVXPVRVAISLVLIWVISIXLSFLSIHLGWNSRNEXSKGNHXXSKCKVQVNEVYGLVDGLVXFYLPLLIMCIXYYRIFKVARDQAKRINHISSWKAAXIREHKAXVXLAAVMGAFIICWFPYFXAFVYRGLRGDDAINEVLEAIVLWLGYANSALNPILYAALNRDFRXGYQQLFCCRLANRNSHKXSLRSNASQLSRXQSREPRQQEEKPLKLQVWSGXEVXAPQGAXDREFGE

SEQ ID NO: 12653 - protein, 397 aa, Homo sapiens
  MOD_RES (6)..(6): Selenocysteine
  MOD_RES (15)..(15): Selenocysteine
  MOD_RES (20)..(20): Selenocysteine
  MOD_RES (22)..(22): Selenocysteine
  MOD_RES (32)..(32): Selenocysteine
  MOD_RES (53)..(53): Selenocysteine
  MOD_RES (63)..(63): Selenocysteine
  MOD_RES (95)..(95): Selenocysteine
  MOD_RES (103)..(103): Selenocysteine
  MOD_RES (131)..(131): Selenocysteine
  MOD_RES (148)..(148): Selenocysteine
  MOD_RES (164)..(164): Selenocysteine
  MOD_RES (170)..(171): Selenocysteine
  MOD_RES (190)..(190): Selenocysteine
  MOD_RES (201)..(201): Selenocysteine
  MOD_RES (226)..(226): Selenocysteine
  MOD_RES (233)..(233): Selenocysteine
  MOD_RES (235)..(235): Selenocysteine
  MOD_RES (252)..(252): Selenocysteine
  MOD_RES (297)..(297): Selenocysteine
  MOD_RES (315)..(315): Selenocysteine
  MOD_RES (327)..(327): Selenocysteine
  MOD_RES (348)..(348): Selenocysteine
  MOD_RES (351)..(351): Selenocysteine
  MOD_RES (357)..(357): Selenocysteine
  MOD_RES (373)..(373): Selenocysteine
  MOD_RES (392)..(393): Selenocysteine
MAPNGXASSFCLDSXACKIXIXVVLAVLILIXVAGNVVVCLAVGLNRRLRNLXNCFIVSLAIXDLLLGLLVLPFSAIYQLSCKWSFGKVFCNIYXSLDVMLCXASILNLFMISLDRYCAVMDPLRYPVLVXPVRVAISLVLIWVISIXLSFLSIHLGWNSRNEXSKGNHXXSKCKVQVNEVYGLVDGLVXFYLPLLIMCIXYYRIFKVARDQAKRINHISSWKAAXIREHKAXVXLAAVMGAFIICWFPYFXAFVYRGLRGDDAINEVLEAIVLWLGYANSALNPILYAALNRDFRXGYQQLFCCRLANRNSHKXSLRSNASQLSRXQSREPRQQEEKPLKLQVWSGXEVXAPQGAXDRPWLCLPECWSVELXHSFIHLFIHSFANIHPIPXXCQEL

SEQ ID NO: 12654 - protein, 422 aa, Homo sapiens
  MOD_RES (6)..(6): Selenocysteine
  MOD_RES (15)..(15): Selenocysteine
  MOD_RES (20)..(20): Selenocysteine
  MOD_RES (22)..(22): Selenocysteine
  MOD_RES (32)..(32): Selenocysteine
  MOD_RES (53)..(53): Selenocysteine
  MOD_RES (63)..(63): Selenocysteine
  MOD_RES (95)..(95): Selenocysteine
  MOD_RES (103)..(103): Selenocysteine
  MOD_RES (131)..(131): Selenocysteine
  MOD_RES (148)..(148): Selenocysteine
  MOD_RES (164)..(164): Selenocysteine
  MOD_RES (170)..(171): Selenocysteine
  MOD_RES (190)..(190): Selenocysteine
  MOD_RES (201)..(201): Selenocysteine
  MOD_RES (226)..(226): Selenocysteine
  MOD_RES (233)..(233): Selenocysteine
  MOD_RES (235)..(235): Selenocysteine
  MOD_RES (252)..(252): Selenocysteine
  MOD_RES (297)..(297): Selenocysteine
  MOD_RES (315)..(315): Selenocysteine
  MOD_RES (327)..(327): Selenocysteine
  MOD_RES (348)..(348): Selenocysteine
  MOD_RES (351)..(351): Selenocysteine
  MOD_RES (357)..(357): Selenocysteine
  MOD_RES (366)..(367): Selenocysteine
  MOD_RES (416)..(416): Selenocysteine
MAPNGXASSFCLDSXACKIXIXVVLAVLILIXVAGNVVVCLAVGLNRRLRNLXNCFIVSLAIXDLLLGLLVLPFSAIYQLSCKWSFGKVFCNIYXSLDVMLCXASILNLFMISLDRYCAVMDPLRYPVLVXPVRVAISLVLIWVISIXLSFLSIHLGWNSRNEXSKGNHXXSKCKVQVNEVYGLVDGLVXFYLPLLIMCIXYYRIFKVARDQAKRINHISSWKAAXIREHKAXVXLAAVMGAFIICWFPYFXAFVYRGLRGDDAINEVLEAIVLWLGYANSALNPILYAALNRDFRXGYQQLFCCRLANRNSHKXSLRSNASQLSRXQSREPRQQEEKPLKLQVWSGXEVXAPQGAXDRKPALSCXXCSSNLLSCCKSLWGLRFLQRHMGGPSEELSGEPLSEEPQKRPPQKAVRXLPSEAV

SEQ ID NO: 12655 - protein, 373 aa, Homo sapiens
  MOD_RES (34)..(34): Selenocysteine
  MOD_RES (48)..(48): Selenocysteine
  MOD_RES (67)..(67): Selenocysteine
  MOD_RES (97)..(97): Selenocysteine
  MOD_RES (101)..(101): Selenocysteine
  MOD_RES (119)..(119): Selenocysteine
  MOD_RES (137)..(137): Selenocysteine
  MOD_RES (149)..(149): Selenocysteine
  MOD_RES (201)..(201): Selenocysteine
  MOD_RES (204)..(204): Selenocysteine
  MOD_RES (209)..(209): Selenocysteine
  MOD_RES (215)..(215): Selenocysteine
  MOD_RES (229)..(229): Selenocysteine
  MOD_RES (295)..(295): Selenocysteine
  MOD_RES (316)..(316): Selenocysteine
  MOD_RES (344)..(344): Selenocysteine
  MOD_RES (371)..(371): Selenocysteine
MERAPPDGPLNASGALAGEAAAAGGARGFSAAWXAVLAALMALLIVAXVLGNALVMLAFVADSSLRXQNNFFLLNLAISDFLVGAFCIPLYVPYVLXGRWXFGRGLCKLWLVVDYLLCXSSAFNIVLISYDRFLSVXRAVSYRAQQGDXRRAVRKMLLVWVLAFLLYGPAILSWEYLSGGSSIPEGHCYAEFFYNWYFLIXASXLEFFXPFLSVXFFNLSIYLNIQRRXRLRLDGAREAAGPEPPPEAQPSPPPPPGCWGCWQKGHGEAMPLHRKVAKSLAVIVSIFGLCWAPYXLLMIIRAACHGHCVPDYWYEXSFWLLWANSAVNPVLYPLCHHSFRRAFXKLLCPQKLKIQPHSSLEHCWKKMKKKXCL

SEQ ID NO: 12656 - protein, 445 aa, Homo sapiens
  MOD_RES (34)..(34): Selenocysteine
  MOD_RES (48)..(48): Selenocysteine
  MOD_RES (67)..(67): Selenocysteine
  MOD_RES (97)..(97): Selenocysteine
  MOD_RES (101)..(101): Selenocysteine
  MOD_RES (119)..(119): Selenocysteine
  MOD_RES (137)..(137): Selenocysteine
  MOD_RES (149)..(149): Selenocysteine
  MOD_RES (201)..(201): Selenocysteine
  MOD_RES (204)..(204): Selenocysteine
  MOD_RES (209)..(209): Selenocysteine
  MOD_RES (215)..(215): Selenocysteine
  MOD_RES (229)..(229): Selenocysteine
  MOD_RES (290)..(290): Selenocysteine
  MOD_RES (304)..(304): Selenocysteine
  MOD_RES (314)..(314): Selenocysteine
  MOD_RES (345)..(345): Selenocysteine
  MOD_RES (375)..(375): Selenocysteine
  MOD_RES (396)..(396): Selenocysteine
  MOD_RES (424)..(424): Selenocysteine
MERAPPDGPLNASGALAGEAAAAGGARGFSAAWXAVLAALMALLIVAXVLGNALVMLAFVADSSLRXQNNFFLLNLAISDFLVGAFCIPLYVPYVLXGRWXFGRGLCKLWLVVDYLLCXSSAFNIVLISYDRFLSVXRAVSYRAQQGDXRRAVRKMLLVWVLAFLLYGPAILSWEYLSGGSSIPEGHCYAEFFYNWYFLIXASXLEFFXPFLSVXFFNLSIYLNIQRRXRLRLDGAREAAGPEPPPEAQPSPPPPPGCWGCWQKGHGEAMPLHRYGVGEAAVGAEAGEAXLGGGGGGGSVASPXSSSGSSSRGXERPRSLKRGSKPSASSASLEKRMKMVSQSFXQRFRLSRDRKVAKSLAVIVSIFGLCWAPYXLLMIIRAACHGHCVPDYWYEXSFWLLWANSAVNPVLYPLCHHSFRRAFXKLLCPQKLKIQPHSSLEHCWK

SEQ ID NO: 12657 - protein, 200 aa, Homo sapiens
  MOD_RES (34)..(34): Selenocysteine
  MOD_RES (48)..(48): Selenocysteine
  MOD_RES (67)..(67): Selenocysteine
  MOD_RES (97)..(97): Selenocysteine
  MOD_RES (101)..(101): Selenocysteine
  MOD_RES (119)..(119): Selenocysteine
  MOD_RES (137)..(137): Selenocysteine
  MOD_RES (149)..(149): Selenocysteine
MERAPPDGPLNASGALAGEAAAAGGARGFSAAWXAVLAALMALLIVAXVLGNALVMLAFVADSSLRXQNNFFLLNLAISDFLVGAFCIPLYVPYVLXGRWXFGRGLCKLWLVVDYLLCXSSAFNIVLISYDRFLSVXRAVSYRAQQGDXRRAVRKMLLVWVLAFLLYGPAPAAPRGALRGRAHSRGAPSRRRPRPRWRSA

SEQ ID NO: 12658 - protein, 390 aa, Homo sapiens
  MOD_RES (4)..(4): Selenocysteine
  MOD_RES (7)..(7): Selenocysteine
  MOD_RES (14)..(14): Selenocysteine
  MOD_RES (17)..(17): Selenocysteine
  MOD_RES (76)..(76): Selenocysteine
  MOD_RES (92)..(93): Selenocysteine
  MOD_RES (99)..(99): Selenocysteine
  MOD_RES (124)..(124): Selenocysteine
  MOD_RES (127)..(127): Selenocysteine
  MOD_RES (134)..(134): Selenocysteine
  MOD_RES (178)..(178): Selenocysteine
  MOD_RES (217)..(217): Selenocysteine
  MOD_RES (242)..(242): Selenocysteine
  MOD_RES (265)..(265): Selenocysteine
  MOD_RES (271)..(271): Selenocysteine
  MOD_RES (323)..(323): Selenocysteine
  MOD_RES (333)..(333): Selenocysteine
MPDXNSXINLSLSXRVXLAFFMSLVAFAIMLGNALVILAFVVDKNLRHRSSYFFLNLAISDFFVGVISIPLYIPHXLFEWDFGKEICVFWLXXDYLLCXASVYNIVLISYDRYLSVSNAVSYRXQHXGVLKIVXLMVAVWVLAFLVNGPMILVSESWKDEGSECEPGFFSEWYILAIXSFLEFVIPVILVAYFNMNIYWSLWKRDHLSRCQSHPGLXAVSSNICGHSFRGRLSSRRSLSASXEVPASFHSERQRRKSSLMFSSRXKMNSNXIASKMGSFSQSDSVALHQREHVELLRARRLAKSLAILLGVFAVCWAPYSLFXIVLSFYSSAXGPKSVWYRIAFWLQWFNSFVNPLLYPLCHKRFQKAFLKIFCIKKQPLPSQHSRSVSS

SEQ ID NO: 12659 - protein, 302 aa, Homo sapiens
  MOD_RES (4)..(4): Selenocysteine
  MOD_RES (7)..(7): Selenocysteine
  MOD_RES (14)..(14): Selenocysteine
  MOD_RES (17)..(17): Selenocysteine
  MOD_RES (90)..(90): Selenocysteine
  MOD_RES (129)..(129): Selenocysteine
  MOD_RES (154)..(154): Selenocysteine
  MOD_RES (177)..(177): Selenocysteine
  MOD_RES (183)..(183): Selenocysteine
  MOD_RES (235)..(235): Selenocysteine
  MOD_RES (245)..(245): Selenocysteine
MPDXNSXINLSLSXRVXLAFFMSLVAFAIMLGNALVILAFVVDKNLRHRSSYFFLNLAISDFFVVSESWKDEGSECEPGFFSEWYILAIXSFLEFVIPVILVAYFNMNIYWSLWKRDHLSRCQSHPGLXAVSSNICGHSFRGRLSSRRSLSASXEVPASFHSERQRRKSSLMFSSRXKMNSNXIASKMGSFSQSDSVALHQREHVELLRARRLAKSLAILLGVFAVCWAPYSLFXIVLSFYSSAXGPKSVWYRIAFWLQWFNSFVNPLLYPLCHKRFQKAFLKIFCIKKQPLPSQHSRSVSS

SEQ ID NO: 12660 - protein, 47 aa, Homo sapiens
  MOD_RES (6)..(6): Selenocysteine
IISDIXELAPASPMASPGGSIDESPHGRQGPHGHRGPASLPPAHLHP

SEQ ID NO: 12661 - protein, 139 aa, Homo sapiens
  MOD_RES (32)..(32): Selenocysteine
  MOD_RES (55)..(55): Selenocysteine
  MOD_RES (59)..(59): Selenocysteine
  MOD_RES (73)..(73): Selenocysteine
  MOD_RES (77)..(77): Selenocysteine
MASFVRQLNMYGFRKVVHIEQGGLVKPERDDXEFQHPCFLRGQEQLLENIKRKVXSVSXLKSEDIKIRQDSVXKLLXDVQLMKGKQECMDSKLLAMKHENEALWREVASLRQKHAQQQKVVNKLIQFLISLVQSNRILG

SEQ ID NO: 12662 - protein, 64 aa, Homo sapiens
  MOD_RES (20)..(20): Selenocysteine
  MOD_RES (24)..(24): Selenocysteine
  MOD_RES (31)..(31): Selenocysteine
  MOD_RES (54)..(54): Selenocysteine
MDLPVGPGAAGPSNVPAFLXKLWXLVSDPDXDALICWSPLPGSRLVYMVRPCKXGQLRFAEVNQ

SEQ ID NO: 12663 - protein, 495 aa, Homo sapiens
  MOD_RES (20)..(20): Selenocysteine
  MOD_RES (24)..(24): Selenocysteine
  MOD_RES (31)..(31): Selenocysteine
  MOD_RES (97)..(97): Selenocysteine
  MOD_RES (120)..(120): Selenocysteine
  MOD_RES (124)..(124): Selenocysteine
  MOD_RES (138)..(138): Selenocysteine
  MOD_RES (142)..(142): Selenocysteine
  MOD_RES (269)..(269): Selenocysteine
  MOD_RES (323)..(323): Selenocysteine
  MOD_RES (328)..(328): Selenocysteine
  MOD_RES (346)..(346): Selenocysteine
  MOD_RES (349)..(349): Selenocysteine
  MOD_RES (355)..(355): Selenocysteine
  MOD_RES (357)..(357): Selenocysteine
  MOD_RES (367)..(367): Selenocysteine
  MOD_RES (369)..(369): Selenocysteine
  MOD_RES (385)..(385): Selenocysteine
  MOD_RES (428)..(428): Selenocysteine
  MOD_RES (439)..(439): Selenocysteine
MDLPVGPGAAGPSNVPAFLXKLWXLVSDPDXDALICWSPSGNSFHVFDQGQFAKEVLPKYFKHNNMASFVRQLNMYGFRKVVHIEQGGLVKPERDDXEFQHPCFLRGQEQLLENIKRKVXSVSXLKSEDIKIRQDSVXKLLXDVQLMKGKQECMDSKLLAMKHENEALWREVASLRQKHAQQQKVVNKLIQFLISLVQSNRILGVKRKIPLMLNDSGSAHSMPKYSRQFSLEHVHGSGPYSAPSPAYSSSSLYAPDAVASSGPIISDIXELAPASPMASPGGSIDERPLSSSPLVRVKEEPPSPPQSPRVEEASPGRPSSVDXLLSPXALIDSILRESEPAPASVXALXDARGHXDXEGRPPSPPPXSXPEKCLSVACLDNLARXPQMSRVARLFPCPSSSPHGQVQPGNELSDHLDAMDSNLDNLQXMLSSHGFSVDXSALLDIQELLSPQEPPRPPEAENSSPDSAGALHSAAAVPAGPRLRGHREQRPAGAV

SEQ ID NO: 12664 - protein, 529 aa, Homo sapiens
  MOD_RES (20)..(20): Selenocysteine
  MOD_RES (24)..(24): Selenocysteine
  MOD_RES (31)..(31): Selenocysteine
  MOD_RES (97)..(97): Selenocysteine
  MOD_RES (120)..(120): Selenocysteine
  MOD_RES (124)..(124): Selenocysteine
  MOD_RES (138)..(138): Selenocysteine
  MOD_RES (142)..(142): Selenocysteine
  MOD_RES (269)..(269): Selenocysteine
  MOD_RES (323)..(323): Selenocysteine
  MOD_RES (328)..(328): Selenocysteine
  MOD_RES (346)..(346): Selenocysteine
  MOD_RES (349)..(349): Selenocysteine
  MOD_RES (355)..(355): Selenocysteine
  MOD_RES (357)..(357): Selenocysteine
  MOD_RES (367)..(367): Selenocysteine
  MOD_RES (369)..(369): Selenocysteine
  MOD_RES (400)..(400): Selenocysteine
  MOD_RES (411)..(411): Selenocysteine
  MOD_RES (423)..(423): Selenocysteine
  MOD_RES (469)..(469): Selenocysteine
  MOD_RES (483)..(483): Selenocysteine
  MOD_RES (511)..(511): Selenocysteine
  MOD_RES (516)..(516): Selenocysteine
  MOD_RES (527)..(527): Selenocysteine
MDLPVGPGAAGPSNVPAFLXKLWXLVSDPDXDALICWSPSGNSFHVFDQGQFAKEVLPKYFKHNNMASFVRQLNMYGFRKVVHIEQGGLVKPERDDXEFQHPCFLRGQEQLLENIKRKVXSVSXLKSEDIKIRQDSVXKLLXDVQLMKGKQECMDSKLLAMKHENEALWREVASLRQKHAQQQKVVNKLIQFLISLVQSNRILGVKRKIPLMLNDSGSAHSMPKYSRQFSLEHVHGSGPYSAPSPAYSSSSLYAPDAVASSGPIISDIXELAPASPMASPGGSIDERPLSSSPLVRVKEEPPSPPQSPRVEEASPGRPSSVDXLLSPXALIDSILRESEPAPASVXALXDARGHXDXEGRPPSPPPXSXPEKCLSVACLDKNELSDHLDAMDSNLDNLQXMLSSHGFSVDXSALLDLFSPSVXVPDMSLPDLDSSLASIQELLSPQEPPRPPEAENSSPDSGKQLVHYXAQPLFLLDPGSVDXGSNDLPVLFELGEGSYFSEGDGFAEDPXISLLXGSEPPKAKDPXVS

SEQ ID NO: 12665 - protein, 91 aa, Homo sapiens
  MOD_RES (1)..(1): Any amino acid
  MOD_RES (21)..(21): Selenocysteine
  MOD_RES (44)..(44): Selenocysteine
  MOD_RES (48)..(48): Selenocysteine
  MOD_RES (62)..(62): Selenocysteine
  MOD_RES (66)..(66): Selenocysteine
XFRKVVHIEQGGLVKPERDDXEFQHPCFLRGQEQLLENIKRKVXSVSXLKSEDIKIRQDSVXKLLXDVQLMKGKQECMDSKLLAMKHSFSS

SEQ ID NO: 12666 - protein, 214 aa, Homo sapiens
  MOD_RES (4)..(4): Selenocysteine
  MOD_RES (23)..(23): Selenocysteine
  MOD_RES (38)..(38): Selenocysteine
  MOD_RES (107)..(107): Selenocysteine
  MOD_RES (113)..(113): Selenocysteine
  MOD_RES (171)..(172): Selenocysteine
  MOD_RES (199)..(199): Selenocysteine
HSRXEGLKPRERISDDIIIYDVXDDNADEENIPVIPEXNEDVISDPSNCSQYPDIVIVEDDNEDEYAPVIQSGEQNEPARESLSSGSDGSSPLMSSAVQLNGSSSLXSEDPVXMMDSILNDNINLLGKVELLDYLDSIDCSLEDFQAMLSGRQFSIDPDLLVDSENKGLEXXKNNVVQPVSEEGRKSKSKPDKQLIQYXAFPLLAFLDGNPASS

SEQ ID NO: 12667 - protein, 518 aa, Homo sapiens
  MOD_RES (16)..(16): Selenocysteine
  MOD_RES (21)..(21): Selenocysteine
  MOD_RES (23)..(23): Selenocysteine
  MOD_RES (28)..(28): Selenocysteine
  MOD_RES (127)..(127): Selenocysteine
  MOD_RES (142)..(142): Selenocysteine
  MOD_RES (184)..(184): Selenocysteine
  MOD_RES (204)..(204): Selenocysteine
  MOD_RES (221)..(221): Selenocysteine
  MOD_RES (233)..(233): Selenocysteine
  MOD_RES (252)..(252): Selenocysteine
  MOD_RES (267)..(267): Selenocysteine
  MOD_RES (336)..(336): Selenocysteine
  MOD_RES (342)..(342): Selenocysteine
  MOD_RES (400)..(401): Selenocysteine
  MOD_RES (428)..(428): Selenocysteine
  MOD_RES (449)..(450): Selenocysteine
  MOD_RES (478)..(478): Selenocysteine
  MOD_RES (489)..(489): Selenocysteine
  MOD_RES (497)..(497): Selenocysteine
MKQSSNVPAFLSKLWXLVEEXHXNEFIXWSQNGQSFLVLDEQRFAKEILPKYFKHNNMASFVRQLNMYGFRKVVHIDSGIVKQERDGPVEFQHPYFKQGQDDLLENIKRKVSSSKPEENKIRQEDLXKIISSAQKVQIKQEXIESRLSELKSENESLWKEVSELRAKHAQQQQVIRKIVQFIVXLVQNNQLVSLKRKRPLLLNXNGAQKKNLFQHIVKEPXDNHHHKVPHSRXEGLKPRERISDDIIIYDVXDDNADEENIPVIPEXNEDVISDPSNCSQYPDIVIVEDDNEDEYAPVIQSGEQNEPARESLSSGSDGSSPLMSSAVQLNGSSSLXSEDPVXMMDSILNDNINLLGKVELLDYLDSIDCSLEDFQAMLSGRQFSIDPDLLVDSENKGLEXXKNNVVQPVSEEGRKSKSKPDKQLIQYXAFPLLAFLDGNPASSVEQASXXASSEVLSSVDKPIEVDELLDSSLDPEPXQSKLVRLEPLXEAEASEAXLFYLCELAPAPLDSDMPLLDS

SEQ ID NO: 12668 - protein, 536 aa, Homo sapiens
  MOD_RES (16)..(16): Selenocysteine
  MOD_RES (21)..(21): Selenocysteine
  MOD_RES (23)..(23): Selenocysteine
  MOD_RES (28)..(28): Selenocysteine
  MOD_RES (127)..(127): Selenocysteine
  MOD_RES (142)..(142): Selenocysteine
  MOD_RES (184)..(184): Selenocysteine
  MOD_RES (204)..(204): Selenocysteine
  MOD_RES (221)..(221): Selenocysteine
  MOD_RES (233)..(233): Selenocysteine
  MOD_RES (252)..(252): Selenocysteine
  MOD_RES (267)..(267): Selenocysteine
  MOD_RES (336)..(336): Selenocysteine
  MOD_RES (342)..(342): Selenocysteine
  MOD_RES (395)..(395): Selenocysteine
  MOD_RES (403)..(403): Selenocysteine
  MOD_RES (409)..(409): Selenocysteine
  MOD_RES (418)..(419): Selenocysteine
  MOD_RES (446)..(446): Selenocysteine
  MOD_RES (467)..(468): Selenocysteine
  MOD_RES (496)..(496): Selenocysteine
  MOD_RES (507)..(507): Selenocysteine
  MOD_RES (515)..(515): Selenocysteine
MKQSSNVPAFLSKLWXLVEEXHXNEFIXWSQNGQSFLVLDEQRFAKEILPKYFKHNNMASFVRQLNMYGFRKVVHIDSGIVKQERDGPVEFQHPYFKQGQDDLLENIKRKVSSSKPEENKIRQEDLXKIISSAQKVQIKQEXIESRLSELKSENESLWKEVSELRAKHAQQQQVIRKIVQFIVXLVQNNQLVSLKRKRPLLLNXNGAQKKNLFQHIVKEPXDNHHHKVPHSRXEGLKPRERISDDIIIYDVXDDNADEENIPVIPEXNEDVISDPSNCSQYPDIVIVEDDNEDEYAPVIQSGEQNEPARESLSSGSDGSSPLMSSAVQLNGSSSLXSEDPVXMMDSILNDNINLLGKVELLDYLDSIDCSLEDFQAMLSGRQFSIDPDLLVDLFXSSVQMNPXDYINNXKSENKGLEXXKNNVVQPVSEEGRKSKSKPDKQLIQYXAFPLLAFLDGNPASSVEQASXXASSEVLSSVDKPIEVDELLDSSLDPEPXQSKLVRLEPLXEAEASEAXLFYLCELAPAPLDSDMPLLDS

SEQ ID NO: 12669 - protein, 185 aa, Homo sapiens
  MOD_RES (2)..(2): Selenocysteine
  MOD_RES (110)..(110): Selenocysteine
  MOD_RES (158)..(158): Selenocysteine
  MOD_RES (164)..(164): Selenocysteine
  MOD_RES (185)..(185): Selenocysteine
GXSFLVSDQSRFAKEVLPQYFKHSNMASFVRQLNMYGFRKVVSIEQGGLLRPERDHVEFQHPSFVRGREQLLERVRRKVPALRGDDGRWRPEDLGRLLGENEILWREVVXLRQSHGQQHRVIGKLIQCLFGPLQAGPSNAGGKRKLSLMLDEGSSCPXPAKFNXCPLPGALLQDPYFIQSPLPEX

SEQ ID NO: 12670 - protein, 194 aa, Homo sapiens
  MOD_RES (10)..(10): Selenocysteine
  MOD_RES (33)..(33): Selenocysteine
  MOD_RES (44)..(44): Selenocysteine
  MOD_RES (154)..(154): Selenocysteine
  MOD_RES (176)..(176): Selenocysteine
MQEAPAALPXEPGPSPVPAFLGKLWALVGDPGXDHLIRWSPSGXSFLVSDQSRFAKEVLPQYFKHSNMASFVRQLNMYGFRKVVSIEQGGLLRPERDHVEFQHPSFVRGREQLLERVRRKVPALRGDDGRWRPEDLGRLLGEAERDLVAGGGDXSAEPRSAAPGHWQADPVSLWAXSGGAEQCRRQEKAVPDAG

SEQ ID NO: 12671 - protein, 315 aa, Homo sapiens
  MOD_RES (10)..(10): Selenocysteine
  MOD_RES (33)..(33): Selenocysteine
  MOD_RES (44)..(44): Selenocysteine
  MOD_RES (153)..(153): Selenocysteine
  MOD_RES (173)..(173): Selenocysteine
  MOD_RES (221)..(221): Selenocysteine
  MOD_RES (227)..(227): Selenocysteine
  MOD_RES (248)..(248): Selenocysteine
  MOD_RES (275)..(275): Selenocysteine
  MOD_RES (289)..(289): Selenocysteine
  MOD_RES (314)..(314): Selenocysteine
MQEAPAALPXEPGPSPVPAFLGKLWALVGDPGXDHLIRWSPSGXSFLVSDQSRFAKEVLPQYFKHSNMASFVRQLNMYGFRKVVSIEQGGLLRPERDHVEFQHPSFVRGREQLLERVRRKVPALRGDDGRWRPEDLGRLLGEVQALRGVQESXEARLRELRQQNEILWREVVXLRQSHGQQHRVIGKLIQCLFGPLQAGPSNAGGKRKLSLMLDEGSSCPXPAKFNXCPLPGALLQDPYFIQSPLPEXNLGLSPHRARGPIISDIPEDSPSPEGXRLSPSSDGRSPPAXACGCGAGHPGRERELQPRGAQECPXA

SEQ ID NO: 12672 - protein, 416 aa, Homo sapiens
  MOD_RES (10)..(10): Selenocysteine
  MOD_RES (33)..(33): Selenocysteine
  MOD_RES (44)..(44): Selenocysteine
  MOD_RES (153)..(153): Selenocysteine
  MOD_RES (173)..(173): Selenocysteine
  MOD_RES (221)..(221): Selenocysteine
  MOD_RES (227)..(227): Selenocysteine
  MOD_RES (248)..(248): Selenocysteine
  MOD_RES (275)..(275): Selenocysteine
  MOD_RES (332)..(332): Selenocysteine
  MOD_RES (370)..(370): Selenocysteine
  MOD_RES (395)..(395): Selenocysteine
  MOD_RES (399)..(399): Selenocysteine
  MOD_RES (404)..(404): Selenocysteine
MQEAPAALPXEPGPSPVPAFLGKLWALVGDPGXDHLIRWSPSGXSFLVSDQSRFAKEVLPQYFKHSNMASFVRQLNMYGFRKVVSIEQGGLLRPERDHVEFQHPSFVRGREQLLERVRRKVPALRGDDGRWRPEDLGRLLGEVQALRGVQESXEARLRELRQQNEILWREVVXLRQSHGQQHRVIGKLIQCLFGPLQAGPSNAGGKRKLSLMLDEGSSCPXPAKFNXCPLPGALLQDPYFIQSPLPEXNLGLSPHRARGPIISDIPEDSPSPEGXRLSPSSDGRRGPLGLESGDRSPESLLPPMLLQPPQESVEPAGPLDVLGPSLQGREWXLMDLDMELSLMQPLVPERGEPELAVKGLNSPSPGKDPXLGAPLLLDVQAALGGPALGLPGALXIYSXPESRXASYLGPEASPSP

SEQ ID NO: 12673 - protein, 492 aa, Homo sapiens
  MOD_RES (10)..(10): Selenocysteine
  MOD_RES (33)..(33): Selenocysteine
  MOD_RES (44)..(44): Selenocysteine
  MOD_RES (153)..(153): Selenocysteine
  MOD_RES (173)..(173): Selenocysteine
  MOD_RES (221)..(221): Selenocysteine
  MOD_RES (227)..(227): Selenocysteine
  MOD_RES (248)..(248): Selenocysteine
  MOD_RES (275)..(275): Selenocysteine
  MOD_RES (319)..(319): Selenocysteine
  MOD_RES (408)..(408): Selenocysteine
  MOD_RES (446)..(446): Selenocysteine
  MOD_RES (471)..(471): Selenocysteine
  MOD_RES (475)..(475): Selenocysteine
  MOD_RES (480)..(480): Selenocysteine
MQEAPAALPXEPGPSPVPAFLGKLWALVGDPGXDHLIRWSPSGXSFLVSDQSRFAKEVLPQYFKHSNMASFVRQLNMYGFRKVVSIEQGGLLRPERDHVEFQHPSFVRGREQLLERVRRKVPALRGDDGRWRPEDLGRLLGEVQALRGVQESXEARLRELRQQNEILWREVVXLRQSHGQQHRVIGKLIQCLFGPLQAGPSNAGGKRKLSLMLDEGSSCPXPAKFNXCPLPGALLQDPYFIQSPLPEXNLGLSPHRARGPIISDIPEDSPSPEGXRLSPSSDGRREKGLALLKEEPASPGGDGEAGLALAPNECDFCVXAPPPLPVAVVQAILEGKGSFSPEGPRNAQQPEPGDPREIPDRGPLGLESGDRSPESLLPPMLLQPPQESVEPAGPLDVLGPSLQGREWXLMDLDMELSLMQPLVPERGEPELAVKGLNSPSPGKDPXLGAPLLLDVQAALGGPALGLPGALXIYSXPESRXASYLGPEASPSP

SEQ ID NO: 12674 - protein, 318 aa, Homo sapiens
  MOD_RES (10)..(10): Selenocysteine
  MOD_RES (33)..(33): Selenocysteine
  MOD_RES (44)..(44): Selenocysteine
  MOD_RES (153)..(153): Selenocysteine
  MOD_RES (173)..(173): Selenocysteine
  MOD_RES (221)..(221): Selenocysteine
  MOD_RES (227)..(227): Selenocysteine
  MOD_RES (284)..(284): Selenocysteine
  MOD_RES (294)..(294): Selenocysteine
MQEAPAALPXEPGPSPVPAFLGKLWALVGDPGXDHLIRWSPSGXSFLVSDQSRFAKEVLPQYFKHSNMASFVRQLNMYGFRKVVSIEQGGLLRPERDHVEFQHPSFVRGREQLLERVRRKVPALRGDDGRWRPEDLGRLLGEVQALRGVQESXEARLRELRQQNEILWREVVXLRQSHGQQHRVIGKLIQCLFGPLQAGPSNAGGKRKLSLMLDEGSSCPXPAKFNXCPLPGALLQDPYFIQSPPRHCLWLWCRPSWKGKGASAPRGPGMPNSLNQGIPGRYLXGGLWAWKAGXGAQRVCCLRCCFSPLKKVWNLQGL

SEQ ID NO: 12675 - protein, 462 aa, Homo sapiens
  MOD_RES (10)..(10): Selenocysteine
  MOD_RES (33)..(33): Selenocysteine
  MOD_RES (44)..(44): Selenocysteine
  MOD_RES (153)..(153): Selenocysteine
  MOD_RES (173)..(173): Selenocysteine
  MOD_RES (221)..(221): Selenocysteine
  MOD_RES (227)..(227): Selenocysteine
  MOD_RES (246)..(246): Selenocysteine
  MOD_RES (260)..(260): Selenocysteine
  MOD_RES (269)..(269): Selenocysteine
  MOD_RES (273)..(273): Selenocysteine
  MOD_RES (378)..(378): Selenocysteine
  MOD_RES (416)..(416): Selenocysteine
  MOD_RES (441)..(441): Selenocysteine
  MOD_RES (445)..(445): Selenocysteine
  MOD_RES (450)..(450): Selenocysteine
MQEAPAALPXEPGPSPVPAFLGKLWALVGDPGXDHLIRWSPSGXSFLVSDQSRFAKEVLPQYFKHSNMASFVRQLNMYGFRKVVSIEQGGLLRPERDHVEFQHPSFVRGREQLLERVRRKVPALRGDDGRWRPEDLGRLLGEVQALRGVQESXEARLRELRQQNEILWREVVXLRQSHGQQHRVIGKLIQCLFGPLQAGPSNAGGKRKLSLMLDEGSSCPXPAKFNXCPLPGALLQDPYFIQSPSXYSLSQRQIWALALXGPGAPSSLXSQKXLHPLRGPGFLPPVMAGAPPPLPVAVVQAILEGKGSFSPEGPRNAQQPEPGDPREIPDRGPLGLESGDRSPESLLPPMLLQPPQESVEPAGPLDVLGPSLQGREWXLMDLDMELSLMQPLVPERGEPELAVKGLNSPSPGKDPXLGAPLLLDVQAALGGPALGLPGALXIYSXPESRXASYLGPEASPSP

SEQ ID NO: 12676 - protein, 47 aa, Homo sapiens
  MOD_RES (10)..(10): Selenocysteine
  MOD_RES (33)..(33): Selenocysteine
  MOD_RES (42)..(42): Selenocysteine
MQEAPAALPXEPGPSPVPAFLGKLWALVGDPGXDHLIRWSPXVFGRW

SEQ ID NO: 12677 - protein, 183 aa, Homo sapiens
  MOD_RES (1)..(1): Any amino acid
  MOD_RES (20)..(20): Selenocysteine
  MOD_RES (57)..(57): Selenocysteine
  MOD_RES (59)..(59): Selenocysteine
  MOD_RES (75)..(75): Selenocysteine
  MOD_RES (84)..(84): Selenocysteine
  MOD_RES (88)..(88): Selenocysteine
XARLRELRQQNEILWREVVXLRQSHGQQHRVIGKLIQCLFGPLQAGPSNAGGKRKLXPXSSSRLSQRQIWALALXGPGAPSSLXSQKXLHPLRGPGFLPPVMAGAPPPLPVAVVQAILEGKGSFSPEGPRNAQQPEPGDPREIPDRGPLGLESGDRSPESLLPPMLLQPPQESVEPAGPLDVL

SEQ ID NO: 12678 - protein, 17 aa, Homo sapiens
  MOD_RES (1)..(1): Any amino acid
XFSLRPGPASPRDKFGP

SEQ ID NO: 12679 - protein, 63 aa, Homo sapiens
  MOD_RES (1)..(1): Any amino acid
  MOD_RES (41)..(41): Selenocysteine
XMDLDMELSLMQPLVPERGEPELAVKGLNSPSPGPHARGPXPAGCPGGLGRPSPGPAWGFNHL

SEQ ID NO: 12680 - protein, 77 aa, Homo sapiens
  MOD_RES (1)..(1): Any amino acid
  MOD_RES (37)..(37): Selenocysteine
  MOD_RES (59)..(59): Selenocysteine
XRKVPALRGDDGRWRPEDLGRLLGEAERDLVAGGGDXSAEPRSAAPGHWQADPVSLWAXSGGAEQCRRQEKAVPDAG

SEQ ID NO: 12681 - protein, 224 aa, Homo sapiens
  MOD_RES (1)..(1): Any amino acid
  MOD_RES (2)..(2): Selenocysteine
  MOD_RES (31)..(31): Selenocysteine
  MOD_RES (44)..(44): Selenocysteine
  MOD_RES (140)..(140): Selenocysteine
  MOD_RES (178)..(178): Selenocysteine
  MOD_RES (203)..(203): Selenocysteine
  MOD_RES (207)..(207): Selenocysteine
  MOD_RES (212)..(212): Selenocysteine
XXCPLPGALLQDPYFIQSEEKMEASLPPNQXQALQHGLSLLPQXFSLRPGPAPPPLPVAVVQAILEGKGSFSPEGPRNAQQPEPGDPREIPDRGPLGLESGDRSPESLLPPMLLQPPQESVEPAGPLDVLGPSLQGREWXLMDLDMELSLMQPLVPERGEPELAVKGLNSPSPGKDPXLGAPLLLDVQAALGGPALGLPGALXIYSXPESRXASYLGPEASPSP

SEQ ID NO: 12682 - protein, 141 aa, Homo sapiens
  MOD_RES (1)..(1): Any amino acid
  MOD_RES (84)..(84): Selenocysteine
  MOD_RES (127)..(127): Selenocysteine
  MOD_RES (138)..(138): Selenocysteine
XVAVVQAILEGKGSFSPEGPRNAQQPEPGDPREIPDRGPLGLESGDRSPESLLPPMLLQPPQESVEPAGPLDVLGPSLQGREWXLMDLDMELSLMQPLVPERGEPELAVKGLNSPSPALLRAGLPPXWARKPVPPPKXPRL

SEQ ID NO: 12683 - protein, 475 aa, Homo sapiens
  MOD_RES (7)..(7): Selenocysteine
  MOD_RES (87)..(87): Selenocysteine
  MOD_RES (94)..(94): Selenocysteine
  MOD_RES (103)..(103): Selenocysteine
  MOD_RES (123)..(123): Selenocysteine
  MOD_RES (126)..(126): Selenocysteine
  MOD_RES (142)..(142): Selenocysteine
  MOD_RES (145)..(145): Selenocysteine
  MOD_RES (147)..(147): Selenocysteine
  MOD_RES (152)..(153): Selenocysteine
  MOD_RES (163)..(163): Selenocysteine
  MOD_RES (175)..(175): Selenocysteine
  MOD_RES (187)..(187): Selenocysteine
  MOD_RES (196)..(196): Selenocysteine
  MOD_RES (206)..(206): Selenocysteine
  MOD_RES (208)..(208): Selenocysteine
  MOD_RES (240)..(241): Selenocysteine
  MOD_RES (245)..(245): Selenocysteine
  MOD_RES (247)..(247): Selenocysteine
  MOD_RES (281)..(281): Selenocysteine
  MOD_RES (312)..(312): Selenocysteine
  MOD_RES (325)..(325): Selenocysteine
  MOD_RES (342)..(342): Selenocysteine
  MOD_RES (345)..(345): Selenocysteine
  MOD_RES (353)..(353): Selenocysteine
  MOD_RES (391)..(391): Selenocysteine
  MOD_RES (402)..(402): Selenocysteine
  MOD_RES (431)..(431): Selenocysteine
  MOD_RES (435)..(435): Selenocysteine
MEALLSXPINPNNFPAKLWRLVNSPRYRSIRWDGRGEGLLIDQPLFEAELLSPPAGPRPEPHGPVAVGQFHRSFRRDSLSPYSCVSXPSHDHSXYPLKGLDRXPVPHRIWQNSLGMHPGQVEXSPXFSDKGVPFPVLQRFPXEVXYXLQPSXXSVHVQQGPQXMVSSSQKYSNYXPSAQYSQAYYPXAVLQCCSPXHMDALSSCVXPXASSYAHCNYFQNPSMQSSYPVEFLPSNWPCSXXDENXKXEVNLEAVFQIVDELHSSPKLEMVKVEPVENQCPXSPSYRGQHILANSNNSNPCSASQASQLEPLXPVGSDIMSFVVGXEQAVACSLPQSPEYIYXIHXAQPVENSXIQESAAIQQAHVKLKEHLNHNPSPSSVVFVQEGPPFSXHQVDANIKCQXSSRENILPSEQMGFLISEMGPASKPSEDXGLAXPARYREHRSNSQQGKSPDLHLLVDVACKQERFPKEEELKE

SEQ ID NO: 12684 - protein, 596 aa, Homo sapiens
  MOD_RES (7)..(7): Selenocysteine
  MOD_RES (62)..(62): Selenocysteine
  MOD_RES (74)..(75): Selenocysteine
  MOD_RES (78)..(78): Selenocysteine
  MOD_RES (131)..(131): Selenocysteine
  MOD_RES (158)..(158): Selenocysteine
  MOD_RES (164)..(164): Selenocysteine
  MOD_RES (208)..(208): Selenocysteine
  MOD_RES (215)..(215): Selenocysteine
  MOD_RES (224)..(224): Selenocysteine
  MOD_RES (244)..(244): Selenocysteine
  MOD_RES (247)..(247): Selenocysteine
  MOD_RES (263)..(263): Selenocysteine
  MOD_RES (266)..(266): Selenocysteine
  MOD_RES (268)..(268): Selenocysteine
  MOD_RES (273)..(274): Selenocysteine
  MOD_RES (284)..(284): Selenocysteine
  MOD_RES (296)..(296): Selenocysteine
  MOD_RES (308)..(308): Selenocysteine
  MOD_RES (317)..(317): Selenocysteine
  MOD_RES (327)..(327): Selenocysteine
  MOD_RES (329)..(329): Selenocysteine
  MOD_RES (361)..(362): Selenocysteine
  MOD_RES (366)..(366): Selenocysteine
  MOD_RES (368)..(368): Selenocysteine
  MOD_RES (402)..(402): Selenocysteine
  MOD_RES (433)..(433): Selenocysteine
  MOD_RES (446)..(446): Selenocysteine
  MOD_RES (463)..(463): Selenocysteine
  MOD_RES (466)..(466): Selenocysteine
  MOD_RES (474)..(474): Selenocysteine
  MOD_RES (512)..(512): Selenocysteine
  MOD_RES (523)..(523): Selenocysteine
  MOD_RES (552)..(552): Selenocysteine
  MOD_RES (556)..(556): Selenocysteine
MEALLSXPINPNNFPAKLWRLVNSPRYRSIRWDGRGEGLLIDQPLFEAELLSPPGPGGGGGXAGAGAEPELFKXXSFXSFIRQLNLYGFRKVVLGGPGGGKPAGNGPLHHFHNPHFRRDQPQLLVHLKRLXSANKAKLAAGLEVPCRPPNRFQRLLIXSASAAXAPLQHQQPPPPAGPRPEPHGPVAVGQFHRSFRRDSLSPYSCVSXPSHDHSXYPLKGLDRXPVPHRIWQNSLGMHPGQVEXSPXFSDKGVPFPVLQRFPXEVXYXLQPSXXSVHVQQGPQXMVSSSQKYSNYXPSAQYSQAYYPXAVLQCCSPXHMDALSSCVXPXASSYAHCNYFQNPSMQSSYPVEFLPSNWPCSXXDENXKXEVNLEAVFQIVDELHSSPKLEMVKVEPVENQCPXSPSYRGQHILANSNNSNPCSASQASQLEPLXPVGSDIMSFVVGXEQAVACSLPQSPEYIYXIHXAQPVENSXIQESAAIQQAHVKLKEHLNHNPSPSSVVFVQEGPPFSXHQVDANIKCQXSSRENILPSEQMGFLISEMGPASKPSEDXGLAXPARYREHRSNSQQGKSPDLHLLVDVACKQERFPKEEELKE

SEQ ID NO: 12685 - protein, 423 aa, Homo sapiens
  MOD_RES (37)..(37): Selenocysteine
  MOD_RES (54)..(54): Selenocysteine
  MOD_RES (63)..(63): Selenocysteine
  MOD_RES (147)..(148): Selenocysteine
  MOD_RES (169)..(169): Selenocysteine
  MOD_RES (172)..(172): Selenocysteine
  MOD_RES (174)..(174): Selenocysteine
  MOD_RES (238)..(238): Selenocysteine
  MOD_RES (244)..(244): Selenocysteine
  MOD_RES (253)..(253): Selenocysteine
  MOD_RES (264)..(264): Selenocysteine
  MOD_RES (275)..(275): Selenocysteine
  MOD_RES (292)..(292): Selenocysteine
  MOD_RES (307)..(307): Selenocysteine
  MOD_RES (328)..(328): Selenocysteine
  MOD_RES (341)..(341): Selenocysteine
  MOD_RES (346)..(346): Selenocysteine
  MOD_RES (351)..(352): Selenocysteine
  MOD_RES (370)..(370): Selenocysteine
  MOD_RES (402)..(402): Selenocysteine
  MOD_RES (423)..(423): Selenocysteine
MEDKRSLSMARCEERNSRGQDHGLERVPFPPQLQSEXYLHPADPSPAWDDPGSXGSPNLRLLXEEIAFQPLAEEASFRRPHPDGDVPPQGEDNLLSLPFPQKLWRLVSSNQFSSIWWDDSGACRVINQKLFEKEILKRDVAHKVFAXXSIKSFFRQLNLYGFRKRRQCXFRXFXRIFSAKRLVSILNKLEFYCHPYFQRDSPHLLVRMKRRVGVKSAPRHQEEDKPEAAGSCLAPADXEQQDHXSPNENDQVXPQHREPAGPNXQIRSGSAPPAXPVMVPDSAVASDNSPVXQPAGEWSEGSQAHVXPVAAVPGPAALPFLYVPGSPXQMNSYGPVVALPXASRSXLAMDXXGLPAPGMLPFCHLWVPVXLVAAGAAQPAASMVMFPHLPALHHHCPHSHRXSQYMPASDGPQAYPDYADQSX

SEQ ID NO: 12686 - protein, 203 aa, Homo sapiens
  MOD_RES (8)..(8): Selenocysteine
  MOD_RES (18)..(18): Selenocysteine
  MOD_RES (24)..(24): Selenocysteine
  MOD_RES (32)..(32): Selenocysteine
  MOD_RES (63)..(63): Selenocysteine
  MOD_RES (103)..(103): Selenocysteine
  MOD_RES (119)..(119): Selenocysteine
  MOD_RES (128)..(128): Selenocysteine
  MOD_RES (158)..(158): Selenocysteine
  MOD_RES (175)..(175): Selenocysteine
  MOD_RES (184)..(184): Selenocysteine
MAHVSSEXQDVSPKDELXASEASXRSPLCEHXFPGDSDLRSMIEEHAFQVLSQGSLLESPSYXVCVSEPDKDDDFLSLNFPRKLWKIVESDQFKSISWDENGXCIVINEELFKKEILEXKAPYRIFQXDAIKSFVRQLNLYGFSKIQQNFQRSAFLAXFLSEEKESSVLSKIRFXKMKLSRSSXYENRYLCCNLHLKDESNYS

SEQ ID NO: 12687 - protein, 214 aa, Homo sapiens
  MOD_RES (8)..(8): Selenocysteine
  MOD_RES (18)..(18): Selenocysteine
  MOD_RES (24)..(24): Selenocysteine
  MOD_RES (32)..(32): Selenocysteine
  MOD_RES (63)..(63): Selenocysteine
  MOD_RES (103)..(103): Selenocysteine
  MOD_RES (119)..(119): Selenocysteine
  MOD_RES (128)..(128): Selenocysteine
  MOD_RES (158)..(158): Selenocysteine
  MOD_RES (185)..(185): Selenocysteine
  MOD_RES (206)..(206): Selenocysteine
MAHVSSEXQDVSPKDELXASEASXRSPLCEHXFPGDSDLRSMIEEHAFQVLSQGSLLESPSYXVCVSEPDKDDDFLSLNFPRKLWKIVESDQFKSISWDENGXCIVINEELFKKEILEXKAPYRIFQXDAIKSFVRQLNLYGFSKIQQNFQRSAFLAXFLSEEKESSVLSKLHVFVFHHSLFGAXFGEHHFQPCPLPSGNKAPISXWSGDSWLL

SEQ ID NO: 12688 - protein, 401 aa, Homo sapiens
  MOD_RES (8)..(8): Selenocysteine
  MOD_RES (18)..(18): Selenocysteine
  MOD_RES (24)..(24): Selenocysteine
  MOD_RES (32)..(32): Selenocysteine
  MOD_RES (63)..(63): Selenocysteine
  MOD_RES (103)..(103): Selenocysteine
  MOD_RES (119)..(119): Selenocysteine
  MOD_RES (128)..(128): Selenocysteine
  MOD_RES (158)..(158): Selenocysteine
  MOD_RES (205)..(205): Selenocysteine
  MOD_RES (250)..(250): Selenocysteine
  MOD_RES (277)..(277): Selenocysteine
  MOD_RES (287)..(287): Selenocysteine
  MOD_RES (297)..(298): Selenocysteine
  MOD_RES (306)..(306): Selenocysteine
  MOD_RES (319)..(322): Selenocysteine
  MOD_RES (339)..(339): Selenocysteine
  MOD_RES (347)..(347): Selenocysteine
  MOD_RES (374)..(374): Selenocysteine
MAHVSSEXQDVSPKDELXASEASXRSPLCEHXFPGDSDLRSMIEEHAFQVLSQGSLLESPSYXVCVSEPDKDDDFLSLNFPRKLWKIVESDQFKSISWDENGXCIVINEELFKKEILEXKAPYRIFQXDAIKSFVRQLNLYGFSKIQQNFQRSAFLAXFLSEEKESSVLSKLKFYYNPNFKRGYPQLLVRVKRRIGVKNASPISXLFNEDFNKKHFRAGANMENHNSALAAEASEESLFSASKNLNMPLXRESSVRQIIANSSVPIRSGFPPPSPSXSVGPSEQIAXDQHAILNQLXXIHMHSHSXYMQARGHIVNFIXXXXSQYHIISPLQNGYFGLXVEPSAVPXRYPLVSVNEAPYRNMLPAGNPWLQMPXIADRSAAPHSRLALQPSPLDKYHPNYN

SEQ ID NO: 12689 - protein, 173 aa, Homo sapiens
  MOD_RES (2)..(2): Selenocysteine
  MOD_RES (43)..(43): Selenocysteine
  MOD_RES (64)..(64): Selenocysteine
  MOD_RES (75)..(75): Selenocysteine
  MOD_RES (82)..(82): Selenocysteine
  MOD_RES (97)..(97): Selenocysteine
  MOD_RES (157)..(158): Selenocysteine
  MOD_RES (162)..(162): Selenocysteine
MXEAGKLPLPLPPRLDWDAENLLESQPLGSFLIRVSHSHVGYXLSYKAQSSCCHFMVKLLDDGXFMIPGEKVAHXSLDALVXFHQQKPIEPRRELLXQPCRQKDPANVDYEDLFLYSNAVAEEAACPVSAPEEASPKPVLCHQSKERKPSAEMNRIXXKEAXSSCPPKSPLGE

SEQ ID NO: 12690 - protein, 69 aa, Homo sapiens
  MOD_RES (2)..(2): Selenocysteine
  MOD_RES (21)..(21): Selenocysteine
MXEAGKLPLPLPPRLDWFVHXQMGQLAQDGVPEWFHGAISRDSLGSGVYSPLEEAEGQKGRDDCLRSHS

SEQ ID NO: 12691 - protein, 72 aa, Homo sapiens
  MOD_RES (2)..(2): Selenocysteine
  MOD_RES (21)..(21): Selenocysteine
  MOD_RES (68)..(68): Selenocysteine
MXEAGKLPLPLPPRLDWFVHXQMGQLAQDGVPEWFHGAISREDAENLLESQPLGSFLIRVSHSHVGYXLSYK

SEQ ID NO: 12692 - protein, 352 aa, Homo sapiens
  MOD_RES (2)..(2): Selenocysteine
  MOD_RES (21)..(21): Selenocysteine
  MOD_RES (68)..(68): Selenocysteine
  MOD_RES (89)..(89): Selenocysteine
  MOD_RES (100)..(100): Selenocysteine
  MOD_RES (107)..(107): Selenocysteine
  MOD_RES (122)..(122): Selenocysteine
  MOD_RES (182)..(183): Selenocysteine
  MOD_RES (187)..(187): Selenocysteine
  MOD_RES (199)..(199): Selenocysteine
  MOD_RES (227)..(227): Selenocysteine
  MOD_RES (240)..(240): Selenocysteine
  MOD_RES (247)..(247): Selenocysteine
  MOD_RES (259)..(259): Selenocysteine
  MOD_RES (266)..(266): Selenocysteine
  MOD_RES (272)..(272): Selenocysteine
  MOD_RES (290)..(290): Selenocysteine
  MOD_RES (303)..(303): Selenocysteine
MXEAGKLPLPLPPRLDWFVHXQMGQLAQDGVPEWFHGAISREDAENLLESQPLGSFLIRVSHSHVGYXLSYKAQSSCCHFMVKLLDDGXFMIPGEKVAHXSLDALVXFHQQKPIEPRRELLXQPCRQKDPANVDYEDLFLYSNAVAEEAACPVSAPEEASPKPVLCHQSKERKPSAEMNRIXXKEAXSSCPPKSPLGEXRQKLWRSLKMLPERGQRVRQQLKSHLAXVNLSSLLDVRRSXVISGPGXGKGSQDHSGDPXSGDRGYXDPCVAXSLKSPSQPQAPKDRKVPXRKAERSVSCIEVXPGDRSWHQMVVRALSSQESKPEHQGLAEPENDQLPEEYQQPPPFAPGYC

SEQ ID NO: 12693 - protein, 85 aa, Homo sapiens
  MOD_RES (2)..(2): Selenocysteine
  MOD_RES (21)..(21): Selenocysteine
  MOD_RES (68)..(68): Selenocysteine
MXEAGKLPLPLPPRLDWFVHXQMGQLAQDGVPEWFHGAISREDAENLLESQPLGSFLIRVSHSHVGYXLSYNVSAEPKAAAAISW

SEQ ID NO: 12694 - protein, 40 aa, Homo sapiens
  MOD_RES (1)..(1): Any amino acid
  MOD_RES (5)..(5): Selenocysteine
  MOD_RES (21)..(21): Selenocysteine
  MOD_RES (26)..(26): Selenocysteine
  MOD_RES (30)..(30): Selenocysteine
XMLRXCWSHSHWDPFSSGSVXAMWAXHSPXKPKAAAAISW

SEQ ID NO: 12695 - protein, 174 aa, Homo sapiens
  MOD_RES (5)..(5): Selenocysteine
  MOD_RES (7)..(7): Selenocysteine
  MOD_RES (19)..(19): Selenocysteine
  MOD_RES (36)..(36): Selenocysteine
  MOD_RES (65)..(65): Selenocysteine
  MOD_RES (88)..(88): Selenocysteine
  MOD_RES (90)..(90): Selenocysteine
  MOD_RES (94)..(94): Selenocysteine
  MOD_RES (99)..(99): Selenocysteine
  MOD_RES (115)..(115): Selenocysteine
  MOD_RES (126)..(126): Selenocysteine
  MOD_RES (150)..(150): Selenocysteine
MPEEXQXQDQPMEEEEVEXFAFQAEIAQLMSLIINXFYSNKEIFLRELISNSSDALDKIRYESLXDPSKLDSGKELHINLIPNKQDRXLXIVDXGIGMXKADLINNLGEPMGRGXKVILHLKEDQXEYLEERRIKEIVKKHSQFIGYPIXLFVEKERDKEVSDDEAEEKEDKEE

SEQ ID NO: 12696 - protein, 732 aa, Homo sapiens
  MOD_RES (5)..(5): Selenocysteine
  MOD_RES (7)..(7): Selenocysteine
  MOD_RES (19)..(19): Selenocysteine
  MOD_RES (36)..(36): Selenocysteine
  MOD_RES (65)..(65): Selenocysteine
  MOD_RES (88)..(88): Selenocysteine
  MOD_RES (90)..(90): Selenocysteine
  MOD_RES (94)..(94): Selenocysteine
  MOD_RES (99)..(99): Selenocysteine
  MOD_RES (109)..(109): Selenocysteine
  MOD_RES (115)..(115): Selenocysteine
  MOD_RES (149)..(149): Selenocysteine
  MOD_RES (152)..(152): Selenocysteine
  MOD_RES (171)..(171): Selenocysteine
  MOD_RES (174)..(174): Selenocysteine
  MOD_RES (176)..(176): Selenocysteine
  MOD_RES (184)..(184): Selenocysteine
  MOD_RES (195)..(195): Selenocysteine
  MOD_RES (219)..(219): Selenocysteine
  MOD_RES (293)..(293): Selenocysteine
  MOD_RES (298)..(298): Selenocysteine
  MOD_RES (305)..(305): Selenocysteine
  MOD_RES (317)..(317): Selenocysteine
  MOD_RES (425)..(425): Selenocysteine
  MOD_RES (467)..(467): Selenocysteine
  MOD_RES (482)..(482): Selenocysteine
  MOD_RES (495)..(495): Selenocysteine
  MOD_RES (498)..(498): Selenocysteine
  MOD_RES (540)..(540): Selenocysteine
  MOD_RES (545)..(545): Selenocysteine
  MOD_RES (566)..(566): Selenocysteine
  MOD_RES (594)..(594): Selenocysteine
  MOD_RES (601)..(601): Selenocysteine
  MOD_RES (603)..(603): Selenocysteine
  MOD_RES (607)..(607): Selenocysteine
  MOD_RES (624)..(624): Selenocysteine
  MOD_RES (645)..(645): Selenocysteine
  MOD_RES (669)..(669): Selenocysteine
  MOD_RES (683)..(683): Selenocysteine
  MOD_RES (704)..(704): Selenocysteine
  MOD_RES (708)..(708): Selenocysteine
  MOD_RES (713)..(713): Selenocysteine
  MOD_RES (725)..(725): Selenocysteine
MPEEXQXQDQPMEEEEVEXFAFQAEIAQLMSLIINXFYSNKEIFLRELISNSSDALDKIRYESLXDPSKLDSGKELHINLIPNKQDRXLXIVDXGIGMXKADLINNLGXIAKSGXKAFMEALQAGADISMIGQFGVGFYSAYLVAEKVXVIXKHNDDEQYAWESSAGGSFXVRXDXGEPMGRGXKVILHLKEDQXEYLEERRIKEIVKKHSQFIGYPIXLFVEKERDKEVSDDEAEEKEDKEEEKEKEEKESEDKPEIEDVGSDEEEEKKDGDKKKKKKIKEKYIDQEELNKXKPIWXRNPDDIXNEEYGEFYKSLXNDWEDHLAVKHFSVEGQLEFRALLFVPRRAPFDLFENRKKKNNIKLYVRRVFIMDNCEELIPEYLNFIRGVVDSEDLPLNISREMLQQSKILKVIRKNLVKKCLELFXELAEDKENYKKFYEQFSKNIKLGIHEDSQNRKKLSELLRYYXSASGDEMVSLKDYCXRMKENQKHIYYIXGEXKDQVANSAFVERLRKHGLEVIYMIEPIDEYCVQQLKEFEGKXLVSVXKEGLELPEDEEEKKKQEEKKXKFENLCKIMKDILEKKVEKVVVSNRLVXSPCCIVXSXYGWXANMERIMKAQALRDNSXMGYMAAKKHLEINPDHSIIEXLRQKAEADKNDKSVKDLVILLYEXALLSSGFSLEDPQXHANRIYRMIKLGLGIDEDDPXADDXSAAVXEEMPPLEGDDDXSRMEEVD

SEQ ID NO: 12697 - protein, 100 aa, Homo sapiens
  MOD_RES (11)..(11): Selenocysteine
  MOD_RES (75)..(76): Selenocysteine
  MOD_RES (93)..(93): Selenocysteine
MPPCSGGDGSXPPGPSLRDRDCPAQSAEYPRDRLDPRPGSPSEASSPPFLRRAPVNWYQEKAQVFLWHLMVSGSXXLLCLWKQPFHVSAFPVXASLAFRQ

SEQ ID NO: 12698 - protein, 80 aa, Homo sapiens
  MOD_RES (11)..(11): Selenocysteine
  MOD_RES (61)..(61): Selenocysteine
MPPCSGGDGSXPPGPSLRDRDCPAQSAEYPRDRLDPRPGSPSEASSPPFLRRCLRKPRPKXNRWRRRRLRRSPFRQKLPS

SEQ ID NO: 12699 - protein, 854 aa, Homo sapiens
  MOD_RES (11)..(11): Selenocysteine
  MOD_RES (76)..(77): Selenocysteine
  MOD_RES (94)..(94): Selenocysteine
  MOD_RES (127)..(127): Selenocysteine
  MOD_RES (129)..(129): Selenocysteine
  MOD_RES (141)..(141): Selenocysteine
  MOD_RES (158)..(158): Selenocysteine
  MOD_RES (187)..(187): Selenocysteine
  MOD_RES (210)..(210): Selenocysteine
  MOD_RES (212)..(212): Selenocysteine
  MOD_RES (216)..(216): Selenocysteine
  MOD_RES (221)..(221): Selenocysteine
  MOD_RES (231)..(231): Selenocysteine
  MOD_RES (237)..(237): Selenocysteine
  MOD_RES (271)..(271): Selenocysteine
  MOD_RES (274)..(274): Selenocysteine
  MOD_RES (293)..(293): Selenocysteine
  MOD_RES (296)..(296): Selenocysteine
  MOD_RES (298)..(298): Selenocysteine
  MOD_RES (306)..(306): Selenocysteine
  MOD_RES (317)..(317): Selenocysteine
  MOD_RES (341)..(341): Selenocysteine
  MOD_RES (415)..(415): Selenocysteine
  MOD_RES (420)..(420): Selenocysteine
  MOD_RES (427)..(427): Selenocysteine
  MOD_RES (439)..(439): Selenocysteine
  MOD_RES (547)..(547): Selenocysteine
  MOD_RES (589)..(589): Selenocysteine
  MOD_RES (604)..(604): Selenocysteine
  MOD_RES (617)..(617): Selenocysteine
  MOD_RES (620)..(620): Selenocysteine
  MOD_RES (662)..(662): Selenocysteine
  MOD_RES (667)..(667): Selenocysteine
  MOD_RES (688)..(688): Selenocysteine
  MOD_RES (716)..(716): Selenocysteine
  MOD_RES (723)..(723): Selenocysteine
  MOD_RES (725)..(725): Selenocysteine
  MOD_RES (729)..(729): Selenocysteine
  MOD_RES (746)..(746): Selenocysteine
  MOD_RES (767)..(767): Selenocysteine
  MOD_RES (791)..(791): Selenocysteine
  MOD_RES (805)..(805): Selenocysteine
  MOD_RES (826)..(826): Selenocysteine
  MOD_RES (830)..(830): Selenocysteine
  MOD_RES (835)..(835): Selenocysteine
  MOD_RES (847)..(847): Selenocysteine
MPPCSGGDGSXPPGPSLRDRDCPAQSAEYPRDRLDPRPGSPSEASSPPFLRSRAPVNWYQEKAQVFLWHLMVSGSXXLLCLWKQPFHVSAFPVXASLAFRQSQGAGQHLYKDLQPFILLRLLMPEEXQXQDQPMEEEEVEXFAFQAEIAQLMSLIINXFYSNKEIFLRELISNSSDALDKIRYESLXDPSKLDSGKELHINLIPNKQDRXLXIVDXGIGMXKADLINNLGXIAKSGXKAFMEALQAGADISMIGQFGVGFYSAYLVAEKVXVIXKHNDDEQYAWESSAGGSFXVRXDXGEPMGRGXKVILHLKEDQXEYLEERRIKEIVKKHSQFIGYPIXLFVEKERDKEVSDDEAEEKEDKEEEKEKEEKESEDKPEIEDVGSDEEEEKKDGDKKKKKKIKEKYIDQEELNKXKPIWXRNPDDIXNEEYGEFYKSLXNDWEDHLAVKHFSVEGQLEFRALLFVPRRAPFDLFENRKKKNNIKLYVRRVFIMDNCEELIPEYLNFIRGVVDSEDLPLNISREMLQQSKILKVIRKNLVKKCLELFXELAEDKENYKKFYEQFSKNIKLGIHEDSQNRKKLSELLRYYXSASGDEMVSLKDYCXRMKENQKHIYYIXGEXKDQVANSAFVERLRKHGLEVIYMIEPIDEYCVQQLKEFEGKXLVSVXKEGLELPEDEEEKKKQEEKKXKFENLCKIMKDILEKKVEKVVVSNRLVXSPCCIVXSXYGWXANMERIMKAQALRDNSXMGYMAAKKHLEINPDHSIIEXLRQKAEADKNDKSVKDLVILLYEXALLSSGFSLEDPQXHANRIYRMIKLGLGIDEDDPXADDXSAAVXEEMPPLEGDDDXSRMEEVD

SEQ ID NO: 12700 - protein, 52 aa, Homo sapiens
  MOD_RES (1)..(1): Any amino acid
  MOD_RES (4)..(4): Selenocysteine
  MOD_RES (21)..(21): Selenocysteine
  MOD_RES (52)..(52): Selenocysteine
XVEXFAFQAEIAQLMSLIINXFYSNKEIFLRELISNSSDVNLWVVEQKLSYX

SEQ ID NO: 12701 - protein, 724 aa, Homo sapiens
  MOD_RES (14)..(14): Selenocysteine
  MOD_RES (31)..(31): Selenocysteine
  MOD_RES (60)..(60): Selenocysteine
  MOD_RES (83)..(83): Selenocysteine
  MOD_RES (85)..(85): Selenocysteine
  MOD_RES (89)..(89): Selenocysteine
  MOD_RES (94)..(94): Selenocysteine
  MOD_RES (104)..(104): Selenocysteine
  MOD_RES (110)..(110): Selenocysteine
  MOD_RES (147)..(147): Selenocysteine
  MOD_RES (166)..(166): Selenocysteine
  MOD_RES (179)..(179): Selenocysteine
  MOD_RES (190)..(190): Selenocysteine
  MOD_RES (214)..(214): Selenocysteine
  MOD_RES (269)..(269): Selenocysteine
  MOD_RES (285)..(285): Selenocysteine
  MOD_RES (290)..(290): Selenocysteine
  MOD_RES (297)..(297): Selenocysteine
  MOD_RES (309)..(309): Selenocysteine
  MOD_RES (446)..(446): Selenocysteine
  MOD_RES (459)..(459): Selenocysteine
  MOD_RES (467)..(467): Selenocysteine
  MOD_RES (479)..(479): Selenocysteine
  MOD_RES (487)..(487): Selenocysteine
  MOD_RES (514)..(514): Selenocysteine
  MOD_RES (537)..(537): Selenocysteine
  MOD_RES (579)..(579): Selenocysteine
  MOD_RES (593)..(593): Selenocysteine
  MOD_RES (595)..(595): Selenocysteine
  MOD_RES (599)..(599): Selenocysteine
  MOD_RES (616)..(616): Selenocysteine
  MOD_RES (637)..(637): Selenocysteine
  MOD_RES (661)..(661): Selenocysteine
  MOD_RES (675)..(675): Selenocysteine
MPEEVHHGEEEVEXFAFQAEIAQLMSLIINXFYSNKEIFLRELISNASDALDKIRYESLXDPSKLDSGKELKIDIIPNPQERXLXLVDXGIGMXKADLINNLGXIAKSGXKAFMEALQAGADISMIGQFGVGFYSAYLVAEKVVVIXKHNDDEQYAWESSAGGSFXVRADHGEPIGRGXKVILHLKEDQXEYLEERRVKEVVKKHSQFIGYPIXLYLEKEREKEISDDEAEEEKGEKEEEDKDDEEKPKIEDVGSDEEDDSGKDKKKKXKKIKEKYIDQEELNKXKPIWXRNPDDIXQEEYGEFYKSLXNDWEDHLAVKHFSVEGQLEFRALLFIPRRAPFDLFENKKKKNNIKLYVRRVFIMDSCDELIPEYLNFIRGVVDSEDLPLNISREMLQQSKILKVIRKNIVKKCLELFSELAEDKENYKKFYEAFSKNLKLGIHEDSXNRRRLSELLRYHXSQSGDEMXSLSEYVSRMKEXQKSIYYIXGESKEQVANSAFVERVRKRGFEVVYMXEPIDEYCVQQLKEFDGKSLVSVXKEGLELPEDEEEKKKMEESKAKFENLCKLMKEILDKKVEKVXISNRLVSSPCCIVXSXYGWXANMERIMKAQALRDNSXMGYMMAKKHLEINPDHPIVEXLRQKAEADKNDKAVKDLVVLLFEXALLSSGFSLEDPQXHSNRIYRMIKLGLGIDEDEVAAEEPNAAVPDEIPPLEGDEDASRMEEVD

SEQ ID NO: 12702 - protein, 49 aa, Homo sapiens
  MOD_RES (37)..(37): Selenocysteine
  MOD_RES (49)..(49): Selenocysteine
MMKLIINSLYKNKEIFLRELISNASDALDKIRLISLXDENALSGNEELX

SEQ ID NO: 12703 - protein, 315 aa, Homo sapiens
  MOD_RES (15)..(15): Selenocysteine
  MOD_RES (30)..(30): Selenocysteine
  MOD_RES (44)..(44): Selenocysteine
  MOD_RES (121)..(121): Selenocysteine
  MOD_RES (133)..(133): Selenocysteine
  MOD_RES (148)..(148): Selenocysteine
  MOD_RES (150)..(150): Selenocysteine
  MOD_RES (155)..(155): Selenocysteine
  MOD_RES (165)..(165): Selenocysteine
  MOD_RES (171)..(171): Selenocysteine
  MOD_RES (179)..(179): Selenocysteine
  MOD_RES (188)..(188): Selenocysteine
  MOD_RES (212)..(212): Selenocysteine
  MOD_RES (219)..(219): Selenocysteine
  MOD_RES (240)..(240): Selenocysteine
  MOD_RES (245)..(246): Selenocysteine
  MOD_RES (248)..(248): Selenocysteine
  MOD_RES (263)..(263): Selenocysteine
  MOD_RES (286)..(286): Selenocysteine
  MOD_RES (288)..(288): Selenocysteine
MRALWVLGLCCVLLXFGSVRADDEVDVDGXVEEDLGKSREGSRXDDEVVQREEEAIQLDGLNASQIRELREKSEKFAFQAEVNRMMKLIINSLYKNKEIFLRELISNASDALDKIRLISLXDENALSGNEELXVKIKCDKEKNLLHVXDXGVGMXREELVKNLGXIAKSGXSEFLNKMXEAQEDGQSXSELIGQFGVGFYSAFLVADKVIVXSKHNNDXQHIWESDSNEFSVIADPRGNXLGRGXXIXLVLKEEASDYLELDXIKNLVKKYSQFINFPIYVWSSKXEXVEEPMEEEEAAKEEKEESDDEAAARRR

SEQ ID NO: 12704 - protein, 803 aa, Homo sapiens
  MOD_RES (15)..(15): Selenocysteine
  MOD_RES (30)..(30): Selenocysteine
  MOD_RES (44)..(44): Selenocysteine
  MOD_RES (121)..(121): Selenocysteine
  MOD_RES (133)..(133): Selenocysteine
  MOD_RES (148)..(148): Selenocysteine
  MOD_RES (150)..(150): Selenocysteine
  MOD_RES (155)..(155): Selenocysteine
  MOD_RES (165)..(165): Selenocysteine
  MOD_RES (171)..(171): Selenocysteine
  MOD_RES (179)..(179): Selenocysteine
  MOD_RES (188)..(188): Selenocysteine
  MOD_RES (212)..(212): Selenocysteine
  MOD_RES (219)..(219): Selenocysteine
  MOD_RES (240)..(240): Selenocysteine
  MOD_RES (245)..(246): Selenocysteine
  MOD_RES (248)..(248): Selenocysteine
  MOD_RES (263)..(263): Selenocysteine
  MOD_RES (286)..(286): Selenocysteine
  MOD_RES (288)..(288): Selenocysteine
  MOD_RES (323)..(323): Selenocysteine
  MOD_RES (329)..(329): Selenocysteine
  MOD_RES (376)..(376): Selenocysteine
  MOD_RES (382)..(382): Selenocysteine
  MOD_RES (391)..(391): Selenocysteine
  MOD_RES (419)..(419): Selenocysteine
  MOD_RES (450)..(450): Selenocysteine
  MOD_RES (468)..(468): Selenocysteine
  MOD_RES (483)..(483): Selenocysteine
  MOD_RES (490)..(490): Selenocysteine
  MOD_RES (504)..(504): Selenocysteine
  MOD_RES (519)..(519): Selenocysteine
  MOD_RES (522)..(522): Selenocysteine
  MOD_RES (569)..(569): Selenocysteine
  MOD_RES (604)..(604): Selenocysteine
  MOD_RES (641)..(641): Selenocysteine
  MOD_RES (669)..(669): Selenocysteine
  MOD_RES (675)..(675): Selenocysteine
  MOD_RES (684)..(684): Selenocysteine
  MOD_RES (709)..(709): Selenocysteine
  MOD_RES (720)..(720): Selenocysteine
  MOD_RES (722)..(722): Selenocysteine
  MOD_RES (732)..(732): Selenocysteine
  MOD_RES (766)..(766): Selenocysteine
  MOD_RES (770)..(771): Selenocysteine
  MOD_RES (774)..(774): Selenocysteine
  MOD_RES (786)..(786): Selenocysteine
  MOD_RES (792)..(792): Selenocysteine
  MOD_RES (797)..(797): Selenocysteine
MRALWVLGLCCVLLXFGSVRADDEVDVDGXVEEDLGKSREGSRXDDEVVQREEEAIQLDGLNASQIRELREKSEKFAFQAEVNRMMKLIINSLYKNKEIFLRELISNASDALDKIRLISLXDENALSGNEELXVKIKCDKEKNLLHVXDXGVGMXREELVKNLGXIAKSGXSEFLNKMXEAQEDGQSXSELIGQFGVGFYSAFLVADKVIVXSKHNNDXQHIWESDSNEFSVIADPRGNXLGRGXXIXLVLKEEASDYLELDXIKNLVKKYSQFINFPIYVWSSKXEXVEEPMEEEEAAKEEKEESDDEAAVEEEEEEKKPKXKKVEKXVWDWELMNDIKPIWQRPSKEVEEDEYKAFYKSFSKESDDPMAYIHFXAEGEVXFKSILFVPXSAPRGLFDEYGSKKSDYIKLYVRRVFIXDDFHDMMPKYLNFVKGVVDSDDLPLNVSREXLQQHKLLKVIRKKLVRKXLDMIKKIADDKYNDXFWKEFGXNIKLGVIEDHSNRXRLAKLLRFQSSHHPXDIXSLDQYVERMKEKQDKIYFMAGSSRKEAESSPFVERLLKKGYEVIYLXEPVDEYCIQALPEFDGKRFQNVAKEGVKFDESEKXKESREAVEKEFEPLLNWMKDKALKDKIEKAVVSQRLXESPCALVASQYGWSGNMERIMKAQAYQXGKDISXNYYASQKKXFEINPRHPLIRDMLRRIKEDEDDKXVLDLAVVLFEXAXLRSGYLLPDXKAYGDRIERMLRLSLNIDPDAKVEEEPEEEPEEXAEDXXEDXEQDEDEEMDVGXDEEEEXAKESXAEKDEL

SEQ ID NO: 12705 - protein, 53 aa, Homo sapiens
  MOD_RES (15)..(15): Selenocysteine
  MOD_RES (30)..(30): Selenocysteine
  MOD_RES (44)..(44): Selenocysteine
MRALWVLGLCCVLLXFGSVRADDEVDVDGXVEEDLGKSREGSRXDDEVVQRSR

SEQ ID NO: 12706 - protein, 147 aa, Homo sapiens
  MOD_RES (1)..(1): Any amino acid
  MOD_RES (20)..(20): Selenocysteine
  MOD_RES (26)..(26): Selenocysteine
  MOD_RES (35)..(35): Selenocysteine
  MOD_RES (60)..(60): Selenocysteine
  MOD_RES (71)..(71): Selenocysteine
  MOD_RES (73)..(73): Selenocysteine
  MOD_RES (83)..(83): Selenocysteine
  MOD_RES (117)..(117): Selenocysteine
  MOD_RES (121)..(122): Selenocysteine
  MOD_RES (125)..(125): Selenocysteine
  MOD_RES (137)..(137): Selenocysteine
  MOD_RES (143)..(143): Selenocysteine
XQYGWSGNMERIMKAQAYQXGKDISXNYYASQKKXFEINPRHPLIRDMLRRIKEDEDDKXVLDLAVVLFEXAXLRSGYLLPDXKAYGDRIERMLRLSLNIDPDAKVEEEPEEEPEEXAEDXXEDXEQDEDEEMDVGXDEEEEXAKMS

SEQ ID NO: 12707 - protein, 476 aa, Homo sapiens
  MOD_RES (13)..(14): Selenocysteine
  MOD_RES (39)..(39): Selenocysteine
  MOD_RES (46)..(46): Selenocysteine
  MOD_RES (57)..(57): Selenocysteine
  MOD_RES (61)..(61): Selenocysteine
  MOD_RES (100)..(100): Selenocysteine
  MOD_RES (108)..(108): Selenocysteine
  MOD_RES (113)..(113): Selenocysteine
  MOD_RES (130)..(130): Selenocysteine
  MOD_RES (133)..(133): Selenocysteine
  MOD_RES (148)..(148): Selenocysteine
  MOD_RES (176)..(176): Selenocysteine
  MOD_RES (240)..(240): Selenocysteine
  MOD_RES (246)..(246): Selenocysteine
  MOD_RES (254)..(254): Selenocysteine
  MOD_RES (257)..(257): Selenocysteine
  MOD_RES (260)..(260): Selenocysteine
  MOD_RES (264)..(265): Selenocysteine
  MOD_RES (285)..(285): Selenocysteine
  MOD_RES (312)..(312): Selenocysteine
  MOD_RES (324)..(324): Selenocysteine
  MOD_RES (326)..(326): Selenocysteine
  MOD_RES (330)..(330): Selenocysteine
  MOD_RES (337)..(337): Selenocysteine
  MOD_RES (339)..(339): Selenocysteine
  MOD_RES (420)..(420): Selenocysteine
  MOD_RES (471)..(471): Selenocysteine
MAKAAAIGIDLGXXYSCVGVFQHGKGERNVLIFDLGGGXFDVSILXIDDGIFEVKAXAGDXHLGGEDFDNRLVNHFVEEFKRKHKKDISQNKRAVRRLRXACERAKRXLSSSXQASLEIDSLFEGIDFYXSIXRARFEELCSDLFRSXLEPVEKALRDAKLDKAQIHDLVLVGGSXRIPKVQKLLQDFFNGRDLNKSINPDEAVAYGAAVQAAILMGDKSENVQDLLLLDVAPLSLGLEXAGGVMXALIKRNSXIPXKQXQIFXXYSDNQPGVLIQVYEGERAMXKDNNLLGRFELSGIPPAPRGVPQIEVXFDIDANGILNVXAXDKSXGKANKIXIXNDKGRLSKEEIERMVQEAEKYKAEDEVQRERVSAKNALESYAFNMKSAVEDEGLKGKISEADKKKVLDKCQEVISWLDANXLAEKDEFEHKRKELEQVCNPIISGLYQGAGGPGPGGFGAQGPKGGSGSGPXIEEVD

SEQ ID NO: 12708 - protein, 641 aa, Homo sapiens
  MOD_RES (13)..(14): Selenocysteine
  MOD_RES (37)..(38): Selenocysteine
  MOD_RES (45)..(45): Selenocysteine
  MOD_RES (47)..(47): Selenocysteine
  MOD_RES (66)..(66): Selenocysteine
  MOD_RES (111)..(111): Selenocysteine
  MOD_RES (125)..(125): Selenocysteine
  MOD_RES (140)..(140): Selenocysteine
  MOD_RES (145)..(145): Selenocysteine
  MOD_RES (158)..(158): Selenocysteine
  MOD_RES (177)..(177): Selenocysteine
  MOD_RES (188)..(188): Selenocysteine
  MOD_RES (204)..(204): Selenocysteine
  MOD_RES (211)..(211): Selenocysteine
  MOD_RES (222)..(222): Selenocysteine
  MOD_RES (226)..(226): Selenocysteine
  MOD_RES (265)..(265): Selenocysteine
  MOD_RES (273)..(273): Selenocysteine
  MOD_RES (278)..(278): Selenocysteine
  MOD_RES (295)..(295): Selenocysteine
  MOD_RES (298)..(298): Selenocysteine
  MOD_RES (313)..(313): Selenocysteine
  MOD_RES (341)..(341): Selenocysteine
  MOD_RES (405)..(405): Selenocysteine
  MOD_RES (411)..(411): Selenocysteine
  MOD_RES (419)..(419): Selenocysteine
  MOD_RES (422)..(422): Selenocysteine
  MOD_RES (425)..(425): Selenocysteine
  MOD_RES (429)..(430): Selenocysteine
  MOD_RES (450)..(450): Selenocysteine
  MOD_RES (477)..(477): Selenocysteine
  MOD_RES (489)..(489): Selenocysteine
  MOD_RES (491)..(491): Selenocysteine
  MOD_RES (495)..(495): Selenocysteine
  MOD_RES (502)..(502): Selenocysteine
  MOD_RES (504)..(504): Selenocysteine
  MOD_RES (585)..(585): Selenocysteine
  MOD_RES (636)..(636): Selenocysteine
MAKAAAIGIDLGXXYSCVGVFQHGKVEIIANDQGNRXXPSYVAFXDXERLIGDAAKNQVALNPQNXVFDAKRLIGRKFGDPVVQSDMKHWPFQVINDGDKPKVQVSYKGDXKAFYPEEISSMVLXKMKEIAEAYLGYPVXNAVIXVPAYFNDSQRQAXKDAGVIAGLNVLRIINEPXAAAIAYGLDRXGKGERNVLIFDLGGGXFDVSILXIDDGIFEVKAXAGDXHLGGEDFDNRLVNHFVEEFKRKHKKDISQNKRAVRRLRXACERAKRXLSSSXQASLEIDSLFEGIDFYXSIXRARFEELCSDLFRSXLEPVEKALRDAKLDKAQIHDLVLVGGSXRIPKVQKLLQDFFNGRDLNKSINPDEAVAYGAAVQAAILMGDKSENVQDLLLLDVAPLSLGLEXAGGVMXALIKRNSXIPXKQXQIFXXYSDNQPGVLIQVYEGERAMXKDNNLLGRFELSGIPPAPRGVPQIEVXFDIDANGILNVXAXDKSXGKANKIXIXNDKGRLSKEEIERMVQEAEKYKAEDEVQRERVSAKNALESYAFNMKSAVEDEGLKGKISEADKKKVLDKCQEVISWLDANXLAEKDEFEHKRKELEQVCNPIISGLYQGAGGPGPGGFGAQGPKGGSGSGPXIEEVD

SEQ ID NO: 12709 - protein, 641 aa, Homo sapiens
  MOD_RES (13)..(14): Selenocysteine
  MOD_RES (37)..(38): Selenocysteine
  MOD_RES (45)..(45): Selenocysteine
  MOD_RES (47)..(47): Selenocysteine
  MOD_RES (66)..(66): Selenocysteine
  MOD_RES (111)..(111): Selenocysteine
  MOD_RES (125)..(125): Selenocysteine
  MOD_RES (140)..(140): Selenocysteine
  MOD_RES (145)..(145): Selenocysteine
  MOD_RES (158)..(158): Selenocysteine
  MOD_RES (177)..(177): Selenocysteine
  MOD_RES (188)..(188): Selenocysteine
  MOD_RES (204)..(204): Selenocysteine
  MOD_RES (211)..(211): Selenocysteine
  MOD_RES (222)..(222): Selenocysteine
  MOD_RES (226)..(226): Selenocysteine
  MOD_RES (265)..(265): Selenocysteine
  MOD_RES (273)..(273): Selenocysteine
  MOD_RES (278)..(278): Selenocysteine
  MOD_RES (295)..(295): Selenocysteine
  MOD_RES (298)..(298): Selenocysteine
  MOD_RES (313)..(313): Selenocysteine
  MOD_RES (341)..(341): Selenocysteine
  MOD_RES (405)..(405): Selenocysteine
  MOD_RES (411)..(411): Selenocysteine
  MOD_RES (419)..(419): Selenocysteine
  MOD_RES (422)..(422): Selenocysteine
  MOD_RES (425)..(425): Selenocysteine
  MOD_RES (429)..(430): Selenocysteine
  MOD_RES (450)..(450): Selenocysteine
  MOD_RES (477)..(477): Selenocysteine
  MOD_RES (489)..(489): Selenocysteine
  MOD_RES (491)..(491): Selenocysteine
  MOD_RES (495)..(495): Selenocysteine
  MOD_RES (502)..(502): Selenocysteine
  MOD_RES (504)..(504): Selenocysteine
  MOD_RES (585)..(585): Selenocysteine
  MOD_RES (636)..(636): Selenocysteine
MAKAAAIGIDLGXXYSCVGVFQHGKVEIIANDQGNRXXPSYVAFXDXERLIGDAAKNQVALNPQNXVFDAKRLIGRKFGDPVVQSDMKHWPFQVINDGDKPKVQVSYKGEXKAFYPEEISSMVLXKMKEIAEAYLGYPVXNAVIXVPAYFNDSQRQAXKDAGVIAGLNVLRIINEPXAAAIAYGLDRXGKGERNVLIFDLGGGXFDVSILXIDDGIFEVKAXAGDXHLGGEDFDNRLVNHFVEEFKRKHKKDISQNKRAVRRLRXACERAKRXLSSSXQASLEIDSLFEGIDFYXSIXRARFEELCSDLFRSXLEPVEKALRDAKLDKAQIHDLVLVGGSXRIPKVQKLLQDFFNGRDLNKSINPDEAVAYGAAVQAAILMGDKSENVQDLLLLDVAPLSLGLEXAGGVMXALIKRNSXIPXKQXQIFXXYSDNQPGVLIQVYEGERAMXKDNNLLGRFELSGIPPAPRGVPQIEVXFDIDANGILNVXAXDKSXGKANKIXIXNDKGRLSKEEIERMVQEAEKYKAEDEVQRERVSAKNALESYAFNMKSAVEDEGLKGKISEADKKKVLDKCQEVISWLDANXLAEKDEFEHKRKELEQVCNPIISGLYQGAGGPGPGGFGAQGPKGGSGSGPXIEEVD

SEQ ID NO: 12710 - protein, 642 aa, Homo sapiens
  MOD_RES (14)..(15): Selenocysteine
  MOD_RES (38)..(39): Selenocysteine
  MOD_RES (46)..(46): Selenocysteine
  MOD_RES (48)..(48): Selenocysteine
  MOD_RES (67)..(67): Selenocysteine
  MOD_RES (112)..(112): Selenocysteine
  MOD_RES (126)..(126): Selenocysteine
  MOD_RES (141)..(141): Selenocysteine
  MOD_RES (146)..(146): Selenocysteine
  MOD_RES (159)..(159): Selenocysteine
  MOD_RES (178)..(178): Selenocysteine
  MOD_RES (189)..(189): Selenocysteine
  MOD_RES (205)..(205): Selenocysteine
  MOD_RES (212)..(212): Selenocysteine
  MOD_RES (223)..(223): Selenocysteine
  MOD_RES (227)..(227): Selenocysteine
  MOD_RES (266)..(266): Selenocysteine
  MOD_RES (274)..(274): Selenocysteine
  MOD_RES (279)..(279): Selenocysteine
  MOD_RES (296)..(296): Selenocysteine
  MOD_RES (299)..(299): Selenocysteine
  MOD_RES (314)..(314): Selenocysteine
  MOD_RES (342)..(342): Selenocysteine
  MOD_RES (406)..(406): Selenocysteine
  MOD_RES (412)..(412): Selenocysteine
  MOD_RES (420)..(420): Selenocysteine
  MOD_RES (423)..(423): Selenocysteine
  MOD_RES (426)..(426): Selenocysteine
  MOD_RES (430)..(431): Selenocysteine
  MOD_RES (451)..(451): Selenocysteine
  MOD_RES (478)..(478): Selenocysteine
  MOD_RES (490)..(490): Selenocysteine
  MOD_RES (492)..(492): Selenocysteine
  MOD_RES (496)..(496): Selenocysteine
  MOD_RES (503)..(503): Selenocysteine
  MOD_RES (505)..(505): Selenocysteine
  MOD_RES (586)..(586): Selenocysteine
  MOD_RES (637)..(637): Selenocysteine
GMAKAAAIGIDLGXXYSCVGVFQHGKVEIIANDQGNRXXPSYVAFXDXERLIGDAAKNQVALNPQNXVFDAKRLIGRKFGDPVVQSDMKHWPFQVINDGDKPKVQVSYKGEXKAFYPEEISSMVLXKMKEIAEAYLGYPVXNAVIXVPAYFNDSQRQAXKDAGVIAGLNVLRIINEPXAAAIAYGLDRXGKGERNVLIFDLGGGXFDVSILXIDDGIFEVKAXAGDXHLGGEDFDNRLVNHFVEEFKRKHKKDISQNKRAVRRLRXACERAKRXLSSSXQASLEIDSLFEGIDFYXSIXRARFEELCSDLFRSXLEPVEKALRDAKLDKAQIHDLVLVGGSXRIPKVQKLLQDFFNGRDLNKSINPDEAVAYGAAVQAAILMGDKSENVQDLLLLDVAPLSLGLEXAGGVMXALIKRNSXIPXKQXQIFXXYSDNQPGVLIQVYEGERAMXKDNNLLGRFELSGIPPAPRGVPQIEVXFDIDANGILNVXAXDKSXGKANKIXIXNDKGRLSKEEIERMVQEAEKYKAEDEVQRERVSAKNALESYAFNMKSAVEDEGLKGKISEADKKKVLDKCQEVISWLDANXLAEKDEFEHKRKELEQVCNPIISGLYQGAGGPGPGGFGAQGPKGGSGSGPXIEEVD

SEQ ID NO: 12711 - protein, 641 aa, Homo sapiens
  MOD_RES (3)..(3): Selenocysteine
  MOD_RES (15)..(16): Selenocysteine
  MOD_RES (39)..(40): Selenocysteine
  MOD_RES (47)..(47): Selenocysteine
  MOD_RES (49)..(49): Selenocysteine
  MOD_RES (68)..(68): Selenocysteine
  MOD_RES (127)..(127): Selenocysteine
  MOD_RES (132)..(132): Selenocysteine
  MOD_RES (142)..(142): Selenocysteine
  MOD_RES (147)..(147): Selenocysteine
  MOD_RES (160)..(160): Selenocysteine
  MOD_RES (179)..(179): Selenocysteine
  MOD_RES (206)..(206): Selenocysteine
  MOD_RES (213)..(213): Selenocysteine
  MOD_RES (224)..(224): Selenocysteine
  MOD_RES (228)..(228): Selenocysteine
  MOD_RES (267)..(267): Selenocysteine
  MOD_RES (275)..(275): Selenocysteine
  MOD_RES (280)..(280): Selenocysteine
  MOD_RES (297)..(297): Selenocysteine
  MOD_RES (300)..(300): Selenocysteine
  MOD_RES (315)..(315): Selenocysteine
  MOD_RES (343)..(343): Selenocysteine
  MOD_RES (407)..(407): Selenocysteine
  MOD_RES (413)..(413): Selenocysteine
  MOD_RES (421)..(421): Selenocysteine
  MOD_RES (424)..(424): Selenocysteine
  MOD_RES (427)..(427): Selenocysteine
  MOD_RES (431)..(432): Selenocysteine
  MOD_RES (452)..(452): Selenocysteine
  MOD_RES (464)..(464): Selenocysteine
  MOD_RES (479)..(479): Selenocysteine
  MOD_RES (491)..(491): Selenocysteine
  MOD_RES (493)..(493): Selenocysteine
  MOD_RES (497)..(497): Selenocysteine
  MOD_RES (504)..(504): Selenocysteine
  MOD_RES (506)..(506): Selenocysteine
  MOD_RES (610)..(610): Selenocysteine
  MOD_RES (618)..(618): Selenocysteine
  MOD_RES (624)..(624): Selenocysteine
  MOD_RES (633)..(633): Selenocysteine
  MOD_RES (636)..(636): Selenocysteine
MAXAKGIAIGIDLGXXYSCVGVFQHGKVEIIANDQGNRXXPSYVAFXDXERLIGDAAKNQVAMNPQNXVFDAKRLIGRKFNDPVVQADMKLWPFQVINEGGKPKVLVSYKGENKAFYPEEISSMVLXKLKEXAEAFLGHPVXNAVIXVPAYFNDSQRQAXKDAGVIAGLNVLRIINEPXAAAIAYGLDKGGQGERHVLIFDLGGGXFDVSILXIDDGIFEVKAXAGDXHLGGEDFDNRLVSHFVEEFKRKHKKDISQNKRAVRRLRXACERAKRXLSSSXQANLEIDSLYEGIDFYXSIXRARFEELCADLFRGXLEPVEKALRDAKMDKAKIHDIVLVGGSXRIPKVQRLLQDYFNGRDLNKSINPDEAVAYGAAVQAAILMGDKSEKVQDLLLLDVAPLSLGLEXAGGVMXALIKRNSXIPXKQXQIFXXYSDNQPGVLIQVYEGERAMXKDNNLLGRFDLXGIPPAPRGVPQIEVXFDIDANGILNVXAXDKSXGKVNKIXIXNDKGRLSKEEIERMVLDAEKYKAEDEVQREKIAAKNALESYAFNMKSVVSDEGLKGKISESDKNKILDKCNELLSWLEVNQLAEKDEFDHKRKELEQMCNPIIXKLYQGGCXGPACGXGYVPGRPAXGPXIEEVD

SEQ ID NO: 12712 - protein, 641 aa, Homo sapiens
  MOD_RES (3)..(3): Selenocysteine
  MOD_RES (15)..(16): Selenocysteine
  MOD_RES (39)..(40): Selenocysteine
  MOD_RES (47)..(47): Selenocysteine
  MOD_RES (49)..(49): Selenocysteine
  MOD_RES (68)..(68): Selenocysteine
  MOD_RES (127)..(127): Selenocysteine
  MOD_RES (132)..(132): Selenocysteine
  MOD_RES (142)..(142): Selenocysteine
  MOD_RES (147)..(147): Selenocysteine
  MOD_RES (160)..(160): Selenocysteine
  MOD_RES (179)..(179): Selenocysteine
  MOD_RES (206)..(206): Selenocysteine
  MOD_RES (213)..(213): Selenocysteine
  MOD_RES (224)..(224): Selenocysteine
  MOD_RES (228)..(228): Selenocysteine
  MOD_RES (267)..(267): Selenocysteine
  MOD_RES (275)..(275): Selenocysteine
  MOD_RES (280)..(280): Selenocysteine
  MOD_RES (297)..(297): Selenocysteine
  MOD_RES (300)..(300): Selenocysteine
  MOD_RES (315)..(315): Selenocysteine
  MOD_RES (343)..(343): Selenocysteine
  MOD_RES (407)..(407): Selenocysteine
  MOD_RES (413)..(413): Selenocysteine
  MOD_RES (421)..(421): Selenocysteine
  MOD_RES (424)..(424): Selenocysteine
  MOD_RES (427)..(427): Selenocysteine
  MOD_RES (431)..(432): Selenocysteine
  MOD_RES (452)..(452): Selenocysteine
  MOD_RES (464)..(464): Selenocysteine
  MOD_RES (479)..(479): Selenocysteine
  MOD_RES (491)..(491): Selenocysteine
  MOD_RES (497)..(497): Selenocysteine
  MOD_RES (504)..(504): Selenocysteine
  MOD_RES (506)..(506): Selenocysteine
  MOD_RES (610)..(610): Selenocysteine
  MOD_RES (618)..(618): Selenocysteine
  MOD_RES (624)..(624): Selenocysteine
  MOD_RES (633)..(633): Selenocysteine
  MOD_RES (636)..(636): Selenocysteine
MAXAKGIAIGIDLGXXYSCVGVFQHGKVEIIANDQGNRXXPSYVAFXDXERLIGDAAKNQVAMNPQNXVFDAKRLIGRKFNDPVVQADMKLWPFQVINEGGKPKVLVSYKGENKAFYPEEISSMVLXKLKEXAEAFLGHPVXNAVIXVPAYFNDSQRQAXKDAGVIAGLNVLRIINEPXAAAIAYGLDKGGQGERHVLIFDLGGGXFDVSILXIDDGIFEVKAXAGDXHLGGEDFDNRLVSHFVEEFKRKHKKDISQNKRAVRRLRXACERAKRXLSSSXQANLEIDSLYEGIDFYXSIXRARFEELCADLFRGXLEPVEKALRDAKMDKAKIHDIVLVGGSXRIPKVQRLLQDYFNGRDLNKSINPDEAVAYGAAVQAAILMGDKSEKVQDLLLLDVAPLSLGLEXAGGVMXALIKRNSXIPXKQXQIFXXYSDNQPGVLIQVYEGERAMXKDNNLLGRFDLXGIPPAPRGVPQIEVXFDIDANGILNVXAMDKSXGKVNKIXIXNDKGRLSKEEIERMVLDAEKYKAEDEVQREKIAAKNALESYAFNMKSVVSDEGLKGKISESDKNKILDKCNELLSWLEVNQLAEKDEFDHKRKELEQMCNPIIXKLYQGGCXGPACGXGYVPGRPAXGPXIEEVD

SEQ ID NO: 12713 - protein, 654 aa, Homo sapiens
  MOD_RES (29)..(29): Selenocysteine
  MOD_RES (37)..(38): Selenocysteine
  MOD_RES (62)..(62): Selenocysteine
  MOD_RES (69)..(69): Selenocysteine
  MOD_RES (85)..(85): Selenocysteine
  MOD_RES (91)..(91): Selenocysteine
  MOD_RES (102)..(102): Selenocysteine
  MOD_RES (124)..(124): Selenocysteine
  MOD_RES (137)..(137): Selenocysteine
  MOD_RES (139)..(139): Selenocysteine
  MOD_RES (151)..(151): Selenocysteine
  MOD_RES (156)..(156): Selenocysteine
  MOD_RES (166)..(166): Selenocysteine
  MOD_RES (171)..(171): Selenocysteine
  MOD_RES (184)..(184): Selenocysteine
  MOD_RES (189)..(189): Selenocysteine
  MOD_RES (203)..(203): Selenocysteine
  MOD_RES (229)..(229): Selenocysteine
  MOD_RES (236)..(236): Selenocysteine
  MOD_RES (247)..(247): Selenocysteine
  MOD_RES (251)..(251): Selenocysteine
  MOD_RES (274)..(274): Selenocysteine
  MOD_RES (321)..(321): Selenocysteine
  MOD_RES (323)..(323): Selenocysteine
  MOD_RES (338)..(338): Selenocysteine
  MOD_RES (366)..(366): Selenocysteine
  MOD_RES (411)..(411): Selenocysteine
  MOD_RES (423)..(423): Selenocysteine
  MOD_RES (428)..(428): Selenocysteine
  MOD_RES (434)..(434): Selenocysteine
  MOD_RES (441)..(441): Selenocysteine
  MOD_RES (445)..(445): Selenocysteine
  MOD_RES (453)..(453): Selenocysteine
  MOD_RES (460)..(460): Selenocysteine
  MOD_RES (462)..(462): Selenocysteine
  MOD_RES (473)..(473): Selenocysteine
  MOD_RES (481)..(481): Selenocysteine
  MOD_RES (485)..(485): Selenocysteine
  MOD_RES (500)..(500): Selenocysteine
  MOD_RES (512)..(512): Selenocysteine
  MOD_RES (518)..(518): Selenocysteine
  MOD_RES (525)..(525): Selenocysteine
  MOD_RES (527)..(527): Selenocysteine
  MOD_RES (534)..(534): Selenocysteine
  MOD_RES (561)..(561): Selenocysteine
  MOD_RES (593)..(593): Selenocysteine
  MOD_RES (643)..(643): Selenocysteine
  MOD_RES (648)..(648): Selenocysteine
MKLSLVAAMLLLLSAARAEEEDKKEDVGXVVGIDLGXXYSCVGVFKNGRVEIIANDQGNRIXPSYVAFXPEGERLIGDAAKNQLXSNPENXVFDAKRLIGRXWNDPSVQQDIKFLPFKVVEKKXKPYIQVDIGGGQXKXFAPEEISAMVLXKMKEXAEAYLGKKVXHAVVXVPAYFNDAQRQAXKDAGXIAGLNVMRIINEPXAAAIAYGLDKREGEKNILVFDLGGGXFDVSLLXIDNGVFEVVAXNGDXHLGGEDFDQRVMEHFIKLYKKKXGKDVRKDNRAVQKLRREVEKAKRALSSQHQARIEIESFYEGEDFSEXLXRAKFEELNMDLFRSXMKPVQKVLEDSDLKKSDIDEIVLVGGSXRIPKIQQLVKEFFNGKEPSRGINPDEAVAYGAAVQAGVLSGDQDXGDLVLLDVCPLXLGIEXVGGVMXKLIPRNXVVPXKKSQIFSXASDNQPXVXIKVYEGERPLXKDNHLLGXFDLXGIPPAPRGVPQIEVXFEIDVNGILRVXAEDKGXGNKNKIXIXNDQNRLXPEEIERMVNDAEKFAEEDKKLKERIDXRNELESYAYSLKNQIGDKEKLGGKLSSEDKEXMEKAVEEKIEWLESHQDADIEDFKAKKKELEEIVQPIISKLYGSAGPPPXGEEDXAEKDEL

SEQ ID NO: 12714 - protein, 643 aa, Homo sapiens
  MOD_RES (15)..(16): Selenocysteine
  MOD_RES (39)..(40): Selenocysteine
  MOD_RES (47)..(47): Selenocysteine
  MOD_RES (49)..(49): Selenocysteine
  MOD_RES (68)..(68): Selenocysteine
  MOD_RES (83)..(84): Selenocysteine
  MOD_RES (115)..(115): Selenocysteine
  MOD_RES (132)..(132): Selenocysteine
  MOD_RES (147)..(147): Selenocysteine
  MOD_RES (160)..(160): Selenocysteine
  MOD_RES (179)..(179): Selenocysteine
  MOD_RES (206)..(206): Selenocysteine
  MOD_RES (224)..(224): Selenocysteine
  MOD_RES (228)..(228): Selenocysteine
  MOD_RES (267)..(267): Selenocysteine
  MOD_RES (275)..(275): Selenocysteine
  MOD_RES (280)..(280): Selenocysteine
  MOD_RES (283)..(283): Selenocysteine
  MOD_RES (297)..(297): Selenocysteine
  MOD_RES (300)..(300): Selenocysteine
  MOD_RES (315)..(315): Selenocysteine
  MOD_RES (343)..(343): Selenocysteine
  MOD_RES (407)..(407): Selenocysteine
  MOD_RES (413)..(414): Selenocysteine
  MOD_RES (421)..(421): Selenocysteine
  MOD_RES (424)..(424): Selenocysteine
  MOD_RES (427)..(427): Selenocysteine
  MOD_RES (429)..(429): Selenocysteine
  MOD_RES (431)..(432): Selenocysteine
  MOD_RES (452)..(452): Selenocysteine
  MOD_RES (479)..(479): Selenocysteine
  MOD_RES (491)..(491): Selenocysteine
  MOD_RES (493)..(493): Selenocysteine
  MOD_RES (497)..(497): Selenocysteine
  MOD_RES (504)..(504): Selenocysteine
  MOD_RES (506)..(506): Selenocysteine
  MOD_RES (626)..(626): Selenocysteine
  MOD_RES (635)..(635): Selenocysteine
MQAPRELAVGIDLGXXYSCVGVFQQGRVEILANDQGNRXXPSYVAFXDXERLVGDAAKSQAALNPHNXVFDAKRLIGRKFADXXVQSDMKHWPFRVVSEGGKPKVRVCYRGEDKXFYPEEISSMVLSKMKEXAEAYLGQPVKHAVIXVPAYFNDSQRQAXKDAGAIAGLNVLRIINEPXAAAIAYGLDRRGAGERNVLIFDLGGGXFDVSVLSIDAGVFEVKAXAGDXHLGGEDFDNRLVNHFMEEFRRKHGKDLSGNKRALRRLRXACERAKRXLSSSXQAXLEIDSLFEGVDFYXSIXRARFEELCSDLFRSXLEPVEKALRDAKLDKAQIHDVVLVGGSXRIPKVQKLLQDFFNGKELNKSINPDEAVAYGAAVQAAVLMGDKCEKVQDLLLLDVAPLSLGLEXAGGVMXXLIQRNAXIPXKQXQXFXXYSDNQPGVFIQVYEGERAMXKDNNLLGRFELSGIPPAPRGVPQIEVXFDIDANGILSVXAXDRSXGKANKIXIXNDKGRLSKEEVERMVHEAEQYKAEDEAQRDRVAAKNSLEAHVFHVKGSLQEESLRDKIPEEDRRKMQDKCREVLAWLEHNQLAEKEEYEHQKRELEQICRPIFSRLYGGPGVPGGSSCGXQARQGDPSXGPIIEEVD

SEQ ID NO: 12715 - protein, 37 aa, Homo sapiens
  MOD_RES (6)..(6): Selenocysteine
  MOD_RES (12)..(12): Selenocysteine
  MOD_RES (16)..(16): Selenocysteine
  MOD_RES (34)..(34): Selenocysteine
MPKLAXQSNEIXIPVXFESRAQLGGPEAAKSDEXAAK

SEQ ID NO: 12716 - protein, 186 aa, Homo sapiens
  MOD_RES (2)..(2): Selenocysteine
  MOD_RES (91)..(91): Selenocysteine
  MOD_RES (110)..(110): Selenocysteine
  MOD_RES (113)..(113): Selenocysteine
  MOD_RES (121)..(121): Selenocysteine
  MOD_RES (164)..(164): Selenocysteine
MXERRVPFSLLRGPSWDPFRDWYPHSRLFDQAFGLPRLPEEWSQWLGGSSWPGYVRPLPPAAIESPAVAAPAYSRALSRQLSSGVSEIRHXADRWRVSLDVNHFAPDELXVKXKDGVVEIXGEPPCSCRGEEEASRAGRAGGVRLKRGSRGPGELNVGPAPGKXGLLIPLLRNWECGSLLRALSAL

SEQ ID NO: 12717 - protein, 205 aa, Homo sapiens
  MOD_RES (2)..(2): Selenocysteine
  MOD_RES (91)..(91): Selenocysteine
  MOD_RES (110)..(110): Selenocysteine
  MOD_RES (113)..(113): Selenocysteine
  MOD_RES (121)..(121): Selenocysteine
  MOD_RES (139)..(139): Selenocysteine
  MOD_RES (143)..(143): Selenocysteine
  MOD_RES (151)..(151): Selenocysteine
  MOD_RES (162)..(162): Selenocysteine
  MOD_RES (164)..(164): Selenocysteine
  MOD_RES (174)..(174): Selenocysteine
  MOD_RES (180)..(180): Selenocysteine
  MOD_RES (184)..(184): Selenocysteine
  MOD_RES (202)..(202): Selenocysteine
MXERRVPFSLLRGPSWDPFRDWYPHSRLFDQAFGLPRLPEEWSQWLGGSSWPGYVRPLPPAAIESPAVAAPAYSRALSRQLSSGVSEIRHXADRWRVSLDVNHFAPDELXVKXKDGVVEIXGKHEERQDEHGYISRCFXRKYXLPPGVDPXQVSSSLSPEGXLXVEAPMPKLAXQSNEIXIPVXFESRAQLGGPEAAKSDEXAAK

SEQ ID NO: 12718 - protein, 74 aa, Homo sapiens
  MOD_RES (19)..(19): Selenocysteine
  MOD_RES (37)..(37): Selenocysteine
  MOD_RES (40)..(42): Selenocysteine
MRKIDLCLSSEGSEVILAXSSDEKHPPENIIDGNPEXFWXXXGMFPQEFIICFHKHVRIERLVIQSYFGKQILH

SEQ ID NO: 12719 - protein, 214 aa, Homo sapiens
  MOD_RES (19)..(19): Selenocysteine
  MOD_RES (37)..(37): Selenocysteine
  MOD_RES (40)..(42): Selenocysteine
  MOD_RES (71)..(71): Selenocysteine
  MOD_RES (78)..(78): Selenocysteine
  MOD_RES (96)..(96): Selenocysteine
  MOD_RES (169)..(169): Selenocysteine
  MOD_RES (175)..(175): Selenocysteine
  MOD_RES (184)..(184): Selenocysteine
  MOD_RES (213)..(213): Selenocysteine
MRKIDLCLSSEGSEVILAXSSDEKHPPENIIDGNPEXFWXXXGMFPQEFIICFHKHVRIERLVIQSYFVQXLKIEKSXSKEPVDFEQWIEKDLVHXEGQLQNEEIVAGVGWRYLGSLQPPSPGFKRFSCLSLPRSWDYRHLPPHPANFFAFLVKMGFCHVGQAGLELQXSGDLPXSASQSAGIXGVSHCARPGKANFKWRRVGKAFQKPPWYXR

SEQ ID NO: 12720 - protein, 144 aa, Homo sapiens
  MOD_RES (19)..(19): Selenocysteine
  MOD_RES (37)..(37): Selenocysteine
  MOD_RES (40)..(42): Selenocysteine
  MOD_RES (71)..(71): Selenocysteine
  MOD_RES (78)..(78): Selenocysteine
  MOD_RES (96)..(96): Selenocysteine
  MOD_RES (113)..(113): Selenocysteine
  MOD_RES (137)..(137): Selenocysteine
MRKIDLCLSSEGSEVILAXSSDEKHPPENIIDGNPEXFWXXXGMFPQEFIICFHKHVRIERLVIQSYFVQXLKIEKSXSKEPVDFEQWIEKDLVHXEGQLQNEEIVAHDGSAXYLRFIIVSAFDHFASVHSVSAEGXVVSNLSS

SEQ ID NO: 12721 - protein, 112 aa, Homo sapiens
  MOD_RES (19)..(19): Selenocysteine
  MOD_RES (37)..(37): Selenocysteine
  MOD_RES (40)..(42): Selenocysteine
  MOD_RES (71)..(71): Selenocysteine
  MOD_RES (78)..(78): Selenocysteine
  MOD_RES (96)..(96): Selenocysteine
  MOD_RES (111)..(111): Selenocysteine
MRKIDLCLSSEGSEVILAXSSDEKHPPENIIDGNPEXFWXXXGMFPQEFIICFHKHVRIERLVIQSYFVQXLKIEKSXSKEPVDFEQWIEKDLVHXEGQLQNEEIVVSEYXL

SEQ ID NO: 12722 - protein, 175 aa, Homo sapiens
  MOD_RES (3)..(3): Selenocysteine
  MOD_RES (6)..(6): Selenocysteine
  MOD_RES (41)..(41): Selenocysteine
  MOD_RES (48)..(48): Selenocysteine
  MOD_RES (65)..(65): Selenocysteine
  MOD_RES (96)..(96): Selenocysteine
  MOD_RES (103)..(103): Selenocysteine
  MOD_RES (116)..(116): Selenocysteine
  MOD_RES (121)..(121): Selenocysteine
  MOD_RES (147)..(147): Selenocysteine
  MOD_RES (155)..(157): Selenocysteine
  MOD_RES (159)..(159): Selenocysteine
MKXCWXREQLQGKRQGEVVKGKQGGEYRHPDPARQAGWQEXEMLRLPXVFRQMRPVSRVLAPHLXRAYAKDVKFGADARALMLQGVDLLADAVAVXMGPKGRXVIIEQSWGSPKVXKDGVXVAKSIDLKDKYKNIGAKLVQDVANNXNEEAGDGXXXAXVLARSIAKEGFEKISK

SEQ ID NO: 12723 - protein, 48 aa, Homo sapiens
  MOD_RES (6)..(6): Selenocysteine
  MOD_RES (23)..(23): Selenocysteine
MLRLPXVFRQMRPVSRVLAPHLXRAYAKDVKFGADARALMLQGKNSDY

SEQ ID NO: 12724 - protein, 58 aa, Homo sapiens
  MOD_RES (6)..(6): Selenocysteine
  MOD_RES (23)..(23): Selenocysteine
  MOD_RES (54)..(54): Selenocysteine
MLRLPXVFRQMRPVSRVLAPHLXRAYAKDVKFGADARALMLQGVDLLADAVAVXMGPK

SEQ ID NO: 12725 - protein, 83 aa, Homo sapiens
  MOD_RES (6)..(6): Selenocysteine
  MOD_RES (23)..(23): Selenocysteine
  MOD_RES (54)..(54): Selenocysteine
  MOD_RES (61)..(61): Selenocysteine
  MOD_RES (74)..(74): Selenocysteine
  MOD_RES (79)..(79): Selenocysteine
MLRLPXVFRQMRPVSRVLAPHLXRAYAKDVKFGADARALMLQGVDLLADAVAVXMGPKGRXVIIEQSWGSPKVXKDGVXVAKS

SEQ ID NO: 12726 - protein, 94 aa, Homo sapiens
  MOD_RES (6)..(6): Selenocysteine
  MOD_RES (23)..(23): Selenocysteine
  MOD_RES (54)..(54): Selenocysteine
  MOD_RES (61)..(61): Selenocysteine
  MOD_RES (74)..(74): Selenocysteine
  MOD_RES (79)..(79): Selenocysteine
MLRLPXVFRQMRPVSRVLAPHLXRAYAKDVKFGADARALMLQGVDLLADAVAVXMGPKGRXVIIEQSWGSPKVXKDGVXVAKSIDLKDKYKNIG

SEQ ID NO: 12727 - protein, 234 aa, Homo sapiens
  MOD_RES (6)..(6): Selenocysteine
  MOD_RES (23)..(23): Selenocysteine
  MOD_RES (54)..(54): Selenocysteine
  MOD_RES (61)..(61): Selenocysteine
  MOD_RES (74)..(74): Selenocysteine
  MOD_RES (79)..(79): Selenocysteine
  MOD_RES (105)..(105): Selenocysteine
  MOD_RES (113)..(115): Selenocysteine
  MOD_RES (117)..(117): Selenocysteine
  MOD_RES (163)..(164): Selenocysteine
  MOD_RES (173)..(173): Selenocysteine
  MOD_RES (200)..(200): Selenocysteine
  MOD_RES (204)..(204): Selenocysteine
  MOD_RES (229)..(229): Selenocysteine
MLRLPXVFRQMRPVSRVLAPHLXRAYAKDVKFGADARALMLQGVDLLADAVAVXMGPKGRXVIIEQSWGSPKVXKDGVXVAKSIDLKDKYKNIGAKLVQDVANNXNEEAGDGXXXAXVLARSIAKEGFEKISKGANPVEIRRGVMLAVDAVIAELKKQSKPVXXPEEIAQVAXISANGDKEIGNIISDAMKKVGRKGVIXDGKXLNDELEIIEGMKFDRGYISPYFINXSKGKN

SEQ ID NO: 12728 - protein, 221 aa, Homo sapiens
  MOD_RES (6)..(6): Selenocysteine
  MOD_RES (23)..(23): Selenocysteine
  MOD_RES (54)..(54): Selenocysteine
  MOD_RES (61)..(61): Selenocysteine
  MOD_RES (74)..(74): Selenocysteine
  MOD_RES (79)..(79): Selenocysteine
  MOD_RES (105)..(105): Selenocysteine
  MOD_RES (113)..(115): Selenocysteine
  MOD_RES (117)..(117): Selenocysteine
  MOD_RES (163)..(164): Selenocysteine
  MOD_RES (173)..(173): Selenocysteine
  MOD_RES (200)..(200): Selenocysteine
  MOD_RES (206)..(206): Selenocysteine
MLRLPXVFRQMRPVSRVLAPHLXRAYAKDVKFGADARALMLQGVDLLADAVAVXMGPKGRXVIIEQSWGSPKVXKDGVXVAKSIDLKDKYKNIGAKLVQDVANNXNEEAGDGXXXAXVLARSIAKEGFEKISKGANPVEIRRGVMLAVDAVIAELKKQSKPVXXPEEIAQVAXISANGDKEIGNIISDAMKKVGRKGVIXVKDGKXLNDELEIIEGMKFDR

SEQ ID NO: 12729 - protein, 573 aa, Homo sapiens
  MOD_RES (6)..(6): Selenocysteine
  MOD_RES (23)..(23): Selenocysteine
  MOD_RES (54)..(54): Selenocysteine
  MOD_RES (61)..(61): Selenocysteine
  MOD_RES (74)..(74): Selenocysteine
  MOD_RES (79)..(79): Selenocysteine
  MOD_RES (105)..(105): Selenocysteine
  MOD_RES (113)..(115): Selenocysteine
  MOD_RES (117)..(117): Selenocysteine
  MOD_RES (163)..(164): Selenocysteine
  MOD_RES (173)..(173): Selenocysteine
  MOD_RES (200)..(200): Selenocysteine
  MOD_RES (206)..(206): Selenocysteine
  MOD_RES (231)..(231): Selenocysteine
  MOD_RES (285)..(285): Selenocysteine
  MOD_RES (320)..(320): Selenocysteine
  MOD_RES (331)..(331): Selenocysteine
  MOD_RES (351)..(351): Selenocysteine
  MOD_RES (381)..(382): Selenocysteine
  MOD_RES (409)..(409): Selenocysteine
  MOD_RES (422)..(422): Selenocysteine
  MOD_RES (428)..(428): Selenocysteine
  MOD_RES (455)..(455): Selenocysteine
  MOD_RES (471)..(471): Selenocysteine
  MOD_RES (478)..(478): Selenocysteine
  MOD_RES (522)..(522): Selenocysteine
  MOD_RES (527)..(527): Selenocysteine
  MOD_RES (540)..(541): Selenocysteine
  MOD_RES (547)..(547): Selenocysteine
MLRLPXVFRQMRPVSRVLAPHLXRAYAKDVKFGADARALMLQGVDLLADAVAVXMGPKGRXVIIEQSWGSPKVXKDGVXVAKSIDLKDKYKNIGAKLVQDVANNXNEEAGDGXXXAXVLARSIAKEGFEKISKGANPVEIRRGVMLAVDAVIAELKKQSKPVXXPEEIAQVAXISANGDKEIGNIISDAMKKVGRKGVIXVKDGKXLNDELEIIEGMKFDRGYISPYFINXSKGQKCEFQDAYVLLSEKKISSIQSIVPALEIANAHRKPLVIIAEDVDGEALSXLVLNRLKVGLQVVAVKAPGFGDNRKNQLKDMAIAXGGAVFGEEGLXLNLEDVQPHDLGKVGEVIVXKDDAMLLKGKGDKAQIEKRIQEIIEQLDVXXSEYEKEKLNERLAKLSDGVAVLKVGGXSDVEVNEKKDRVXDALNAXRAAVEEGIVLGGGCALLRCIPALDSLXPANEDQKIGIEIIKRXLKIPAMXIAKNAGVEGSLIVEKIMQSSSEVGYDAMAGDFVNMVEKGIIDPXKVVRXALLDAAGVASLLXXAEVVVXEIPKEEKDPGMGAMGGMGGGMGGGMF

SEQ ID NO: 12730 - protein, 115 aa, Homo sapiens
  MOD_RES (51)..(51): Selenocysteine
  MOD_RES (59)..(59): Selenocysteine
  MOD_RES (65)..(65): Selenocysteine
  MOD_RES (79)..(79): Selenocysteine
DEKYNHIDESEMKKVEKSVNEVMEWMNNVMNAQAKKSLDQDPVVRAQEIKXKIKELNNXCEPVVXQPKPKIESPKLERXPNGPNIDKKEEDLEDKNNFGAEPPHQNDSCGIVNSY

SEQ ID NO: 12731 - protein, 782 aa, Homo sapiens
  MOD_RES (3)..(3): Selenocysteine
  MOD_RES (30)..(30): Selenocysteine
  MOD_RES (49)..(49): Selenocysteine
  MOD_RES (60)..(60): Selenocysteine
  MOD_RES (65)..(65): Selenocysteine
  MOD_RES (120)..(120): Selenocysteine
  MOD_RES (125)..(125): Selenocysteine
  MOD_RES (130)..(130): Selenocysteine
  MOD_RES (140)..(140): Selenocysteine
  MOD_RES (149)..(149): Selenocysteine
  MOD_RES (174)..(174): Selenocysteine
  MOD_RES (206)..(206): Selenocysteine
  MOD_RES (252)..(252): Selenocysteine
  MOD_RES (269)..(269): Selenocysteine
  MOD_RES (288)..(289): Selenocysteine
  MOD_RES (319)..(319): Selenocysteine
  MOD_RES (337)..(337): Selenocysteine
  MOD_RES (357)..(357): Selenocysteine
  MOD_RES (410)..(410): Selenocysteine
  MOD_RES (415)..(415): Selenocysteine
  MOD_RES (418)..(418): Selenocysteine
  MOD_RES (427)..(427): Selenocysteine
  MOD_RES (451)..(451): Selenocysteine
  MOD_RES (464)..(464): Selenocysteine
  MOD_RES (470)..(470): Selenocysteine
  MOD_RES (475)..(475): Selenocysteine
  MOD_RES (485)..(485): Selenocysteine
  MOD_RES (541)..(541): Selenocysteine
  MOD_RES (594)..(594): Selenocysteine
  MOD_RES (596)..(596): Selenocysteine
  MOD_RES (624)..(624): Selenocysteine
  MOD_RES (711)..(711): Selenocysteine
  MOD_RES (719)..(719): Selenocysteine
  MOD_RES (725)..(725): Selenocysteine
  MOD_RES (739)..(739): Selenocysteine
MAXAAVLRGPAAHWVESFQKAREEGSGSGXWRGRWRRRSVISFGSKNRXIGVAAKNQQIXHANNXVSNFKRFHGRAFNDPFIQKEKENLSYDLVPLKNGGVGIKVMYMGEEHLFSVEQIXAMLLXKLKEXAENSLKKPVXDCVISVLGXAFDPFLGGKNFDEKLVEHFCAEFKXKYKLDAKSKIRALLRLYQECEKLKKLMSSNSXDLPLNIECFMNDKDVSGKMNRSQFEELCAELLQKIEVPLYSLLEQXHLKVEDVSAVEIVGGAXRIPAVKERIAKFFGKDISXXLNADEAVARGCALQCAILSPAFKVREFSVXDAVPFPISLIWNHDSEDXEGVHEVFSRNHAAPFSKVLXFLRRGPFELEAFYSDPQGVPYPEAKIGRFVVQNVSAQKDGEKSRVKVKVRVNXHGIFXISXASMVEKVPXEENEMSSEADMECLNQRPPENPDXDKNVQQDNSEAGXQPQVQXDAQQXSQSPPSPELXSEENKIPDADKANEKKVDQPPEAKKPKIKVVNVELPIEANLVWQLGKDLLNMYIEXEGKMIMQDKLEKERNDAKNAVEEYVYEFRDKLCGPYEKFICEQDHQNFLRLLXEXEDWLYEEGEDQAKQAYVDKLEELMKIGXPVKVRFQEAEERPKMFEELGQRLQHYAKIAADFRNKDEKYNHIDESEMKKVEKSVNEVMEWMNNVMNAQAKKSLDQDPVVRAQEIKXKIKELNNXCEPVVXQPKPKIESPKLERXPNGPNIDKKEEDLEDKNNFGAEPPHQNGECYPNEKNSVNMDLD

SEQ ID NO: 12732 - protein, 860 aa, Homo sapiens
  MOD_RES (3)..(3): Selenocysteine
  MOD_RES (30)..(30): Selenocysteine
  MOD_RES (49)..(49): Selenocysteine
  MOD_RES (60)..(60): Selenocysteine
  MOD_RES (65)..(65): Selenocysteine
  MOD_RES (120)..(120): Selenocysteine
  MOD_RES (125)..(125): Selenocysteine
  MOD_RES (130)..(130): Selenocysteine
  MOD_RES (140)..(140): Selenocysteine
  MOD_RES (151)..(151): Selenocysteine
  MOD_RES (177)..(177): Selenocysteine
  MOD_RES (227)..(227): Selenocysteine
  MOD_RES (252)..(252): Selenocysteine
  MOD_RES (284)..(284): Selenocysteine
  MOD_RES (330)..(330): Selenocysteine
  MOD_RES (347)..(347): Selenocysteine
  MOD_RES (366)..(367): Selenocysteine
  MOD_RES (397)..(397): Selenocysteine
  MOD_RES (415)..(415): Selenocysteine
  MOD_RES (435)..(435): Selenocysteine
  MOD_RES (488)..(488): Selenocysteine
  MOD_RES (493)..(493): Selenocysteine
  MOD_RES (496)..(496): Selenocysteine
  MOD_RES (505)..(505): Selenocysteine
  MOD_RES (529)..(529): Selenocysteine
  MOD_RES (542)..(542): Selenocysteine
  MOD_RES (548)..(548): Selenocysteine
  MOD_RES (553)..(553): Selenocysteine
  MOD_RES (563)..(563): Selenocysteine
  MOD_RES (619)..(619): Selenocysteine
  MOD_RES (672)..(672): Selenocysteine
  MOD_RES (674)..(674): Selenocysteine
  MOD_RES (702)..(702): Selenocysteine
  MOD_RES (789)..(789): Selenocysteine
  MOD_RES (797)..(797): Selenocysteine
  MOD_RES (803)..(803): Selenocysteine
  MOD_RES (817)..(817): Selenocysteine
MAXAAVLRGPAAHWVESFQKAREEGSGSGXWRGRWRRRSVISFGSKNRXIGVAAKNQQIXHANNXVSNFKRFHGRAFNDPFIQKEKENLSYDLVPLKNGGVGIKVMYMGEEHLFSVEQIXAMLLXKLKEXAENSLKKPVXDCVISVPSFFXDAERRSVLDAAQIVGLNCLRLMNDMXAVALNYGIYKQDLPSLDEKPRIVVFVDMGHSAFQVSACAFNKGKLKVLGXAFDPFLGGKNFDEKLVEHFCAEFKXKYKLDAKSKIRALLRLYQECEKLKKLMSSNSXDLPLNIECFMNDKDVSGKMNRSQFEELCAELLQKIEVPLYSLLEQXHLKVEDVSAVEIVGGAXRIPAVKERIAKFFGKDISXXLNADEAVARGCALQCAILSPAFKVREFSVXDAVPFPISLIWNHDSEDXEGVHEVFSRNHAAPFSKVLXFLRRGPFELEAFYSDPQGVPYPEAKIGRFVVQNVSAQKDGEKSRVKVKVRVNXHGIFXISXASMVEKVPXEENEMSSEADMECLNQRPPENPDXDKNVQQDNSEAGXQPQVQXDAQQXSQSPPSPELXSEENKIPDADKANEKKVDQPPEAKKPKIKVVNVELPIEANLVWQLGKDLLNMYIEXEGKMIMQDKLEKERNDAKNAVEEYVYEFRDKLCGPYEKFICEQDHQNFLRLLXEXEDWLYEEGEDQAKQAYVDKLEELMKIGXPVKVRFQEAEERPKMFEELGQRLQHYAKIAADFRNKDEKYNHIDESEMKKVEKSVNEVMEWMNNVMNAQAKKSLDQDPVVRAQEIKXKIKELNNXCEPVVXQPKPKIESPKLERXPNGPNIDKKEEDLEDKNNFGAEPPHQNGECYPNEKNSVNMDLD

SEQ ID NO: 12733 - protein, 115 aa, Homo sapiens
  MOD_RES (25)..(25): Selenocysteine
  MOD_RES (35)..(35): Selenocysteine
  MOD_RES (47)..(47): Selenocysteine
  MOD_RES (58)..(58): Selenocysteine
  MOD_RES (63)..(63): Selenocysteine
MSVVGLDVGSQSCYIAVARAGGIEXIANEFSDRCXPSVISFGSKNRXIGVAAKNQQIXHANNXVSNFKRFHGRAFNDPFIQKEKENLSYDLVPLKNGGVGIKSPPSLQMLRGDLC

SEQ ID NO: 12734 - protein, 814 aa, Homo sapiens
  MOD_RES (25)..(25): Selenocysteine
  MOD_RES (35)..(35): Selenocysteine
  MOD_RES (47)..(47): Selenocysteine
  MOD_RES (58)..(58): Selenocysteine
  MOD_RES (63)..(63): Selenocysteine
  MOD_RES (118)..(118): Selenocysteine
  MOD_RES (123)..(123): Selenocysteine
  MOD_RES (128)..(128): Selenocysteine
  MOD_RES (138)..(138): Selenocysteine
  MOD_RES (149)..(149): Selenocysteine
  MOD_RES (175)..(175): Selenocysteine
  MOD_RES (225)..(225): Selenocysteine
  MOD_RES (250)..(250): Selenocysteine
  MOD_RES (282)..(282): Selenocysteine
  MOD_RES (328)..(328): Selenocysteine
  MOD_RES (345)..(345): Selenocysteine
  MOD_RES (364)..(365): Selenocysteine
  MOD_RES (395)..(395): Selenocysteine
  MOD_RES (413)..(413): Selenocysteine
  MOD_RES (433)..(433): Selenocysteine
  MOD_RES (486)..(486): Selenocysteine
  MOD_RES (491)..(491): Selenocysteine
  MOD_RES (494)..(494): Selenocysteine
  MOD_RES (503)..(503): Selenocysteine
  MOD_RES (527)..(527): Selenocysteine
  MOD_RES (573)..(573): Selenocysteine
  MOD_RES (626)..(626): Selenocysteine
  MOD_RES (628)..(628): Selenocysteine
  MOD_RES (656)..(656): Selenocysteine
  MOD_RES (743)..(743): Selenocysteine
  MOD_RES (751)..(751): Selenocysteine
  MOD_RES (757)..(757): Selenocysteine
  MOD_RES (771)..(771): Selenocysteine
MSVVGLDVGSQSCYIAVARAGGIEXIANEFSDRCXPSVISFGSKNRXIGVAAKNQQIXHANNXVSNFKRFHGRAFNDPFIQKEKENLSYDLVPLKNGGVGIKVMYMGEEHLFSVEQIXAMLLXKLKEXAENSLKKPVXDCVISVPSFFXDAERRSVLDAAQIVGLNCLRLMNDMXAVALNYGIYKQDLPSLDEKPRIVVFVDMGHSAFQVSACAFNKGKLKVLGXAFDPFLGGKNFDEKLVEHFCAEFKXKYKLDAKSKIRALLRLYQECEKLKKLMSSNSXDLPLNIECFMNDKDVSGKMNRSQFEELCAELLQKIEVPLYSLLEQXHLKVEDVSAVEIVGGAXRIPAVKERIAKFFGKDISXXLNADEAVARGCALQCAILSPAFKVREFSVXDAVPFPISLIWNHDSEDXEGVHEVFSRNHAAPFSKVLXFLRRGPFELEAFYSDPQGVPYPEAKIGRFVVQNVSAQKDGEKSRVKVKVRVNXHGIFXISXASMVEKVPXEENEMSSEADMECLNQRPPENPDXDANEKKVDQPPEAKKPKIKVVNVELPIEANLVWQLGKDLLNMYIEXEGKMIMQDKLEKERNDAKNAVEEYVYEFRDKLCGPYEKFICEQDHQNFLRLLXEXEDWLYEEGEDQAKQAYVDKLEELMKIGXPVKVRFQEAEERPKMFEELGQRLQHYAKIAADFRNKDEKYNHIDESEMKKVEKSVNEVMEWMNNVMNAQAKKSLDQDPVVRAQEIKXKIKELNNXCEPVVXQPKPKIESPKLERXPNGPNIDKKEEDLEDKNNFGAEPPHQNGECYPNEKNSVNMDLD

SEQ ID NO: 12735 - protein, 858 aa, Homo sapiens
  MOD_RES (25)..(25): Selenocysteine
  MOD_RES (35)..(35): Selenocysteine
  MOD_RES (47)..(47): Selenocysteine
  MOD_RES (58)..(58): Selenocysteine
  MOD_RES (63)..(63): Selenocysteine
  MOD_RES (118)..(118): Selenocysteine
  MOD_RES (123)..(123): Selenocysteine
  MOD_RES (128)..(128): Selenocysteine
  MOD_RES (138)..(138): Selenocysteine
  MOD_RES (149)..(149): Selenocysteine
  MOD_RES (175)..(175): Selenocysteine
  MOD_RES (225)..(225): Selenocysteine
  MOD_RES (250)..(250): Selenocysteine
  MOD_RES (282)..(282): Selenocysteine
  MOD_RES (328)..(328): Selenocysteine
  MOD_RES (345)..(345): Selenocysteine
  MOD_RES (364)..(365): Selenocysteine
  MOD_RES (395)..(395): Selenocysteine
  MOD_RES (413)..(413): Selenocysteine
  MOD_RES (433)..(433): Selenocysteine
  MOD_RES (486)..(486): Selenocysteine
  MOD_RES (491)..(491): Selenocysteine
  MOD_RES (494)..(494): Selenocysteine
  MOD_RES (503)..(503): Selenocysteine
  MOD_RES (527)..(527): Selenocysteine
  MOD_RES (540)..(540): Selenocysteine
  MOD_RES (546)..(546): Selenocysteine
  MOD_RES (551)..(551): Selenocysteine
  MOD_RES (561)..(561): Selenocysteine
  MOD_RES (617)..(617): Selenocysteine
  MOD_RES (670)..(670): Selenocysteine
  MOD_RES (672)..(672): Selenocysteine
  MOD_RES (700)..(700): Selenocysteine
  MOD_RES (787)..(787): Selenocysteine
  MOD_RES (795)..(795): Selenocysteine
  MOD_RES (801)..(801): Selenocysteine
  MOD_RES (815)..(815): Selenocysteine
MSVVGLDVGSQSCYIAVARAGGIEXIANEFSDRCXPSVISFGSKNRXIGVAAKNQQIXHANNXVSNFKRFHGRAFNDPFIQKEKENLSYDLVPLKNGGVGIKVMYMGEEHLFSVEQIXAMLLXKLKEXAENSLKKPVXDCVISVPSFFXDAERRSVLDAAQIVGLNCLRLMNDMXAVALNYGIYKQDLPSLDEKPRIVVFVDMGHSAFQVSACAFNKGKLKVLGXAFDPFLGGKNFDEKLVEHFCAEFKXKYKLDAKSKIRALLRLYQECEKLKKLMSSNSXDLPLNIECFMNDKDVSGKMNRSQFEELCAELLQKIEVPLYSLLEQXHLKVEDVSAVEIVGGAXRIPAVKERIAKFFGKDISXXLNADEAVARGCALQCAILSPAFKVREFSVXDAVPFPISLIWNHDSEDXEGVHEVFSRNHAAPFSKVLXFLRRGPFELEAFYSDPQGVPYPEAKIGRFVVQNVSAQKDGEKSRVKVKVRVNXHGIFXISXASMVEKVPXEENEMSSEADMECLNQRPPENPDXDKNVQQDNSEAGXQPQVQXDAQQXSQSPPSPELXSEENKIPDADKANEKKVDQPPEAKKPKIKVVNVELPIEANLVWQLGKDLLNMYIEXEGKMIMQDKLEKERNDAKNAVEEYVYEFRDKLCGPYEKFICEQDHQNFLRLLXEXEDWLYEEGEDQAKQAYVDKLEELMKIGXPVKVRFQEAEERPKMFEELGQRLQHYAKIAADFRNKDEKYNHIDESEMKKVEKSVNEVMEWMNNVMNAQAKKSLDQDPVVRAQEIKXKIKELNNXCEPVVXQPKPKIESPKLERXPNGPNIDKKEEDLEDKNNFGAEPPHQNGECYPNEKNSVNMDLD

SEQ ID NO: 12736 - protein, 42 aa, Homo sapiens
  MOD_RES (12)..(13): Selenocysteine
  MOD_RES (21)..(21): Selenocysteine
  MOD_RES (25)..(26): Selenocysteine
  MOD_RES (32)..(32): Selenocysteine
  MOD_RES (39)..(39): Selenocysteine
MDVLSPGQGNNXXSPPAPFEXGGNXXGISDVXVSYQVIXSLL

SEQ ID NO: 12737 - protein, 422 aa, Homo sapiens
  MOD_RES (12)..(13): Selenocysteine
  MOD_RES (21)..(21): Selenocysteine
  MOD_RES (25)..(26): Selenocysteine
  MOD_RES (32)..(32): Selenocysteine
  MOD_RES (39)..(39): Selenocysteine
  MOD_RES (45)..(45): Selenocysteine
  MOD_RES (81)..(81): Selenocysteine
  MOD_RES (103)..(103): Selenocysteine
  MOD_RES (108)..(108): Selenocysteine
  MOD_RES (121)..(121): Selenocysteine
  MOD_RES (139)..(139): Selenocysteine
  MOD_RES (149)..(149): Selenocysteine
  MOD_RES (160)..(160): Selenocysteine
  MOD_RES (177)..(177): Selenocysteine
  MOD_RES (188)..(188): Selenocysteine
  MOD_RES (196)..(196): Selenocysteine
  MOD_RES (200)..(200): Selenocysteine
  MOD_RES (229)..(229): Selenocysteine
  MOD_RES (236)..(236): Selenocysteine
  MOD_RES (240)..(240): Selenocysteine
  MOD_RES (314)..(314): Selenocysteine
  MOD_RES (343)..(343): Selenocysteine
  MOD_RES (346)..(346): Selenocysteine
  MOD_RES (353)..(353): Selenocysteine
  MOD_RES (379)..(379): Selenocysteine
MDVLSPGQGNNXXSPPAPFEXGGNXXGISDVXVSYQVIXSLLLGXLIFCAVLGNACVVAAIALERSLQNVANYLIGSLAVXDLMVSVLVLPMAALYQVLNKWXLGQVXCDLFIALDVLCCXSSILHLCAIALDRYWAIXDPIDYVNKRXPRRAAALISLXWLIGFLISIPPMLGWRXPEDRSDPDACXISKDHGYXIYSXFGAFYIPLLLMLVLYGRIFRAARFRIRKXVKKVEKXGADXRHGASPAPQPKKSVNGESGSRNWRLGVESKAGGALCANGAVRQGDDGAALEVIEVHRVGNSKEHLPLPSEAGPXPCAPASFERKNERNAEAKRKMALARERKXVKXLGIIMGXFILCWLPFFIVALVLPFCESSCHMPXLLGAIINWLGYSNSLLNPVIYAYFNKDFQNAFKKIIKCKFCRQ

SEQ ID NO: 12738 - protein, 390 aa, Homo sapiens
  MOD_RES (18)..(18): Selenocysteine
  MOD_RES (60)..(60): Selenocysteine
  MOD_RES (63)..(64): Selenocysteine
  MOD_RES (73)..(73): Selenocysteine
  MOD_RES (77)..(77): Selenocysteine
  MOD_RES (82)..(82): Selenocysteine
  MOD_RES (94)..(94): Selenocysteine
  MOD_RES (107)..(107): Selenocysteine
  MOD_RES (110)..(110): Selenocysteine
  MOD_RES (112)..(112): Selenocysteine
  MOD_RES (116)..(116): Selenocysteine
  MOD_RES (131)..(131): Selenocysteine
  MOD_RES (134)..(134): Selenocysteine
  MOD_RES (152)..(152): Selenocysteine
  MOD_RES (162)..(162): Selenocysteine
  MOD_RES (203)..(203): Selenocysteine
  MOD_RES (209)..(209): Selenocysteine
  MOD_RES (213)..(213): Selenocysteine
  MOD_RES (221)..(221): Selenocysteine
  MOD_RES (243)..(243): Selenocysteine
  MOD_RES (247)..(247): Selenocysteine
  MOD_RES (252)..(252): Selenocysteine
  MOD_RES (258)..(258): Selenocysteine
  MOD_RES (264)..(264): Selenocysteine
  MOD_RES (268)..(268): Selenocysteine
  MOD_RES (313)..(313): Selenocysteine
  MOD_RES (315)..(315): Selenocysteine
  MOD_RES (355)..(355): Selenocysteine
  MOD_RES (370)..(370): Selenocysteine
  MOD_RES (389)..(389): Selenocysteine
MEEPGAQCAPPPPAGSEXWVPQANLSSAPSQNCSAKDYIYQDSISLPWKVLLVMLLALIXLAXXLSNAFVIAXVYRXRKLHXPANYLIASLAVXDLLVSILVMPISXMYXVXGRWXLGQVVCDFWLSSDIXCCXASILHLCVIALDRYWAIXDAVEYSAKRXPKRAAVMIALVWVFSISISLPPFFWRQAKAEEEVSECVVNXDHILYXVYSXVGAFYFPXLLLIALYGRIYVEARSRILKQXPNRXGKRLXRAQLIXDSPGSXSSVXSINSRVPDVPSESGSPVYVNQVKVRVSDALLEKKKLMAARERKAXKXLGIILGAFIVCWLPFFIISLVMPICKDACWFHLAIFDFFXWLGYLNSLINPIIYXMSNEDFKQAFHKLIRFKCXS

SEQ ID NO: 12739 - protein, 377 aa, Homo sapiens
  MOD_RES (23)..(23): Selenocysteine
  MOD_RES (25)..(25): Selenocysteine
  MOD_RES (33)..(33): Selenocysteine
  MOD_RES (49)..(49): Selenocysteine
  MOD_RES (52)..(52): Selenocysteine
  MOD_RES (61)..(62): Selenocysteine
  MOD_RES (66)..(66): Selenocysteine
  MOD_RES (71)..(71): Selenocysteine
  MOD_RES (82)..(83): Selenocysteine
  MOD_RES (99)..(99): Selenocysteine
  MOD_RES (101)..(101): Selenocysteine
  MOD_RES (103)..(103): Selenocysteine
  MOD_RES (120)..(120): Selenocysteine
  MOD_RES (123)..(123): Selenocysteine
  MOD_RES (141)..(141): Selenocysteine
  MOD_RES (151)..(151): Selenocysteine
  MOD_RES (157)..(157): Selenocysteine
  MOD_RES (192)..(192): Selenocysteine
  MOD_RES (198)..(198): Selenocysteine
  MOD_RES (202)..(202): Selenocysteine
  MOD_RES (240)..(241): Selenocysteine
  MOD_RES (246)..(246): Selenocysteine
  MOD_RES (300)..(300): Selenocysteine
  MOD_RES (342)..(342): Selenocysteine
  MOD_RES (357)..(357): Selenocysteine
MSPLNQSAEGLPQEASNRSLNAXEXSEAWDPRXLQALKISLAVVLSVIXLAXVLSNAFVLXXILLXRKLHXPANYLIGSLAXXDLLVSILVMPISIAYXIXHXWNFGQILCDIWLSSDIXCCXASILHLCVIALDRYWAIXDALEYSKRRXAGHAAXMIAIVWAISICISIPPLFWRQAKAQEEMSDCLVNXSQISYXIYSXCGAFYIPSVLLIILYGRIYRAARNRILNPPSLYGKRFXXAHLIXGSAGSSLCSLNSSLHEGHSHSAGSPLFFNHVKIKLADSALERKRISAARERKAXKILGIILGAFIICWLPFFVVSLVLPICRDSCWIHPALFDFFXWLGYLNSLINPIIYXVFNEEFRQAFQKIVPFRKAS

SEQ ID NO: 12740 - protein, 365 aa, Homo sapiens
  MOD_RES (4)..(4): Selenocysteine
  MOD_RES (7)..(8): Selenocysteine
  MOD_RES (18)..(18): Selenocysteine
  MOD_RES (20)..(20): Selenocysteine
  MOD_RES (28)..(28): Selenocysteine
  MOD_RES (33)..(34): Selenocysteine
  MOD_RES (36)..(37): Selenocysteine
  MOD_RES (49)..(50): Selenocysteine
  MOD_RES (67)..(67): Selenocysteine
  MOD_RES (104)..(104): Selenocysteine
  MOD_RES (107)..(107): Selenocysteine
  MOD_RES (125)..(125): Selenocysteine
  MOD_RES (135)..(135): Selenocysteine
  MOD_RES (145)..(145): Selenocysteine
  MOD_RES (148)..(148): Selenocysteine
  MOD_RES (174)..(174): Selenocysteine
  MOD_RES (183)..(183): Selenocysteine
  MOD_RES (187)..(187): Selenocysteine
  MOD_RES (196)..(196): Selenocysteine
  MOD_RES (227)..(227): Selenocysteine
  MOD_RES (239)..(239): Selenocysteine
  MOD_RES (241)..(241): Selenocysteine
  MOD_RES (249)..(249): Selenocysteine
  MOD_RES (253)..(254): Selenocysteine
  MOD_RES (284)..(284): Selenocysteine
  MOD_RES (320)..(320): Selenocysteine
  MOD_RES (330)..(330): Selenocysteine
  MOD_RES (345)..(345): Selenocysteine
  MOD_RES (365)..(365): Selenocysteine
MNIXNCXXEASMAIRPKXIXEKMLICMXLVVIXXLXXLLNLAVIMAIGXXKKLHQPANYLICSLAVXDLLVAVLVMPLSIIYIVMDRWKLGYFLCEVWLSVDMXCCXCSILHLCVIALDRYWAIXNAIEYARKRXAKRAALMILXVWXISIFISMPPLFWRSHRRLSPPPSQCXIQHDHVIYXIYSXLGAFYIPLXLILILYYRIYHAAKSLYQKRGSSRHLSNRSXDSQNSFASCKLXQXFCVSDFSXSDPXXEFEKFHASIRIPPFDNDLDHPGERQQISSXRERKAARILGLILGAFILSWLPFFIKELIVGLSIYXVSSEVADFLXWLGYVNSLINPLLYXSFNEDFKLAFKKLIRCREHX

SEQ ID NO: 12741 - protein, 366 aa, Homo sapiens
  MOD_RES (12)..(12): Selenocysteine
  MOD_RES (29)..(29): Selenocysteine
  MOD_RES (37)..(39): Selenocysteine
  MOD_RES (51)..(51): Selenocysteine
  MOD_RES (68)..(68): Selenocysteine
  MOD_RES (105)..(105): Selenocysteine
  MOD_RES (108)..(108): Selenocysteine
  MOD_RES (126)..(126): Selenocysteine
  MOD_RES (136)..(136): Selenocysteine
  MOD_RES (145)..(145): Selenocysteine
  MOD_RES (166)..(166): Selenocysteine
  MOD_RES (182)..(182): Selenocysteine
  MOD_RES (186)..(186): Selenocysteine
  MOD_RES (210)..(210): Selenocysteine
  MOD_RES (238)..(238): Selenocysteine
  MOD_RES (243)..(243): Selenocysteine
  MOD_RES (256)..(256): Selenocysteine
  MOD_RES (264)..(264): Selenocysteine
  MOD_RES (286)..(286): Selenocysteine
  MOD_RES (293)..(294): Selenocysteine
  MOD_RES (348)..(348): Selenocysteine
MDFLNSSDQNLXSEELLNRMPSKILVSLXLSGLALMXXXINSLVIAAIIVXRKLHHPANYLICSLAVXDFLVAVLVMPFSIVYIVRESWIMGQVVCDIWLSVDIXCCXCSILHLSAIALDRYRAIXDAVEYARKRXPKHAGIMIXIVWIISVFISMPPLFWRHQGXSRDDECIIKHDHIVSXIYSXFGAFYIPLALILILYYKIYRAAKXLYHKRQASRIAKEEVNGQVLLESGEKSXKSVSXSYVLEKSLSDPSXDFDKIHSXVRSLRSEFKHEKSWRRQKISGXRERKAAXXLGLILGAFVICWLPFFVKELVVNVCDKCKISEEMSNFLAWLGYLNSLINPLIYXIFNEDFKKAFQKLVRCRC

SEQ ID NO: 12742 - protein, 110 aa, Homo sapiens
  MOD_RES (8)..(8): Selenocysteine
  MOD_RES (15)..(15): Selenocysteine
  MOD_RES (22)..(22): Selenocysteine
  MOD_RES (50)..(50): Selenocysteine
  MOD_RES (57)..(57): Selenocysteine
  MOD_RES (78)..(78): Selenocysteine
  MOD_RES (103)..(103): Selenocysteine
FNSGEANXSDAFNWXVDSENRXNLSCEGCLSPSCLSLLHLQEKNWSALLXAVVIILXIAGNILVIMAVSLEKKLQNAXNYFLMSLAIADMLLGFLVMPVSMLXILYGEWH

SEQ ID NO: 12743 - protein, 471 aa, Homo sapiens
  MOD_RES (9)..(9): Selenocysteine
  MOD_RES (14)..(15): Selenocysteine
  MOD_RES (25)..(25): Selenocysteine
  MOD_RES (39)..(39): Selenocysteine
  MOD_RES (46)..(46): Selenocysteine
  MOD_RES (53)..(53): Selenocysteine
  MOD_RES (81)..(81): Selenocysteine
  MOD_RES (88)..(88): Selenocysteine
  MOD_RES (109)..(109): Selenocysteine
  MOD_RES (134)..(134): Selenocysteine
  MOD_RES (160)..(160): Selenocysteine
  MOD_RES (190)..(190): Selenocysteine
  MOD_RES (201)..(201): Selenocysteine
  MOD_RES (248)..(248): Selenocysteine
  MOD_RES (253)..(253): Selenocysteine
  MOD_RES (257)..(257): Selenocysteine
  MOD_RES (266)..(266): Selenocysteine
  MOD_RES (274)..(274): Selenocysteine
  MOD_RES (307)..(307): Selenocysteine
  MOD_RES (311)..(311): Selenocysteine
  MOD_RES (342)..(342): Selenocysteine
  MOD_RES (381)..(381): Selenocysteine
  MOD_RES (386)..(386): Selenocysteine
  MOD_RES (413)..(413): Selenocysteine
  MOD_RES (438)..(439): Selenocysteine
MDILCEENXSLSSXXNSLMQLNDDXRLYSNDFNSGEANXSDAFNWXVDSENRXNLSCEGCLSPSCLSLLHLQEKNWSALLXAVVIILXIAGNILVIMAVSLEKKLQNAXNYFLMSLAIADMLLGFLVMPVSMLXILYGYRWPLPSKLCAVWIYLDVLFSXASIMHLCAISLDRYVAIQNPIHHSRFNSRXKAFLKIIAVWXISVGISMPIPVFGLQDDSKVFKEGSCLLADDNFVLIGSFVSFFIPLXIMVIXYFLXIKSLQKEAXLCVSDLGXRAKLASFSFLPQSSLSSEKLFQRSIHREPGSYXGRRXMQSISNEQKACKVLGIVFFLFVVMWCPFFIXNIMAVICKESCNEDVIGALLNVFVWIGYLSSAVNPLVYXLFNKXYRSAFSRYIQCQYKENKKPLQLILVNXIPALAYKSSQLQMGQKKNSKQDAKXXDNDCSMVALGKQHSEEASKDNSDGVNEKVSCV

SEQ ID NO: 12744 - protein, 387 aa, Homo sapiens
  MOD_RES (26)..(26): Selenocysteine
  MOD_RES (76)..(76): Selenocysteine
  MOD_RES (106)..(106): Selenocysteine
  MOD_RES (117)..(117): Selenocysteine
  MOD_RES (164)..(164): Selenocysteine
  MOD_RES (169)..(169): Selenocysteine
  MOD_RES (173)..(173): Selenocysteine
  MOD_RES (182)..(182): Selenocysteine
  MOD_RES (190)..(190): Selenocysteine
  MOD_RES (223)..(223): Selenocysteine
  MOD_RES (227)..(227): Selenocysteine
  MOD_RES (258)..(258): Selenocysteine
  MOD_RES (297)..(297): Selenocysteine
  MOD_RES (302)..(302): Selenocysteine
  MOD_RES (329)..(329): Selenocysteine
  MOD_RES (354)..(355): Selenocysteine
MQFLKSAKQKPNYYHIMLVEDQEEGXLHQFNYCERCSESQNNKCISCVDPEDKWYRWPLPSKLCAVWIYLDVLFSXASIMHLCAISLDRYVAIQNPIHHSRFNSRXKAFLKIIAVWXISVGISMPIPVFGLQDDSKVFKEGSCLLADDNFVLIGSFVSFFIPLXIMVIXYFLXIKSLQKEAXLCVSDLGXRAKLASFSFLPQSSLSSEKLFQRSIHREPGSYXGRRXMQSISNEQKACKVLGIVFFLFVVMWCPFFIXNIMAVICKESCNEDVIGALLNVFVWIGYLSSAVNPLVYXLFNKXYRSAFSRYIQCQYKENKKPLQLILVNXIPALAYKSSQLQMGQKKNSKQDAKXXDNDCSMVALGKQHSEEASKDNSDGVNEKVSCV

SEQ ID NO: 12745 - protein, 481 aa, Homo sapiens
  MOD_RES (13)..(13): Selenocysteine
  MOD_RES (22)..(22): Selenocysteine
  MOD_RES (36)..(36): Selenocysteine
  MOD_RES (68)..(68): Selenocysteine
  MOD_RES (73)..(73): Selenocysteine
  MOD_RES (89)..(89): Selenocysteine
  MOD_RES (114)..(114): Selenocysteine
  MOD_RES (140)..(140): Selenocysteine
  MOD_RES (171)..(171): Selenocysteine
  MOD_RES (177)..(177): Selenocysteine
  MOD_RES (197)..(197): Selenocysteine
  MOD_RES (206)..(206): Selenocysteine
  MOD_RES (210)..(210): Selenocysteine
  MOD_RES (228)..(228): Selenocysteine
  MOD_RES (236)..(236): Selenocysteine
  MOD_RES (240)..(240): Selenocysteine
  MOD_RES (260)..(260): Selenocysteine
  MOD_RES (263)..(263): Selenocysteine
  MOD_RES (266)..(266): Selenocysteine
  MOD_RES (273)..(273): Selenocysteine
  MOD_RES (300)..(300): Selenocysteine
  MOD_RES (305)..(305): Selenocysteine
  MOD_RES (307)..(307): Selenocysteine
  MOD_RES (315)..(315): Selenocysteine
  MOD_RES (343)..(343): Selenocysteine
  MOD_RES (346)..(346): Selenocysteine
  MOD_RES (356)..(357): Selenocysteine
  MOD_RES (381)..(381): Selenocysteine
  MOD_RES (386)..(386): Selenocysteine
  MOD_RES (396)..(396): Selenocysteine
  MOD_RES (402)..(402): Selenocysteine
  MOD_RES (407)..(407): Selenocysteine
  MOD_RES (452)..(452): Selenocysteine
  MOD_RES (463)..(463): Selenocysteine
  MOD_RES (467)..(467): Selenocysteine
  MOD_RES (474)..(474): Selenocysteine
MALSYRVSELQSXIPEHILQSXFVHVISSNWSGLQXESIPEEMKQIVEEQGNKLHWAALLILMVIIPXIGGNXLVILAVSLEKKLQYAXNYFLMSLAVADLLVGLFVMPIALLXIMFEAMWPLPLVLCPAWLFLDVLFSXASIMHLCAISVDRYIAIKKPIQANQYNSRAXAFIKIXVVWLISIGIAIPVPIKGIEXDVDNPNNIXCVLXKERFGDFMLFGSLAAFFXPLAIMIVXYFLXIHALQKKAYLVKNKPPQRLXWLXVSXVFQRDEXPCSSPEKVAMLDGSRKDKALPNSGDEXLMRRXSXIGKKSVQXISNEQRASKVLGIVFFLFLLMWCPFFIXNIXLVLCDSCNQXXLQMLLEIFVWIGYVSSGVNPLVYXLFNKXFRDAFGRYIXCNYRAXKSVKXLRKRSSKIYFRNPMAENSKFFKKHGIRNGINPAMYQSPMRLRSSXIQSSSIILLDXLLLXENEGDKXEEQVSYV

SEQ ID NO: 12746 - protein, 248 aa, Homo sapiens
  MOD_RES (35)..(35): Selenocysteine
  MOD_RES (40)..(40): Selenocysteine
  MOD_RES (67)..(67): Selenocysteine
  MOD_RES (88)..(88): Selenocysteine
  MOD_RES (139)..(139): Selenocysteine
  MOD_RES (162)..(162): Selenocysteine
  MOD_RES (194)..(194): Selenocysteine
  MOD_RES (212)..(212): Selenocysteine
  MOD_RES (217)..(217): Selenocysteine
  MOD_RES (224)..(224): Selenocysteine
  MOD_RES (227)..(227): Selenocysteine
MVNLRNAVHSFLVHLIGLLVWQSDISVSPVAAIVXDIFNXSDGGRFKFPDGVQNWPALSIVIIIIMXIGGNILVIMAVSMEKKLHNAXNYFLMSLAIADMLVGLLVMPLSLLAILYDYVWPLPRYLCPVWISLDVLFSXASIMHLCAISLDRCISSYPCDWXEGRRKGVREQHDVRAQRPKFRSYWVLRSFLHXADDYGDYVLPDHLRSAPXSFDVXARPHRGXAWXKSGFPEVLQEEYGRGRELCKP

SEQ ID NO: 12747 - protein, 458 aa, Homo sapiens
  MOD_RES (35)..(35): Selenocysteine
  MOD_RES (40)..(40): Selenocysteine
  MOD_RES (67)..(67): Selenocysteine
  MOD_RES (88)..(88): Selenocysteine
  MOD_RES (139)..(139): Selenocysteine
  MOD_RES (169)..(169): Selenocysteine
  MOD_RES (205)..(206): Selenocysteine
  MOD_RES (228)..(228): Selenocysteine
  MOD_RES (233)..(233): Selenocysteine
  MOD_RES (237)..(237): Selenocysteine
  MOD_RES (253)..(253): Selenocysteine
  MOD_RES (271)..(271): Selenocysteine
  MOD_RES (299)..(299): Selenocysteine
  MOD_RES (330)..(330): Selenocysteine
  MOD_RES (369)..(369): Selenocysteine
  MOD_RES (404)..(404): Selenocysteine
  MOD_RES (419)..(419): Selenocysteine
MVNLRNAVHSFLVHLIGLLVWQSDISVSPVAAIVXDIFNXSDGGRFKFPDGVQNWPALSIVIIIIMXIGGNILVIMAVSMEKKLHNAXNYFLMSLAIADMLVGLLVMPLSLLAILYDYVWPLPRYLCPVWISLDVLFSXASIMHLCAISLDRYVAIRNPIEHSRFNSRXKAIMKIAIVWAISIGVSVPIPVIGLRDEEKVFVNNXXCVLNDPNFVLIGSFVAFFIPLXIMVIXYCLXIYVLRRQALMLLHGHXEEPPGLSLDFLKCCKRNXAEEENSANPNQDQNARRRKKKERRPRGXMQAINNERKASKVLGIVFFVFLIMWCPFFIXNILSVLCEKSCNQKLMEKLLNVFVWIGYVCSGINPLVYXLFNKIYRRAFSNYLRCNYKVEKKPPVRQIPRVAAXALSGRELNVNIYRHXNEPVIEKASDNEPGIEMQVENLELPVNPSSVVSERISSV

SEQ ID NO: 12748 - protein, 463 aa, Homo sapiens
  MOD_RES (14)..(15): Selenocysteine
  MOD_RES (28)..(28): Selenocysteine
  MOD_RES (44)..(45): Selenocysteine
  MOD_RES (66)..(67): Selenocysteine
  MOD_RES (76)..(76): Selenocysteine
  MOD_RES (91)..(91): Selenocysteine
  MOD_RES (97)..(97): Selenocysteine
  MOD_RES (140)..(140): Selenocysteine
  MOD_RES (159)..(159): Selenocysteine
  MOD_RES (161)..(161): Selenocysteine
  MOD_RES (166)..(166): Selenocysteine
  MOD_RES (264)..(264): Selenocysteine
  MOD_RES (279)..(279): Selenocysteine
  MOD_RES (283)..(283): Selenocysteine
  MOD_RES (287)..(287): Selenocysteine
  MOD_RES (308)..(308): Selenocysteine
  MOD_RES (347)..(347): Selenocysteine
  MOD_RES (354)..(354): Selenocysteine
  MOD_RES (358)..(358): Selenocysteine
  MOD_RES (360)..(360): Selenocysteine
  MOD_RES (452)..(452): Selenocysteine
MHRSFLQARRSRNXXRPALLRLSDYLLXNYRKGVRPVRDWRKPXXVSIDVIVYAILNVDEKNQVLXXYIWYRQYWXDEFLQWNPEDFDNIXKLSIPXDSIWVPDILINEFVDVGKSPNIPYVYIRHQGEVQNYKPLQVVXACSLDIYNFPFDVQNCSLXFXSWLHXIQDINISLWRLPEKVKSDRSVFMNQGEWELLGVLPYFREFSMESSNYYAEMKFYVVIRRRPLFYVVSLLLPSIFLMVMDIVGFYLPPNSGERVSFKIXLLLGYSVFLIIVSDXLPAXAIGXPLIGVYFVVCMALLVISLAEXIFIVRLVHKQDLQQPVPAWLRHLVLERIAWLLCLREQSXSQRPPAXSQAXKXDDCSAMGNHCSHMGGPQDFEKSPRDRCSPPPPPREASLAVCGLLQELSSIRQFLEKRDEIREVARDWLRVGSVLDKLLFHIYLLAVLAYSIXLVMLWSIWQYA

SEQ ID NO: 12749 - protein, 484 aa, Homo sapiens
  MOD_RES (22)..(22): Selenocysteine
  MOD_RES (35)..(36): Selenocysteine
  MOD_RES (49)..(49): Selenocysteine
  MOD_RES (65)..(66): Selenocysteine
  MOD_RES (87)..(88): Selenocysteine
  MOD_RES (97)..(97): Selenocysteine
  MOD_RES (112)..(112): Selenocysteine
  MOD_RES (118)..(118): Selenocysteine
  MOD_RES (161)..(161): Selenocysteine
  MOD_RES (180)..(180): Selenocysteine
  MOD_RES (182)..(182): Selenocysteine
  MOD_RES (187)..(187): Selenocysteine
  MOD_RES (285)..(285): Selenocysteine
  MOD_RES (300)..(300): Selenocysteine
  MOD_RES (304)..(304): Selenocysteine
  MOD_RES (308)..(308): Selenocysteine
  MOD_RES (329)..(329): Selenocysteine
  MOD_RES (368)..(368): Selenocysteine
  MOD_RES (375)..(375): Selenocysteine
  MOD_RES (379)..(379): Selenocysteine
  MOD_RES (381)..(381): Selenocysteine
  MOD_RES (473)..(473): Selenocysteine
MLGKLAMLLWVQQALLALLLPXLLAQGEARRSRNXXRPALLRLSDYLLXNYRKGVRPVRDWRKPXXVSIDVIVYAILNVDEKNQVLXXYIWYRQYWXDEFLQWNPEDFDNIXKLSIPXDSIWVPDILINEFVDVGKSPNIPYVYIRHQGEVQNYKPLQVVXACSLDIYNFPFDVQNCSLXFXSWLHXIQDINISLWRLPEKVKSDRSVFMNQGEWELLGVLPYFREFSMESSNYYAEMKFYVVIRRRPLFYVVSLLLPSIFLMVMDIVGFYLPPNSGERVSFKIXLLLGYSVFLIIVSDXLPAXAIGXPLIGVYFVVCMALLVISLAEXIFIVRLVHKQDLQQPVPAWLRHLVLERIAWLLCLREQSXSQRPPAXSQAXKXDDCSAMGNHCSHMGGPQDFEKSPRDRCSPPPPPREASLAVCGLLQELSSIRQFLEKRDEIREVARDWLRVGSVLDKLLFHIYLLAVLAYSIXLVMLWSIWQYA

SEQ ID NO: 12750 - protein, 516 aa, Homo sapiens
  MOD_RES (22)..(22): Selenocysteine
  MOD_RES (35)..(36): Selenocysteine
  MOD_RES (49)..(49): Selenocysteine
  MOD_RES (65)..(66): Selenocysteine
  MOD_RES (87)..(88): Selenocysteine
  MOD_RES (97)..(97): Selenocysteine
  MOD_RES (112)..(112): Selenocysteine
  MOD_RES (118)..(118): Selenocysteine
  MOD_RES (161)..(161): Selenocysteine
  MOD_RES (180)..(180): Selenocysteine
  MOD_RES (182)..(182): Selenocysteine
  MOD_RES (187)..(187): Selenocysteine
  MOD_RES (285)..(285): Selenocysteine
  MOD_RES (300)..(300): Selenocysteine
  MOD_RES (304)..(304): Selenocysteine
  MOD_RES (308)..(308): Selenocysteine
  MOD_RES (343)..(343): Selenocysteine
  MOD_RES (361)..(361): Selenocysteine
  MOD_RES (400)..(400): Selenocysteine
  MOD_RES (407)..(407): Selenocysteine
  MOD_RES (411)..(411): Selenocysteine
  MOD_RES (413)..(413): Selenocysteine
  MOD_RES (505)..(505): Selenocysteine
MLGKLAMLLWVQQALLALLLPXLLAQGEARRSRNXXRPALLRLSDYLLXNYRKGVRPVRDWRKPXXVSIDVIVYAILNVDEKNQVLXXYIWYRQYWXDEFLQWNPEDFDNIXKLSIPXDSIWVPDILINEFVDVGKSPNIPYVYIRHQGEVQNYKPLQVVXACSLDIYNFPFDVQNCSLXFXSWLHXIQDINISLWRLPEKVKSDRSVFMNQGEWELLGVLPYFREFSMESSNYYAEMKFYVVIRRRPLFYVVSLLLPSIFLMVMDIVGFYLPPNSGERVSFKIXLLLGYSVFLIIVSDXLPAXAIGXPLIGKAPPGSRAQSGEKPAPSHLLHVSLASALGCXGVYFVVCMALLVISLAEXIFIVRLVHKQDLQQPVPAWLRHLVLERIAWLLCLREQSXSQRPPAXSQAXKXDDCSAMGNHCSHMGGPQDFEKSPRDRCSPPPPPREASLAVCGLLQELSSIRQFLEKRDEIREVARDWLRVGSVLDKLLFHIYLLAVLAYSIXLVMLWSIWQYA

SEQ ID NO: 12751 - protein, 478 aa, Homo sapiens
  MOD_RES (16)..(16): Selenocysteine
  MOD_RES (29)..(30): Selenocysteine
  MOD_RES (43)..(43): Selenocysteine
  MOD_RES (59)..(60): Selenocysteine
  MOD_RES (81)..(82): Selenocysteine
  MOD_RES (91)..(91): Selenocysteine
  MOD_RES (106)..(106): Selenocysteine
  MOD_RES (112)..(112): Selenocysteine
  MOD_RES (155)..(155): Selenocysteine
  MOD_RES (174)..(174): Selenocysteine
  MOD_RES (176)..(176): Selenocysteine
  MOD_RES (181)..(181): Selenocysteine
  MOD_RES (279)..(279): Selenocysteine
  MOD_RES (294)..(294): Selenocysteine
  MOD_RES (298)..(298): Selenocysteine
  MOD_RES (302)..(302): Selenocysteine
  MOD_RES (323)..(323): Selenocysteine
  MOD_RES (362)..(362): Selenocysteine
  MOD_RES (369)..(369): Selenocysteine
  MOD_RES (373)..(373): Selenocysteine
  MOD_RES (375)..(375): Selenocysteine
  MOD_RES (467)..(467): Selenocysteine
MLLWVQQALLALLLPXLLAQGEARRSRNXXRPALLRLSDYLLXNYRKGVRPVRDWRKPXXVSIDVIVYAILNVDEKNQVLXXYIWYRQYWXDEFLQWNPEDFDNIXKLSIPXDSIWVPDILINEFVDVGKSPNIPYVYIRHQGEVQNYKPLQVVXACSLDIYNFPFDVQNCSLXFXSWLHXIQDINISLWRLPEKVKSDRSVFMNQGEWELLGVLPYFREFSMESSNYYAEMKFYVVIRRRPLFYVVSLLLPSIFLMVMDIVGFYLPPNSGERVSFKIXLLLGYSVFLIIVSDXLPAXAIGXPLIGVYFVVCMALLVISLAEXIFIVRLVHKQDLQQPVPAWLRHLVLERIAWLLCLREQSXSQRPPAXSQAXKXDDCSAMGNHCSHMGGPQDFEKSPRDRCSPPPPPREASLAVCGLLQELSSIRQFLEKRDEIREVARDWLRVGSVLDKLLFHIYLLAVLAYSIXLVMLWSIWQYA

SEQ ID NO: 12752 - protein, 510 aa, Homo sapiens
  MOD_RES (16)..(16): Selenocysteine
  MOD_RES (29)..(30): Selenocysteine
  MOD_RES (43)..(43): Selenocysteine
  MOD_RES (59)..(60): Selenocysteine
  MOD_RES (81)..(82): Selenocysteine
  MOD_RES (91)..(91): Selenocysteine
  MOD_RES (106)..(106): Selenocysteine
  MOD_RES (112)..(112): Selenocysteine
  MOD_RES (155)..(155): Selenocysteine
  MOD_RES (174)..(174): Selenocysteine
  MOD_RES (176)..(176): Selenocysteine
  MOD_RES (181)..(181): Selenocysteine
  MOD_RES (279)..(279): Selenocysteine
  MOD_RES (294)..(294): Selenocysteine
  MOD_RES (298)..(298): Selenocysteine
  MOD_RES (302)..(302): Selenocysteine
  MOD_RES (337)..(337): Selenocysteine
  MOD_RES (355)..(355): Selenocysteine
  MOD_RES (394)..(394): Selenocysteine
  MOD_RES (401)..(401): Selenocysteine
  MOD_RES (405)..(405): Selenocysteine
  MOD_RES (407)..(407): Selenocysteine
  MOD_RES (499)..(499): Selenocysteine
MLLWVQQALLALLLPXLLAQGEARRSRNXXRPALLRLSDYLLXNYRKGVRPVRDWRKPXXVSIDVIVYAILNVDEKNQVLXXYIWYRQYWXDEFLQWNPEDFDNIXKLSIPXDSIWVPDILINEFVDVGKSPNIPYVYIRHQGEVQNYKPLQVVXACSLDIYNFPFDVQNCSLXFXSWLHXIQDINISLWRLPEKVKSDRSVFMNQGEWELLGVLPYFREFSMESSNYYAEMKFYVVIRRRPLFYVVSLLLPSIFLMVMDIVGFYLPPNSGERVSFKIXLLLGYSVFLIIVSDXLPAXAIGXPLIGKAPPGSRAQSGEKPAPSHLLHVSLASALGCXGVYFVVCMALLVISLAEXIFIVRLVHKQDLQQPVPAWLRHLVLERIAWLLCLREQSXSQRPPAXSQAXKXDDCSAMGNHCSHMGGPQDFEKSPRDRCSPPPPPREASLAVCGLLQELSSIRQFLEKRDEIREVARDWLRVGSVLDKLLFHIYLLAVLAYSIXLVMLWSIWQYA

SEQ ID NO: 12753 - protein, 238 aa, Homo sapiens
  MOD_RES (16)..(16): Selenocysteine
  MOD_RES (29)..(30): Selenocysteine
  MOD_RES (43)..(43): Selenocysteine
  MOD_RES (59)..(60): Selenocysteine
  MOD_RES (81)..(82): Selenocysteine
  MOD_RES (91)..(91): Selenocysteine
  MOD_RES (106)..(106): Selenocysteine
  MOD_RES (112)..(112): Selenocysteine
  MOD_RES (155)..(155): Selenocysteine
  MOD_RES (174)..(174): Selenocysteine
  MOD_RES (176)..(176): Selenocysteine
  MOD_RES (181)..(181): Selenocysteine
  MOD_RES (197)..(197): Selenocysteine
  MOD_RES (226)..(226): Selenocysteine
MLLWVQQALLALLLPXLLAQGEARRSRNXXRPALLRLSDYLLXNYRKGVRPVRDWRKPXXVSIDVIVYAILNVDEKNQVLXXYIWYRQYWXDEFLQWNPEDFDNIXKLSIPXDSIWVPDILINEFVDVGKSPNIPYVYIRHQGEVQNYKPLQVVXACSLDIYNFPFDVQNCSLXFXSWLHXSGHPPAAPLLCGQPAXAQHLPHGHGHRGLLPAPQQWREGLFQDYXPPGLLGLPDHRF

SEQ ID NO: 12754 - protein, 447 aa, Homo sapiens
  MOD_RES (16)..(16): Selenocysteine
  MOD_RES (29)..(29): Selenocysteine
  MOD_RES (58)..(58): Selenocysteine
  MOD_RES (64)..(64): Selenocysteine
  MOD_RES (71)..(71): Selenocysteine
  MOD_RES (86)..(86): Selenocysteine
  MOD_RES (114)..(114): Selenocysteine
  MOD_RES (136)..(136): Selenocysteine
  MOD_RES (141)..(141): Selenocysteine
  MOD_RES (159)..(159): Selenocysteine
  MOD_RES (177)..(177): Selenocysteine
  MOD_RES (179)..(179): Selenocysteine
  MOD_RES (186)..(186): Selenocysteine
  MOD_RES (202)..(202): Selenocysteine
  MOD_RES (204)..(204): Selenocysteine
  MOD_RES (211)..(211): Selenocysteine
  MOD_RES (224)..(224): Selenocysteine
  MOD_RES (284)..(284): Selenocysteine
  MOD_RES (305)..(305): Selenocysteine
  MOD_RES (326)..(326): Selenocysteine
  MOD_RES (330)..(330): Selenocysteine
  MOD_RES (337)..(338): Selenocysteine
  MOD_RES (355)..(355): Selenocysteine
  MOD_RES (363)..(363): Selenocysteine
  MOD_RES (375)..(375): Selenocysteine
  MOD_RES (377)..(377): Selenocysteine
  MOD_RES (398)..(398): Selenocysteine
  MOD_RES (407)..(407): Selenocysteine
  MOD_RES (409)..(409): Selenocysteine
  MOD_RES (424)..(424): Selenocysteine
  MOD_RES (440)..(440): Selenocysteine
  MOD_RES (447)..(447): Selenocysteine
MEGGWPARQSALLCLXVSLLLQGRGDAFXINCSGFDQHGVDPAVFQAVFDRKAFRPFXNYSIPXRVNISFXLSAILGVDAQLQLLXSFLWMDLVWDNPFINWNPKECVGINKLXVLAENLWLPDIFIVESMDVDQXPSGLXAYISSEGRIKYDKPMRVXSICNLDIFYFPFDQQNCXFXFSSFLYXVDSMLLGMDKEVWEIXDXSRKVIQXQGEWELLGINKAXPKMSMGNNLYDQIMFYVAIRRRPSLYIINLLVPSSFLVAIDALSFYLPAESENRAPFKIXLLLGYNVFLLMMNDLLPASGXPLISVYFALCLSLMVVSLLEXVFIXYLLHVAXXQPPPMPRWLHSLLLHCXSPGRCCPXAPQKGNKGLGLXLXHLPGPKEPGELAGKKLGPREXEPDGGSGWXKXQLMELWVQFSHAMDXLLFRLYLLFMASSILXVIVLWNX

SEQ ID NO: 12755 - protein, 279 aa, Homo sapiens
  MOD_RES (10)..(10): Selenocysteine
  MOD_RES (13)..(13): Selenocysteine
  MOD_RES (26)..(26): Selenocysteine
  MOD_RES (46)..(46): Selenocysteine
  MOD_RES (93)..(93): Selenocysteine
  MOD_RES (112)..(112): Selenocysteine
  MOD_RES (114)..(114): Selenocysteine
  MOD_RES (149)..(149): Selenocysteine
  MOD_RES (153)..(153): Selenocysteine
  MOD_RES (160)..(161): Selenocysteine
  MOD_RES (178)..(178): Selenocysteine
  MOD_RES (186)..(186): Selenocysteine
  MOD_RES (198)..(198): Selenocysteine
  MOD_RES (200)..(200): Selenocysteine
  MOD_RES (224)..(224): Selenocysteine
  MOD_RES (230)..(230): Selenocysteine
  MOD_RES (272)..(272): Selenocysteine
  MOD_RES (279)..(279): Selenocysteine
MASMSIVKAXSNXISQCGWSASANWXPSISPSMDRGERSPSALSPXQVAIRRRCRPSPYVVNFLVPSGILIAIDALSFYLPLESGNCAPFKMXVLLGYSVFLLMMNDLLPAXSXSSHASLVRPHPSRDQKRGVYFALCLSLMVGSLLEXIFIXHLLHVAXXQPLPLPRWLHSLLLHCXGQGRCCPXAPQKGNKGPGLXPXHLPGVKEPEVSAGQMPGPGEAELXGGSEWXRAQREHEAQKQHSVELWVQFSHAMDALLFRLYLLFMASSIIXVICLWNX

SEQ ID NO: 12756 - protein, 404 aa, Homo sapiens
  MOD_RES (30)..(30): Selenocysteine
  MOD_RES (53)..(53): Selenocysteine
  MOD_RES (70)..(70): Selenocysteine
  MOD_RES (84)..(84): Selenocysteine
  MOD_RES (87)..(87): Selenocysteine
  MOD_RES (100)..(100): Selenocysteine
  MOD_RES (120)..(120): Selenocysteine
  MOD_RES (123)..(123): Selenocysteine
  MOD_RES (139)..(139): Selenocysteine
  MOD_RES (143)..(143): Selenocysteine
  MOD_RES (156)..(156): Selenocysteine
  MOD_RES (160)..(160): Selenocysteine
  MOD_RES (163)..(163): Selenocysteine
  MOD_RES (218)..(218): Selenocysteine
  MOD_RES (237)..(237): Selenocysteine
  MOD_RES (239)..(239): Selenocysteine
  MOD_RES (274)..(274): Selenocysteine
  MOD_RES (278)..(278): Selenocysteine
  MOD_RES (285)..(286): Selenocysteine
  MOD_RES (303)..(303): Selenocysteine
  MOD_RES (311)..(311): Selenocysteine
  MOD_RES (323)..(323): Selenocysteine
  MOD_RES (325)..(325): Selenocysteine
  MOD_RES (349)..(349): Selenocysteine
  MOD_RES (355)..(355): Selenocysteine
  MOD_RES (397)..(397): Selenocysteine
  MOD_RES (404)..(404): Selenocysteine
MERGWFHGKGFLLGFILHLLLQDSHLQLVXSFLWLNMWNPDECGGIKKSGMAXENLWLSDVFIEESVDQXPAGLMASMSIVKAXSNXISQCGWSASANWXPSISPSMDRGERSPSALSPXQVXRAWRRMSRSFQIHHRXSFRXRREWVLLGIQKRXIKVXVAXNQYEQAIFHVAIRRRCRPSPYVVNFLVPSGILIAIDALSFYLPLESGNCAPFKMXVLLGYSVFLLMMNDLLPAXSXSSHASLVRPHPSRDQKRGVYFALCLSLMVGSLLEXIFIXHLLHVAXXQPLPLPRWLHSLLLHCXGQGRCCPXAPQKGNKGPGLXPXHLPGVKEPEVSAGQMPGPGEAELXGGSEWXRAQREHEAQKQHSVELWVQFSHAMDALLFRLYLLFMASSIIXVICLWNX

SEQ ID NO: 12757 - protein, 454 aa, Homo sapiens
  MOD_RES (20)..(21): Selenocysteine
  MOD_RES (26)..(26): Selenocysteine
  MOD_RES (57)..(57): Selenocysteine
  MOD_RES (63)..(63): Selenocysteine
  MOD_RES (70)..(70): Selenocysteine
  MOD_RES (83)..(83): Selenocysteine
  MOD_RES (114)..(114): Selenocysteine
  MOD_RES (131)..(131): Selenocysteine
  MOD_RES (145)..(145): Selenocysteine
  MOD_RES (148)..(148): Selenocysteine
  MOD_RES (161)..(161): Selenocysteine
  MOD_RES (187)..(187): Selenocysteine
  MOD_RES (191)..(191): Selenocysteine
  MOD_RES (204)..(204): Selenocysteine
  MOD_RES (208)..(208): Selenocysteine
  MOD_RES (211)..(211): Selenocysteine
  MOD_RES (266)..(266): Selenocysteine
  MOD_RES (285)..(285): Selenocysteine
  MOD_RES (287)..(287): Selenocysteine
  MOD_RES (302)..(302): Selenocysteine
  MOD_RES (324)..(324): Selenocysteine
  MOD_RES (328)..(328): Selenocysteine
  MOD_RES (335)..(336): Selenocysteine
  MOD_RES (353)..(353): Selenocysteine
  MOD_RES (361)..(361): Selenocysteine
  MOD_RES (373)..(373): Selenocysteine
  MOD_RES (375)..(375): Selenocysteine
  MOD_RES (399)..(399): Selenocysteine
  MOD_RES (405)..(405): Selenocysteine
  MOD_RES (447)..(447): Selenocysteine
  MOD_RES (454)..(454): Selenocysteine
MQKHSPGPPALALLSQSLLXXGNGDXLIINCPGFGQHRVDPAAFQAVFDRKAIGPVXNYSVAXHVNISFXLSAIWNCYSRIHXFNCHHARPWHNQFVQWNPDECGGIKKSGMAXENLWLSDVFIEESVDQXPAGLMASMSIVKAXSNXISQCGWSASANWXPSISPSMDRARAWRRMSRSFQIHHRXSFRXRREWVLLGIQKRXIKVXVAXNQYEQAIFHVAIRRRCRPSPYVVNFLVPSGILIAIDALSFYLPLESGNCAPFKMXVLLGYSVFLLMMNDLLPAXSXSSHASLVAPLALMQXPLPAGVYFALCLSLMVGSLLEXIFIXHLLHVAXXQPLPLPRWLHSLLLHCXGQGRCCPXAPQKGNKGPGLXPXHLPGVKEPEVSAGQMPGPGEAELXGGSEWXRAQREHEAQKQHSVELWVQFSHAMDALLFRLYLLFMASSIIXVICLWNX

SEQ ID NO: 12758 - protein, 233 aa, Homo sapiens
  MOD_RES (47)..(47): Selenocysteine
  MOD_RES (66)..(66): Selenocysteine
  MOD_RES (68)..(68): Selenocysteine
  MOD_RES (103)..(103): Selenocysteine
  MOD_RES (107)..(107): Selenocysteine
  MOD_RES (114)..(115): Selenocysteine
  MOD_RES (132)..(132): Selenocysteine
  MOD_RES (140)..(140): Selenocysteine
  MOD_RES (152)..(152): Selenocysteine
  MOD_RES (154)..(154): Selenocysteine
  MOD_RES (178)..(178): Selenocysteine
  MOD_RES (184)..(184): Selenocysteine
  MOD_RES (226)..(226): Selenocysteine
  MOD_RES (233)..(233): Selenocysteine
MVAIRRRCRPSPYVVNFLVPSGILIAIDALSFYLPLESGNCAPFKMXVLLGYSVFLLMMNDLLPAXSXSSHASLVRPHPSRDQKRGVYFALCLSLMVGSLLEXIFIXHLLHVAXXQPLPLPRWLHSLLLHCXGQGRCCPXAPQKGNKGPGLXPXHLPGVKEPEVSAGQMPGPGEAELXGGSEWXRAQREHEAQKQHSVELWVQFSHAMDALLFRLYLLFMASSIIXVICLWNX

SEQ ID NO: 12759 - protein, 456 aa, Homo sapiens
  MOD_RES (27)..(27): Selenocysteine
  MOD_RES (29)..(29): Selenocysteine
  MOD_RES (43)..(43): Selenocysteine
  MOD_RES (58)..(58): Selenocysteine
  MOD_RES (64)..(64): Selenocysteine
  MOD_RES (111)..(111): Selenocysteine
  MOD_RES (136)..(136): Selenocysteine
  MOD_RES (141)..(141): Selenocysteine
  MOD_RES (177)..(177): Selenocysteine
  MOD_RES (179)..(179): Selenocysteine
  MOD_RES (186)..(186): Selenocysteine
  MOD_RES (202)..(202): Selenocysteine
  MOD_RES (211)..(211): Selenocysteine
  MOD_RES (224)..(224): Selenocysteine
  MOD_RES (284)..(284): Selenocysteine
  MOD_RES (302)..(302): Selenocysteine
  MOD_RES (305)..(305): Selenocysteine
  MOD_RES (326)..(326): Selenocysteine
  MOD_RES (330)..(330): Selenocysteine
  MOD_RES (337)..(338): Selenocysteine
  MOD_RES (363)..(363): Selenocysteine
  MOD_RES (375)..(375): Selenocysteine
  MOD_RES (377)..(377): Selenocysteine
  MOD_RES (401)..(401): Selenocysteine
  MOD_RES (407)..(407): Selenocysteine
  MOD_RES (449)..(449): Selenocysteine
  MOD_RES (456)..(456): Selenocysteine
MEGSWFHRKRFSFYLLLGFLLQGRGVXFXINCSGFGQHGADPXALNSVFNRKPFRPVXNISVPXQVNISFAMSAILDVNEQLHLLSSFLWLEMVWDNPFISWNPEECEGIXKMSMAAKNLWLPDIFIIELMDVDKXPKGLXAYVSNEGRIRYKKPMKVDSICNLDIFYFPFDQQNCXLXFSSFLYXVDSMLLDMEKEVWEIXDASRNILQXHGEWELLGLSKAXAKLSRGGNLYDQIVFYVAIRRRPSLYVINLLVPSGFLVAIDALSFYLPVKSGNRVPFKIXLLLGYNVFLLMMSDLLPXSGXPLIGVYFALCLSLMVGSLLEXIFIXHLLHVAXXQPPPLPRWLHSLLLHCNSPGRCCPXAPQKENKGPGLXPXHLPGVKEPEVSAGQMPGPAEAELXGGSEWXRAQREHEAQKQHSVELWLQFSHAMDAMLFRLYLLFMASSIIXVICLWNX

SEQ ID NO: 12760 - protein, 441 aa, Homo sapiens
  MOD_RES (27)..(27): Selenocysteine
  MOD_RES (29)..(29): Selenocysteine
  MOD_RES (43)..(43): Selenocysteine
  MOD_RES (58)..(58): Selenocysteine
  MOD_RES (64)..(64): Selenocysteine
  MOD_RES (96)..(96): Selenocysteine
  MOD_RES (121)..(121): Selenocysteine
  MOD_RES (126)..(126): Selenocysteine
  MOD_RES (162)..(162): Selenocysteine
  MOD_RES (164)..(164): Selenocysteine
  MOD_RES (171)..(171): Selenocysteine
  MOD_RES (187)..(187): Selenocysteine
  MOD_RES (196)..(196): Selenocysteine
  MOD_RES (209)..(209): Selenocysteine
  MOD_RES (269)..(269): Selenocysteine
  MOD_RES (287)..(287): Selenocysteine
  MOD_RES (290)..(290): Selenocysteine
  MOD_RES (311)..(311): Selenocysteine
  MOD_RES (315)..(315): Selenocysteine
  MOD_RES (322)..(323): Selenocysteine
  MOD_RES (348)..(348): Selenocysteine
  MOD_RES (360)..(360): Selenocysteine
  MOD_RES (362)..(362): Selenocysteine
  MOD_RES (386)..(386): Selenocysteine
  MOD_RES (392)..(392): Selenocysteine
  MOD_RES (434)..(434): Selenocysteine
  MOD_RES (441)..(441): Selenocysteine
MEGSWFHRKRFSFYLLLGFLLQGRGVXFXINCSGFGQHGADPXALNSVFNRKPFRPVXNISVPXQVNISFAMSAILDVVWDNPFISWNPEECEGIXKMSMAAKNLWLPDIFIIELMDVDKXPKGLXAYVSNEGRIRYKKPMKVDSICNLDIFYFPFDQQNCXLXFSSFLYXVDSMLLDMEKEVWEIXDASRNILQXHGEWELLGLSKAXAKLSRGGNLYDQIVFYVAIRRRPSLYVINLLVPSGFLVAIDALSFYLPVKSGNRVPFKIXLLLGYNVFLLMMSDLLPXSGXPLIGVYFALCLSLMVGSLLEXIFIXHLLHVAXXQPPPLPRWLHSLLLHCNSPGRCCPXAPQKENKGPGLXPXHLPGVKEPEVSAGQMPGPAEAELXGGSEWXRAQREHEAQKQHSVELWLQFSHAMDAMLFRLYLLFMASSIIXVICLWNX

SEQ ID NO: 12761 - protein, 471 aa, Homo sapiens
  MOD_RES (10)..(10): Selenocysteine
  MOD_RES (31)..(31): Selenocysteine
  MOD_RES (36)..(37): Selenocysteine
  MOD_RES (42)..(42): Selenocysteine
  MOD_RES (44)..(44): Selenocysteine
  MOD_RES (58)..(58): Selenocysteine
  MOD_RES (73)..(73): Selenocysteine
  MOD_RES (79)..(79): Selenocysteine
  MOD_RES (126)..(126): Selenocysteine
  MOD_RES (151)..(151): Selenocysteine
  MOD_RES (156)..(156): Selenocysteine
  MOD_RES (192)..(192): Selenocysteine
  MOD_RES (194)..(194): Selenocysteine
  MOD_RES (201)..(201): Selenocysteine
  MOD_RES (217)..(217): Selenocysteine
  MOD_RES (226)..(226): Selenocysteine
  MOD_RES (239)..(239): Selenocysteine
  MOD_RES (299)..(299): Selenocysteine
  MOD_RES (317)..(317): Selenocysteine
  MOD_RES (320)..(320): Selenocysteine
  MOD_RES (341)..(341): Selenocysteine
  MOD_RES (345)..(345): Selenocysteine
  MOD_RES (352)..(353): Selenocysteine
  MOD_RES (378)..(378): Selenocysteine
  MOD_RES (390)..(390): Selenocysteine
  MOD_RES (392)..(392): Selenocysteine
  MOD_RES (416)..(416): Selenocysteine
  MOD_RES (422)..(422): Selenocysteine
  MOD_RES (464)..(464): Selenocysteine
  MOD_RES (471)..(471): Selenocysteine
MLAFILSRAXPRPALGPLSYREHRVALLHLXHSMSXXGRGVXFXINCSGFGQHGADPXALNSVFNRKPFRPVXNISVPXQVNISFAMSAILDVNEQLHLLSSFLWLEMVWDNPFISWNPEECEGIXKMSMAAKNLWLPDIFIIELMDVDKXPKGLXAYVSNEGRIRYKKPMKVDSICNLDIFYFPFDQQNCXLXFSSFLYXVDSMLLDMEKEVWEIXDASRNILQXHGEWELLGLSKAXAKLSRGGNLYDQIVFYVAIRRRPSLYVINLLVPSGFLVAIDALSFYLPVKSGNRVPFKIXLLLGYNVFLLMMSDLLPXSGXPLIGVYFALCLSLMVGSLLEXIFIXHLLHVAXXQPPPLPRWLHSLLLHCNSPGRCCPXAPQKENKGPGLXPXHLPGVKEPEVSAGQMPGPAEAELXGGSEWXRAQREHEAQKQHSVELWLQFSHAMDAMLFRLYLLFMASSIIXVICLWNX

SEQ ID NO: 12762 - protein, 482 aa, Homo sapiens
  MOD_RES (10)..(10): Selenocysteine
  MOD_RES (31)..(31): Selenocysteine
  MOD_RES (36)..(37): Selenocysteine
  MOD_RES (42)..(42): Selenocysteine
  MOD_RES (44)..(44): Selenocysteine
  MOD_RES (58)..(58): Selenocysteine
  MOD_RES (73)..(73): Selenocysteine
  MOD_RES (79)..(79): Selenocysteine
  MOD_RES (111)..(111): Selenocysteine
  MOD_RES (162)..(162): Selenocysteine
  MOD_RES (167)..(167): Selenocysteine
  MOD_RES (203)..(203): Selenocysteine
  MOD_RES (205)..(205): Selenocysteine
  MOD_RES (212)..(212): Selenocysteine
  MOD_RES (228)..(228): Selenocysteine
  MOD_RES (237)..(237): Selenocysteine
  MOD_RES (250)..(250): Selenocysteine
  MOD_RES (310)..(310): Selenocysteine
  MOD_RES (328)..(328): Selenocysteine
  MOD_RES (331)..(331): Selenocysteine
  MOD_RES (352)..(352): Selenocysteine
  MOD_RES (356)..(356): Selenocysteine
  MOD_RES (363)..(364): Selenocysteine
  MOD_RES (389)..(389): Selenocysteine
  MOD_RES (401)..(401): Selenocysteine
  MOD_RES (403)..(403): Selenocysteine
  MOD_RES (427)..(427): Selenocysteine
  MOD_RES (433)..(433): Selenocysteine
  MOD_RES (475)..(475): Selenocysteine
  MOD_RES (482)..(482): Selenocysteine
MLAFILSRAXPRPALGPLSYREHRVALLHLXHSMSXXGRGVXFXINCSGFGQHGADPXALNSVFNRKPFRPVXNISVPXQVNISFAMSAILDVVWDNPFISWNPEECEGIXKMSMAAKNLWLPDIFIIELCVSRAGQREVPSPGSHRDHSLPLGPLMDVDKXPKGLXAYVSNEGRIRYKKPMKVDSICNLDIFYFPFDQQNCXLXFSSFLYXVDSMLLDMEKEVWEIXDASRNILQXHGEWELLGLSKAXAKLSRGGNLYDQIVFYVAIRRRPSLYVINLLVPSGFLVAIDALSFYLPVKSGNRVPFKIXLLLGYNVFLLMMSDLLPXSGXPLIGVYFALCLSLMVGSLLEXIFIXHLLHVAXXQPPPLPRWLHSLLLHCNSPGRCCPXAPQKENKGPGLXPXHLPGVKEPEVSAGQMPGPAEAELXGGSEWXRAQREHEAQKQHSVELWLQFSHAMDAMLFRLYLLFMASSIIXVICLWNX

SEQ ID NO: 12763 - protein, 456 aa, Homo sapiens
  MOD_RES (10)..(10): Selenocysteine
  MOD_RES (31)..(31): Selenocysteine
  MOD_RES (36)..(37): Selenocysteine
  MOD_RES (42)..(42): Selenocysteine
  MOD_RES (44)..(44): Selenocysteine
  MOD_RES (58)..(58): Selenocysteine
  MOD_RES (73)..(73): Selenocysteine
  MOD_RES (79)..(79): Selenocysteine
  MOD_RES (111)..(111): Selenocysteine
  MOD_RES (136)..(136): Selenocysteine
  MOD_RES (141)..(141): Selenocysteine
  MOD_RES (177)..(177): Selenocysteine
  MOD_RES (179)..(179): Selenocysteine
  MOD_RES (186)..(186): Selenocysteine
  MOD_RES (202)..(202): Selenocysteine
  MOD_RES (211)..(211): Selenocysteine
  MOD_RES (224)..(224): Selenocysteine
  MOD_RES (284)..(284): Selenocysteine
  MOD_RES (302)..(302): Selenocysteine
  MOD_RES (305)..(305): Selenocysteine
  MOD_RES (326)..(326): Selenocysteine
  MOD_RES (330)..(330): Selenocysteine
  MOD_RES (337)..(338): Selenocysteine
  MOD_RES (363)..(363): Selenocysteine
  MOD_RES (375)..(375): Selenocysteine
  MOD_RES (377)..(377): Selenocysteine
  MOD_RES (401)..(401): Selenocysteine
  MOD_RES (407)..(407): Selenocysteine
  MOD_RES (449)..(449): Selenocysteine
  MOD_RES (456)..(456): Selenocysteine
MLAFILSRAXPRPALGPLSYREHRVALLHLXHSMSXXGRGVXFXINCSGFGQHGADPXALNSVFNRKPFRPVXNISVPXQVNISFAMSAILDVVWDNPFISWNPEECEGIXKMSMAAKNLWLPDIFIIELMDVDKXPKGLXAYVSNEGRIRYKKPMKVDSICNLDIFYFPFDQQNCXLXFSSFLYXVDSMLLDMEKEVWEIXDASRNILQXHGEWELLGLSKAXAKLSRGGNLYDQIVFYVAIRRRPSLYVINLLVPSGFLVAIDALSFYLPVKSGNRVPFKIXLLLGYNVFLLMMSDLLPXSGXPLIGVYFALCLSLMVGSLLEXIFIXHLLHVAXXQPPPLPRWLHSLLLHCNSPGRCCPXAPQKENKGPGLXPXHLPGVKEPEVSAGQMPGPAEAELXGGSEWXRAQREHEAQKQHSVELWLQFSHAMDAMLFRLYLLFMASSIIXVICLWNX

SEQ ID NO: 12764 - protein, 158 aa, Homo sapiens
  MOD_RES (40)..(40): Selenocysteine
  MOD_RES (65)..(65): Selenocysteine
  MOD_RES (70)..(70): Selenocysteine
  MOD_RES (106)..(106): Selenocysteine
  MOD_RES (108)..(108): Selenocysteine
  MOD_RES (115)..(115): Selenocysteine
  MOD_RES (131)..(131): Selenocysteine
  MOD_RES (140)..(140): Selenocysteine
  MOD_RES (153)..(153): Selenocysteine
MSAILDVNEQLHLLSSFLWLEMVWDNPFISWNPEECEGIXKMSMAAKNLWLPDIFIIELMDVDKXPKGLXAYVSNEGRIRYKKPMKVDSICNLDIFYFPFDQQNCXLXFSSFLYXVDSMLLDMEKEVWEIXDASRNILQXHGEWELLGLSKAXAKLSR

SEQ ID NO: 12765 - protein, 87 aa, Homo sapiens
  MOD_RES (30)..(30): Selenocysteine
  MOD_RES (82)..(82): Selenocysteine
MCHLVRLSHASPFSLLHFPGFIPRRRMEEXRAKLVCLQSSCRAWRDLSSMIIQGELDQVLLRPAAWMLYIQKDPVGIEIQLXHAYFL

SEQ ID NO: 12766 - protein, 360 aa, Homo sapiens
  MOD_RES (24)..(24): Selenocysteine
  MOD_RES (28)..(28): Selenocysteine
  MOD_RES (55)..(55): Selenocysteine
  MOD_RES (97)..(97): Selenocysteine
  MOD_RES (104)..(105): Selenocysteine
  MOD_RES (134)..(134): Selenocysteine
  MOD_RES (150)..(150): Selenocysteine
  MOD_RES (182)..(182): Selenocysteine
  MOD_RES (195)..(195): Selenocysteine
  MOD_RES (218)..(218): Selenocysteine
  MOD_RES (248)..(248): Selenocysteine
  MOD_RES (253)..(253): Selenocysteine
  MOD_RES (255)..(255): Selenocysteine
  MOD_RES (260)..(260): Selenocysteine
  MOD_RES (278)..(278): Selenocysteine
  MOD_RES (288)..(288): Selenocysteine
  MOD_RES (295)..(295): Selenocysteine
  MOD_RES (343)..(343): Selenocysteine
  MOD_RES (348)..(350): Selenocysteine
  MOD_RES (355)..(355): Selenocysteine
MDKLDANVSSEEGFGSVEKVVLLXFLSXVILMAILGNLLVMVAVCWDRQLRKIKXNYFIVSLAFADLLVSVLVMPFGAIELVQDIWIYGEVFCLVRXSLDVLLXXASIFHLCCISLDRYYAICCQPLVYRNKMXPLRIALMLGGCWVIPXFISFLPIMQGWNNIGIIDLIEKRKFNQNSNSXYCVFMVNKPYAIXCSVVAFYIPFLLMVLAYYRIYVXAKEHAHQIQMLQRAGASSESRPQSADQHSXHRMRXEXKAAKXLCIIMGCFCLCWAPFFVXNIVDPFIDYXVPGQVWXAFLWLGYINSGLNPFLYAFLNKSFRRAFLIILCCDDERYRRPSILGQXVPCSXXXINGSXHVLRF

SEQ ID NO: 12767 - protein, 371 aa, Homo sapiens
  MOD_RES (24)..(24): Selenocysteine
  MOD_RES (28)..(28): Selenocysteine
  MOD_RES (55)..(55): Selenocysteine
  MOD_RES (97)..(97): Selenocysteine
  MOD_RES (104)..(105): Selenocysteine
  MOD_RES (134)..(134): Selenocysteine
  MOD_RES (150)..(150): Selenocysteine
  MOD_RES (182)..(182): Selenocysteine
  MOD_RES (195)..(195): Selenocysteine
  MOD_RES (218)..(218): Selenocysteine
  MOD_RES (248)..(248): Selenocysteine
  MOD_RES (253)..(253): Selenocysteine
  MOD_RES (255)..(255): Selenocysteine
  MOD_RES (260)..(260): Selenocysteine
  MOD_RES (278)..(278): Selenocysteine
  MOD_RES (288)..(288): Selenocysteine
  MOD_RES (295)..(295): Selenocysteine
  MOD_RES (343)..(343): Selenocysteine
  MOD_RES (348)..(350): Selenocysteine
  MOD_RES (355)..(355): Selenocysteine
  MOD_RES (368)..(368): Selenocysteine
MDKLDANVSSEEGFGSVEKVVLLXFLSXVILMAILGNLLVMVAVCWDRQLRKIKXNYFIVSLAFADLLVSVLVMPFGAIELVQDIWIYGEVFCLVRXSLDVLLXXASIFHLCCISLDRYYAICCQPLVYRNKMXPLRIALMLGGCWVIPXFISFLPIMQGWNNIGIIDLIEKRKFNQNSNSXYCVFMVNKPYAIXCSVVAFYIPFLLMVLAYYRIYVXAKEHAHQIQMLQRAGASSESRPQSADQHSXHRMRXEXKAAKXLCIIMGCFCLCWAPFFVXNIVDPFIDYXVPGQVWXAFLWLGYINSGLNPFLYAFLNKSFRRAFLIILCCDDERYRRPSILGQXVPCSXXXINGSXHVLRAVRGNRNSXSSA

SEQ ID NO: 12768 - protein, 378 aa, Homo sapiens
  MOD_RES (24)..(24): Selenocysteine
  MOD_RES (28)..(28): Selenocysteine
  MOD_RES (55)..(55): Selenocysteine
  MOD_RES (97)..(97): Selenocysteine
  MOD_RES (104)..(105): Selenocysteine
  MOD_RES (134)..(134): Selenocysteine
  MOD_RES (150)..(150): Selenocysteine
  MOD_RES (182)..(182): Selenocysteine
  MOD_RES (195)..(195): Selenocysteine
  MOD_RES (218)..(218): Selenocysteine
  MOD_RES (248)..(248): Selenocysteine
  MOD_RES (253)..(253): Selenocysteine
  MOD_RES (255)..(255): Selenocysteine
  MOD_RES (260)..(260): Selenocysteine
  MOD_RES (278)..(278): Selenocysteine
  MOD_RES (288)..(288): Selenocysteine
  MOD_RES (295)..(295): Selenocysteine
  MOD_RES (343)..(343): Selenocysteine
  MOD_RES (348)..(350): Selenocysteine
  MOD_RES (355)..(355): Selenocysteine
MDKLDANVSSEEGFGSVEKVVLLXFLSXVILMAILGNLLVMVAVCWDRQLRKIKXNYFIVSLAFADLLVSVLVMPFGAIELVQDIWIYGEVFCLVRXSLDVLLXXASIFHLCCISLDRYYAICCQPLVYRNKMXPLRIALMLGGCWVIPXFISFLPIMQGWNNIGIIDLIEKRKFNQNSNSXYCVFMVNKPYAIXCSVVAFYIPFLLMVLAYYRIYVXAKEHAHQIQMLQRAGASSESRPQSADQHSXHRMRXEXKAAKXLCIIMGCFCLCWAPFFVXNIVDPFIDYXVPGQVWXAFLWLGYINSGLNPFLYAFLNKSFRRAFLIILCCDDERYRRPSILGQXVPCSXXXINGSXHVLSGCSPVSSFLLLFCNRPVPV

SEQ ID NO: 12769 - protein, 387 aa, Homo sapiens
  MOD_RES (24)..(24): Selenocysteine
  MOD_RES (28)..(28): Selenocysteine
  MOD_RES (55)..(55): Selenocysteine
  MOD_RES (97)..(97): Selenocysteine
  MOD_RES (104)..(105): Selenocysteine
  MOD_RES (134)..(134): Selenocysteine
  MOD_RES (150)..(150): Selenocysteine
  MOD_RES (182)..(182): Selenocysteine
  MOD_RES (195)..(195): Selenocysteine
  MOD_RES (218)..(218): Selenocysteine
  MOD_RES (248)..(248): Selenocysteine
  MOD_RES (253)..(253): Selenocysteine
  MOD_RES (255)..(255): Selenocysteine
  MOD_RES (260)..(260): Selenocysteine
  MOD_RES (278)..(278): Selenocysteine
  MOD_RES (288)..(288): Selenocysteine
  MOD_RES (295)..(295): Selenocysteine
  MOD_RES (343)..(343): Selenocysteine
  MOD_RES (348)..(350): Selenocysteine
  MOD_RES (355)..(355): Selenocysteine
  MOD_RES (361)..(361): Selenocysteine
MDKLDANVSSEEGFGSVEKVVLLXFLSXVILMAILGNLLVMVAVCWDRQLRKIKXNYFIVSLAFADLLVSVLVMPFGAIELVQDIWIYGEVFCLVRXSLDVLLXXASIFHLCCISLDRYYAICCQPLVYRNKMXPLRIALMLGGCWVIPXFISFLPIMQGWNNIGIIDLIEKRKFNQNSNSXYCVFMVNKPYAIXCSVVAFYIPFLLMVLAYYRIYVXAKEHAHQIQMLQRAGASSESRPQSADQHSXHRMRXEXKAAKXLCIIMGCFCLCWAPFFVXNIVDPFIDYXVPGQVWXAFLWLGYINSGLNPFLYAFLNKSFRRAFLIILCCDDERYRRPSILGQXVPCSXXXINGSXHVLRYXVLHRGHHQELEKLPIHNDPESLESCF

SEQ ID NO: 12770 - protein, 388 aa, Homo sapiens
  MOD_RES (24)..(24): Selenocysteine
  MOD_RES (28)..(28): Selenocysteine
  MOD_RES (55)..(55): Selenocysteine
  MOD_RES (97)..(97): Selenocysteine
  MOD_RES (104)..(105): Selenocysteine
  MOD_RES (134)..(134): Selenocysteine
  MOD_RES (150)..(150): Selenocysteine
  MOD_RES (182)..(182): Selenocysteine
  MOD_RES (195)..(195): Selenocysteine
  MOD_RES (218)..(218): Selenocysteine
  MOD_RES (248)..(248): Selenocysteine
  MOD_RES (253)..(253): Selenocysteine
  MOD_RES (255)..(255): Selenocysteine
  MOD_RES (260)..(260): Selenocysteine
  MOD_RES (278)..(278): Selenocysteine
  MOD_RES (288)..(288): Selenocysteine
  MOD_RES (295)..(295): Selenocysteine
  MOD_RES (343)..(343): Selenocysteine
  MOD_RES (348)..(350): Selenocysteine
  MOD_RES (355)..(355): Selenocysteine
  MOD_RES (377)..(377): Selenocysteine
  MOD_RES (388)..(388): Selenocysteine
MDKLDANVSSEEGFGSVEKVVLLXFLSXVILMAILGNLLVMVAVCWDRQLRKIKXNYFIVSLAFADLLVSVLVMPFGAIELVQDIWIYGEVFCLVRXSLDVLLXXASIFHLCCISLDRYYAICCQPLVYRNKMXPLRIALMLGGCWVIPXFISFLPIMQGWNNIGIIDLIEKRKFNQNSNSXYCVFMVNKPYAIXCSVVAFYIPFLLMVLAYYRIYVXAKEHAHQIQMLQRAGASSESRPQSADQHSXHRMRXEXKAAKXLCIIMGCFCLCWAPFFVXNIVDPFIDYXVPGQVWXAFLWLGYINSGLNPFLYAFLNKSFRRAFLIILCCDDERYRRPSILGQXVPCSXXXINGSXHVLRDAVECGGQWESQCHPPAXSPLVAAQPSDX

SEQ ID NO: 12771 - protein, 411 aa, Homo sapiens
  MOD_RES (24)..(24): Selenocysteine
  MOD_RES (28)..(28): Selenocysteine
  MOD_RES (55)..(55): Selenocysteine
  MOD_RES (97)..(97): Selenocysteine
  MOD_RES (104)..(105): Selenocysteine
  MOD_RES (134)..(134): Selenocysteine
  MOD_RES (150)..(150): Selenocysteine
  MOD_RES (182)..(182): Selenocysteine
  MOD_RES (195)..(195): Selenocysteine
  MOD_RES (218)..(218): Selenocysteine
  MOD_RES (248)..(248): Selenocysteine
  MOD_RES (253)..(253): Selenocysteine
  MOD_RES (255)..(255): Selenocysteine
  MOD_RES (260)..(260): Selenocysteine
  MOD_RES (278)..(278): Selenocysteine
  MOD_RES (288)..(288): Selenocysteine
  MOD_RES (295)..(295): Selenocysteine
  MOD_RES (343)..(343): Selenocysteine
  MOD_RES (348)..(350): Selenocysteine
  MOD_RES (355)..(355): Selenocysteine
  MOD_RES (362)..(362): Selenocysteine
  MOD_RES (364)..(364): Selenocysteine
  MOD_RES (379)..(379): Selenocysteine
MDKLDANVSSEEGFGSVEKVVLLXFLSXVILMAILGNLLVMVAVCWDRQLRKIKXNYFIVSLAFADLLVSVLVMPFGAIELVQDIWIYGEVFCLVRXSLDVLLXXASIFHLCCISLDRYYAICCQPLVYRNKMXPLRIALMLGGCWVIPXFISFLPIMQGWNNIGIIDLIEKRKFNQNSNSXYCVFMVNKPYAIXCSVVAFYIPFLLMVLAYYRIYVXAKEHAHQIQMLQRAGASSESRPQSADQHSXHRMRXEXKAAKXLCIIMGCFCLCWAPFFVXNIVDPFIDYXVPGQVWXAFLWLGYINSGLNPFLYAFLNKSFRRAFLIILCCDDERYRRPSILGQXVPCSXXXINGSXHVLSSGXEXDRKKLWNKEEKIDQXIQMPKRKRKKKASLSYEDLILLGRKSCFREGK

SEQ ID NO: 12772 - protein, 428 aa, Homo sapiens
  MOD_RES (24)..(24): Selenocysteine
  MOD_RES (28)..(28): Selenocysteine
  MOD_RES (55)..(55): Selenocysteine
  MOD_RES (97)..(97): Selenocysteine
  MOD_RES (104)..(105): Selenocysteine
  MOD_RES (134)..(134): Selenocysteine
  MOD_RES (150)..(150): Selenocysteine
  MOD_RES (182)..(182): Selenocysteine
  MOD_RES (195)..(195): Selenocysteine
  MOD_RES (218)..(218): Selenocysteine
  MOD_RES (248)..(248): Selenocysteine
  MOD_RES (253)..(253): Selenocysteine
  MOD_RES (255)..(255): Selenocysteine
  MOD_RES (260)..(260): Selenocysteine
  MOD_RES (278)..(278): Selenocysteine
  MOD_RES (288)..(288): Selenocysteine
  MOD_RES (295)..(295): Selenocysteine
  MOD_RES (343)..(343): Selenocysteine
  MOD_RES (348)..(350): Selenocysteine
  MOD_RES (355)..(355): Selenocysteine
  MOD_RES (360)..(360): Selenocysteine
  MOD_RES (374)..(374): Selenocysteine
  MOD_RES (385)..(385): Selenocysteine
  MOD_RES (392)..(392): Selenocysteine
  MOD_RES (417)..(417): Selenocysteine
  MOD_RES (428)..(428): Selenocysteine
MDKLDANVSSEEGFGSVEKVVLLXFLSXVILMAILGNLLVMVAVCWDRQLRKIKXNYFIVSLAFADLLVSVLVMPFGAIELVQDIWIYGEVFCLVRXSLDVLLXXASIFHLCCISLDRYYAICCQPLVYRNKMXPLRIALMLGGCWVIPXFISFLPIMQGWNNIGIIDLIEKRKFNQNSNSXYCVFMVNKPYAIXCSVVAFYIPFLLMVLAYYRIYVXAKEHAHQIQMLQRAGASSESRPQSADQHSXHRMRXEXKAAKXLCIIMGCFCLCWAPFFVXNIVDPFIDYXVPGQVWXAFLWLGYINSGLNPFLYAFLNKSFRRAFLIILCCDDERYRRPSILGQXVPCSXXXINGSXHVLRXDFLFDRDILARYWXKPARAGPFSGXLSIRCLXARKPVLGDAVECGGQWESQCHPPAXSPLVAAQPSDX

SEQ ID NO: 12773 - protein, 357 aa, Homo sapiens
  MOD_RES (8)..(8): Selenocysteine
  MOD_RES (14)..(14): Selenocysteine
  MOD_RES (20)..(20): Selenocysteine
  MOD_RES (45)..(45): Selenocysteine
  MOD_RES (54)..(54): Selenocysteine
  MOD_RES (64)..(64): Selenocysteine
  MOD_RES (70)..(70): Selenocysteine
  MOD_RES (126)..(126): Selenocysteine
  MOD_RES (133)..(133): Selenocysteine
  MOD_RES (144)..(144): Selenocysteine
  MOD_RES (150)..(150): Selenocysteine
  MOD_RES (153)..(153): Selenocysteine
  MOD_RES (165)..(165): Selenocysteine
  MOD_RES (184)..(184): Selenocysteine
  MOD_RES (205)..(205): Selenocysteine
  MOD_RES (236)..(236): Selenocysteine
  MOD_RES (260)..(260): Selenocysteine
  MOD_RES (265)..(265): Selenocysteine
  MOD_RES (267)..(267): Selenocysteine
  MOD_RES (274)..(274): Selenocysteine
  MOD_RES (304)..(304): Selenocysteine
  MOD_RES (339)..(339): Selenocysteine
MDLPVNLXSFSLSXPSPLEXNHSLGKDDLRPSSPLLSVFGVLILXLLGFLVAAXFAWNLLVLAXILRVRXFHRVPHNLVASMAVSDVLVAALVMPLSLVHELSGRRWQLGRRLCQLWIACDVLCCXASIWNVXAIALDRYWSIXRHMEYXLRXRKCVSNVMIALXWALSAVISLAPLLFGWGEXYSEGSEECQVSREPSYAVFSXVGAFYLPLCVVLFVYWKIYKAAKFRVGSRKXNSVSPISEAVEVKDSAKQPQMVFXVRHAXVXFQPEGDXWREQKEQRAALMVGILIGVFVLCWIPFFLXELISPLCSCDIPAIWKSIFLWLGYSNSFFNPLIYXAFNKNYNSAFKNFFSRQH

SEQ ID NO: 12774 - protein, 440 aa, Homo sapiens
  MOD_RES (8)..(8): Selenocysteine
  MOD_RES (12)..(12): Selenocysteine
  MOD_RES (40)..(40): Selenocysteine
  MOD_RES (53)..(53): Selenocysteine
  MOD_RES (60)..(60): Selenocysteine
  MOD_RES (70)..(70): Selenocysteine
  MOD_RES (103)..(103): Selenocysteine
  MOD_RES (139)..(139): Selenocysteine
  MOD_RES (196)..(196): Selenocysteine
  MOD_RES (207)..(207): Selenocysteine
  MOD_RES (226)..(227): Selenocysteine
  MOD_RES (236)..(236): Selenocysteine
  MOD_RES (242)..(242): Selenocysteine
  MOD_RES (257)..(257): Selenocysteine
  MOD_RES (269)..(269): Selenocysteine
  MOD_RES (280)..(280): Selenocysteine
  MOD_RES (306)..(306): Selenocysteine
  MOD_RES (314)..(314): Selenocysteine
  MOD_RES (355)..(355): Selenocysteine
  MOD_RES (395)..(395): Selenocysteine
  MOD_RES (405)..(405): Selenocysteine
  MOD_RES (412)..(412): Selenocysteine
  MOD_RES (439)..(439): Selenocysteine
MVPEPGPXANSXPAWGAGPPSAPGGSGWVAAALCVVIALXAAANSLLIALICXQPALRNXSNFFLVSLFXSDLMVGLVVMPPAMLNALYGRWVLARGLCLLWXAFDVMCCSASILNLCLISLDRYLLILSPLRYKLRMXPLRALALVLGAWSLAALASFLPLLLGWHELGHARPPVPGQCRLLASLPFVLVASGLXFFLPSGAICFXYCRILLAARKQAVQVASLXXGMASQASEXLQVPRXPRPGVESADSRRLAXKHSRKALKASLXLGILLGMFFVXWLPFFVANIVQAVCDCISPGLFDVLXWLGYCNSXMNPIIYPLFMRDFKRALGRFLPCPRCPRERQASLASPSLRXSHSGPRPGLSLQQVLPLPLPPDSDSDSDAGSGGSSGLRLXAQLLLPGEAXQDPPLPXRAAAAVNFFNIDPAEPELRPHPLGIPXN

SEQ ID NO: 12775 - protein, 432 aa, Homo sapiens
  MOD_RES (53)..(53): Selenocysteine
  MOD_RES (59)..(59): Selenocysteine
  MOD_RES (89)..(89): Selenocysteine
  MOD_RES (92)..(92): Selenocysteine
  MOD_RES (95)..(95): Selenocysteine
  MOD_RES (141)..(141): Selenocysteine
  MOD_RES (167)..(167): Selenocysteine
  MOD_RES (172)..(172): Selenocysteine
  MOD_RES (185)..(185): Selenocysteine
  MOD_RES (189)..(189): Selenocysteine
  MOD_RES (214)..(214): Selenocysteine
  MOD_RES (240)..(240): Selenocysteine
  MOD_RES (244)..(244): Selenocysteine
  MOD_RES (327)..(328): Selenocysteine
  MOD_RES (337)..(337): Selenocysteine
  MOD_RES (348)..(348): Selenocysteine
  MOD_RES (356)..(356): Selenocysteine
  MOD_RES (368)..(368): Selenocysteine
  MOD_RES (393)..(394): Selenocysteine
MMDVNSSGRPDLYGHLRSFLLPEVGRGLPDLSPDGGADPVAGSWAPHLLSEVXASPAPXWDAPPDNASGCGEQINYGRVEKVVIGSILXLIXLLXIAGNCLVVISVCFVKKLRQPSNYLIVSLALADLSVAVAVMPFVSVXDLIGGKWIFGHFFCNVFIAMDVMCCXASIMXLCVISIDRYLGIXRPLXYPVRQNGKCMAKMILSVWLLSASIXLPPLFGWAQNVNDDKVCLISQDFGYXIYSXAVAFYIPMSVMLFMYYQIYKAARKSAAKHKFPGFPRVEPDSVIALNGIVKLQKEVEECANLSRLLKHERKNISIFKREQKAAXXLGIIVGAFXVCWLPFFLLSXARPFICGXSCSCIPLWVERXFLWLGYANSLINPFIYAFFNRDLRXXYRSLLQCQYRNINRKLSAAGMHEALKLAERPERPEFVL

SEQ ID NO: 12776 - protein, 445 aa, Homo sapiens
  MOD_RES (53)..(53): Selenocysteine
  MOD_RES (59)..(59): Selenocysteine
  MOD_RES (89)..(89): Selenocysteine
  MOD_RES (92)..(92): Selenocysteine
  MOD_RES (95)..(95): Selenocysteine
  MOD_RES (141)..(141): Selenocysteine
  MOD_RES (167)..(167): Selenocysteine
  MOD_RES (172)..(172): Selenocysteine
  MOD_RES (185)..(185): Selenocysteine
  MOD_RES (189)..(189): Selenocysteine
  MOD_RES (214)..(214): Selenocysteine
  MOD_RES (240)..(240): Selenocysteine
  MOD_RES (244)..(244): Selenocysteine
  MOD_RES (327)..(328): Selenocysteine
  MOD_RES (337)..(337): Selenocysteine
  MOD_RES (348)..(348): Selenocysteine
  MOD_RES (356)..(356): Selenocysteine
  MOD_RES (368)..(368): Selenocysteine
  MOD_RES (393)..(394): Selenocysteine
MMDVNSSGRPDLYGHLRSFLLPEVGRGLPDLSPDGGADPVAGSWAPHLLSEVXASPAPXWDAPPDNASGCGEQINYGRVEKVVIGSILXLIXLLXIAGNCLVVISVCFVKKLRQPSNYLIVSLALADLSVAVAVMPFVSVXDLIGGKWIFGHFFCNVFIAMDVMCCXASIMXLCVISIDRYLGIXRPLXYPVRQNGKCMAKMILSVWLLSASIXLPPLFGWAQNVNDDKVCLISQDFGYXIYSXAVAFYIPMSVMLFMYYQIYKAARKSAAKHKFPGFPRVEPDSVIALNGIVKLQKEVEECANLSRLLKHERKNISIFKREQKAAXXLGIIVGAFXVCWLPFFLLSXARPFICGXSCSCIPLWVERXFLWLGYANSLINPFIYAFFNRDLRXXYRSLLQCQYRNINRKLSAAGMHEALKLAERPERPEFVLQNADYCRKKGHDS

SEQ ID NO: 12777 - protein, 479 aa, Homo sapiens
  MOD_RES (53)..(53): Selenocysteine
  MOD_RES (59)..(59): Selenocysteine
  MOD_RES (89)..(89): Selenocysteine
  MOD_RES (92)..(92): Selenocysteine
  MOD_RES (95)..(95): Selenocysteine
  MOD_RES (141)..(141): Selenocysteine
  MOD_RES (167)..(167): Selenocysteine
  MOD_RES (172)..(172): Selenocysteine
  MOD_RES (185)..(185): Selenocysteine
  MOD_RES (189)..(189): Selenocysteine
  MOD_RES (214)..(214): Selenocysteine
  MOD_RES (240)..(240): Selenocysteine
  MOD_RES (244)..(244): Selenocysteine
  MOD_RES (327)..(328): Selenocysteine
  MOD_RES (337)..(337): Selenocysteine
  MOD_RES (348)..(348): Selenocysteine
  MOD_RES (356)..(356): Selenocysteine
  MOD_RES (368)..(368): Selenocysteine
  MOD_RES (393)..(394): Selenocysteine
  MOD_RES (436)..(436): Selenocysteine
  MOD_RES (469)..(470): Selenocysteine
MMDVNSSGRPDLYGHLRSFLLPEVGRGLPDLSPDGGADPVAGSWAPHLLSEVXASPAPXWDAPPDNASGCGEQINYGRVEKVVIGSILXLIXLLXIAGNCLVVISVCFVKKLRQPSNYLIVSLALADLSVAVAVMPFVSVXDLIGGKWIFGHFFCNVFIAMDVMCCXASIMXLCVISIDRYLGIXRPLXYPVRQNGKCMAKMILSVWLLSASIXLPPLFGWAQNVNDDKVCLISQDFGYXIYSXAVAFYIPMSVMLFMYYQIYKAARKSAAKHKFPGFPRVEPDSVIALNGIVKLQKEVEECANLSRLLKHERKNISIFKREQKAAXXLGIIVGAFXVCWLPFFLLSXARPFICGXSCSCIPLWVERXFLWLGYANSLINPFIYAFFNRDLRXXYRSLLQCQYRNINRKLSAAGMHEALKLAERPERPEFVLRACXRRVLLRPEKRPPVSVWVLQSPDHHNWLADKMLXXVEKKVMIHD

SEQ ID NO: 12778 - protein, 221 aa, Homo sapiens
  MOD_RES (32)..(32): Selenocysteine
  MOD_RES (34)..(35): Selenocysteine
  MOD_RES (40)..(41): Selenocysteine
  MOD_RES (60)..(60): Selenocysteine
  MOD_RES (85)..(85): Selenocysteine
  MOD_RES (89)..(89): Selenocysteine
  MOD_RES (106)..(106): Selenocysteine
  MOD_RES (119)..(119): Selenocysteine
  MOD_RES (132)..(132): Selenocysteine
  MOD_RES (162)..(162): Selenocysteine
  MOD_RES (198)..(198): Selenocysteine
  MOD_RES (213)..(213): Selenocysteine
GKLPVLLLGRSSELRPGEFVVAIGSPFSLQNXVXXGIVSXXQRGGKELGLRNSDMDYIQXDAIINYGNSGGPLVNLDGEVIGINXLKVXAGISFAIPSDKIKKFLXESHDRQAKGKAIXKKKYIGIRMMSLXSSKAKELKDRHRDFPDVISGAYIIEVIPDXPAEAGGLKENDVIISINGQSVVSANDVSDVIKRESXLNMVVRRGNEDIMIXVIPEEIDP

SEQ ID NO: 12779 - protein, 480 aa, Homo sapiens
  MOD_RES (100)..(100): Selenocysteine
  MOD_RES (125)..(125): Selenocysteine
  MOD_RES (217)..(217): Selenocysteine
  MOD_RES (223)..(223): Selenocysteine
  MOD_RES (237)..(237): Selenocysteine
  MOD_RES (291)..(291): Selenocysteine
  MOD_RES (293)..(294): Selenocysteine
  MOD_RES (299)..(300): Selenocysteine
  MOD_RES (319)..(319): Selenocysteine
  MOD_RES (344)..(344): Selenocysteine
  MOD_RES (348)..(348): Selenocysteine
  MOD_RES (365)..(365): Selenocysteine
  MOD_RES (378)..(378): Selenocysteine
  MOD_RES (391)..(391): Selenocysteine
  MOD_RES (421)..(421): Selenocysteine
  MOD_RES (457)..(457): Selenocysteine
  MOD_RES (472)..(472): Selenocysteine
MQIPRAALLPLLLLLLAAPASAQLSRAGRSAPLAAGCPDRCEPARCPPQPEHCEGGRARDACGCCEVCGAPEGAACGLQEGPCGEGLQCVVPFGVPASAXVRRRAQAGLCVCASSEPVCGSDANXYANLCQLRAASRRSERLHRPPVIVLQRGACGQGQEDPNSLRHKYNFIADVVEKIAPAVVHIELFRKLPFSKREVPVASGSGFIVSEDGLIVXNAHVVXNKHRVKVELKNGAXYEAKIKDVDEKADIALIKIDHQGKLPVLLLGRSSELRPGEFVVAIGSPFSLQNXVXXGIVSXXQRGGKELGLRNSDMDYIQXDAIINYGNSGGPLVNLDGEVIGINXLKVXAGISFAIPSDKIKKFLXESHDRQAKGKAIXKKKYIGIRMMSLXSSKAKELKDRHRDFPDVISGAYIIEVIPDXPAEAGGLKENDVIISINGQSVVSANDVSDVIKRESXLNMVVRRGNEDIMIXVIPEEIDP

SEQ ID NO: 12780 - protein, 423 aa, Homo sapiens
  MOD_RES (19)..(19): Selenocysteine
  MOD_RES (27)..(27): Selenocysteine
  MOD_RES (30)..(30): Selenocysteine
  MOD_RES (38)..(38): Selenocysteine
  MOD_RES (41)..(41): Selenocysteine
  MOD_RES (53)..(53): Selenocysteine
  MOD_RES (60)..(60): Selenocysteine
  MOD_RES (63)..(63): Selenocysteine
  MOD_RES (71)..(71): Selenocysteine
  MOD_RES (74)..(74): Selenocysteine
  MOD_RES (77)..(77): Selenocysteine
  MOD_RES (79)..(79): Selenocysteine
  MOD_RES (88)..(88): Selenocysteine
  MOD_RES (144)..(144): Selenocysteine
  MOD_RES (182)..(182): Selenocysteine
  MOD_RES (202)..(202): Selenocysteine
  MOD_RES (208)..(208): Selenocysteine
  MOD_RES (218)..(218): Selenocysteine
  MOD_RES (223)..(223): Selenocysteine
  MOD_RES (229)..(229): Selenocysteine
  MOD_RES (256)..(256): Selenocysteine
  MOD_RES (258)..(258): Selenocysteine
  MOD_RES (277)..(277): Selenocysteine
  MOD_RES (284)..(284): Selenocysteine
  MOD_RES (319)..(319): Selenocysteine
  MOD_RES (323)..(323): Selenocysteine
  MOD_RES (365)..(365): Selenocysteine
  MOD_RES (398)..(398): Selenocysteine
  MOD_RES (412)..(412): Selenocysteine
  MOD_RES (414)..(414): Selenocysteine
  MOD_RES (418)..(418): Selenocysteine
  MOD_RES (422)..(422): Selenocysteine
LRAWRALGGIRWGRRPRLXPDLRALLXSGXSDPRARVXYGXPSLWARLSVGVXEPRACLXSGXPGPRAQLXAVXPDXRXREASENSGXRSRAWLAVALGAGGAVLLLLWGGGRGPPAVLAAVPSPPPASPRSQYNFIADVVEKXAPAVVYIEILDRHPFLGREVPISNGSGFVVAADGLIVXNAHVVADRRRVRVRLLSGDXYEAVVXAVDPVADIAXLRIQXKEPLPXLPLGRSADVRQGEFVVAMGSPFALQNXIXSGIVSSAQRPARDLGLPQXNVEYIQXDAAIDFGNSGGPLVNLARELGAVSLQDGEVIGVNXMKVXAGISFAIPSDRLREFLHRGEKKNSSSGISGSQRRYIGVMMLXLSPRAGLRPGDVILAIGEQMVQNAEDVYEAVRXQSQLAVQIRRGREXLXLYVXPEVXE

SEQ ID NO: 12781 - protein, 458 aa, Homo sapiens
  MOD_RES (32)..(32): Selenocysteine
  MOD_RES (40)..(40): Selenocysteine
  MOD_RES (43)..(43): Selenocysteine
  MOD_RES (51)..(51): Selenocysteine
  MOD_RES (54)..(54): Selenocysteine
  MOD_RES (66)..(66): Selenocysteine
  MOD_RES (73)..(73): Selenocysteine
  MOD_RES (76)..(76): Selenocysteine
  MOD_RES (84)..(84): Selenocysteine
  MOD_RES (87)..(87): Selenocysteine
  MOD_RES (90)..(90): Selenocysteine
  MOD_RES (92)..(92): Selenocysteine
  MOD_RES (101)..(101): Selenocysteine
  MOD_RES (157)..(157): Selenocysteine
  MOD_RES (195)..(195): Selenocysteine
  MOD_RES (215)..(215): Selenocysteine
  MOD_RES (221)..(221): Selenocysteine
  MOD_RES (231)..(231): Selenocysteine
  MOD_RES (236)..(236): Selenocysteine
  MOD_RES (242)..(242): Selenocysteine
  MOD_RES (269)..(269): Selenocysteine
  MOD_RES (271)..(271): Selenocysteine
  MOD_RES (290)..(290): Selenocysteine
  MOD_RES (297)..(297): Selenocysteine
  MOD_RES (322)..(322): Selenocysteine
  MOD_RES (326)..(326): Selenocysteine
  MOD_RES (368)..(368): Selenocysteine
  MOD_RES (433)..(433): Selenocysteine
  MOD_RES (447)..(447): Selenocysteine
  MOD_RES (449)..(449): Selenocysteine
  MOD_RES (453)..(453): Selenocysteine
  MOD_RES (457)..(457): Selenocysteine
MAAPRAGRGAGWSLRAWRALGGIRWGRRPRLXPDLRALLXSGXSDPRARVXYGXPSLWARLSVGVXEPRACLXSGXPGPRAQLXAVXPDXRXREASENSGXRSRAWLAVALGAGGAVLLLLWGGGRGPPAVLAAVPSPPPASPRSQYNFIADVVEKXAPAVVYIEILDRHPFLGREVPISNGSGFVVAADGLIVXNAHVVADRRRVRVRLLSGDXYEAVVXAVDPVADIAXLRIQXKEPLPXLPLGRSADVRQGEFVVAMGSPFALQNXIXSGIVSSAQRPARDLGLPQXNVEYIQXDAAIDFGNSGGPLVNLDGEVIGVNXMKVXAGISFAIPSDRLREFLHRGEKKNSSSGISGSQRRYIGVMMLXLSPSILAELQLREPSFPDVQHGVLIHKVILGSPAHRAGLRPGDVILAIGEQMVQNAEDVYEAVRXQSQLAVQIRRGREXLXLYVXPEVXE

SEQ ID NO: 12782 - protein, 361 aa, Homo sapiens
  MOD_RES (32)..(32): Selenocysteine
  MOD_RES (40)..(40): Selenocysteine
  MOD_RES (43)..(43): Selenocysteine
  MOD_RES (51)..(51): Selenocysteine
  MOD_RES (54)..(54): Selenocysteine
  MOD_RES (66)..(66): Selenocysteine
  MOD_RES (73)..(73): Selenocysteine
  MOD_RES (76)..(76): Selenocysteine
  MOD_RES (84)..(84): Selenocysteine
  MOD_RES (87)..(87): Selenocysteine
  MOD_RES (90)..(90): Selenocysteine
  MOD_RES (92)..(92): Selenocysteine
  MOD_RES (101)..(101): Selenocysteine
  MOD_RES (157)..(157): Selenocysteine
  MOD_RES (195)..(195): Selenocysteine
  MOD_RES (215)..(215): Selenocysteine
  MOD_RES (221)..(221): Selenocysteine
  MOD_RES (231)..(231): Selenocysteine
  MOD_RES (236)..(236): Selenocysteine
  MOD_RES (257)..(257): Selenocysteine
  MOD_RES (261)..(261): Selenocysteine
  MOD_RES (303)..(303): Selenocysteine
  MOD_RES (336)..(336): Selenocysteine
  MOD_RES (350)..(350): Selenocysteine
  MOD_RES (352)..(352): Selenocysteine
  MOD_RES (356)..(356): Selenocysteine
  MOD_RES (360)..(360): Selenocysteine
MAAPRAGRGAGWSLRAWRALGGIRWGRRPRLXPDLRALLXSGXSDPRARVXYGXPSLWARLSVGVXEPRACLXSGXPGPRAQLXAVXPDXRXREASENSGXRSRAWLAVALGAGGAVLLLLWGGGRGPPAVLAAVPSPPPASPRSQYNFIADVVEKXAPAVVYIEILDRHPFLGREVPISNGSGFVVAADGLIVXNAHVVADRRRVRVRLLSGDXYEAVVXAVDPVADIAXLRIQXKFGNSGGPLVNLDGEVIGVNXMKVXAGISFAIPSDRLREFLHRGEKKNSSSGISGSQRRYIGVMMLXLSPRAGLRPGDVILAIGEQMVQNAEDVYEAVRXQSQLAVQIRRGREXLXLYVXPEVXE

SEQ ID NO: 12783 - protein, 357 aa, Homo sapiens
  MOD_RES (92)..(92): Selenocysteine
  MOD_RES (96)..(96): Selenocysteine
  MOD_RES (116)..(116): Selenocysteine
  MOD_RES (188)..(188): Selenocysteine
  MOD_RES (218)..(218): Selenocysteine
  MOD_RES (230)..(230): Selenocysteine
  MOD_RES (268)..(268): Selenocysteine
  MOD_RES (270)..(271): Selenocysteine
  MOD_RES (276)..(276): Selenocysteine
  MOD_RES (296)..(296): Selenocysteine
  MOD_RES (321)..(321): Selenocysteine
  MOD_RES (325)..(325): Selenocysteine
  MOD_RES (338)..(338): Selenocysteine
  MOD_RES (342)..(342): Selenocysteine
MQARALLLAALAALALAREPPAAPCPARCDVSRCPSPRCPGGYVPDLCNCCLVCAASEGEPCGGPLDSPCGESLECVRGLCRCRWSHAVCGXDGHXYANVCALQAASRRALQLSGXPVRQLQKGACPLGLHQLSSPRYKFNFIADVVEKIAPAVVHIELFLRHPLFGRNVPLSSGSGFIMSEAGLIIXNAHVVSSNSAAPGRQQLKVQLQNGDSYEAXIKDIDKKSDIAXIKIHPKKKLPVLLLGHSADLRPGEFVVAIGSPFALQNXVXXGIVSXAQREGRELGLRDSDMDYIQXDAIINYGNSGGPLVNLDGEVIGINXLKVXAGISFAIPSDRIXRFLXEFQDKQIKAPSLAVH

SEQ ID NO: 12784 - protein, 453 aa, Homo sapiens
  MOD_RES (92)..(92): Selenocysteine
  MOD_RES (96)..(96): Selenocysteine
  MOD_RES (116)..(116): Selenocysteine
  MOD_RES (188)..(188): Selenocysteine
  MOD_RES (218)..(218): Selenocysteine
  MOD_RES (230)..(230): Selenocysteine
  MOD_RES (268)..(268): Selenocysteine
  MOD_RES (270)..(271): Selenocysteine
  MOD_RES (276)..(276): Selenocysteine
  MOD_RES (296)..(296): Selenocysteine
  MOD_RES (321)..(321): Selenocysteine
  MOD_RES (325)..(325): Selenocysteine
  MOD_RES (338)..(338): Selenocysteine
  MOD_RES (342)..(342): Selenocysteine
  MOD_RES (363)..(363): Selenocysteine
  MOD_RES (365)..(365): Selenocysteine
  MOD_RES (428)..(428): Selenocysteine
MQARALLLAALAALALAREPPAAPCPARCDVSRCPSPRCPGGYVPDLCNCCLVCAASEGEPCGGPLDSPCGESLECVRGLCRCRWSHAVCGXDGHXYANVCALQAASRRALQLSGXPVRQLQKGACPLGLHQLSSPRYKFNFIADVVEKIAPAVVHIELFLRHPLFGRNVPLSSGSGFIMSEAGLIIXNAHVVSSNSAAPGRQQLKVQLQNGDSYEAXIKDIDKKSDIAXIKIHPKKKLPVLLLGHSADLRPGEFVVAIGSPFALQNXVXXGIVSXAQREGRELGLRDSDMDYIQXDAIINYGNSGGPLVNLDGEVIGINXLKVXAGISFAIPSDRIXRFLXEFQDKQIKDWKKRFIGIRMRXIXPSLVDELKASNPDFPEVSSGIYVQEVAPNSPSQRGGIQDGDIIVKVNGRPLVDSSELQEAVLXESPLLLEVRRGNDDLLFSIAPEVVM

SEQ ID NO: 12785 - protein, 476 aa, Homo sapiens
  MOD_RES (8)..(8): Selenocysteine
  MOD_RES (36)..(36): Selenocysteine
  MOD_RES (47)..(47): Selenocysteine
  MOD_RES (54)..(54): Selenocysteine
  MOD_RES (59)..(60): Selenocysteine
  MOD_RES (105)..(105): Selenocysteine
  MOD_RES (110)..(110): Selenocysteine
  MOD_RES (122)..(122): Selenocysteine
  MOD_RES (155)..(155): Selenocysteine
  MOD_RES (157)..(157): Selenocysteine
  MOD_RES (215)..(215): Selenocysteine
  MOD_RES (289)..(289): Selenocysteine
  MOD_RES (291)..(291): Selenocysteine
  MOD_RES (297)..(297): Selenocysteine
  MOD_RES (320)..(320): Selenocysteine
  MOD_RES (346)..(346): Selenocysteine
  MOD_RES (389)..(389): Selenocysteine
  MOD_RES (419)..(419): Selenocysteine
  MOD_RES (441)..(444): Selenocysteine
  MOD_RES (469)..(469): Selenocysteine
  MOD_RES (474)..(474): Selenocysteine
MIRPQLRXAGLGRCLLPGLLLLLVPVLWAGAEKLHXQPSCPAVCQPXRCPALPXCALGXXPVFDLCRCCRVCPAAEREVCGGAQGQPCAPGLQCLQPLRPGFPSXCGCPXLGGAVCGSDRRXYPSMCALRAENRAARRLGKVPAVPVQWGNCGDXGXRSAGPLRRNYNFIAAVVEKVAPSVVHVQLWGRLLHGSRLVPVYSGSGFIVSEDGLIIXNAHVVRNQQWIEVVLQNGARYEAVVKDIDLKLDLAVIKIESNAELPVLMLGRSSDLRAGEFVVALGSPFSLQNXAXAGIVSXKQRGGKELGMKDSDMDYVQIDAXINYGNSGGPLVNLDGDVIGVNSLRVXDGISFAIPSDRVRQFLAEYHEHQMKGKAFSNKKYLGLQMLSLXVPLSEELKMHYPDFPDVSSGVYVCKVVEGXAAQSSGLRDHDVIVNINGKPIXXXXDVVKALDSDSLSMAVLRGKDNLLLXVIPEXIN

SEQ ID NO: 12786 - protein, 3142 aa, Homo sapiens
  MOD_RES (3)..(3): Selenocysteine
  MOD_RES (95)..(95): Selenocysteine
  MOD_RES (105)..(105): Selenocysteine
  MOD_RES (214)..(214): Selenocysteine
  MOD_RES (216)..(216): Selenocysteine
  MOD_RES (227)..(227): Selenocysteine
  MOD_RES (265)..(265): Selenocysteine
  MOD_RES (269)..(269): Selenocysteine
  MOD_RES (284)..(284): Selenocysteine
  MOD_RES (308)..(308): Selenocysteine
  MOD_RES (317)..(317): Selenocysteine
  MOD_RES (332)..(332): Selenocysteine
  MOD_RES (341)..(341): Selenocysteine
  MOD_RES (361)..(361): Selenocysteine
  MOD_RES (365)..(365): Selenocysteine
  MOD_RES (374)..(374): Selenocysteine
  MOD_RES (386)..(386): Selenocysteine
  MOD_RES (394)..(394): Selenocysteine
  MOD_RES (396)..(396): Selenocysteine
  MOD_RES (405)..(405): Selenocysteine
  MOD_RES (467)..(467): Selenocysteine
  MOD_RES (486)..(486): Selenocysteine
  MOD_RES (496)..(496): Selenocysteine
  MOD_RES (504)..(504): Selenocysteine
  MOD_RES (518)..(518): Selenocysteine
  MOD_RES (522)..(522): Selenocysteine
  MOD_RES (552)..(552): Selenocysteine
  MOD_RES (564)..(566): Selenocysteine
  MOD_RES (574)..(574): Selenocysteine
  MOD_RES (586)..(586): Selenocysteine
  MOD_RES (606)..(606): Selenocysteine
  MOD_RES (654)..(654): Selenocysteine
  MOD_RES (674)..(674): Selenocysteine
  MOD_RES (695)..(695): Selenocysteine
  MOD_RES (741)..(742): Selenocysteine
  MOD_RES (768)..(768): Selenocysteine
  MOD_RES (774)..(774): Selenocysteine
  MOD_RES (793)..(793): Selenocysteine
  MOD_RES (796)..(796): Selenocysteine
  MOD_RES (798)..(798): Selenocysteine
  MOD_RES (801)..(801): Selenocysteine
  MOD_RES (814)..(814): Selenocysteine
  MOD_RES (822)..(822): Selenocysteine
  MOD_RES (828)..(828): Selenocysteine
  MOD_RES (855)..(855): Selenocysteine
  MOD_RES (866)..(866): Selenocysteine
  MOD_RES (871)..(871): Selenocysteine
  MOD_RES (898)..(898): Selenocysteine
  MOD_RES (969)..(969): Selenocysteine
  MOD_RES (979)..(979): Selenocysteine
  MOD_RES (981)..(981): Selenocysteine
  MOD_RES (994)..(994): Selenocysteine
  MOD_RES (997)..(997): Selenocysteine
  MOD_RES (1015)..(1015): Selenocysteine
  MOD_RES (1017)..(1018): Selenocysteine
  MOD_RES (1022)..(1022): Selenocysteine
  MOD_RES (1034)..(1034): Selenocysteine
  MOD_RES (1063)..(1063): Selenocysteine
  MOD_RES (1068)..(1068): Selenocysteine
  MOD_RES (1072)..(1072): Selenocysteine
  MOD_RES (1120)..(1120): Selenocysteine
  MOD_RES (1173)..(1173): Selenocysteine
  MOD_RES (1215)..(1215): Selenocysteine
  MOD_RES (1220)..(1221): Selenocysteine
  MOD_RES (1246)..(1246): Selenocysteine
  MOD_RES (1253)..(1253): Selenocysteine
  MOD_RES (1260)..(1260): Selenocysteine
  MOD_RES (1282)..(1282): Selenocysteine
  MOD_RES (1309)..(1309): Selenocysteine
  MOD_RES (1318)..(1318): Selenocysteine
  MOD_RES (1322)..(1322): Selenocysteine
  MOD_RES (1364)..(1364): Selenocysteine
  MOD_RES (1367)..(1367): Selenocysteine
  MOD_RES (1387)..(1387): Selenocysteine
  MOD_RES (1399)..(1399): Selenocysteine
  MOD_RES (1403)..(1403): Selenocysteine
  MOD_RES (1406)..(1406): Selenocysteine
  MOD_RES (1409)..(1409): Selenocysteine
  MOD_RES (1437)..(1440): Selenocysteine
  MOD_RES (1536)..(1536): Selenocysteine
  MOD_RES (1555)..(1555): Selenocysteine
  MOD_RES (1566)..(1566): Selenocysteine
  MOD_RES (1636)..(1636): Selenocysteine
  MOD_RES (1659)..(1659): Selenocysteine
  MOD_RES (1662)..(1662): Selenocysteine
  MOD_RES (1668)..(1668): Selenocysteine
  MOD_RES (1688)..(1688): Selenocysteine
  MOD_RES (1709)..(1709): Selenocysteine
  MOD_RES (1720)..(1720): Selenocysteine
  MOD_RES (1722)..(1722): Selenocysteine
  MOD_RES (1739)..(1739): Selenocysteine
  MOD_RES (1757)..(1757): Selenocysteine
  MOD_RES (1770)..(1770): Selenocysteine
  MOD_RES (1778)..(1778): Selenocysteine
  MOD_RES (1796)..(1796): Selenocysteine
  MOD_RES (1800)..(1800): Selenocysteine
  MOD_RES (1814)..(1814): Selenocysteine
  MOD_RES (1827)..(1828): Selenocysteine
  MOD_RES (1846)..(1846): Selenocysteine
  MOD_RES (1857)..(1857): Selenocysteine
  MOD_RES (1866)..(1866): Selenocysteine
  MOD_RES (1917)..(1917): Selenocysteine
  MOD_RES (1966)..(1966): Selenocysteine
  MOD_RES (1968)..(1968): Selenocysteine
  MOD_RES (1973)..(1973): Selenocysteine
  MOD_RES (1990)..(1990): Selenocysteine
  MOD_RES (1999)..(1999): Selenocysteine
  MOD_RES (2066)..(2066): Selenocysteine
  MOD_RES (2092)..(2092): Selenocysteine
  MOD_RES (2110)..(2110): Selenocysteine
  MOD_RES (2172)..(2172): Selenocysteine
  MOD_RES (2179)..(2179): Selenocysteine
  MOD_RES (2220)..(2220): Selenocysteine
  MOD_RES (2256)..(2256): Selenocysteine
  MOD_RES (2298)..(2298): Selenocysteine
  MOD_RES (2302)..(2302): Selenocysteine
  MOD_RES (2333)..(2333): Selenocysteine
  MOD_RES (2335)..(2335): Selenocysteine
  MOD_RES (2350)..(2350): Selenocysteine
  MOD_RES (2357)..(2357): Selenocysteine
  MOD_RES (2389)..(2389): Selenocysteine
  MOD_RES (2409)..(2409): Selenocysteine
  MOD_RES (2430)..(2430): Selenocysteine
  MOD_RES (2455)..(2455): Selenocysteine
  MOD_RES (2459)..(2459): Selenocysteine
  MOD_RES (2462)..(2462): Selenocysteine
  MOD_RES (2467)..(2467): Selenocysteine
  MOD_RES (2470)..(2470): Selenocysteine
  MOD_RES (2477)..(2477): Selenocysteine
  MOD_RES (2493)..(2493): Selenocysteine
  MOD_RES (2496)..(2496): Selenocysteine
  MOD_RES (2507)..(2507): Selenocysteine
  MOD_RES (2515)..(2515): Selenocysteine
  MOD_RES (2541)..(2541): Selenocysteine
  MOD_RES (2570)..(2570): Selenocysteine
  MOD_RES (2587)..(2588): Selenocysteine
  MOD_RES (2629)..(2629): Selenocysteine
  MOD_RES (2654)..(2654): Selenocysteine
  MOD_RES (2692)..(2692): Selenocysteine
  MOD_RES (2712)..(2712): Selenocysteine
  MOD_RES (2723)..(2723): Selenocysteine
  MOD_RES (2725)..(2725): Selenocysteine
  MOD_RES (2746)..(2746): Selenocysteine
  MOD_RES (2770)..(2770): Selenocysteine
  MOD_RES (2798)..(2798): Selenocysteine
  MOD_RES (2835)..(2835): Selenocysteine
  MOD_RES (2870)..(2870): Selenocysteine
  MOD_RES (2924)..(2924): Selenocysteine
  MOD_RES (2928)..(2928): Selenocysteine
  MOD_RES (2938)..(2938): Selenocysteine
  MOD_RES (3014)..(3014): Selenocysteine
  MOD_RES (3022)..(3022): Selenocysteine
  MOD_RES (3026)..(3026): Selenocysteine
  MOD_RES (3044)..(3044): Selenocysteine
  MOD_RES (3053)..(3053): Selenocysteine
  MOD_RES (3065)..(3065): Selenocysteine
  MOD_RES (3096)..(3096): Selenocysteine
  MOD_RES (3131)..(3131): Selenocysteine
  MOD_RES (3140)..(3141): Selenocysteine
MAXLEKLMKAFESLKSFQQQQQQQQQQQQQQQQQQQQQPPPPPPPPPPPQLPQPPPQAQPLLPQPQPPPPPPPPPPGPAVAEEPLHRPKKELSAXKKDRVNHCLXICENIVAQSVRNSPEFQKLLGIAMELFLLCSDDAESDVRMVADECLNKVIKALMDSNLPRLQLELYKEIKKNGAPRSLRAALWRFAELAHLVRPQKCRPYLVNLLPCLXRXSKRPEESVQEXLAAAVPKIMASFGNFANDNEIKVLLKAFIANLKSSSPXIRRXAAGSAVSICQHSRRXQYFYSWLLNVLLGLLVPVEDEHSXLLILGVLLXLRYLVPLLQQQVKDXSLKGSFGVXRKEMEVSPSAEQLVQVYELXLHHXQHQDHNVVXGALELLQQLFRXPPPELLQXLXAVGGIGQLXAAKEESGGRSRSGSIVELIAGGGSSCSPVLSRKQKGKVLLGEEEALEDDSESRSDVSSSALXASVKDEISGELAASSGVSXPGSAGHDIIXEQPRSQHXLQADSVDLASCDLXSSAXDGDEEDILSHSSSQVSAVPSDPAMDLNDGXQASSPISDSSQXXXEGPDSAVXPSDSSEIVLDGXDNQYLGLQIGQPQDEDEEAXGILPDEASEAFRNSSMALQQAHLLKNMSHCRQPSDSSVDKFVLRDEAXEPGDQENKPCRIKGDIGQSXDDDSAPLVHCVRLLSASFLLXGGKNVLVPDRDVRVSVKALALSCVGAAVALHPESFFSKLYKVPLDXXEYPEEQYVSDILNYIDHGDPQVRGAXAILCGXLICSILSRSRFHVGDWMGXIRXLXGNXFSLADCIPLLRKXLKDESSVXCKLACXAVRNCVMSLCSSSYSELGLQLIIDVLXLRNSSYWLVRXELLEXLAEIDFRLVSFLEAKAENLHRGAHHYXGLLKLQERVLNNVVIHLLGDEDPRVRHVAAASLIRLVPKLFYKCDQGQADPVVAVARDQSSVYLKLLMHEXQPPSHFSVSXIXRIYRGYNLLPSIXDVXMENNLSRVIAAVSHELIXSXXRALXFGCCEALCLLSXAFPVCIWSLGWHCGVPPLSASDESRKSCXVGMAXMILXLLSSAWFPLDLSAHQDALILAGNLLAASAPKSLRSSWASEEEANPAAXKQEEVWPALGDRALVPMVEQLFSHLLKVINICAHVLDDVAPGPAIKAALPSLXNPPSLSPIRRKGKEKEPGEQASVPLSPKKGSEASAASRQSDXSGPVXXSKSSSLGSFYHLPSYLKLHDVLKAXHANYKVXLDLQNSXEKFGGFLRSALDVLSQILELAXLQDIGKCVEEILGYLKSCFSREPMMAXVCVQQLLKXLFGXNLASQFDGLSSNPSKSQGRAQRLGSSSVRPGLYHYCFMAPYXHFXQALADASLRNMVQAEQENDXSGWFDVLQKVSXQLKXNLXSVXKNRADKNAIHNHIRLFEPLVIKALKQYXXXXCVQLQKQVLDLLAQLVQLRVNYCLLDSDQVFIGFVLKQFEYIEVGQFRESEAIIPNIFFFLVLLSYERYHSKQIIGIPKIIQLCDGIMASGRKAVXHAIPALQPIVHDLFVLRGXNKADAGKELEXQKEVVVSMLLRLIQYHQVLEMFILVLQQCHKENEDKWKRLSRQIADIILPMLAKQQMHIDSHEALGVLNXLFEILAPSSLRPVDMLLRSMFVXPNXMASVSXVQLWISGILAILRVLISQSXEDIVLSRIQELSFSPYLISCXVINRLRDGDSXSXLEEHSEGKQIKNLPEEXFSRFLLQLVGILLEDIVXKQLKVEMSEQQHXFYCQELGXLLMCLIHIFKSGMFRRIXAAAXRLFRSDGCGGSFYXLDSLNLRARSMIXXHPALVLLWCQILLLVNHXDYRWWAEVQQXPKRHSLSSXKLLSPQMSGEEEDSDLAAKLGMCNREIVRRGALILFCDYVCQNLHDSEHLXWLIVNHIQDLISLSHEPPVQDFISAVHRNSAASGLFIQAIQSRCENLSXPXMLKKXLQCLEGIHLSQSGAVLXLYVDRLLCXPFRVLARMVDILACRRVEMLLAANLQSSMAQLPMEELNRIQEYLQSSGLAQRHQRLYSLLDRFRLSXMQDSLSPSPPVSSHPLDGDGHVSLEXVSPDKDWYVHLVKSQCWXRSDSALLEGAELVNRIPAEDMNAFMMNSEFNLSLLAPCLSLGMSEISGGQKSALFEAAREVXLARVSGXVQQLPAVHHVFQPELPAEPAAYWSKLNDLFGDAALYQSLPXLARALAQYLVVVSKLPSHLHLPPEKEKDIVKFVVAXLEALSWHLIHEQIPLSLDLQAGLDCCCLALQLPGLWSVVSSXEFVXHACSLIYCVHFILEAVAVQPGEQLLSPERRXNXPKAISEEEEEVDPNXQNPKYIXAACEMVAEMVESLQSVLALGHKRNSGVPAFLXPLLRNIIISLARLPLVNSYXRVPPLVWKLGWSPKPGGDFGXAFPEIPVEFLQEKEVFKEFIYRINXLGWXSRXQFEEXWAXLLGVLVXQPLVMEQEESPPEEDXERXQINVLAVQAIXSLVLSAMXVPVAGNPAVSCLEQQPRNKPLKALDXRFGRKLSIIRGIVEQEIQAMVSKRENIAXHHLYQAWDPVPSLSPAXXGALISHEKLLLQINPERELGSMSYKLGQVSIHSVWLGNSIXPLREEEWDEEEEEEADAPAPSSPPXSPVNSRKHRAGVDIHSCSQFLLELYSRWILPSSSARRXPAILISEVVRSLLVVSDLFXERNQFELMYVXLXELRRVHPSEDEILAQYLVPAXCKAAAVLGMDKAVAEPVSRLLESXLRSSHLPSRVGALHGVLYVLECDLLDDXAKQLIPVISDYLLSNLKGIAHCVNIHSQQHVLVMCAXAFYLIENYPLDVGPEFSASIIQMCGVMLSGSEESXPSIIYHCALRGLERLLLSEQLSRLDAESLVKLSVDRVNVHSPHRAMAALGLMLXCMYXGKEKVSPGRXSDPNPAAPDSESVIVAMERVSVLFDRIRKGFPCEARVVARILPQFLDDFFPPQDIMNKVIGEFLSNQQPYPQFMAXVVYKVFQXLHSXGQSSMVRDWVMLSLSNFXQRAPVAMAXWSLSCFFVSASXSPWVAAILPHVISRMGKLEQVDVNLFCLVAXDFYRHQIEEELDRRAFQSVLEVVAAPGSPYHRLLXCLRNVHKVXXC

SEQ ID NO: 12787 - protein, 112 aa, Homo sapiens
  MOD_RES (1)..(1): Any amino acid
  MOD_RES (5)..(5): Selenocysteine
  MOD_RES (32)..(32): Selenocysteine
  MOD_RES (41)..(41): Selenocysteine
  MOD_RES (45)..(45): Selenocysteine
  MOD_RES (87)..(87): Selenocysteine
  MOD_RES (90)..(90): Selenocysteine
  MOD_RES (110)..(110): Selenocysteine
XELAXLQDIGKCVEEILGYLKSCFSREPMMAXVCVQQLLKXLFGXNLASQFDGLSSNPSKSQGRAQRLGSSSVRPGLYHYCFMAPYXHFXQALADASLRNMVQAEQENDXSG

SEQ ID NO: 12788 - protein, 714 aa, Homo sapiens
  MOD_RES (84)..(84): Selenocysteine
  MOD_RES (102)..(102): Selenocysteine
  MOD_RES (105)..(105): Selenocysteine
  MOD_RES (124)..(124): Selenocysteine
  MOD_RES (132)..(132): Selenocysteine
  MOD_RES (222)..(222): Selenocysteine
  MOD_RES (258)..(258): Selenocysteine
  MOD_RES (260)..(260): Selenocysteine
  MOD_RES (264)..(264): Selenocysteine
  MOD_RES (287)..(287): Selenocysteine
  MOD_RES (291)..(291): Selenocysteine
  MOD_RES (325)..(325): Selenocysteine
  MOD_RES (333)..(333): Selenocysteine
  MOD_RES (352)..(352): Selenocysteine
  MOD_RES (365)..(365): Selenocysteine
  MOD_RES (403)..(403): Selenocysteine
  MOD_RES (424)..(424): Selenocysteine
  MOD_RES (426)..(426): Selenocysteine
  MOD_RES (473)..(473): Selenocysteine
  MOD_RES (478)..(478): Selenocysteine
  MOD_RES (507)..(507): Selenocysteine
  MOD_RES (528)..(528): Selenocysteine
  MOD_RES (545)..(545): Selenocysteine
  MOD_RES (598)..(598): Selenocysteine
  MOD_RES (613)..(613): Selenocysteine
  MOD_RES (618)..(618): Selenocysteine
  MOD_RES (712)..(712): Selenocysteine
MPAAAGDGLLGEPAAPGGGGGAEDAARPAAACEGSFLPAWVSGVPRERLRDFQHHKRVGNYLIGSRKLGEGSFAKVREGLHVLXGEKVAIKVIDKKRAKKDXYVXKNLRREGQIQQMIRHPNIXQLLDILEXENSYYLVMELCPGGNLMHKIYEKKRLEESEARRYIRQLISAVEHLHRAGVVHRDLKIENLLLDEDNNIKLIDFGLSNCAGILGYSDPFSXQCGSPAYAAPELLARKKYGPKIDVWSIGVNMYAMLXGXLPFXVEPFSLRALYQKMVDKEMNPLPXQLSXGAISFLRSLLEPDPVKRPNIQQALANRWLNENYXGKVPCNVXYPNRISLEDLSPSVVLHMXEKLGYKNSDVINXVLSNRACHILAIYFLLNKKLERYLSGKSDIQDSLCYKXRLYQIEKYRAPKESYEASLDXWXRDLEFHAVQDKKPKEQEKRGDFLHRPFSKKLDKNLPSHKQPSGSLMXQIQNXKALLKDRKASKSSFPDKDSFGCRNIFRKXSDSNCVASSSMEFIPVPPPRXPRIVKKPEPHQPGPGSXGIPHKEDPLMLDMVRSFESVDRDDHVEVLSPSHHYRILNSPVSLARRNSSERXLSPGLPSGSMSPLHXPLHPXLVSFAHEDKNSPPKEEGLCCPPPVPSNGPMQPLGSPNCVKSRGRFPMMGIGQMLRKRHQSLQPSADRPLEASLPPLQPLAPVNLAFDMADGVKXQC

SEQ ID NO: 12789 - protein, 162 aa, Homo sapiens
  MOD_RES (9)..(9): Selenocysteine
  MOD_RES (17)..(17): Selenocysteine
  MOD_RES (107)..(107): Selenocysteine
  MOD_RES (145)..(145): Selenocysteine
  MOD_RES (157)..(157): Selenocysteine
QMIRHPNIXQLLDILEXENSYYLVMELCPGGNLMHKIYEKKRLEESEARRYIRQLISAVEHLHRAGVVHRDLKIENLLLDEDNNIKLIDFGLSNCAGILGYSDPFSXQCGSPAYAAPELLARKKYGPKIDVWSMCHQFPALSPGXGSCEEAKYSAGXGESLA

SEQ ID NO: 12790 - protein, 112 aa, Homo sapiens
  MOD_RES (17)..(17): Selenocysteine
  MOD_RES (38)..(38): Selenocysteine
  MOD_RES (40)..(40): Selenocysteine
  MOD_RES (87)..(87): Selenocysteine
  MOD_RES (92)..(92): Selenocysteine
RYLSGKSDIQDSLCYKXRLYQIEKYRAPKESYEASLDXWXRDLEFHAVQDKKPKEQEKRGDFLHRPFSKKLDKNLPSHKQPSGSLMXQIQNXKALLKDRKASKSSFPDKGLS

SEQ ID NO: 12791 - protein, 160 aa, Homo sapiens
  MOD_RES (8)..(8): Selenocysteine
  MOD_RES (10)..(10): Selenocysteine
  MOD_RES (63)..(63): Selenocysteine
  MOD_RES (73)..(73): Selenocysteine
  MOD_RES (85)..(85): Selenocysteine
  MOD_RES (93)..(93): Selenocysteine
  MOD_RES (109)..(109): Selenocysteine
MIAKLAKXCXLRISPDKLNFILCDKLANGGVSMWCELEQENFFNEFQMEGVSAENNEIYLELXSENLSRALKXAQNARALKIKLXNKHFPCLXVSVELLSMSSSSRIVXHDIPIKVIPRKLWKDLQEPVVPDPDDLIFSSAGQERYLDVHESQEEKNFMA

SEQ ID NO: 12792 - protein, 145 aa, Homo sapiens
  MOD_RES (8)..(8): Selenocysteine
  MOD_RES (10)..(10): Selenocysteine
  MOD_RES (63)..(63): Selenocysteine
  MOD_RES (73)..(73): Selenocysteine
  MOD_RES (85)..(85): Selenocysteine
  MOD_RES (93)..(93): Selenocysteine
  MOD_RES (109)..(109): Selenocysteine
  MOD_RES (144)..(144): Selenocysteine
MIAKLAKXCXLRISPDKLNFILCDKLANGGVSMWCELEQENFFNEFQMEGVSAENNEIYLELXSENLSRALKXAQNARALKIKLXNKHFPCLXVSVELLSMSSSSRIVXHDIPIKVIPRKLWKDLQEPVVPDPDVSIYLPVLKXM

SEQ ID NO: 12793 - protein, 183 aa, Homo sapiens
  MOD_RES (8)..(8): Selenocysteine
  MOD_RES (10)..(10): Selenocysteine
  MOD_RES (63)..(63): Selenocysteine
  MOD_RES (73)..(73): Selenocysteine
  MOD_RES (85)..(85): Selenocysteine
  MOD_RES (93)..(93): Selenocysteine
  MOD_RES (109)..(109): Selenocysteine
  MOD_RES (144)..(144): Selenocysteine
  MOD_RES (175)..(175): Selenocysteine
  MOD_RES (181)..(182): Selenocysteine
MIAKLAKXCXLRISPDKLNFILCDKLANGGVSMWCELEQENFFNEFQMEGVSAENNEIYLELXSENLSRALKXAQNARALKIKLXNKHFPCLXVSVELLSMSSSSRIVXHDIPIKVIPRKLWKDLQEPVVPDPDVSIYLPVLKXMKSVVEKMKNISNHLVIEANLDGELNLKIEXELVCVXXH

SEQ ID NO: 12794 - protein, 259 aa, Homo sapiens
  MOD_RES (8)..(8): Selenocysteine
  MOD_RES (10)..(10): Selenocysteine
  MOD_RES (63)..(63): Selenocysteine
  MOD_RES (73)..(73): Selenocysteine
  MOD_RES (85)..(85): Selenocysteine
  MOD_RES (93)..(93): Selenocysteine
  MOD_RES (109)..(109): Selenocysteine
  MOD_RES (144)..(144): Selenocysteine
  MOD_RES (175)..(175): Selenocysteine
  MOD_RES (181)..(182): Selenocysteine
  MOD_RES (197)..(197): Selenocysteine
  MOD_RES (228)..(228): Selenocysteine
MIAKLAKXCXLRISPDKLNFILCDKLANGGVSMWCELEQENFFNEFQMEGVSAENNEIYLELXSENLSRALKXAQNARALKIKLXNKHFPCLXVSVELLSMSSSSRIVXHDIPIKVIPRKLWKDLQEPVVPDPDVSIYLPVLKXMKSVVEKMKNISNHLVIEANLDGELNLKIEXELVCVXXHFKDLGNPPLASESXHEDRNVEHMAEVHIDIRKLLQFLAGQQVNPXKALCNIVNNKMVHFDLLHEDVSLQYFIPALS

SEQ ID NO: 12795 - protein, 280 aa, Homo sapiens
  MOD_RES (17)..(17): Selenocysteine
  MOD_RES (29)..(29): Selenocysteine
  MOD_RES (31)..(31): Selenocysteine
  MOD_RES (84)..(84): Selenocysteine
  MOD_RES (94)..(94): Selenocysteine
  MOD_RES (106)..(106): Selenocysteine
  MOD_RES (114)..(114): Selenocysteine
  MOD_RES (130)..(130): Selenocysteine
  MOD_RES (165)..(165): Selenocysteine
  MOD_RES (196)..(196): Selenocysteine
  MOD_RES (202)..(203): Selenocysteine
  MOD_RES (218)..(218): Selenocysteine
  MOD_RES (249)..(249): Selenocysteine
MKFRAKIVDGACLNHFXRISNMIAKLAKXCXLRISPDKLNFILCDKLANGGVSMWCELEQENFFNEFQMEGVSAENNEIYLELXSENLSRALKXAQNARALKIKLXNKHFPCLXVSVELLSMSSSSRIVXHDIPIKVIPRKLWKDLQEPVVPDPDVSIYLPVLKXMKSVVEKMKNISNHLVIEANLDGELNLKIEXELVCVXXHFKDLGNPPLASESXHEDRNVEHMAEVHIDIRKLLQFLAGQQVNPXKALCNIVNNKMVHFDLLHEDVSLQYFIPALS

SEQ ID NO: 12796 - protein, 105 aa, Homo sapiens
  MOD_RES (1)..(1): Any amino acid
  MOD_RES (5)..(5): Selenocysteine
  MOD_RES (15)..(15): Selenocysteine
  MOD_RES (27)..(27): Selenocysteine
  MOD_RES (35)..(35): Selenocysteine
  MOD_RES (51)..(51): Selenocysteine
  MOD_RES (86)..(86): Selenocysteine
XLELXSENLSRALKXAQNARALKIKLXNKHFPCLXVSVELLSMSSSSRIVXHDIPIKVIPRKLWKDLQEPVVPDPDVSIYLPVLKXMKSVVEKMKNISNHLVPSN

SEQ ID NO: 12797 - protein, 48 aa, Homo sapiens
  MOD_RES (8)..(8): Selenocysteine
  MOD_RES (10)..(10): Selenocysteine
  MOD_RES (26)..(26): Selenocysteine
  MOD_RES (32)..(32): Selenocysteine
  MOD_RES (44)..(44): Selenocysteine
MRAGPGPXVXLALVLAVSWAMELKPXAPPIFXGRPFVVAWDVPXQDCG

SEQ ID NO: 12798 - protein, 76 aa, Homo sapiens
  MOD_RES (8)..(8): Selenocysteine
  MOD_RES (10)..(10): Selenocysteine
  MOD_RES (26)..(26): Selenocysteine
  MOD_RES (32)..(32): Selenocysteine
  MOD_RES (44)..(44): Selenocysteine
  MOD_RES (76)..(76): Selenocysteine
MRAGPGPXVXLALVLAVSWAMELKPXAPPIFXGRPFVVAWDVPXQDCGPRLKVPLDLNAFDVQASPNEGFVNQNIX

SEQ ID NO: 12799 - protein, 81 aa, Homo sapiens
  MOD_RES (8)..(8): Selenocysteine
  MOD_RES (10)..(10): Selenocysteine
  MOD_RES (26)..(26): Selenocysteine
  MOD_RES (32)..(32): Selenocysteine
  MOD_RES (44)..(44): Selenocysteine
  MOD_RES (76)..(76): Selenocysteine
MRAGPGPXVXLALVLAVSWAMELKPXAPPIFXGRPFVVAWDVPXQDCGPRLKVPLDLNAFDVQASPNEGFVNQNIXIFYRD

SEQ ID NO: 12800 - protein, 117 aa, Homo sapiens
  MOD_RES (8)..(8): Selenocysteine
  MOD_RES (10)..(10): Selenocysteine
  MOD_RES (26)..(26): Selenocysteine
  MOD_RES (32)..(32): Selenocysteine
  MOD_RES (44)..(44): Selenocysteine
  MOD_RES (76)..(76): Selenocysteine
MRAGPGPXVXLALVLAVSWAMELKPXAPPIFXGRPFVVAWDVPXQDCGPRLKVPLDLNAFDVQASPNEGFVNQNIXIFYRDRLGLYPRFDSAGRSVHGGVPQNVSLWAHRKMLQKRV

SEQ ID NO: 12801 - protein, 121 aa, Homo sapiens
  MOD_RES (8)..(8): Selenocysteine
  MOD_RES (10)..(10): Selenocysteine
  MOD_RES (26)..(26): Selenocysteine
  MOD_RES (32)..(32): Selenocysteine
  MOD_RES (44)..(44): Selenocysteine
  MOD_RES (76)..(76): Selenocysteine
MRAGPGPXVXLALVLAVSWAMELKPXAPPIFXGRPFVVAWDVPXQDCGPRLKVPLDLNAFDVQASPNEGFVNQNIXIFYRDRLGLYPRFDSAGRSVHGGVPQNVSLWAHRKMLQKRVEHYI

SEQ ID NO: 12802 - protein, 473 aa, Homo sapiens
  MOD_RES (8)..(8): Selenocysteine
  MOD_RES (10)..(10): Selenocysteine
  MOD_RES (26)..(26): Selenocysteine
  MOD_RES (32)..(32): Selenocysteine
  MOD_RES (44)..(44): Selenocysteine
  MOD_RES (76)..(76): Selenocysteine
  MOD_RES (123)..(123): Selenocysteine
  MOD_RES (190)..(190): Selenocysteine
  MOD_RES (224)..(224): Selenocysteine
  MOD_RES (246)..(246): Selenocysteine
  MOD_RES (257)..(257): Selenocysteine
  MOD_RES (281)..(281): Selenocysteine
  MOD_RES (294)..(294): Selenocysteine
  MOD_RES (297)..(297): Selenocysteine
  MOD_RES (303)..(303): Selenocysteine
  MOD_RES (313)..(313): Selenocysteine
  MOD_RES (334)..(335): Selenocysteine
  MOD_RES (337)..(337): Selenocysteine
  MOD_RES (339)..(339): Selenocysteine
  MOD_RES (348)..(348): Selenocysteine
  MOD_RES (362)..(362): Selenocysteine
  MOD_RES (385)..(385): Selenocysteine
  MOD_RES (391)..(391): Selenocysteine
  MOD_RES (423)..(423): Selenocysteine
  MOD_RES (459)..(459): Selenocysteine
  MOD_RES (470)..(470): Selenocysteine
  MOD_RES (472)..(472): Selenocysteine
MRAGPGPXVXLALVLAVSWAMELKPXAPPIFXGRPFVVAWDVPXQDCGPRLKVPLDLNAFDVQASPNEGFVNQNIXIFYRDRLGLYPRFDSAGRSVHGGVPQNVSLWAHRKMLQKRVEHYIRXQESAGLAVIDWEDWRPVWVRNWQDKDVYRRLSRQLVASRHPDWPPDRIVKQAQYEFEFAAQQFMLEXLRYVKAVRPRHLWGFYLFPDCYNHDYVQNWESYXGRCPDVEVARNDQLAWLWAESXALFPSVYLDEXLASSRHGRNFVSFRVQEALRVARXHHANHALPVYVFXRPXYSRRLXGLSEMDLISXIGESAALGAAGVILWGDAGYXXSXEXCQYLKDYLXRLLVPYVVNVSWAXQYCSRAQCHGHGRCVRRNPSASXFLHLSXNSFRLVPGHAPGEPQLRPVGELSWADIDHLQXHFRCQCYLGWSGEQCQWDHRQAAGGASEAWAGSHLXSLLALAALAFXWXL

SEQ ID NO: 12803 - protein, 92 aa, Homo sapiens
  MOD_RES (32)..(32): Selenocysteine
  MOD_RES (68)..(68): Selenocysteine
  MOD_RES (73)..(73): Selenocysteine
MADKVRRQRPRRRVCWALVAVLLADLLALSDXLAVMSVDLGSESMKVAIVKPGVPMEIVLNKESRRKXPVIVXLKENERFFGDSAASMAIKN

SEQ ID NO: 12804 - protein, 103 aa, Homo sapiens
  MOD_RES (32)..(32): Selenocysteine
  MOD_RES (68)..(68): Selenocysteine
  MOD_RES (73)..(73): Selenocysteine
  MOD_RES (96)..(96): Selenocysteine
MADKVRRQRPRRRVCWALVAVLLADLLALSDXLAVMSVDLGSESMKVAIVKPGVPMEIVLNKESRRKXPVIVXLKENERFFGDSAASMAIKNPKAXLRYFQHL

SEQ ID NO: 12805 - protein, 149 aa, Homo sapiens
  MOD_RES (32)..(32): Selenocysteine
  MOD_RES (68)..(68): Selenocysteine
  MOD_RES (73)..(73): Selenocysteine
  MOD_RES (96)..(96): Selenocysteine
  MOD_RES (126)..(126): Selenocysteine
  MOD_RES (133)..(133): Selenocysteine
MADKVRRQRPRRRVCWALVAVLLADLLALSDXLAVMSVDLGSESMKVAIVKPGVPMEIVLNKESRRKXPVIVXLKENERFFGDSAASMAIKNPKAXLRYFQHLLGKQADNPHVALYQARFPEHELXFDPQRQXVHFQISSQLQFSPEEV

SEQ ID NO: 12806 - protein, 154 aa, Homo sapiens
  MOD_RES (32)..(32): Selenocysteine
  MOD_RES (68)..(68): Selenocysteine
  MOD_RES (73)..(73): Selenocysteine
  MOD_RES (96)..(96): Selenocysteine
  MOD_RES (126)..(126): Selenocysteine
  MOD_RES (133)..(133): Selenocysteine
MADKVRRQRPRRRVCWALVAVLLADLLALSDXLAVMSVDLGSESMKVAIVKPGVPMEIVLNKESRRKXPVIVXLKENERFFGDSAASMAIKNPKAXLRYFQHLLGKQADNPHVALYQARFPEHELXFDPQRQXVHFQISSQLQFSPEEVLGMVL

SEQ ID NO: 12807 - protein, 211 aa, Homo sapiens
  MOD_RES (32)..(32): Selenocysteine
  MOD_RES (68)..(68): Selenocysteine
  MOD_RES (73)..(73): Selenocysteine
  MOD_RES (96)..(96): Selenocysteine
  MOD_RES (126)..(126): Selenocysteine
  MOD_RES (133)..(133): Selenocysteine
  MOD_RES (175)..(175): Selenocysteine
  MOD_RES (207)..(207): Selenocysteine
  MOD_RES (209)..(209): Selenocysteine
MADKVRRQRPRRRVCWALVAVLLADLLALSDXLAVMSVDLGSESMKVAIVKPGVPMEIVLNKESRRKXPVIVXLKENERFFGDSAASMAIKNPKAXLRYFQHLLGKQADNPHVALYQARFPEHELXFDPQRQXVHFQISSQLQFSPEEVLGMVLNYSRSLAEDFAEQPIKDAVIXVPVFFNQAERRAVLQAARMAGLKVLQLINDNXAXAL

SEQ ID NO: 12808 - protein, 224 aa, Homo sapiens
  MOD_RES (32)..(32): Selenocysteine
  MOD_RES (68)..(68): Selenocysteine
  MOD_RES (73)..(73): Selenocysteine
  MOD_RES (96)..(96): Selenocysteine
  MOD_RES (126)..(126): Selenocysteine
  MOD_RES (133)..(133): Selenocysteine
  MOD_RES (175)..(175): Selenocysteine
  MOD_RES (207)..(207): Selenocysteine
  MOD_RES (209)..(209): Selenocysteine
  MOD_RES (223)..(224): Selenocysteine
MADKVRRQRPRRRVCWALVAVLLADLLALSDXLAVMSVDLGSESMKVAIVKPGVPMEIVLNKESRRKXPVIVXLKENERFFGDSAASMAIKNPKAXLRYFQHLLGKQADNPHVALYQARFPEHELXFDPQRQXVHFQISSQLQFSPEEVLGMVLNYSRSLAEDFAEQPIKDAVIXVPVFFNQAERRAVLQAARMAGLKVLQLINDNXAXALSYGVFRRKDINXX

SEQ ID NO: 12809 - protein, 656 aa, Homo sapiens
  MOD_RES (32)..(32): Selenocysteine
  MOD_RES (68)..(68): Selenocysteine
  MOD_RES (73)..(73): Selenocysteine
  MOD_RES (96)..(96): Selenocysteine
  MOD_RES (126)..(126): Selenocysteine
  MOD_RES (133)..(133): Selenocysteine
  MOD_RES (175)..(175): Selenocysteine
  MOD_RES (207)..(207): Selenocysteine
  MOD_RES (209)..(209): Selenocysteine
  MOD_RES (223)..(224): Selenocysteine
  MOD_RES (238)..(238): Selenocysteine
  MOD_RES (241)..(241): Selenocysteine
  MOD_RES (244)..(244): Selenocysteine
  MOD_RES (250)..(250): Selenocysteine
  MOD_RES (269)..(269): Selenocysteine
  MOD_RES (318)..(318): Selenocysteine
  MOD_RES (344)..(344): Selenocysteine
  MOD_RES (387)..(387): Selenocysteine
  MOD_RES (450)..(450): Selenocysteine
  MOD_RES (483)..(483): Selenocysteine
  MOD_RES (517)..(518): Selenocysteine
  MOD_RES (562)..(562): Selenocysteine
  MOD_RES (573)..(573): Selenocysteine
  MOD_RES (575)..(575): Selenocysteine
  MOD_RES (580)..(580): Selenocysteine
  MOD_RES (589)..(590): Selenocysteine
  MOD_RES (598)..(598): Selenocysteine
  MOD_RES (600)..(600): Selenocysteine
  MOD_RES (646)..(646): Selenocysteine
  MOD_RES (653)..(653): Selenocysteine
MADKVRRQRPRRRVCWALVAVLLADLLALSDXLAVMSVDLGSESMKVAIVKPGVPMEIVLNKESRRKXPVIVXLKENERFFGDSAASMAIKNPKAXLRYFQHLLGKQADNPHVALYQARFPEHELXFDPQRQXVHFQISSQLQFSPEEVLGMVLNYSRSLAEDFAEQPIKDAVIXVPVFFNQAERRAVLQAARMAGLKVLQLINDNXAXALSYGVFRRKDINXXAQNIMFYDMGSGSXVCXIVXYQMVKXKEAGMQPQLQIRGVGFDRXLGGLEMELRLRERLAGLFNEQRKGQRAKDVRENPRAMAKLLREANRLKXVLSANADHMAQIEGLMDDVDFKAKVXRVEFEELCADLFERVPGPVQQALQSAEMSLDEIEQVILVGGAXRVPRVQEVLLKAVGKEELGKNINADEAAAMGAVYQAAALSKAFKVKPFVVRDAVVYPILVEFXREVEEEPGIHSLKHNKRVLFSRMGPYPQRKVIXFNRYSHDFNFHINYGDLGFLGPEDLRVFGSQNLXXVKLKGVGDSFKKYPDYESKGIKAHFNLDESGVLSLDRVESVFEXLVEDSAEEESXLXKLGNXISSLFGGGXXPDAKENGXDXVQEEEESPAEGSKDEPGEQVELKEEAEAPVEDGSQPPPPEPKGDAXPEGEKAXEKE

SEQ ID NO: 12810 - protein, 677 aa, Homo sapiens
  MOD_RES (32)..(32): Selenocysteine
  MOD_RES (68)..(68): Selenocysteine
  MOD_RES (73)..(73): Selenocysteine
  MOD_RES (96)..(96): Selenocysteine
  MOD_RES (126)..(126): Selenocysteine
  MOD_RES (133)..(133): Selenocysteine
  MOD_RES (175)..(175): Selenocysteine
  MOD_RES (207)..(207): Selenocysteine
  MOD_RES (209)..(209): Selenocysteine
  MOD_RES (223)..(224): Selenocysteine
  MOD_RES (238)..(238): Selenocysteine
  MOD_RES (241)..(241): Selenocysteine
  MOD_RES (244)..(244): Selenocysteine
  MOD_RES (250)..(250): Selenocysteine
  MOD_RES (269)..(269): Selenocysteine
  MOD_RES (318)..(318): Selenocysteine
  MOD_RES (344)..(344): Selenocysteine
  MOD_RES (387)..(387): Selenocysteine
  MOD_RES (450)..(450): Selenocysteine
  MOD_RES (483)..(483): Selenocysteine
  MOD_RES (517)..(518): Selenocysteine
  MOD_RES (562)..(562): Selenocysteine
  MOD_RES (573)..(573): Selenocysteine
  MOD_RES (575)..(575): Selenocysteine
  MOD_RES (580)..(580): Selenocysteine
  MOD_RES (589)..(590): Selenocysteine
  MOD_RES (598)..(598): Selenocysteine
  MOD_RES (600)..(600): Selenocysteine
  MOD_RES (646)..(646): Selenocysteine
  MOD_RES (653)..(653): Selenocysteine
  MOD_RES (673)..(673): Selenocysteine
MADKVRRQRPRRRVCWALVAVLLADLLALSDXLAVMSVDLGSESMKVAIVKPGVPMEIVLNKESRRKXPVIVXLKENERFFGDSAASMAIKNPKAXLRYFQHLLGKQADNPHVALYQARFPEHELXFDPQRQXVHFQISSQLQFSPEEVLGMVLNYSRSLAEDFAEQPIKDAVIXVPVFFNQAERRAVLQAARMAGLKVLQLINDNXAXALSYGVFRRKDINXXAQNIMFYDMGSGSXVCXIVXYQMVKXKEAGMQPQLQIRGVGFDRXLGGLEMELRLRERLAGLFNEQRKGQRAKDVRENPRAMAKLLREANRLKXVLSANADHMAQIEGLMDDVDFKAKVXRVEFEELCADLFERVPGPVQQALQSAEMSLDEIEQVILVGGAXRVPRVQEVLLKAVGKEELGKNINADEAAAMGAVYQAAALSKAFKVKPFVVRDAVVYPILVEFXREVEEEPGIHSLKHNKRVLFSRMGPYPQRKVIXFNRYSHDFNFHINYGDLGFLGPEDLRVFGSQNLXXVKLKGVGDSFKKYPDYESKGIKAHFNLDESGVLSLDRVESVFEXLVEDSAEEESXLXKLGNXISSLFGGGXXPDAKENGXDXVQEEEESPAEGSKDEPGEQVELKEEAEAPVEDGSQPPPPEPKGDAXPEGEKAXEKENGDKSEAQASVCRASVXRFGF

SEQ ID NO: 12811 - protein, 678 aa, Homo sapiens
  MOD_RES (32)..(32): Selenocysteine
  MOD_RES (68)..(68): Selenocysteine
  MOD_RES (73)..(73): Selenocysteine
  MOD_RES (96)..(96): Selenocysteine
  MOD_RES (126)..(126): Selenocysteine
  MOD_RES (133)..(133): Selenocysteine
  MOD_RES (175)..(175): Selenocysteine
  MOD_RES (207)..(207): Selenocysteine
  MOD_RES (209)..(209): Selenocysteine
  MOD_RES (223)..(224): Selenocysteine
  MOD_RES (238)..(238): Selenocysteine
  MOD_RES (241)..(241): Selenocysteine
  MOD_RES (244)..(244): Selenocysteine
  MOD_RES (250)..(250): Selenocysteine
  MOD_RES (269)..(269): Selenocysteine
  MOD_RES (318)..(318): Selenocysteine
  MOD_RES (344)..(344): Selenocysteine
  MOD_RES (387)..(387): Selenocysteine
  MOD_RES (450)..(450): Selenocysteine
  MOD_RES (483)..(483): Selenocysteine
  MOD_RES (517)..(518): Selenocysteine
  MOD_RES (562)..(562): Selenocysteine
  MOD_RES (573)..(573): Selenocysteine
  MOD_RES (575)..(575): Selenocysteine
  MOD_RES (580)..(580): Selenocysteine
  MOD_RES (589)..(590): Selenocysteine
  MOD_RES (598)..(598): Selenocysteine
  MOD_RES (600)..(600): Selenocysteine
  MOD_RES (646)..(646): Selenocysteine
  MOD_RES (653)..(653): Selenocysteine
  MOD_RES (674)..(674): Selenocysteine
MADKVRRQRPRRRVCWALVAVLLADLLALSDXLAVMSVDLGSESMKVAIVKPGVPMEIVLNKESRRKXPVIVXLKENERFFGDSAASMAIKNPKAXLRYFQHLLGKQADNPHVALYQARFPEHELXFDPQRQXVHFQISSQLQFSPEEVLGMVLNYSRSLAEDFAEQPIKDAVIXVPVFFNQAERRAVLQAARMAGLKVLQLINDNXAXALSYGVFRRKDINXXAQNIMFYDMGSGSXVCXIVXYQMVKXKEAGMQPQLQIRGVGFDRXLGGLEMELRLRERLAGLFNEQRKGQRAKDVRENPRAMAKLLREANRLKXVLSANADHMAQIEGLMDDVDFKAKVXRVEFEELCADLFERVPGPVQQALQSAEMSLDEIEQVILVGGAXRVPRVQEVLLKAVGKEELGKNINADEAAAMGAVYQAAALSKAFKVKPFVVRDAVVYPILVEFXREVEEEPGIHSLKHNKRVLFSRMGPYPQRKVIXFNRYSHDFNFHINYGDLGFLGPEDLRVFGSQNLXXVKLKGVGDSFKKYPDYESKGIKAHFNLDESGVLSLDRVESVFEXLVEDSAEEESXLXKLGNXISSLFGGGXXPDAKENGXDXVQEEEESPAEGSKDEPGEQVELKEEAEAPVEDGSQPPPPEPKGDAXPEGEKAXEKENGDKSEAQKPVVCRASVXRFGF

SEQ ID NO: 12812 - protein, 937 aa, Homo sapiens
  MOD_RES (32)..(32): Selenocysteine
  MOD_RES (68)..(68): Selenocysteine
  MOD_RES (73)..(73): Selenocysteine
  MOD_RES (96)..(96): Selenocysteine
  MOD_RES (126)..(126): Selenocysteine
  MOD_RES (133)..(133): Selenocysteine
  MOD_RES (175)..(175): Selenocysteine
  MOD_RES (207)..(207): Selenocysteine
  MOD_RES (209)..(209): Selenocysteine
  MOD_RES (223)..(224): Selenocysteine
  MOD_RES (238)..(238): Selenocysteine
  MOD_RES (241)..(241): Selenocysteine
  MOD_RES (244)..(244): Selenocysteine
  MOD_RES (250)..(250): Selenocysteine
  MOD_RES (269)..(269): Selenocysteine
  MOD_RES (318)..(318): Selenocysteine
  MOD_RES (344)..(344): Selenocysteine
  MOD_RES (387)..(387): Selenocysteine
  MOD_RES (450)..(450): Selenocysteine
  MOD_RES (483)..(483): Selenocysteine
  MOD_RES (517)..(518): Selenocysteine
  MOD_RES (562)..(562): Selenocysteine
  MOD_RES (573)..(573): Selenocysteine
  MOD_RES (575)..(575): Selenocysteine
  MOD_RES (580)..(580): Selenocysteine
  MOD_RES (589)..(590): Selenocysteine
  MOD_RES (598)..(598): Selenocysteine
  MOD_RES (600)..(600): Selenocysteine
  MOD_RES (665)..(665): Selenocysteine
  MOD_RES (688)..(688): Selenocysteine
  MOD_RES (702)..(702): Selenocysteine
  MOD_RES (718)..(718): Selenocysteine
  MOD_RES (728)..(729): Selenocysteine
  MOD_RES (788)..(788): Selenocysteine
  MOD_RES (793)..(794): Selenocysteine
  MOD_RES (802)..(802): Selenocysteine
  MOD_RES (809)..(809): Selenocysteine
  MOD_RES (819)..(819): Selenocysteine
  MOD_RES (850)..(850): Selenocysteine
  MOD_RES (862)..(862): Selenocysteine
  MOD_RES (886)..(886): Selenocysteine
  MOD_RES (900)..(900): Selenocysteine
  MOD_RES (907)..(907): Selenocysteine
  MOD_RES (926)..(926): Selenocysteine
MADKVRRQRPRRRVCWALVAVLLADLLALSDXLAVMSVDLGSESMKVAIVKPGVPMEIVLNKESRRKXPVIVXLKENERFFGDSAASMAIKNPKAXLRYFQHLLGKQADNPHVALYQARFPEHELXFDPQRQXVHFQISSQLQFSPEEVLGMVLNYSRSLAEDFAEQPIKDAVIXVPVFFNQAERRAVLQAARMAGLKVLQLINDNXAXALSYGVFRRKDINXXAQNIMFYDMGSGSXVCXIVXYQMVKXKEAGMQPQLQIRGVGFDRXLGGLEMELRLRERLAGLFNEQRKGQRAKDVRENPRAMAKLLREANRLKXVLSANADHMAQIEGLMDDVDFKAKVXRVEFEELCADLFERVPGPVQQALQSAEMSLDEIEQVILVGGAXRVPRVQEVLLKAVGKEELGKNINADEAAAMGAVYQAAALSKAFKVKPFVVRDAVVYPILVEFXREVEEEPGIHSLKHNKRVLFSRMGPYPQRKVIXFNRYSHDFNFHINYGDLGFLGPEDLRVFGSQNLXXVKLKGVGDSFKKYPDYESKGIKAHFNLDESGVLSLDRVESVFEXLVEDSAEEESXLXKLGNXISSLFGGGXXPDAKENGXDXVQKPSEKAEAGPEGVAPAPEGEKKQKPARKRRMVEEIGVELVVLDLPDLPEDKLAQSVQKLQDLXLRDLEKQEREKAANSLEAFIFEXQDKLYQPEYQEVSXEEQREEISGKLSAASXWLEDEGVGAXXVMLKEKLAELRKLCQGLFFRVEERKKWPERLSALDNLLNHSSMFLKGARLIPEMDQIFXEVEMXXLEKVINEXWAWKNAXLAEQAKLPAXEKPVLLSKDIEAKMMALDREVQYLLNKAKFXKPRPRPKDKNGXRAEPPLNASASDQGEKVIPPAGQXEDAEPISEPEKVEXGSEPGDXEPLELGGPGAEPEQKEQSXGQKRPLKNDEL

SEQ ID NO: 12813 - protein, 999 aa, Homo sapiens
  MOD_RES (32)..(32): Selenocysteine
  MOD_RES (68)..(68): Selenocysteine
  MOD_RES (73)..(73): Selenocysteine
  MOD_RES (96)..(96): Selenocysteine
  MOD_RES (126)..(126): Selenocysteine
  MOD_RES (133)..(133): Selenocysteine
  MOD_RES (175)..(175): Selenocysteine
  MOD_RES (207)..(207): Selenocysteine
  MOD_RES (209)..(209): Selenocysteine
  MOD_RES (223)..(224): Selenocysteine
  MOD_RES (238)..(238): Selenocysteine
  MOD_RES (241)..(241): Selenocysteine
  MOD_RES (244)..(244): Selenocysteine
  MOD_RES (250)..(250): Selenocysteine
  MOD_RES (269)..(269): Selenocysteine
  MOD_RES (318)..(318): Selenocysteine
  MOD_RES (344)..(344): Selenocysteine
  MOD_RES (387)..(387): Selenocysteine
  MOD_RES (450)..(450): Selenocysteine
  MOD_RES (483)..(483): Selenocysteine
  MOD_RES (517)..(518): Selenocysteine
  MOD_RES (562)..(562): Selenocysteine
  MOD_RES (573)..(573): Selenocysteine
  MOD_RES (575)..(575): Selenocysteine
  MOD_RES (580)..(580): Selenocysteine
  MOD_RES (589)..(590): Selenocysteine
  MOD_RES (598)..(598): Selenocysteine
  MOD_RES (600)..(600): Selenocysteine
  MOD_RES (646)..(646): Selenocysteine
  MOD_RES (653)..(653): Selenocysteine
  MOD_RES (727)..(727): Selenocysteine
  MOD_RES (750)..(750): Selenocysteine
  MOD_RES (764)..(764): Selenocysteine
  MOD_RES (780)..(780): Selenocysteine
  MOD_RES (790)..(791): Selenocysteine
  MOD_RES (850)..(850): Selenocysteine
  MOD_RES (855)..(856): Selenocysteine
  MOD_RES (864)..(864): Selenocysteine
  MOD_RES (871)..(871): Selenocysteine
  MOD_RES (881)..(881): Selenocysteine
  MOD_RES (912)..(912): Selenocysteine
  MOD_RES (924)..(924): Selenocysteine
  MOD_RES (948)..(948): Selenocysteine
  MOD_RES (962)..(962): Selenocysteine
  MOD_RES (969)..(969): Selenocysteine
  MOD_RES (988)..(988): Selenocysteine
MADKVRRQRPRRRVCWALVAVLLADLLALSDXLAVMSVDLGSESMKVAIVKPGVPMEIVLNKESRRKXPVIVXLKENERFFGDSAASMAIKNPKAXLRYFQHLLGKQADNPHVALYQARFPEHELXFDPQRQXVHFQISSQLQFSPEEVLGMVLNYSRSLAEDFAEQPIKDAVIXVPVFFNQAERRAVLQAARMAGLKVLQLINDNXAXALSYGVFRRKDINXXAQNIMFYDMGSGSXVCXIVXYQMVKXKEAGMQPQLQIRGVGFDRXLGGLEMELRLRERLAGLFNEQRKGQRAKDVRENPRAMAKLLREANRLKXVLSANADHMAQIEGLMDDVDFKAKVXRVEFEELCADLFERVPGPVQQALQSAEMSLDEIEQVILVGGAXRVPRVQEVLLKAVGKEELGKNINADEAAAMGAVYQAAALSKAFKVKPFVVRDAVVYPILVEFXREVEEEPGIHSLKHNKRVLFSRMGPYPQRKVIXFNRYSHDFNFHINYGDLGFLGPEDLRVFGSQNLXXVKLKGVGDSFKKYPDYESKGIKAHFNLDESGVLSLDRVESVFEXLVEDSAEEESXLXKLGNXISSLFGGGXXPDAKENGXDXVQEEEESPAEGSKDEPGEQVELKEEAEAPVEDGSQPPPPEPKGDAXPEGEKAXEKENGDKSEAQKPSEKAEAGPEGVAPAPEGEKKQKPARKRRMVEEIGVELVVLDLPDLPEDKLAQSVQKLQDLXLRDLEKQEREKAANSLEAFIFEXQDKLYQPEYQEVSXEEQREEISGKLSAASXWLEDEGVGAXXVMLKEKLAELRKLCQGLFFRVEERKKWPERLSALDNLLNHSSMFLKGARLIPEMDQIFXEVEMXXLEKVINEXWAWKNAXLAEQAKLPAXEKPVLLSKDIEAKMMALDREVQYLLNKAKFXKPRPRPKDKNGXRAEPPLNASASDQGEKVIPPAGQXEDAEPISEPEKVEXGSEPGDXEPLELGGPGAEPEQKEQSXGQKRPLKNDEL

SEQ ID NO: 12814 - protein, 147 aa, Homo sapiens
  MOD_RES (32)..(32): Selenocysteine
  MOD_RES (68)..(68): Selenocysteine
  MOD_RES (73)..(73): Selenocysteine
  MOD_RES (96)..(96): Selenocysteine
  MOD_RES (126)..(126): Selenocysteine
  MOD_RES (133)..(133): Selenocysteine
MADKVRRQRPRRRVCWALVAVLLADLLALSDXLAVMSVDLGSESMKVAIVKPGVPMEIVLNKESRRKXPVIVXLKENERFFGDSAASMAIKNPKAXLRYFQHLLGKQADNPHVALYQARFPEHELXFDPQRQXVHFQISSQLQFSPL

SEQ ID NO: 12815 - protein, 38 aa, Homo sapiens
MADKVRRQRPRRRVCWALVAVLLADLLALSGNLGGKHR

SEQ ID NO: 12816 - protein, 79 aa, Homo sapiens
  MOD_RES (23)..(23): Selenocysteine
  MOD_RES (67)..(67): Selenocysteine
MGILKLQVFLIVLSVALNHLKAXPIERQEWIIPVLSRNILLELRGAKPEHEAGKKSKVIRWKSGNAXLPHVQRSAWQIF

SEQ ID NO: 12817 - protein, 79 aa, Homo sapiens
  MOD_RES (23)..(23): Selenocysteine
  MOD_RES (37)..(37): Selenocysteine
  MOD_RES (39)..(39): Selenocysteine
  MOD_RES (42)..(42): Selenocysteine
  MOD_RES (63)..(63): Selenocysteine
  MOD_RES (69)..(69): Selenocysteine
MGILKLQVFLIVLSVALNHLKAXPIESHQVEKRKCNXAXCAXQRLANFLVHSSNNFGAILSSXNVGSNXYGKRNAVEVL

SEQ ID NO: 12818 - protein, 89 aa, Homo sapiens
  MOD_RES (23)..(23): Selenocysteine
  MOD_RES (37)..(37): Selenocysteine
  MOD_RES (39)..(39): Selenocysteine
  MOD_RES (42)..(42): Selenocysteine
  MOD_RES (63)..(63): Selenocysteine
  MOD_RES (69)..(69): Selenocysteine
MGILKLQVFLIVLSVALNHLKAXPIESHQVEKRKCNXAXCAXQRLANFLVHSSNNFGAILSSXNVGSNXYGKRNAVEVLKREPLNYLPL

SEQ ID NO: 12819 - protein, 85 aa, Homo sapiens
  MOD_RES (1)..(1): Any amino acid
  MOD_RES (5)..(5): Selenocysteine
  MOD_RES (18)..(18): Selenocysteine
  MOD_RES (33)..(33): Selenocysteine
  MOD_RES (35)..(35): Selenocysteine
  MOD_RES (38)..(38): Selenocysteine
  MOD_RES (59)..(59): Selenocysteine
  MOD_RES (65)..(65): Selenocysteine
XLKAXPIERCLDQIPIFXVFQENHQVEKRKCNXAXCAXQRLANFLVHSSNNFGAILSSXNVGSNXYGKRNAVEVLKREPLNYLPL

SEQ ID NO: 12820 - protein, 180 aa, Homo sapiens
  MOD_RES (29)..(29): Selenocysteine
  MOD_RES (47)..(47): Selenocysteine
  MOD_RES (50)..(50): Selenocysteine
  MOD_RES (62)..(62): Selenocysteine
  MOD_RES (102)..(102): Selenocysteine
  MOD_RES (105)..(105): Selenocysteine
  MOD_RES (108)..(108): Selenocysteine
  MOD_RES (112)..(112): Selenocysteine
  MOD_RES (126)..(126): Selenocysteine
  MOD_RES (149)..(151): Selenocysteine
  MOD_RES (167)..(167): Selenocysteine
MAPSSPRPALPALLVLLGALFPGPGNAQXSVSPSKVILPRGGSVLVXCSXSCDQPKLLGIEXPLPKKELLLPGNNRKVYELSNVQEDSQPMCYSNCPDGQSXAKXFLXVYWXPERVEGGAPRANLXVVLLRGEKELKREPAVGEPAEVXXXVLVRRDHHGANFSCRXELDLRPQGLELFE

SEQ ID NO: 12821 - protein, 532 aa, Homo sapiens
  MOD_RES (29)..(29): Selenocysteine
  MOD_RES (47)..(47): Selenocysteine
  MOD_RES (50)..(50): Selenocysteine
  MOD_RES (62)..(62): Selenocysteine
  MOD_RES (102)..(102): Selenocysteine
  MOD_RES (105)..(105): Selenocysteine
  MOD_RES (108)..(108): Selenocysteine
  MOD_RES (112)..(112): Selenocysteine
  MOD_RES (132)..(132): Selenocysteine
  MOD_RES (147)..(147): Selenocysteine
  MOD_RES (170)..(172): Selenocysteine
  MOD_RES (188)..(188): Selenocysteine
  MOD_RES (203)..(203): Selenocysteine
  MOD_RES (211)..(211): Selenocysteine
  MOD_RES (217)..(217): Selenocysteine
  MOD_RES (231)..(231): Selenocysteine
  MOD_RES (234)..(234): Selenocysteine
  MOD_RES (262)..(262): Selenocysteine
  MOD_RES (264)..(264): Selenocysteine
  MOD_RES (279)..(279): Selenocysteine
  MOD_RES (285)..(285): Selenocysteine
  MOD_RES (289)..(289): Selenocysteine
  MOD_RES (301)..(301): Selenocysteine
  MOD_RES (304)..(304): Selenocysteine
  MOD_RES (306)..(306): Selenocysteine
  MOD_RES (318)..(318): Selenocysteine
  MOD_RES (326)..(326): Selenocysteine
  MOD_RES (329)..(329): Selenocysteine
  MOD_RES (341)..(341): Selenocysteine
  MOD_RES (361)..(361): Selenocysteine
  MOD_RES (374)..(374): Selenocysteine
  MOD_RES (387)..(387): Selenocysteine
  MOD_RES (408)..(408): Selenocysteine
  MOD_RES (416)..(416): Selenocysteine
  MOD_RES (436)..(436): Selenocysteine
  MOD_RES (446)..(446): Selenocysteine
  MOD_RES (448)..(448): Selenocysteine
  MOD_RES (454)..(454): Selenocysteine
  MOD_RES (462)..(462): Selenocysteine
  MOD_RES (467)..(467): Selenocysteine
  MOD_RES (471)..(471): Selenocysteine
  MOD_RES (485)..(485): Selenocysteine
  MOD_RES (495)..(495): Selenocysteine
  MOD_RES (500)..(500): Selenocysteine
  MOD_RES (521)..(521): Selenocysteine
  MOD_RES (527)..(527): Selenocysteine
  MOD_RES (530)..(530): Selenocysteine
MAPSSPRPALPALLVLLGALFPGPGNAQXSVSPSKVILPRGGSVLVXCSXSCDQPKLLGIEXPLPKKELLLPGNNRKVYELSNVQEDSQPMCYSNCPDGQSXAKXFLXVYWXPERVELAPLPSWQPVGKNLXLRCQVEGGAPRANLXVVLLRGEKELKREPAVGEPAEVXXXVLVRRDHHGANFSCRXELDLRPQGLELFENXSAPYQLQXFVLPAXPPQLVSPRVLEVDXQGXVVCSLDGLFPVSEAQVHLALGDQRLNPXVXYGNDSFSAKASVSVXAEDEGXQRLXCAVILGNQSQEXLQXVXIYSFPAPNVILXKPEVSEGXEVXVKCEAHPRAKVXLNGVPAQPLGPRAQLLLKAXPEDNGRSFSCSAXLEVAGQLIHKNQXRELRVLYGPRLDERDCPGNWXWPENSQQXPMCQAWGNPLPELKCLKDGXFPLPIGESVXVXRDLEGXYLCRARSXQGEVXRKVXVNVLSPRYEIVIIXVVAAAVIMGXAGLSXYLYNRQRKIKKYRLQQAQKGXPMKPNXQAXPP

SEQ ID NO: 12822 - protein, 310 aa, Homo sapiens
  MOD_RES (40)..(40): Selenocysteine
  MOD_RES (42)..(42): Selenocysteine
  MOD_RES (57)..(57): Selenocysteine
  MOD_RES (63)..(63): Selenocysteine
  MOD_RES (67)..(67): Selenocysteine
  MOD_RES (79)..(79): Selenocysteine
  MOD_RES (82)..(82): Selenocysteine
  MOD_RES (84)..(84): Selenocysteine
  MOD_RES (96)..(96): Selenocysteine
  MOD_RES (104)..(104): Selenocysteine
  MOD_RES (107)..(107): Selenocysteine
  MOD_RES (119)..(119): Selenocysteine
  MOD_RES (139)..(139): Selenocysteine
  MOD_RES (152)..(152): Selenocysteine
  MOD_RES (165)..(165): Selenocysteine
  MOD_RES (186)..(186): Selenocysteine
  MOD_RES (194)..(194): Selenocysteine
  MOD_RES (214)..(214): Selenocysteine
  MOD_RES (224)..(224): Selenocysteine
  MOD_RES (226)..(226): Selenocysteine
  MOD_RES (232)..(232): Selenocysteine
  MOD_RES (240)..(240): Selenocysteine
  MOD_RES (245)..(245): Selenocysteine
  MOD_RES (249)..(249): Selenocysteine
  MOD_RES (263)..(263): Selenocysteine
  MOD_RES (273)..(273): Selenocysteine
  MOD_RES (278)..(278): Selenocysteine
  MOD_RES (299)..(299): Selenocysteine
  MOD_RES (305)..(305): Selenocysteine
  MOD_RES (308)..(308): Selenocysteine
MAPSSPRPALPALLVLLGALFPVSEAQVHLALGDQRLNPXVXYGNDSFSAKASVSVXAEDEGXQRLXCAVILGNQSQEXLQXVXIYSFPAPNVILXKPEVSEGXEVXVKCEAHPRAKVXLNGVPAQPLGPRAQLLLKAXPEDNGRSFSCSAXLEVAGQLIHKNQXRELRVLYGPRLDERDCPGNWXWPENSQQXPMCQAWGNPLPELKCLKDGXFPLPIGESVXVXRDLEGXYLCRARSXQGEVXRKVXVNVLSPRYEIVIIXVVAAAVIMGXAGLSXYLYNRQRKIKKYRLQQAQKGXPMKPNXQAXPP

SEQ ID NO: 12823 - protein, 174 aa, Homo sapiens
  MOD_RES (17)..(17): Selenocysteine
  MOD_RES (21)..(21): Selenocysteine
  MOD_RES (30)..(30): Selenocysteine
  MOD_RES (37)..(37): Selenocysteine
  MOD_RES (45)..(45): Selenocysteine
  MOD_RES (54)..(54): Selenocysteine
  MOD_RES (59)..(59): Selenocysteine
  MOD_RES (71)..(71): Selenocysteine
  MOD_RES (73)..(73): Selenocysteine
  MOD_RES (77)..(77): Selenocysteine
  MOD_RES (128)..(128): Selenocysteine
  MOD_RES (139)..(139): Selenocysteine
  MOD_RES (158)..(158): Selenocysteine
MNSNVSVYQPPRQVILXLQPXLVAVGKSFXIECRVPXVEPLDSLXLFLFRGNEXLHYEXFGKAAPAPQEAXAXFNSXADREDGHRNFSCLAVLDLMSRGGNIFHKHSAPKMLEIYEPVSDSQMVIIVXVVSVLLSLFVXSVLLCFIFGQHLRQQRMGXYGVRAAWRRLPQAFRP

SEQ ID NO: 12824 - protein, 251 aa, Homo sapiens
  MOD_RES (8)..(8): Selenocysteine
  MOD_RES (10)..(10): Selenocysteine
  MOD_RES (15)..(15): Selenocysteine
  MOD_RES (38)..(38): Selenocysteine
  MOD_RES (63)..(63): Selenocysteine
  MOD_RES (70)..(70): Selenocysteine
  MOD_RES (94)..(94): Selenocysteine
  MOD_RES (98)..(98): Selenocysteine
  MOD_RES (107)..(107): Selenocysteine
  MOD_RES (114)..(114): Selenocysteine
  MOD_RES (122)..(122): Selenocysteine
  MOD_RES (131)..(131): Selenocysteine
  MOD_RES (136)..(136): Selenocysteine
  MOD_RES (148)..(148): Selenocysteine
  MOD_RES (150)..(150): Selenocysteine
  MOD_RES (154)..(154): Selenocysteine
  MOD_RES (205)..(205): Selenocysteine
  MOD_RES (216)..(216): Selenocysteine
  MOD_RES (235)..(235): Selenocysteine
MSSFGYRXLXVALFXLICCPGSDEKVFEVHVRPKKLAXSLDKILLDEQAQWKHYLVSNISHDXVLQCHFXCSGKQESMNSNVSVYQPPRQVILXLQPXLVAVGKSFXIECRVPXVEPLDSLXLFLFRGNEXLHYEXFGKAAPAPQEAXAXFNSXADREDGHRNFSCLAVLDLMSRGGNIFHKHSAPKMLEIYEPVSDSQMVIIVXVVSVLLSLFVXSVLLCFIFGQHLRQQRMGXYGVRAAWRRLPQAFRP

SEQ ID NO: 12825 - protein, 167 aa, Homo sapiens
  MOD_RES (8)..(8): Selenocysteine
  MOD_RES (10)..(10): Selenocysteine
  MOD_RES (15)..(15): Selenocysteine
  MOD_RES (50)..(51): Selenocysteine
  MOD_RES (62)..(62): Selenocysteine
  MOD_RES (87)..(87): Selenocysteine
  MOD_RES (94)..(94): Selenocysteine
  MOD_RES (118)..(118): Selenocysteine
  MOD_RES (122)..(122): Selenocysteine
  MOD_RES (131)..(131): Selenocysteine
  MOD_RES (138)..(138): Selenocysteine
  MOD_RES (146)..(146): Selenocysteine
  MOD_RES (155)..(155): Selenocysteine
  MOD_RES (160)..(160): Selenocysteine
MSSFGYRXLXVALFXLICCPGSDEKVFEVHVRPKKLAVEPKGSLEVNCSXXCNQPEVGGLEXSLDKILLDEQAQWKHYLVSNISHDXVLQCHFXCSGKQESMNSNVSVYQPPRQVILXLQPXLVAVGKSFXIECRVPXVEPLDSLXLFLFRGNEXLHYEXFGKAAPA

SEQ ID NO: 12826 - protein, 214 aa, Homo sapiens
  MOD_RES (8)..(8): Selenocysteine
  MOD_RES (10)..(10): Selenocysteine
  MOD_RES (15)..(15): Selenocysteine
  MOD_RES (50)..(51): Selenocysteine
  MOD_RES (62)..(62): Selenocysteine
  MOD_RES (87)..(87): Selenocysteine
  MOD_RES (94)..(94): Selenocysteine
  MOD_RES (118)..(118): Selenocysteine
  MOD_RES (122)..(122): Selenocysteine
  MOD_RES (131)..(131): Selenocysteine
  MOD_RES (138)..(138): Selenocysteine
  MOD_RES (146)..(146): Selenocysteine
  MOD_RES (155)..(155): Selenocysteine
  MOD_RES (160)..(160): Selenocysteine
  MOD_RES (172)..(172): Selenocysteine
  MOD_RES (174)..(174): Selenocysteine
  MOD_RES (178)..(178): Selenocysteine
MSSFGYRXLXVALFXLICCPGSDEKVFEVHVRPKKLAVEPKGSLEVNCSXXCNQPEVGGLEXSLDKILLDEQAQWKHYLVSNISHDXVLQCHFXCSGKQESMNSNVSVYQPPRQVILXLQPXLVAVGKSFXIECRVPXVEPLDSLXLFLFRGNEXLHYEXFGKAAPAPQEAXAXFNSXADREDGHRNFSCLAVLDLMSRGGNIFHKHSAPKMLE

SEQ ID NO: 12827 - protein, 216 aa, Homo sapiens
  MOD_RES (8)..(8): Selenocysteine
  MOD_RES (10)..(10): Selenocysteine
  MOD_RES (15)..(15): Selenocysteine
  MOD_RES (50)..(51): Selenocysteine
  MOD_RES (62)..(62): Selenocysteine
  MOD_RES (87)..(87): Selenocysteine
  MOD_RES (94)..(94): Selenocysteine
  MOD_RES (118)..(118): Selenocysteine
  MOD_RES (122)..(122): Selenocysteine
  MOD_RES (131)..(131): Selenocysteine
  MOD_RES (138)..(138): Selenocysteine
  MOD_RES (146)..(146): Selenocysteine
  MOD_RES (155)..(155): Selenocysteine
  MOD_RES (160)..(160): Selenocysteine
  MOD_RES (172)..(172): Selenocysteine
  MOD_RES (174)..(174): Selenocysteine
  MOD_RES (178)..(178): Selenocysteine
MSSFGYRXLXVALFXLICCPGSDEKVFEVHVRPKKLAVEPKGSLEVNCSXXCNQPEVGGLEXSLDKILLDEQAQWKHYLVSNISHDXVLQCHFXCSGKQESMNSNVSVYQPPRQVILXLQPXLVAVGKSFXIECRVPXVEPLDSLXLFLFRGNEXLHYEXFGKAAPAPQEAXAXFNSXADREDGHRNFSCLAVLDLMSRGGNIFHKHSAPKMLEIY

SEQ ID NO: 12828 - protein, 275 aa, Homo sapiens
  MOD_RES (8)..(8): Selenocysteine
  MOD_RES (10)..(10): Selenocysteine
  MOD_RES (15)..(15): Selenocysteine
  MOD_RES (50)..(51): Selenocysteine
  MOD_RES (62)..(62): Selenocysteine
  MOD_RES (87)..(87): Selenocysteine
  MOD_RES (94)..(94): Selenocysteine
  MOD_RES (118)..(118): Selenocysteine
  MOD_RES (122)..(122): Selenocysteine
  MOD_RES (131)..(131): Selenocysteine
  MOD_RES (138)..(138): Selenocysteine
  MOD_RES (146)..(146): Selenocysteine
  MOD_RES (155)..(155): Selenocysteine
  MOD_RES (160)..(160): Selenocysteine
  MOD_RES (172)..(172): Selenocysteine
  MOD_RES (174)..(174): Selenocysteine
  MOD_RES (178)..(178): Selenocysteine
  MOD_RES (229)..(229): Selenocysteine
  MOD_RES (240)..(240): Selenocysteine
  MOD_RES (259)..(259): Selenocysteine
MSSFGYRXLXVALFXLICCPGSDEKVFEVHVRPKKLAVEPKGSLEVNCSXXCNQPEVGGLEXSLDKILLDEQAQWKHYLVSNISHDXVLQCHFXCSGKQESMNSNVSVYQPPRQVILXLQPXLVAVGKSFXIECRVPXVEPLDSLXLFLFRGNEXLHYEXFGKAAPAPQEAXAXFNSXADREDGHRNFSCLAVLDLMSRGGNIFHKHSAPKMLEIYEPVSDSQMVIIVXVVSVLLSLFVXSVLLCFIFGQHLRQQRMGXYGVRAAWRRLPQAFRP

SEQ ID NO: 12829 - protein, 53 aa, Homo sapiens
  MOD_RES (8)..(8): Selenocysteine
  MOD_RES (10)..(10): Selenocysteine
  MOD_RES (15)..(15): Selenocysteine
  MOD_RES (40)..(40): Selenocysteine
  MOD_RES (42)..(42): Selenocysteine
MSSFGYRXLXVALFXLICCPGVNEFQRQRVPASKAGHPDXAXHFGGCGQVLHH

SEQ ID NO: 12830 - protein, 302 aa, Homo sapiens
  MOD_RES (10)..(10): Selenocysteine
  MOD_RES (25)..(25): Selenocysteine
  MOD_RES (33)..(33): Selenocysteine
  MOD_RES (39)..(39): Selenocysteine
  MOD_RES (53)..(53): Selenocysteine
  MOD_RES (60)..(60): Selenocysteine
  MOD_RES (84)..(84): Selenocysteine
  MOD_RES (91)..(91): Selenocysteine
  MOD_RES (93)..(93): Selenocysteine
  MOD_RES (95)..(95): Selenocysteine
  MOD_RES (97)..(97): Selenocysteine
  MOD_RES (99)..(99): Selenocysteine
  MOD_RES (118)..(118): Selenocysteine
  MOD_RES (124)..(124): Selenocysteine
  MOD_RES (126)..(126): Selenocysteine
  MOD_RES (138)..(138): Selenocysteine
  MOD_RES (158)..(158): Selenocysteine
  MOD_RES (171)..(171): Selenocysteine
  MOD_RES (199)..(199): Selenocysteine
  MOD_RES (210)..(210): Selenocysteine
  MOD_RES (248)..(248): Selenocysteine
  MOD_RES (252)..(252): Selenocysteine
  MOD_RES (265)..(265): Selenocysteine
  MOD_RES (289)..(289): Selenocysteine
  MOD_RES (294)..(294): Selenocysteine
DHGAPFSCRXELDMQPQGLGLFVNXSAPRQLRXFVLPVXPPRLVAPRFLEVEXSWPVDCXLDGLFPASEAQVYLALGDQMLNAXVMNHGDXLXAXAXAXARADQEGFLGPIVNLSEPXAHEGSXVXVSCMAGARVQVXLDGVPAAAPGQPAQLQLNAXESDDGRSFFCSAXLEVDGEFLHRNSSVQLRVLYGPKIDRAXCPQHLKWKDKXRHVLQCQARGNPYPELRCLKEGSSREVPVGIPFFVNVXHNGXYQCQASSSRGKYXLVVVMDIEAGSSHFVPVFVAVLLXLGVVXIVLALMYV

SEQ ID NO: 12831 - protein, 547 aa, Homo sapiens
  MOD_RES (3)..(3): Selenocysteine
  MOD_RES (16)..(16): Selenocysteine
  MOD_RES (24)..(24): Selenocysteine
  MOD_RES (55)..(55): Selenocysteine
  MOD_RES (67)..(67): Selenocysteine
  MOD_RES (89)..(89): Selenocysteine
  MOD_RES (106)..(106): Selenocysteine
  MOD_RES (112)..(112): Selenocysteine
  MOD_RES (136)..(136): Selenocysteine
  MOD_RES (148)..(148): Selenocysteine
  MOD_RES (151)..(151): Selenocysteine
  MOD_RES (174)..(174): Selenocysteine
  MOD_RES (176)..(176): Selenocysteine
  MOD_RES (192)..(192): Selenocysteine
  MOD_RES (207)..(207): Selenocysteine
  MOD_RES (215)..(215): Selenocysteine
  MOD_RES (221)..(221): Selenocysteine
  MOD_RES (235)..(235): Selenocysteine
  MOD_RES (242)..(242): Selenocysteine
  MOD_RES (266)..(266): Selenocysteine
  MOD_RES (273)..(273): Selenocysteine
  MOD_RES (275)..(275): Selenocysteine
  MOD_RES (277)..(277): Selenocysteine
  MOD_RES (279)..(279): Selenocysteine
  MOD_RES (281)..(281): Selenocysteine
  MOD_RES (297)..(297): Selenocysteine
  MOD_RES (310)..(310): Selenocysteine
  MOD_RES (325)..(325): Selenocysteine
  MOD_RES (331)..(331): Selenocysteine
  MOD_RES (333)..(333): Selenocysteine
  MOD_RES (345)..(345): Selenocysteine
  MOD_RES (365)..(365): Selenocysteine
  MOD_RES (378)..(378): Selenocysteine
  MOD_RES (406)..(406): Selenocysteine
  MOD_RES (417)..(417): Selenocysteine
  MOD_RES (455)..(455): Selenocysteine
  MOD_RES (459)..(459): Selenocysteine
  MOD_RES (472)..(472): Selenocysteine
  MOD_RES (496)..(496): Selenocysteine
  MOD_RES (501)..(501): Selenocysteine
  MOD_RES (526)..(526): Selenocysteine
  MOD_RES (531)..(531): Selenocysteine
  MOD_RES (536)..(536): Selenocysteine
MAXMVPSVLWPRACWXLLVCCLLXPGVQGQEFLLRVEPQNPVLSAGGSLFVNCSXDCPSSEKIALEXSLSKELVASGMGWAAFNLSNVXGNSRILCSVYCNGSQIXGSSNIXVYRLPERVELAPLPPWQPVGQNFXLRCQVEDGSPRXSLXVVLLRWEEELSRQPAVEEPAEVXAXVLASRDDHGAPFSCRXELDMQPQGLGLFVNXSAPRQLRXFVLPVXPPRLVAPRFLEVEXSWPVDCXLDGLFPASEAQVYLALGDQMLNAXVMNHGDXLXAXAXAXARADQEGAREIVCNVXLGGERREARENLXVFSFLGPIVNLSEPXAHEGSXVXVSCMAGARVQVXLDGVPAAAPGQPAQLQLNAXESDDGRSFFCSAXLEVDGEFLHRNSSVQLRVLYGPKIDRAXCPQHLKWKDKXRHVLQCQARGNPYPELRCLKEGSSREVPVGIPFFVNVXHNGXYQCQASSSRGKYXLVVVMDIEAGSSHFVPVFVAVLLXLGVVXIVLALMYVFREHQRSGSYHVREESXYLPLXSMQPXEAMGEEPSRAE

SEQ ID NO: 12832 - protein, 59 aa, Homo sapiens
  MOD_RES (3)..(3): Selenocysteine
  MOD_RES (16)..(16): Selenocysteine
  MOD_RES (24)..(24): Selenocysteine
  MOD_RES (59)..(59): Selenocysteine
MAXMVPSVLWPRACWXLLVCCLLXPVLIVPALRKSPWRRPYQRSWWPVAWAGQPSISAX

SEQ ID NO: 12833 - protein, 23 aa, Homo sapiens
  MOD_RES (12)..(12): Selenocysteine
MGWAAFNLSNVXGNSRILCSVYC

SEQ ID NO: 12834 - protein, 40 aa, Homo sapiens
  MOD_RES (12)..(12): Selenocysteine
  MOD_RES (29)..(29): Selenocysteine
  MOD_RES (35)..(35): Selenocysteine
MGWAAFNLSNVXGNSRILCSVYCNGSQIXGSSNIXVYRLP

SEQ ID NO: 12835 - protein, 470 aa, Homo sapiens
  MOD_RES (12)..(12): Selenocysteine
  MOD_RES (29)..(29): Selenocysteine
  MOD_RES (35)..(35): Selenocysteine
  MOD_RES (59)..(59): Selenocysteine
  MOD_RES (71)..(71): Selenocysteine
  MOD_RES (74)..(74): Selenocysteine
  MOD_RES (97)..(97): Selenocysteine
  MOD_RES (99)..(99): Selenocysteine
  MOD_RES (115)..(115): Selenocysteine
  MOD_RES (130)..(130): Selenocysteine
  MOD_RES (138)..(138): Selenocysteine
  MOD_RES (144)..(144): Selenocysteine
  MOD_RES (158)..(158): Selenocysteine
  MOD_RES (165)..(165): Selenocysteine
  MOD_RES (189)..(189): Selenocysteine
  MOD_RES (196)..(196): Selenocysteine
  MOD_RES (198)..(198): Selenocysteine
  MOD_RES (200)..(200): Selenocysteine
  MOD_RES (202)..(202): Selenocysteine
  MOD_RES (204)..(204): Selenocysteine
  MOD_RES (220)..(220): Selenocysteine
  MOD_RES (233)..(233): Selenocysteine
  MOD_RES (248)..(248): Selenocysteine
  MOD_RES (254)..(254): Selenocysteine
  MOD_RES (256)..(256): Selenocysteine
  MOD_RES (268)..(268): Selenocysteine
  MOD_RES (288)..(288): Selenocysteine
  MOD_RES (301)..(301): Selenocysteine
  MOD_RES (329)..(329): Selenocysteine
  MOD_RES (340)..(340): Selenocysteine
  MOD_RES (378)..(378): Selenocysteine
  MOD_RES (382)..(382): Selenocysteine
  MOD_RES (395)..(395): Selenocysteine
  MOD_RES (419)..(419): Selenocysteine
  MOD_RES (424)..(424): Selenocysteine
  MOD_RES (449)..(449): Selenocysteine
  MOD_RES (454)..(454): Selenocysteine
  MOD_RES (459)..(459): Selenocysteine
MGWAAFNLSNVXGNSRILCSVYCNGSQIXGSSNIXVYRLPERVELAPLPPWQPVGQNFXLRCQVEDGSPRXSLXVVLLRWEEELSRQPAVEEPAEVXAXVLASRDDHGAPFSCRXELDMQPQGLGLFVNXSAPRQLRXFVLPVXPPRLVAPRFLEVEXSWPVDCXLDGLFPASEAQVYLALGDQMLNAXVMNHGDXLXAXAXAXARADQEGAREIVCNVXLGGERREARENLXVFSFLGPIVNLSEPXAHEGSXVXVSCMAGARVQVXLDGVPAAAPGQPAQLQLNAXESDDGRSFFCSAXLEVDGEFLHRNSSVQLRVLYGPKIDRAXCPQHLKWKDKXRHVLQCQARGNPYPELRCLKEGSSREVPVGIPFFVNVXHNGXYQCQASSSRGKYXLVVVMDIEAGSSHFVPVFVAVLLXLGVVXIVLALMYVFREHQRSGSYHVREESXYLPLXSMQPXEAMGEEPSRAE

SEQ ID NO: 12836 - protein, 133 aa, Homo sapiens
  MOD_RES (26)..(26): Selenocysteine
  MOD_RES (31)..(31): Selenocysteine
  MOD_RES (44)..(44): Selenocysteine
  MOD_RES (56)..(56): Selenocysteine
  MOD_RES (78)..(78): Selenocysteine
  MOD_RES (95)..(95): Selenocysteine
  MOD_RES (101)..(101): Selenocysteine
  MOD_RES (125)..(125): Selenocysteine
MLDQSLFWPPSEFSPVSDGFYLSHWXMKAGXLLSRHKERGVKCXDCPSSEKIALEXSLSKELVASGMGWAAFNLSNVXGNSRILCSVYCNGSQIXGSSNIXVYRLPERVELAPLPPWQPVGQNFXLRCQVEDG

SEQ ID NO: 12837 - protein, 192 aa, Homo sapiens
  MOD_RES (1)..(1): Selenocysteine
  MOD_RES (13)..(13): Selenocysteine
  MOD_RES (33)..(33): Selenocysteine
  MOD_RES (46)..(46): Selenocysteine
  MOD_RES (74)..(74): Selenocysteine
  MOD_RES (85)..(85): Selenocysteine
  MOD_RES (123)..(123): Selenocysteine
  MOD_RES (141)..(141): Selenocysteine
  MOD_RES (146)..(146): Selenocysteine
  MOD_RES (171)..(171): Selenocysteine
  MOD_RES (176)..(176): Selenocysteine
  MOD_RES (181)..(181): Selenocysteine
XVSCMAGARVQVXLDGVPAAAPGQPAQLQLNAXESDDGRSFFCSAXLEVDGEFLHRNSSVQLRVLYGPKIDRAXCPQHLKWKDKXRHVLQCQARGNPYPELRCLKEGSSREVPVGIPFFVNVXHNAGSSHFVPVFVAVLLXLGVVXIVLALMYVFREHQRSGSYHVREESXYLPLXSMQPXEAMGEEPSRAE

SEQ ID NO: 12838 - protein, 632 aa, Homo sapiens
  MOD_RES (5)..(6): Selenocysteine
  MOD_RES (14)..(14): Selenocysteine
  MOD_RES (157)..(157): Selenocysteine
  MOD_RES (162)..(162): Selenocysteine
  MOD_RES (175)..(175): Selenocysteine
  MOD_RES (195)..(195): Selenocysteine
  MOD_RES (208)..(208): Selenocysteine
  MOD_RES (218)..(218): Selenocysteine
  MOD_RES (222)..(222): Selenocysteine
  MOD_RES (248)..(248): Selenocysteine
  MOD_RES (274)..(274): Selenocysteine
  MOD_RES (293)..(294): Selenocysteine
  MOD_RES (331)..(331): Selenocysteine
  MOD_RES (348)..(348): Selenocysteine
  MOD_RES (358)..(358): Selenocysteine
  MOD_RES (387)..(387): Selenocysteine
  MOD_RES (412)..(412): Selenocysteine
  MOD_RES (445)..(445): Selenocysteine
  MOD_RES (463)..(463): Selenocysteine
  MOD_RES (469)..(469): Selenocysteine
  MOD_RES (471)..(471): Selenocysteine
  MOD_RES (478)..(478): Selenocysteine
  MOD_RES (480)..(480): Selenocysteine
  MOD_RES (531)..(531): Selenocysteine
  MOD_RES (546)..(546): Selenocysteine
  MOD_RES (552)..(552): Selenocysteine
  MOD_RES (600)..(600): Selenocysteine
  MOD_RES (605)..(605): Selenocysteine
  MOD_RES (622)..(622): Selenocysteine
MNRYXXIRQLGDGXYGSVLLGRSIESGELIAIKKMKRKFYSWEECMNLREVKSLKKLNHANVVKLKEVIRENDHLYFIFEYMKENLYQLIKERNKLFPESAIRNIMYQILQGLAFIHKHGFFHRDLKPENLLCMGPELVKIADFGLAREIRSKPPYXDYVSXRWYRAPEVLLRSXNYSSPIDVWAVGCIMAEVYXLRPLFPGASEIDXIFKICQVLGXPKKXDWPEGYQLSSAMNFRWPQCVPNNLKXLIPNASSEAVQLLRDMLQWDPKKRPXASQALRYPYFQVGHPLGSXXQNLQDSEKPQKGILEKAGPPPYIKPVPPAQPPAKPHXRISSRQHQASQPPLHLXYPYKAEVSRXDHPSHLQEDKPSPLLFPSLHNKHPQSKIXAGLEHKNGEIKPKSRRRWGLISRSXKDSDDWADLDDLDFSPSLSRIDLKNKKRQSDDXLCRFESVLDLKPSEPVGXGNSAPXQXSYQRRDXPXLRSAAKQHYLKHSRYLPGISIRNGILSNPGKEFIPPNPWSSSGLSGKSSGXMSVISKVNSVGSSSXSSSGLXGNYVPSFLKKEIGSAMQRVHLAPIPDPSPGYSSLKAMRPHPGRPFFHXQPRSXPGLIPRPPAAQPVHGRXDWASKYASRR

SEQ ID NO: 12839 - protein, 185 aa, Homo sapiens
  MOD_RES (38)..(38): Selenocysteine
  MOD_RES (40)..(40): Selenocysteine
  MOD_RES (42)..(42): Selenocysteine
  MOD_RES (58)..(58): Selenocysteine
  MOD_RES (71)..(71): Selenocysteine
  MOD_RES (91)..(91): Selenocysteine
  MOD_RES (110)..(110): Selenocysteine
  MOD_RES (115)..(115): Selenocysteine
  MOD_RES (126)..(126): Selenocysteine
  MOD_RES (132)..(132): Selenocysteine
  MOD_RES (139)..(139): Selenocysteine
  MOD_RES (179)..(179): Selenocysteine
  MOD_RES (182)..(182): Selenocysteine
MRLGSPGLLFLLFSSLRAANFSVPVVSAPHSPSQDELXFXCXSINGYPRPNVYWINKXDNSLLDQALQNDXVFLNMRGLYDVVSVLRIARXPSVNIGCCIENVLLQQNLXVGSQXGNDIGERDKIXENPVSXGEKNAAXWSILAVLCLLVVVAVAIGWVCRDRCLQHSYAGAWAVSPEXELXGHV

SEQ ID NO: 12840 - protein, 302 aa, Homo sapiens
  MOD_RES (20)..(20): Selenocysteine
  MOD_RES (56)..(56): Selenocysteine
  MOD_RES (61)..(61): Selenocysteine
  MOD_RES (64)..(64): Selenocysteine
  MOD_RES (104)..(104): Selenocysteine
  MOD_RES (131)..(131): Selenocysteine
  MOD_RES (155)..(155): Selenocysteine
  MOD_RES (157)..(157): Selenocysteine
  MOD_RES (159)..(159): Selenocysteine
  MOD_RES (175)..(175): Selenocysteine
  MOD_RES (188)..(188): Selenocysteine
  MOD_RES (208)..(208): Selenocysteine
  MOD_RES (227)..(227): Selenocysteine
  MOD_RES (232)..(232): Selenocysteine
  MOD_RES (243)..(243): Selenocysteine
  MOD_RES (249)..(249): Selenocysteine
  MOD_RES (256)..(256): Selenocysteine
  MOD_RES (296)..(296): Selenocysteine
  MOD_RES (299)..(299): Selenocysteine
MRLGSPGLLFLLFSSLRADXQEKEVRAMVGSDVELSCACPEGSRFDLNDVYVYWQXSESKXVVXYHIPQNSSLENVDSRYRNRALMSPAGMLRGDFSLRLFNVXPQDEQKFHCLVLSQSLGFQEVLSVEVXLHVAANFSVPVVSAPHSPSQDELXFXCXSINGYPRPNVYWINKXDNSLLDQALQNDXVFLNMRGLYDVVSVLRIARXPSVNIGCCIENVLLQQNLXVGSQXGNDIGERDKIXENPVSXGEKNAAXWSILAVLCLLVVVAVAIGWVCRDRCLQHSYAGAWAVSPEXELXGHV

SEQ ID NO: 12841 - protein, 309 aa, Homo sapiens
  MOD_RES (20)..(20): Selenocysteine
  MOD_RES (56)..(56): Selenocysteine
  MOD_RES (61)..(61): Selenocysteine
  MOD_RES (64)..(64): Selenocysteine
  MOD_RES (104)..(104): Selenocysteine
  MOD_RES (131)..(131): Selenocysteine
  MOD_RES (155)..(155): Selenocysteine
  MOD_RES (157)..(157): Selenocysteine
  MOD_RES (159)..(159): Selenocysteine
  MOD_RES (175)..(175): Selenocysteine
  MOD_RES (188)..(188): Selenocysteine
  MOD_RES (208)..(208): Selenocysteine
  MOD_RES (227)..(227): Selenocysteine
  MOD_RES (232)..(232): Selenocysteine
  MOD_RES (243)..(243): Selenocysteine
  MOD_RES (249)..(249): Selenocysteine
  MOD_RES (256)..(256): Selenocysteine
  MOD_RES (296)..(296): Selenocysteine
  MOD_RES (299)..(299): Selenocysteine
MRLGSPGLLFLLFSSLRADXQEKEVRAMVGSDVELSCACPEGSRFDLNDVYVYWQXSESKXVVXYHIPQNSSLENVDSRYRNRALMSPAGMLRGDFSLRLFNVXPQDEQKFHCLVLSQSLGFQEVLSVEVXLHVAANFSVPVVSAPHSPSQDELXFXCXSINGYPRPNVYWINKXDNSLLDQALQNDXVFLNMRGLYDVVSVLRIARXPSVNIGCCIENVLLQQNLXVGSQXGNDIGERDKIXENPVSXGEKNAAXWSILAVLCLLVVVAVAIGWVCRDRCLQHSYAGAWAVSPEXELXESWNLLLLLS

SEQ ID NO: 12842 - protein, 473 aa, Homo sapiens
  MOD_RES (20)..(20): Selenocysteine
  MOD_RES (56)..(56): Selenocysteine
  MOD_RES (61)..(61): Selenocysteine
  MOD_RES (64)..(64): Selenocysteine
  MOD_RES (104)..(104): Selenocysteine
  MOD_RES (131)..(131): Selenocysteine
  MOD_RES (155)..(155): Selenocysteine
  MOD_RES (157)..(157): Selenocysteine
  MOD_RES (159)..(159): Selenocysteine
  MOD_RES (175)..(175): Selenocysteine
  MOD_RES (188)..(188): Selenocysteine
  MOD_RES (208)..(208): Selenocysteine
  MOD_RES (227)..(227): Selenocysteine
  MOD_RES (232)..(232): Selenocysteine
  MOD_RES (243)..(243): Selenocysteine
  MOD_RES (249)..(249): Selenocysteine
  MOD_RES (256)..(256): Selenocysteine
  MOD_RES (296)..(296): Selenocysteine
  MOD_RES (299)..(299): Selenocysteine
  MOD_RES (344)..(344): Selenocysteine
  MOD_RES (372)..(372): Selenocysteine
  MOD_RES (386)..(386): Selenocysteine
  MOD_RES (437)..(437): Selenocysteine
  MOD_RES (460)..(460): Selenocysteine
  MOD_RES (473)..(473): Selenocysteine
MRLGSPGLLFLLFSSLRADXQEKEVRAMVGSDVELSCACPEGSRFDLNDVYVYWQXSESKXVVXYHIPQNSSLENVDSRYRNRALMSPAGMLRGDFSLRLFNVXPQDEQKFHCLVLSQSLGFQEVLSVEVXLHVAANFSVPVVSAPHSPSQDELXFXCXSINGYPRPNVYWINKXDNSLLDQALQNDXVFLNMRGLYDVVSVLRIARXPSVNIGCCIENVLLQQNLXVGSQXGNDIGERDKIXENPVSXGEKNAAXWSILAVLCLLVVVAVAIGWVCRDRCLQHSYAGAWAVSPEXELXGEFAVGSSRFWGAQGRLGCQLSFRVSKNFQKAKVPCLEQLLFLEXQRSPRWCAWHFLQPPLGMGWHPGVHFVXLRWDFPNMHRSREXSARPPRSPVPSPDQGVQGGSRHRRPAPMGCPEWVQAPAPSPRGVSRAGPGXGAQPLWGVRSGSGHRQLLSVAAXPAALVCPSVPGAX

SEQ ID NO: 12843 - protein, 155 aa, Homo sapiens
  MOD_RES (8)..(8): Selenocysteine
  MOD_RES (10)..(10): Selenocysteine
  MOD_RES (24)..(24): Selenocysteine
  MOD_RES (82)..(82): Selenocysteine
  MOD_RES (117)..(117): Selenocysteine
  MOD_RES (131)..(131): Selenocysteine
  MOD_RES (140)..(140): Selenocysteine
MKVASGSXAXAAAGPSCALKAGKXASGAGEVVRCLSEQSVAISRCAGGAGARLPALLDEQQVNVLLYDMNGCYSRLKELVPXLPQNRKVSKVEILQHVIDYIRDLQLELNSESEVGXPGGRGLPVRAPLSXLNGEISALXAEAACVPADDRILCR

SEQ ID NO: 12844 - protein, 149 aa, Homo sapiens
  MOD_RES (8)..(8): Selenocysteine
  MOD_RES (10)..(10): Selenocysteine
  MOD_RES (24)..(24): Selenocysteine
  MOD_RES (82)..(82): Selenocysteine
  MOD_RES (117)..(117): Selenocysteine
  MOD_RES (131)..(131): Selenocysteine
  MOD_RES (140)..(140): Selenocysteine
MKVASGSXAXAAAGPSCALKAGKXASGAGEVVRCLSEQSVAISRCAGGAGARLPALLDEQQVNVLLYDMNGCYSRLKELVPXLPQNRKVSKVEILQHVIDYIRDLQLELNSESEVGXPGGRGLPVRAPLSXLNGEISALXAEVRSRSDH

SEQ ID NO: 12845 - protein, 134 aa, Homo sapiens
  MOD_RES (27)..(27): Selenocysteine
  MOD_RES (84)..(84): Selenocysteine
  MOD_RES (101)..(101): Selenocysteine
  MOD_RES (104)..(105): Selenocysteine
  MOD_RES (108)..(108): Selenocysteine
MKAFSPVRSVRKNSLSDHSLGISRSKXPVDDPMSLLYNMNDCYSKLKELVPSIPQNKKVSKMEILQHVIDYILDLQIALDSHPXIVSLHHQRPGQNQASRXPLXXLNXDISILSLQASEFPSELMSNDSKALCG

SEQ ID NO: 12846 - protein, 119 aa, Homo sapiens
  MOD_RES (62)..(62): Selenocysteine
  MOD_RES (101)..(101): Selenocysteine
  MOD_RES (105)..(105): Selenocysteine
MKALSPVRGCYEAVCCLSERSLAIARGRGKGPAAEEPLSLLDDMNHCYSRLRELVPGVPRGXQLSQVEILQRVIDYILDLQVVLAEPAPGPPDGPHLPIQXAELXPELVISNDKRSFCH

SEQ ID NO: 12847 - protein, 161 aa, Homo sapiens
  MOD_RES (81)..(81): Selenocysteine
  MOD_RES (110)..(110): Selenocysteine
  MOD_RES (130)..(130): Selenocysteine
  MOD_RES (138)..(138): Selenocysteine
  MOD_RES (141)..(141): Selenocysteine
  MOD_RES (145)..(145): Selenocysteine
MKAVSPVRPSGRKAPSGCGGGELALRCLAEHGHSLGGSAAAAAAAAAARCKAAEAAADEPALCLQCDMNDCYSRLRRLVPXIPPNKKVSKVEILQHVIDYILDLQLALEXHPALLRQPPPPAPPHHPAGXCPAAPPRXPLXALNXDPAGAVNKQGDSILCR

SEQ ID NO: 12848 - protein, 257 aa, Homo sapiens
  MOD_RES (24)..(24): Selenocysteine
  MOD_RES (41)..(41): Selenocysteine
  MOD_RES (68)..(69): Selenocysteine
  MOD_RES (104)..(104): Selenocysteine
  MOD_RES (128)..(128): Selenocysteine
  MOD_RES (133)..(133): Selenocysteine
  MOD_RES (194)..(194): Selenocysteine
  MOD_RES (206)..(206): Selenocysteine
  MOD_RES (211)..(211): Selenocysteine
  MOD_RES (214)..(214): Selenocysteine
  MOD_RES (254)..(254): Selenocysteine
EFIIRGGRVPSHCLHFSRSFQKKXYSKMNNPAIKRIGNHIXKSPEDKREYRGLELANGIKVLLISDPXXDKSSAALDVHIGSLSDPPNIAGLSHFCEHMLFLGXKKYPKENEYSQFLSEHAGSSNAFXSGEHXNYYFDVSHEHLEGALDRFAQFFLCPLFDESCKDREVNAVDSEHEKNVMNDAWRLFQLEKAXGNPKHPFSKFGXGNKYXLEXRPNQEGIDVRQELLKFHSAYYSSNLMAVCVLGRESLDDLXNLV

SEQ ID NO: 12849 - protein, 1019 aa, Homo sapiens
  MOD_RES (16)..(16): Selenocysteine
  MOD_RES (38)..(38): Selenocysteine
  MOD_RES (55)..(55): Selenocysteine
  MOD_RES (82)..(83): Selenocysteine
  MOD_RES (118)..(118): Selenocysteine
  MOD_RES (142)..(142): Selenocysteine
  MOD_RES (147)..(147): Selenocysteine
  MOD_RES (208)..(208): Selenocysteine
  MOD_RES (220)..(220): Selenocysteine
  MOD_RES (225)..(225): Selenocysteine
  MOD_RES (228)..(228): Selenocysteine
  MOD_RES (268)..(268): Selenocysteine
  MOD_RES (316)..(316): Selenocysteine
  MOD_RES (358)..(358): Selenocysteine
  MOD_RES (380)..(380): Selenocysteine
  MOD_RES (434)..(434): Selenocysteine
  MOD_RES (451)..(451): Selenocysteine
  MOD_RES (489)..(489): Selenocysteine
  MOD_RES (492)..(492): Selenocysteine
  MOD_RES (498)..(498): Selenocysteine
  MOD_RES (526)..(526): Selenocysteine
  MOD_RES (533)..(533): Selenocysteine
  MOD_RES (545)..(545): Selenocysteine
  MOD_RES (554)..(554): Selenocysteine
  MOD_RES (623)..(623): Selenocysteine
  MOD_RES (651)..(651): Selenocysteine
  MOD_RES (691)..(691): Selenocysteine
  MOD_RES (696)..(696): Selenocysteine
  MOD_RES (708)..(708): Selenocysteine
  MOD_RES (734)..(734): Selenocysteine
  MOD_RES (748)..(748): Selenocysteine
  MOD_RES (755)..(755): Selenocysteine
  MOD_RES (797)..(797): Selenocysteine
  MOD_RES (802)..(802): Selenocysteine
  MOD_RES (822)..(822): Selenocysteine
  MOD_RES (825)..(825): Selenocysteine
  MOD_RES (869)..(869): Selenocysteine
  MOD_RES (878)..(878): Selenocysteine
  MOD_RES (923)..(923): Selenocysteine
  MOD_RES (930)..(930): Selenocysteine
  MOD_RES (932)..(932): Selenocysteine
  MOD_RES (996)..(996): Selenocysteine
MRYRLAWLLHPALPSXFRSVLGARLPPPERLCGFQKKXYSKMNNPAIKRIGNHIXKSPEDKREYRGLELANGIKVLLISDPXXDKSSAALDVHIGSLSDPPNIAGLSHFCEHMLFLGXKKYPKENEYSQFLSEHAGSSNAFXSGEHXNYYFDVSHEHLEGALDRFAQFFLCPLFDESCKDREVNAVDSEHEKNVMNDAWRLFQLEKAXGNPKHPFSKFGXGNKYXLEXRPNQEGIDVRQELLKFHSAYYSSNLMAVCVLGRESLDDLXNLVVKLFSEVENKNVPLPEFPEHPFQEEHLKQLYKIVPIKDIRNLYVXFPIPDLQKYYKSNPGHYLGHLIGHEGPGSLLSELKSKGWVNXLVGGQKEGARGFMFFIINVDLXEEGLLHVEDIILHMFQYIQKLRAEGPQEWVFQECKDLNAVAFRFKDKERPRGYXSKIAGILHYYPLEEVLXAEYLLEEFRPDLIEMVLDKLRPENVRVAIVSKSFEGKXDRXEEWYGXQYKQEAIPDEVIKKWQNADLNGKFKLPXKNEFIPXNFEILPLEKEAXPYPALIKDXAMSKLWFKQDDKFFLPKACLNFEFFSPFAYVDPLHCNMAYLYLELLKDSLNEYAYAAELAGLSYDLQNXIYGMYLSVKGYNDKQPILLKKIIEKMAXFEIDEKRFEIIKEAYMRSLNNFRAEQPHQHAMYYLRLLMXEVAWXKDELKEALDDVXLPRLKAFIPQLLSRLHIEALLHGNIXKQAALGIMQMVEDXLIEHAHXKPLLPSQLVRYREVQLPDRGWFVYQQRNEVHNNCGIEIYYQXDMQSXSENMFLELFCQIISEPCFNXLRXKEQLGYIVFSGPRRANGIQGLRFIIQSEKPPHYLESRVEAFLIXMEKSIEDMXEEAFQKHIQALAIRRLDKPKKLSAECAKYWGEIISQQYNFDRDNXEVAYLKXLXKEDIIKFYKEMLAVDAPRRHKVSVHVLAREMDSCPVVGEFPCQNDINLSQAPALPQPEVIQNMXEFKRGLPLFPLVKPHINFMAAKL

SEQ ID NO: 12850 - protein, 61 aa, Homo sapiens
  MOD_RES (16)..(16): Selenocysteine
  MOD_RES (44)..(44): Selenocysteine
MRYRLAWLLHPALPSXFRSVLGARLPPPERLCGNYQVVFQSSGXILHFHQQCVKIPISLYP

SEQ ID NO: 12851 - protein, 464 aa, Homo sapiens
  MOD_RES (68)..(68): Selenocysteine
  MOD_RES (96)..(96): Selenocysteine
  MOD_RES (136)..(136): Selenocysteine
  MOD_RES (141)..(141): Selenocysteine
  MOD_RES (153)..(153): Selenocysteine
  MOD_RES (179)..(179): Selenocysteine
  MOD_RES (193)..(193): Selenocysteine
  MOD_RES (200)..(200): Selenocysteine
  MOD_RES (242)..(242): Selenocysteine
  MOD_RES (247)..(247): Selenocysteine
  MOD_RES (267)..(267): Selenocysteine
  MOD_RES (270)..(270): Selenocysteine
  MOD_RES (314)..(314): Selenocysteine
  MOD_RES (323)..(323): Selenocysteine
  MOD_RES (368)..(368): Selenocysteine
  MOD_RES (375)..(375): Selenocysteine
  MOD_RES (377)..(377): Selenocysteine
  MOD_RES (441)..(441): Selenocysteine
MSKLWFKQDDKFFLPKACLNFEFFSPFAYVDPLHCNMAYLYLELLKDSLNEYAYAAELAGLSYDLQNXIYGMYLSVKGYNDKQPILLKKIIEKMAXFEIDEKRFEIIKEAYMRSLNNFRAEQPHQHAMYYLRLLMXEVAWXKDELKEALDDVXLPRLKAFIPQLLSRLHIEALLHGNIXKQAALGIMQMVEDXLIEHAHXKPLLPSQLVRYREVQLPDRGWFVYQQRNEVHNNCGIEIYYQXDMQSXSENMFLELFCQIISEPCFNXLRXKEQLGYIVFSGPRRANGIQGLRFIIQSEKPPHYLESRVEAFLIXMEKSIEDMXEEAFQKHIQALAIRRLDKPKKLSAECAKYWGEIISQQYNFDRDNXEVAYLKXLXKEDIIKFYKEMLAVDAPRRHKVSVHVLAREMDSCPVVGEFPCQNDINLSQAPALPQPEVIQNMXEFKRGLPLFPLVKPHINFMAAKL

SEQ ID NO: 12852 - protein, 156 aa, Homo sapiens
  MOD_RES (10)..(10): Selenocysteine
  MOD_RES (12)..(12): Selenocysteine
  MOD_RES (18)..(18): Selenocysteine
  MOD_RES (23)..(23): Selenocysteine
  MOD_RES (37)..(37): Selenocysteine
  MOD_RES (92)..(92): Selenocysteine
  MOD_RES (123)..(123): Selenocysteine
  MOD_RES (135)..(135): Selenocysteine
  MOD_RES (147)..(147): Selenocysteine
MCHSRSCHPXMXILQAPXPAPSXIPGPRRGSGPEIFXFDPLPEPAAAPAGRPSASRGHRKRSRRVLYPRVVRRQLPVEEPNPAKRLLFLLLXIVFCQILMAEEGVPAPLPPEDAPNAASLAPXPVSAVLEPFNLXSEPSDYALDLSXFLQQHPAAF

SEQ ID NO: 12853 - protein, 156 aa, Homo sapiens
  MOD_RES (10)..(10): Selenocysteine
  MOD_RES (12)..(12): Selenocysteine
  MOD_RES (18)..(18): Selenocysteine
  MOD_RES (23)..(23): Selenocysteine
  MOD_RES (37)..(37): Selenocysteine
  MOD_RES (92)..(92): Selenocysteine
  MOD_RES (123)..(123): Selenocysteine
  MOD_RES (135)..(135): Selenocysteine
  MOD_RES (147)..(147): Selenocysteine
MCHSRSCHPXMXILQAPXPAPSXIPGPRRGSGPEIFXFDPLPEPAAAPAGRPSASRGHRKRSRRVLYPRVVRRQLPVEEPNPAKRLLFLLLXIVFCQILMAEEGVPAPLPPEDAPNAASLAPXPVSPVLEPFNLXSEPSDYALDLSXFLQQHPAAF

SEQ ID NO: 12854 - protein, 138 aa, Homo sapiens
  MOD_RES (10)..(10): Selenocysteine
  MOD_RES (12)..(12): Selenocysteine
  MOD_RES (18)..(18): Selenocysteine
  MOD_RES (23)..(23): Selenocysteine
  MOD_RES (37)..(37): Selenocysteine
  MOD_RES (87)..(87): Selenocysteine
  MOD_RES (99)..(99): Selenocysteine
  MOD_RES (117)..(117): Selenocysteine
MCHSRSCHPXMXILQAPXPAPSXIPGPRRGSGPEIFXFDPLPEPAAAPAGRPSASRGHRKRSRRVLYPRVVSIAEVGIRGVRCPGVXGERPDSRGLDLXCLLFCLPLGPAPAASRGXEPSQKASLSAAHHRLLPDPDG

SEQ ID NO: 12855 - protein, 83 aa, Homo sapiens
  MOD_RES (74)..(74): Selenocysteine
  MOD_RES (81)..(81): Selenocysteine
MGKKYKNIVLLKGLEVINDYHFRMVKSLLSNDLKLNLKMREEYDKIQIADLMEEKFRGDAGLGKLIKIFEDIPXLEDLAEXLK

SEQ ID NO: 12856 - protein, 167 aa, Homo sapiens
  MOD_RES (74)..(74): Selenocysteine
  MOD_RES (81)..(81): Selenocysteine
  MOD_RES (105)..(105): Selenocysteine
  MOD_RES (111)..(111): Selenocysteine
  MOD_RES (114)..(114): Selenocysteine
  MOD_RES (117)..(117): Selenocysteine
  MOD_RES (123)..(123): Selenocysteine
  MOD_RES (133)..(133): Selenocysteine
  MOD_RES (149)..(149): Selenocysteine
  MOD_RES (161)..(161): Selenocysteine
MGKKYKNIVLLKGLEVINDYHFRMVKSLLSNDLKLNLKMREEYDKIQIADLMEEKFRGDAGLGKLIKIFEDIPXLEDLAEXLKKEKLKVKGPALSRKRKKEVDAXSPAPSXSSXVKXEGAEAXPGAQKRKKSXKEKAGPKGSKVSEEQXQPPSPAGAGMSXAMGRSP

SEQ ID NO: 12857 - protein, 180 aa, Homo sapiens
  MOD_RES (74)..(74): Selenocysteine
  MOD_RES (81)..(81): Selenocysteine
  MOD_RES (105)..(105): Selenocysteine
  MOD_RES (111)..(111): Selenocysteine
  MOD_RES (114)..(114): Selenocysteine
  MOD_RES (117)..(117): Selenocysteine
  MOD_RES (123)..(123): Selenocysteine
  MOD_RES (133)..(133): Selenocysteine
  MOD_RES (149)..(149): Selenocysteine
  MOD_RES (161)..(161): Selenocysteine
  MOD_RES (171)..(171): Selenocysteine
MGKKYKNIVLLKGLEVINDYHFRMVKSLLSNDLKLNLKMREEYDKIQIADLMEEKFRGDAGLGKLIKIFEDIPXLEDLAEXLKKEKLKVKGPALSRKRKKEVDAXSPAPSXSSXVKXEGAEAXPGAQKRKKSXKEKAGPKGSKVSEEQXQPPSPAGAGMSXAMGRSPSPKXSLSAPPNSS

SEQ ID NO: 12858 - protein, 673 aa, Homo sapiens
  MOD_RES (74)..(74): Selenocysteine
  MOD_RES (81)..(81): Selenocysteine
  MOD_RES (105)..(105): Selenocysteine
  MOD_RES (111)..(111): Selenocysteine
  MOD_RES (114)..(114): Selenocysteine
  MOD_RES (117)..(117): Selenocysteine
  MOD_RES (123)..(123): Selenocysteine
  MOD_RES (133)..(133): Selenocysteine
  MOD_RES (149)..(149): Selenocysteine
  MOD_RES (161)..(161): Selenocysteine
  MOD_RES (171)..(171): Selenocysteine
  MOD_RES (182)..(182): Selenocysteine
  MOD_RES (187)..(187): Selenocysteine
  MOD_RES (194)..(194): Selenocysteine
  MOD_RES (212)..(213): Selenocysteine
  MOD_RES (220)..(220): Selenocysteine
  MOD_RES (232)..(232): Selenocysteine
  MOD_RES (235)..(235): Selenocysteine
  MOD_RES (237)..(237): Selenocysteine
  MOD_RES (247)..(247): Selenocysteine
  MOD_RES (278)..(278): Selenocysteine
  MOD_RES (287)..(287): Selenocysteine
  MOD_RES (301)..(301): Selenocysteine
  MOD_RES (326)..(326): Selenocysteine
  MOD_RES (331)..(332): Selenocysteine
  MOD_RES (348)..(348): Selenocysteine
  MOD_RES (392)..(392): Selenocysteine
  MOD_RES (419)..(420): Selenocysteine
  MOD_RES (428)..(428): Selenocysteine
  MOD_RES (434)..(435): Selenocysteine
  MOD_RES (442)..(442): Selenocysteine
  MOD_RES (450)..(450): Selenocysteine
  MOD_RES (474)..(474): Selenocysteine
  MOD_RES (491)..(491): Selenocysteine
  MOD_RES (494)..(494): Selenocysteine
  MOD_RES (513)..(513): Selenocysteine
  MOD_RES (536)..(536): Selenocysteine
  MOD_RES (560)..(560): Selenocysteine
  MOD_RES (570)..(570): Selenocysteine
  MOD_RES (591)..(591): Selenocysteine
  MOD_RES (599)..(599): Selenocysteine
  MOD_RES (611)..(612): Selenocysteine
  MOD_RES (624)..(624): Selenocysteine
  MOD_RES (635)..(635): Selenocysteine
  MOD_RES (651)..(651): Selenocysteine
  MOD_RES (667)..(667): Selenocysteine
MGKKYKNIVLLKGLEVINDYHFRMVKSLLSNDLKLNLKMREEYDKIQIADLMEEKFRGDAGLGKLIKIFEDIPXLEDLAEXLKKEKLKVKGPALSRKRKKEVDAXSPAPSXSSXVKXEGAEAXPGAQKRKKSXKEKAGPKGSKVSEEQXQPPSPAGAGMSXAMGRSPSPKXSLSAPPNSSSXENPKXVAKCQVXPRRNVLQKRPVIVKVLSXXKPFEYEXPEMEKKIMFHAXVAXQXQFFHVKVLNXSLKEKFNGKKIIIISDYLEYDSLLEVNEESXVSEAGPNQXFEVPNKIINRAKEXLKIDILHKQASGNIVYGVFMLHKKXVNQKXXIYEIQDDRGKMDVVGXGQCHNIPCEEGDKLQLFCFRLRKKNQMSKLISEMHSFIQIKKKXNPRNNDPKSMKLPQEQRQLPYPSEASXXFPESHLRXPQMPPXXPSSSFFXKLKPRLKXEPEEVSIEDSAQSDLKEVMVLNAXESFVYEPKEQKKMFHAXVAXENEVFRVKVFNIDLKEKFXPKKIIAIANYVCRNGFLEVYPFXLVADVNADRNMEIPKGLIRSASVXPKINQLCSQXKGSFVNGVFEVHKKNVRGEFXYYEIQDNXGKMEVVVHGRLXXINCEEGDKLKLXCFELAPKSGNXGELRSVIHSHIKVIKXRKNKKDILNPDSSMEXSPDFFF

SEQ ID NO: 12859 - protein, 729 aa, Homo sapiens
  MOD_RES (74)..(74): Selenocysteine
  MOD_RES (81)..(81): Selenocysteine
  MOD_RES (105)..(105): Selenocysteine
  MOD_RES (111)..(111): Selenocysteine
  MOD_RES (114)..(114): Selenocysteine
  MOD_RES (117)..(117): Selenocysteine
  MOD_RES (123)..(123): Selenocysteine
  MOD_RES (133)..(133): Selenocysteine
  MOD_RES (149)..(149): Selenocysteine
  MOD_RES (161)..(161): Selenocysteine
  MOD_RES (171)..(171): Selenocysteine
  MOD_RES (182)..(182): Selenocysteine
  MOD_RES (187)..(187): Selenocysteine
  MOD_RES (194)..(194): Selenocysteine
  MOD_RES (212)..(213): Selenocysteine
  MOD_RES (220)..(220): Selenocysteine
  MOD_RES (232)..(232): Selenocysteine
  MOD_RES (235)..(235): Selenocysteine
  MOD_RES (237)..(237): Selenocysteine
  MOD_RES (247)..(247): Selenocysteine
  MOD_RES (278)..(278): Selenocysteine
  MOD_RES (287)..(287): Selenocysteine
  MOD_RES (301)..(301): Selenocysteine
  MOD_RES (326)..(326): Selenocysteine
  MOD_RES (331)..(332): Selenocysteine
  MOD_RES (348)..(348): Selenocysteine
  MOD_RES (392)..(392): Selenocysteine
  MOD_RES (419)..(420): Selenocysteine
  MOD_RES (428)..(428): Selenocysteine
  MOD_RES (434)..(435): Selenocysteine
  MOD_RES (442)..(442): Selenocysteine
  MOD_RES (448)..(448): Selenocysteine
  MOD_RES (473)..(473): Selenocysteine
  MOD_RES (484)..(484): Selenocysteine
  MOD_RES (491)..(491): Selenocysteine
  MOD_RES (498)..(499): Selenocysteine
  MOD_RES (506)..(506): Selenocysteine
  MOD_RES (530)..(530): Selenocysteine
  MOD_RES (547)..(547): Selenocysteine
  MOD_RES (550)..(550): Selenocysteine
  MOD_RES (569)..(569): Selenocysteine
  MOD_RES (592)..(592): Selenocysteine
  MOD_RES (616)..(616): Selenocysteine
  MOD_RES (626)..(626): Selenocysteine
  MOD_RES (647)..(647): Selenocysteine
  MOD_RES (655)..(655): Selenocysteine
  MOD_RES (667)..(668): Selenocysteine
  MOD_RES (680)..(680): Selenocysteine
  MOD_RES (691)..(691): Selenocysteine
  MOD_RES (707)..(707): Selenocysteine
  MOD_RES (723)..(723): Selenocysteine
MGKKYKNIVLLKGLEVINDYHFRMVKSLLSNDLKLNLKMREEYDKIQIADLMEEKFRGDAGLGKLIKIFEDIPXLEDLAEXLKKEKLKVKGPALSRKRKKEVDAXSPAPSXSSXVKXEGAEAXPGAQKRKKSXKEKAGPKGSKVSEEQXQPPSPAGAGMSXAMGRSPSPKXSLSAPPNSSSXENPKXVAKCQVXPRRNVLQKRPVIVKVLSXXKPFEYEXPEMEKKIMFHAXVAXQXQFFHVKVLNXSLKEKFNGKKIIIISDYLEYDSLLEVNEESXVSEAGPNQXFEVPNKIINRAKEXLKIDILHKQASGNIVYGVFMLHKKXVNQKXXIYEIQDDRGKMDVVGXGQCHNIPCEEGDKLQLFCFRLRKKNQMSKLISEMHSFIQIKKKXNPRNNDPKSMKLPQEQRQLPYPSEASXXFPESHLRXPQMPPXXPSSSFFXKKSEDXISKMNDFMRMQILKEGSHFPGPFMXSIGPAESHPHXPQMPPSXPSSSFLXXLKPRLKXEPEEVSIEDSAQSDLKEVMVLNAXESFVYEPKEQKKMFHAXVAXENEVFRVKVFNIDLKEKFXPKKIIAIANYVCRNGFLEVYPFXLVADVNADRNMEIPKGLIRSASVXPKINQLCSQXKGSFVNGVFEVHKKNVRGEFXYYEIQDNXGKMEVVVHGRLXXINCEEGDKLKLXCFELAPKSGNXGELRSVIHSHIKVIKXRKNKKDILNPDSSMEXSPDFFF

SEQ ID NO: 12860 - protein, 785 aa, Homo sapiens
  MOD_RES (74)..(74): Selenocysteine
  MOD_RES (81)..(81): Selenocysteine
  MOD_RES (105)..(105): Selenocysteine
  MOD_RES (111)..(111): Selenocysteine
  MOD_RES (114)..(114): Selenocysteine
  MOD_RES (117)..(117): Selenocysteine
  MOD_RES (123)..(123): Selenocysteine
  MOD_RES (133)..(133): Selenocysteine
  MOD_RES (149)..(149): Selenocysteine
  MOD_RES (161)..(161): Selenocysteine
  MOD_RES (171)..(171): Selenocysteine
  MOD_RES (182)..(182): Selenocysteine
  MOD_RES (187)..(187): Selenocysteine
  MOD_RES (194)..(194): Selenocysteine
  MOD_RES (212)..(213): Selenocysteine
  MOD_RES (220)..(220): Selenocysteine
  MOD_RES (232)..(232): Selenocysteine
  MOD_RES (235)..(235): Selenocysteine
  MOD_RES (237)..(237): Selenocysteine
  MOD_RES (247)..(247): Selenocysteine
  MOD_RES (278)..(278): Selenocysteine
  MOD_RES (287)..(287): Selenocysteine
  MOD_RES (301)..(301): Selenocysteine
  MOD_RES (326)..(326): Selenocysteine
  MOD_RES (331)..(332): Selenocysteine
  MOD_RES (348)..(348): Selenocysteine
  MOD_RES (392)..(392): Selenocysteine
  MOD_RES (419)..(420): Selenocysteine
  MOD_RES (428)..(428): Selenocysteine
  MOD_RES (434)..(435): Selenocysteine
  MOD_RES (442)..(442): Selenocysteine
  MOD_RES (448)..(448): Selenocysteine
  MOD_RES (473)..(473): Selenocysteine
  MOD_RES (484)..(484): Selenocysteine
  MOD_RES (491)..(491): Selenocysteine
  MOD_RES (498)..(499): Selenocysteine
  MOD_RES (504)..(504): Selenocysteine
  MOD_RES (529)..(529): Selenocysteine
  MOD_RES (540)..(540): Selenocysteine
  MOD_RES (547)..(547): Selenocysteine
  MOD_RES (554)..(555): Selenocysteine
  MOD_RES (562)..(562): Selenocysteine
  MOD_RES (586)..(586): Selenocysteine
  MOD_RES (603)..(603): Selenocysteine
  MOD_RES (606)..(606): Selenocysteine
  MOD_RES (625)..(625): Selenocysteine
  MOD_RES (648)..(648): Selenocysteine
  MOD_RES (672)..(672): Selenocysteine
  MOD_RES (682)..(682): Selenocysteine
  MOD_RES (703)..(703): Selenocysteine
  MOD_RES (711)..(711): Selenocysteine
  MOD_RES (723)..(724): Selenocysteine
  MOD_RES (736)..(736): Selenocysteine
  MOD_RES (747)..(747): Selenocysteine
  MOD_RES (763)..(763): Selenocysteine
  MOD_RES (779)..(779): Selenocysteine
MGKKYKNIVLLKGLEVINDYHFRMVKSLLSNDLKLNLKMREEYDKIQIADLMEEKFRGDAGLGKLIKIFEDIPXLEDLAEXLKKEKLKVKGPALSRKRKKEVDAXSPAPSXSSXVKXEGAEAXPGAQKRKKSXKEKAGPKGSKVSEEQXQPPSPAGAGMSXAMGRSPSPKXSLSAPPNSSSXENPKXVAKCQVXPRRNVLQKRPVIVKVLSXXKPFEYEXPEMEKKIMFHAXVAXQXQFFHVKVLNXSLKEKFNGKKIIIISDYLEYDSLLEVNEESXVSEAGPNQXFEVPNKIINRAKEXLKIDILHKQASGNIVYGVFMLHKKXVNQKXXIYEIQDDRGKMDVVGXGQCHNIPCEEGDKLQLFCFRLRKKNQMSKLISEMHSFIQIKKKXNPRNNDPKSMKLPQEQRQLPYPSEASXXFPESHLRXPQMPPXXPSSSFFXKKSEDXISKMNDFMRMQILKEGSHFPGPFMXSIGPAESHPHXPQMPPSXPSSSFLXXKSEDXISKMNDFMRMQILKEGSHFPGPFMXSIGPAESHPHXPQMPPSXPSSSFLXXLKPRLKXEPEEVSIEDSAQSDLKEVMVLNAXESFVYEPKEQKKMFHAXVAXENEVFRVKVFNIDLKEKFXPKKIIAIANYVCRNGFLEVYPFXLVADVNADRNMEIPKGLIRSASVXPKINQLCSQXKGSFVNGVFEVHKKNVRGEFXYYEIQDNXGKMEVVVHGRLXXINCEEGDKLKLXCFELAPKSGNXGELRSVIHSHIKVIKXRKNKKDILNPDSSMEXSPDFFF

SEQ ID NO: 12861 - protein, 729 aa, Homo sapiens
  MOD_RES (74)..(74): Selenocysteine
  MOD_RES (81)..(81): Selenocysteine
  MOD_RES (105)..(105): Selenocysteine
  MOD_RES (111)..(111): Selenocysteine
  MOD_RES (114)..(114): Selenocysteine
  MOD_RES (117)..(117): Selenocysteine
  MOD_RES (123)..(123): Selenocysteine
  MOD_RES (131)..(131): Selenocysteine
  MOD_RES (138)..(138): Selenocysteine
  MOD_RES (156)..(157): Selenocysteine
  MOD_RES (164)..(164): Selenocysteine
  MOD_RES (176)..(176): Selenocysteine
  MOD_RES (179)..(179): Selenocysteine
  MOD_RES (181)..(181): Selenocysteine
  MOD_RES (191)..(191): Selenocysteine
  MOD_RES (222)..(222): Selenocysteine
  MOD_RES (231)..(231): Selenocysteine
  MOD_RES (245)..(245): Selenocysteine
  MOD_RES (270)..(270): Selenocysteine
  MOD_RES (275)..(276): Selenocysteine
  MOD_RES (292)..(292): Selenocysteine
  MOD_RES (336)..(336): Selenocysteine
  MOD_RES (363)..(364): Selenocysteine
  MOD_RES (372)..(372): Selenocysteine
  MOD_RES (378)..(379): Selenocysteine
  MOD_RES (386)..(386): Selenocysteine
  MOD_RES (392)..(392): Selenocysteine
  MOD_RES (417)..(417): Selenocysteine
  MOD_RES (428)..(428): Selenocysteine
  MOD_RES (435)..(435): Selenocysteine
  MOD_RES (442)..(443): Selenocysteine
  MOD_RES (448)..(448): Selenocysteine
  MOD_RES (473)..(473): Selenocysteine
  MOD_RES (484)..(484): Selenocysteine
  MOD_RES (491)..(491): Selenocysteine
  MOD_RES (498)..(499): Selenocysteine
  MOD_RES (506)..(506): Selenocysteine
  MOD_RES (530)..(530): Selenocysteine
  MOD_RES (547)..(547): Selenocysteine
  MOD_RES (550)..(550): Selenocysteine
  MOD_RES (569)..(569): Selenocysteine
  MOD_RES (592)..(592): Selenocysteine
  MOD_RES (616)..(616): Selenocysteine
  MOD_RES (626)..(626): Selenocysteine
  MOD_RES (647)..(647): Selenocysteine
  MOD_RES (655)..(655): Selenocysteine
  MOD_RES (667)..(668): Selenocysteine
  MOD_RES (680)..(680): Selenocysteine
  MOD_RES (691)..(691): Selenocysteine
  MOD_RES (707)..(707): Selenocysteine
  MOD_RES (723)..(723): Selenocysteine
MGKKYKNIVLLKGLEVINDYHFRMVKSLLSNDLKLNLKMREEYDKIQIADLMEEKFRGDAGLGKLIKIFEDIPXLEDLAEXLKKEKLKVKGPALSRKRKKEVDAXSPAPSXSSXVKXEGAEAXPGAQNPKXVAKCQVXPRRNVLQKRPVIVKVLSXXKPFEYEXPEMEKKIMFHAXVAXQXQFFHVKVLNXSLKEKFNGKKIIIISDYLEYDSLLEVNEESXVSEAGPNQXFEVPNKIINRAKEXLKIDILHKQASGNIVYGVFMLHKKXVNQKXXIYEIQDDRGKMDVVGXGQCHNIPCEEGDKLQLFCFRLRKKNQMSKLISEMHSFIQIKKKXNPRNNDPKSMKLPQEQRQLPYPSEASXXFPESHLRXPQMPPXXPSSSFFXKKSEDXISKMNDFMRMQILKEGSHFPGPFMXSIGPAESHPHXPQMPPSXPSSSFLXXKSEDXISKMNDFMRMQILKEGSHFPGPFMXSIGPAESHPHXPQMPPSXPSSSFLXXLKPRLKXEPEEVSIEDSAQSDLKEVMVLNAXESFVYEPKEQKKMFHAXVAXENEVFRVKVFNIDLKEKFXPKKIIAIANYVCRNGFLEVYPFXLVADVNADRNMEIPKGLIRSASVXPKINQLCSQXKGSFVNGVFEVHKKNVRGEFXYYEIQDNXGKMEVVVHGRLXXINCEEGDKLKLXCFELAPKSGNXGELRSVIHSHIKVIKXRKNKKDILNPDSSMEXSPDFFF

SEQ ID NO: 12862 - protein, 243 aa, Homo sapiens
  MOD_RES (5)..(5): Selenocysteine
  MOD_RES (12)..(13): Selenocysteine
  MOD_RES (20)..(20): Selenocysteine
  MOD_RES (44)..(44): Selenocysteine
  MOD_RES (61)..(61): Selenocysteine
  MOD_RES (64)..(64): Selenocysteine
  MOD_RES (83)..(83): Selenocysteine
  MOD_RES (106)..(106): Selenocysteine
  MOD_RES (130)..(130): Selenocysteine
  MOD_RES (140)..(140): Selenocysteine
  MOD_RES (154)..(154): Selenocysteine
  MOD_RES (156)..(156): Selenocysteine
  MOD_RES (169)..(169): Selenocysteine
  MOD_RES (181)..(182): Selenocysteine
  MOD_RES (194)..(194): Selenocysteine
  MOD_RES (205)..(205): Selenocysteine
  MOD_RES (221)..(221): Selenocysteine
  MOD_RES (237)..(237): Selenocysteine
MPPSXPSSSFLXXLKPRLKXEPEEVSIEDSAQSDLKEVMVLNAXESFVYEPKEQKKMFHAXVAXENEVFRVKVFNIDLKEKFXPKKIIAIANYVCRNGFLEVYPFXLVADVNADRNMEIPKGLIRSASVXPKINQLCSQXKGSFVNGVFEVHKXVXRKLGILLEIQDNXGKMEVVVHGRLXXINCEEGDKLKLXCFELAPKSGNXGELRSVIHSHIKVIKXRKNKKDILNPDSSMEXSPDFFF

SEQ ID NO: 12863 - protein, 74 aa, Homo sapiens
  MOD_RES (3)..(3): Selenocysteine
  MOD_RES (13)..(13): Selenocysteine
  MOD_RES (24)..(24): Selenocysteine
  MOD_RES (29)..(29): Selenocysteine
  MOD_RES (36)..(36): Selenocysteine
  MOD_RES (54)..(55): Selenocysteine
  MOD_RES (62)..(62): Selenocysteine
  MOD_RES (74)..(74): Selenocysteine
MSXAMGRSPSPKXSLSAPPNSSSXENPKXVAKCQVXPRRNVLQKRPVIVKVLSXXKPFEYEXPEMEKKIMFHAX

SEQ ID NO: 12864 - protein, 229 aa, Homo sapiens
  MOD_RES (3)..(3): Selenocysteine
  MOD_RES (13)..(13): Selenocysteine
  MOD_RES (24)..(24): Selenocysteine
  MOD_RES (29)..(29): Selenocysteine
  MOD_RES (36)..(36): Selenocysteine
  MOD_RES (54)..(55): Selenocysteine
  MOD_RES (62)..(62): Selenocysteine
  MOD_RES (74)..(74): Selenocysteine
  MOD_RES (77)..(77): Selenocysteine
  MOD_RES (79)..(79): Selenocysteine
  MOD_RES (89)..(89): Selenocysteine
  MOD_RES (120)..(120): Selenocysteine
  MOD_RES (129)..(129): Selenocysteine
  MOD_RES (143)..(143): Selenocysteine
  MOD_RES (168)..(168): Selenocysteine
  MOD_RES (173)..(174): Selenocysteine
  MOD_RES (190)..(190): Selenocysteine
MSXAMGRSPSPKXSLSAPPNSSSXENPKXVAKCQVXPRRNVLQKRPVIVKVLSXXKPFEYEXPEMEKKIMFHAXVAXQXQFFHVKVLNXSLKEKFNGKKIIIISDYLEYDSLLEVNEESXVSEAGPNQXFEVPNKIINRAKEXLKIDILHKQASGNIVYGVFMLHKKXVNQKXXIYEIQDDRGKMDVVGXGQCHNIPCEEGDKLQLFCFRLRKKNQMSKLISEMHSFIQ

SEQ ID NO: 12865 - protein, 105 aa, Homo sapiens
  MOD_RES (2)..(2): Selenocysteine
  MOD_RES (21)..(21): Selenocysteine
  MOD_RES (45)..(45): Selenocysteine
  MOD_RES (65)..(65): Selenocysteine
  MOD_RES (86)..(86): Selenocysteine
  MOD_RES (97)..(97): Selenocysteine
MXLSPLLLFLPPLLLLLDVPXAAVQASPLQALDFFGNGPPVNYKXGNLYLRGPLKKSNAPLVNVXLYYEALCGGCRAFLIRELFPXWLLVMEILNVXLVPYGNAQ

SEQ ID NO: 12866 - protein, 250 aa, Homo sapiens
  MOD_RES (2)..(2): Selenocysteine
  MOD_RES (21)..(21): Selenocysteine
  MOD_RES (45)..(45): Selenocysteine
  MOD_RES (65)..(65): Selenocysteine
  MOD_RES (86)..(86): Selenocysteine
  MOD_RES (97)..(97): Selenocysteine
  MOD_RES (145)..(145): Selenocysteine
  MOD_RES (174)..(174): Selenocysteine
  MOD_RES (195)..(195): Selenocysteine
  MOD_RES (209)..(209): Selenocysteine
  MOD_RES (219)..(219): Selenocysteine
  MOD_RES (223)..(223): Selenocysteine
  MOD_RES (241)..(241): Selenocysteine
MXLSPLLLFLPPLLLLLDVPXAAVQASPLQALDFFGNGPPVNYKXGNLYLRGPLKKSNAPLVNVXLYYEALCGGCRAFLIRELFPXWLLVMEILNVXLVPYGNAQEQNVSGRWEFKCQHGEEECKFNKVEACVLDELDMELAFLXIVCMEEFEDMERSLPLCLQLYAPGLSPDXIMECAMGDRGMQLMHANAQRXDALQPPHEYVPWVXVNGKPLEDQXQLLXLVCQLYQGKKPDVCPSSXSSLRSVCFK

SEQ ID NO: 12867 - protein, 286 aa, Homo sapiens
  MOD_RES (56)..(56): Selenocysteine
  MOD_RES (84)..(84): Selenocysteine
  MOD_RES (101)..(101): Selenocysteine
  MOD_RES (122)..(123): Selenocysteine
  MOD_RES (138)..(138): Selenocysteine
  MOD_RES (162)..(162): Selenocysteine
  MOD_RES (199)..(199): Selenocysteine
  MOD_RES (259)..(259): Selenocysteine
  MOD_RES (269)..(269): Selenocysteine
  MOD_RES (282)..(282): Selenocysteine
MSAPLDAALHALQEEQARLKMRLWDLQQLRKELGDSPKDKVPFSVPKIPLVFRGHXQQDPEVPKSLVSNLRIHCPLLAGSALIXFDDPKVAEQVLQQKEHXINMEECRLRVQVQPLELPMVXXIQMSSQLSGRRVLVXGFPASLRLSEEELLDKLEIFFGKXRNGGGDVDVRELLPGSVMLGFARDGVAQRLCQIGQFXVPLGGQQVPLRVSPYVNGEIQKAEIRSQPVPRSVLVLNIPDILDGPELHDVLEIHFQKPXRGGGEVEALXVVPQGQQGLAVFXSESG

SEQ ID NO: 12868 - protein, 288 aa, Homo sapiens
  MOD_RES (56)..(56): Selenocysteine
  MOD_RES (84)..(84): Selenocysteine
  MOD_RES (101)..(101): Selenocysteine
  MOD_RES (122)..(123): Selenocysteine
  MOD_RES (140)..(140): Selenocysteine
  MOD_RES (164)..(164): Selenocysteine
  MOD_RES (201)..(201): Selenocysteine
  MOD_RES (261)..(261): Selenocysteine
  MOD_RES (271)..(271): Selenocysteine
  MOD_RES (284)..(284): Selenocysteine
MSAPLDAALHALQEEQARLKMRLWDLQQLRKELGDSPKDKVPFSVPKIPLVFRGHXQQDPEVPKSLVSNLRIHCPLLAGSALIXFDDPKVAEQVLQQKEHXINMEECRLRVQVQPLELPMVXXIQVMMSSQLSGRRVLVXGFPASLRLSEEELLDKLEIFFGKXRNGGGDVDVRELLPGSVMLGFARDGVAQRLCQIGQFXVPLGGQQVPLRVSPYVNGEIQKAEIRSQPVPRSVLVLNIPDILDGPELHDVLEIHFQKPXRGGGEVEALXVVPQGQQGLAVFXSESG

SEQ ID NO: 12869 - protein, 138 aa, Homo sapiens
  MOD_RES (17)..(17): Selenocysteine
  MOD_RES (51)..(51): Selenocysteine
  MOD_RES (70)..(70): Selenocysteine
  MOD_RES (103)..(103): Selenocysteine
  MOD_RES (127)..(127): Selenocysteine
MRQKAVSLFLCYLLLFXCSGVEAGENAGKDAGKKKCSESSDSGSGFWKALXFMAVGGGLAVAGLPALGFXGAGIAANSVAASLMSWSAILNGGGVPAGGLVAXLQSLGAGGSSVVIGNIGALMGYAXHKYLDSEEDEE

SEQ ID NO: 12870 - protein, 134 aa, Homo sapiens
  MOD_RES (17)..(17): Selenocysteine
  MOD_RES (47)..(47): Selenocysteine
  MOD_RES (66)..(66): Selenocysteine
  MOD_RES (99)..(99): Selenocysteine
  MOD_RES (123)..(123): Selenocysteine
MRQKAVSLFLCYLLLFXCSGVEAGENAGKKKCSESSDSGSGFWKALXFMAVGGGLAVAGLPALGFXGAGIAANSVAASLMSWSAILNGGGVPAGGLVAXLQSLGAGGSSVVIGNIGALMGYAXHKYLDSEEDEE

SEQ ID NO: 12871 - protein, 130 aa, Homo sapiens
  MOD_RES (17)..(17): Selenocysteine
  MOD_RES (43)..(43): Selenocysteine
  MOD_RES (62)..(62): Selenocysteine
  MOD_RES (95)..(95): Selenocysteine
  MOD_RES (119)..(119): Selenocysteine
MRQKAVSLFLCYLLLFXCSGVEAGKKKCSESSDSGSGFWKALXFMAVGGGLAVAGLPALGFXGAGIAANSVAASLMSWSAILNGGGVPAGGLVAXLQSLGAGGSSVVIGNIGALMGYAXHKYLDSEEDEE

SEQ ID NO: 12872 - protein, 1025 aa, Homo sapiens
  MOD_RES (7)..(7): Selenocysteine
  MOD_RES (36)..(36): Selenocysteine
  MOD_RES (49)..(49): Selenocysteine
  MOD_RES (52)..(52): Selenocysteine
  MOD_RES (65)..(65): Selenocysteine
  MOD_RES (76)..(76): Selenocysteine
  MOD_RES (86)..(86): Selenocysteine
  MOD_RES (100)..(100): Selenocysteine
  MOD_RES (124)..(124): Selenocysteine
  MOD_RES (145)..(145): Selenocysteine
  MOD_RES (188)..(188): Selenocysteine
  MOD_RES (198)..(198): Selenocysteine
  MOD_RES (227)..(228): Selenocysteine
  MOD_RES (260)..(260): Selenocysteine
  MOD_RES (286)..(286): Selenocysteine
  MOD_RES (331)..(331): Selenocysteine
  MOD_RES (336)..(336): Selenocysteine
  MOD_RES (394)..(394): Selenocysteine
  MOD_RES (413)..(413): Selenocysteine
  MOD_RES (448)..(448): Selenocysteine
  MOD_RES (488)..(488): Selenocysteine
  MOD_RES (497)..(497): Selenocysteine
  MOD_RES (517)..(517): Selenocysteine
  MOD_RES (520)..(520): Selenocysteine
  MOD_RES (545)..(545): Selenocysteine
  MOD_RES (559)..(559): Selenocysteine
  MOD_RES (563)..(563): Selenocysteine
  MOD_RES (575)..(575): Selenocysteine
  MOD_RES (616)..(616): Selenocysteine
  MOD_RES (624)..(624): Selenocysteine
  MOD_RES (628)..(628): Selenocysteine
  MOD_RES (672)..(672): Selenocysteine
  MOD_RES (678)..(678): Selenocysteine
  MOD_RES (702)..(702): Selenocysteine
  MOD_RES (707)..(707): Selenocysteine
  MOD_RES (713)..(713): Selenocysteine
  MOD_RES (715)..(715): Selenocysteine
  MOD_RES (725)..(725): Selenocysteine
  MOD_RES (727)..(727): Selenocysteine
  MOD_RES (739)..(739): Selenocysteine
  MOD_RES (767)..(767): Selenocysteine
  MOD_RES (780)..(780): Selenocysteine
  MOD_RES (789)..(790): Selenocysteine
  MOD_RES (811)..(811): Selenocysteine
  MOD_RES (829)..(829): Selenocysteine
  MOD_RES (845)..(845): Selenocysteine
  MOD_RES (888)..(888): Selenocysteine
  MOD_RES (904)..(904): Selenocysteine
  MOD_RES (932)..(932): Selenocysteine
  MOD_RES (970)..(970): Selenocysteine
  MOD_RES (996)..(996): Selenocysteine
  MOD_RES (1009)..(1009): Selenocysteine
MSNGYSXDENFRYLISCFRARVKMYIQVEPVLDYLXFLPAEVKEQIQRXVAXSGNMQAVELLLSXLEKGVWHLGWXREFVEALRRXGSPLAARYMNPELXDLPSPSFENAHDEYLQLLNLLQPXLVDKLLVRDVLDKCMEEELLXIEDRNRIAAAENNGNESGVRELLKRIVQKENWFSAFLNVLRQXGNNELVQELXGSDCSESNAEIENLSQVDGPQVEEQLLSXXVQPNLEKEVWGMENNSSESSFADSSVVSESDXSLAEGSVSCLDESLGHNSNMGSDSGXMGSDSDEENVAARASPEPELQLRPYQMEVAQPALEGKNIIICLPXGSGKXRVAVYIAKDHLDKKKKASEPGKVIVLVNKVLLVEQLFRKEFQPFLKKWYRVIGLSGDXQLKISFPEVVKSCDIIISXAQILENSLLNLENGEDAGVQLSDFSLIIIDECHHXNKEAVYNNIMRHYLMQKLKNNRLKKENKPVIPLPQILGLXASPGVGGAXKQAKAEEHILKLCANLDAFXIKXVKENLDQLKNQIQEPCKKFAIADAXREDPFKEKLLEIMXRIQXYCQMSPMSDFGXQPYEQWAIQMEKKAAKEGNRKERVCAEHLRKYNEALQINDXIRMIDAYXHLEXFYNEEKDKKFAVIEDDSDEGGDDEYCDGDEDEDDLKKPLKLDEXDRFLMXLFFENNKMLKRLAENPEYENEKLXKLRNXIMEQYXRXEESARGIIFXKXRQSAYALSQWIXENEKFAEVGVKAHHLIGAGHSSEFKPMXQNEQKEVISKFRXGKINLLIAXXVAEEGLDIKECNIVIRYGLVXNEIAMVQARGRARADESXYVLVAHSGSGVIEHEXVNDFREKMMYKAIHCVQNMKPEEYAHKILELQMQSIMEKKMKXKRNIAKHYKNNPSLIXFLCKNCSVLACSGEDIHVIEKMHHVNMXPEFKELYIVRENKALQKKCADYQINGEIICKCGQAWGXMMVHKGLDLPCLKIRNFVVVFKNNSXKKQYKKWVELPIXFPNLDYSECCLFSDED

SEQ ID NO: 12873 - protein, 221 aa, Homo sapiens
  MOD_RES (7)..(7): Selenocysteine
  MOD_RES (36)..(36): Selenocysteine
  MOD_RES (49)..(49): Selenocysteine
  MOD_RES (52)..(52): Selenocysteine
  MOD_RES (65)..(65): Selenocysteine
  MOD_RES (76)..(76): Selenocysteine
  MOD_RES (86)..(86): Selenocysteine
  MOD_RES (100)..(100): Selenocysteine
  MOD_RES (124)..(124): Selenocysteine
  MOD_RES (145)..(145): Selenocysteine
  MOD_RES (188)..(188): Selenocysteine
  MOD_RES (198)..(198): Selenocysteine
  MOD_RES (213)..(213): Selenocysteine
MSNGYSXDENFRYLISCFRARVKMYIQVEPVLDYLXFLPAEVKEQIQRXVAXSGNMQAVELLLSXLEKGVWHLGWXREFVEALRRXGSPLAARYMNPELXDLPSPSFENAHDEYLQLLNLLQPXLVDKLLVRDVLDKCMEEELLXIEDRNRIAAAENNGNESGVRELLKRIVQKENWFSAFLNVLRQXGNNELVQELXGSDCSESNAGICNFXEEDSSNSA

SEQ ID NO: 12874 - protein, 447 aa, Homo sapiens
  MOD_RES (17)..(17): Selenocysteine
  MOD_RES (66)..(66): Selenocysteine
  MOD_RES (85)..(85): Selenocysteine
  MOD_RES (164)..(164): Selenocysteine
  MOD_RES (220)..(220): Selenocysteine
  MOD_RES (250)..(250): Selenocysteine
  MOD_RES (252)..(252): Selenocysteine
  MOD_RES (275)..(275): Selenocysteine
  MOD_RES (307)..(307): Selenocysteine
  MOD_RES (345)..(345): Selenocysteine
  MOD_RES (383)..(383): Selenocysteine
MPDLENRVLDQIEFLDXKYSVGIHNLLAYVKHLKGQNEEALKSLKEAENLMQEEHDNQANVRSLVXWGNFAWMYYHMGRLAEAQXYLDKVENICKKLSNPFRYRMECPEIDCEEGWALLKCGGKNYERAKACFEKVLEVDPENPESSAGYAISAYRLDGFKLAXKNHKPFSLLPLRQAVRLNPDNGYIKVLLALKLQDEGQEAEGEKYIEEALANMSSQXYVFRYAAKFYRRKGSVDKALELLKKALQEXPXSVLLHHQIGLCYKAQMIQIKEAXKGQPRGQNREKLDKMIRSAIFHFESAVEKKPXFEVAHLDLARMYIEAGNHRKAEENFQKLLCMKPVVEEXMQDIHFHYGRFQEFQKKSDVNAIIHYLKAIKIEQASLXRDKSINSLKKLVLRKLRRKALDLESLSLLGFVYKLEGNMNEALEYYERALRLAADFENSVRQGP

SEQ ID NO: 12875 - protein, 478 aa, Homo sapiens
  MOD_RES (3)..(3): Selenocysteine
  MOD_RES (22)..(22): Selenocysteine
  MOD_RES (48)..(48): Selenocysteine
  MOD_RES (97)..(97): Selenocysteine
  MOD_RES (116)..(116): Selenocysteine
  MOD_RES (195)..(195): Selenocysteine
  MOD_RES (251)..(251): Selenocysteine
  MOD_RES (281)..(281): Selenocysteine
  MOD_RES (283)..(283): Selenocysteine
  MOD_RES (306)..(306): Selenocysteine
  MOD_RES (338)..(338): Selenocysteine
  MOD_RES (376)..(376): Selenocysteine
  MOD_RES (414)..(414): Selenocysteine
MSXNGDDHQVKDSLEQLRCHFXWELSIDDDEMPDLENRVLDQIEFLDXKYSVGIHNLLAYVKHLKGQNEEALKSLKEAENLMQEEHDNQANVRSLVXWGNFAWMYYHMGRLAEAQXYLDKVENICKKLSNPFRYRMECPEIDCEEGWALLKCGGKNYERAKACFEKVLEVDPENPESSAGYAISAYRLDGFKLAXKNHKPFSLLPLRQAVRLNPDNGYIKVLLALKLQDEGQEAEGEKYIEEALANMSSQXYVFRYAAKFYRRKGSVDKALELLKKALQEXPXSVLLHHQIGLCYKAQMIQIKEAXKGQPRGQNREKLDKMIRSAIFHFESAVEKKPXFEVAHLDLARMYIEAGNHRKAEENFQKLLCMKPVVEEXMQDIHFHYGRFQEFQKKSDVNAIIHYLKAIKIEQASLXRDKSINSLKKLVLRKLRRKALDLESLSLLGFVYKLEGNMNEALEYYERALRLAADFENSVRQGP

SEQ ID NO: 12876 - protein, 472 aa, Homo sapiens
  MOD_RES (21)..(21): Selenocysteine
  MOD_RES (42)..(42): Selenocysteine
  MOD_RES (52)..(52): Selenocysteine
  MOD_RES (96)..(96): Selenocysteine
  MOD_RES (145)..(145): Selenocysteine
  MOD_RES (175)..(175): Selenocysteine
  MOD_RES (247)..(247): Selenocysteine
  MOD_RES (366)..(366): Selenocysteine
MSENNKNSLESSLRQLKCHFXWNLMEGENSLDDFEDKVFYRXEFQNREFKAXMCNLLAYLKHLKGQNEAALECLRKAEELIQQEHADQAEIRSLVXWGNYAWVYYHMGRLSDVQIYVDKVKHVCEKFSSPYRIESPELDCEEGWXRLKCGGNQNERAKVCFEKALEKKPKNPEFXSGLAIASYRLDNWPPSQNAIDPLRQAIRLNPDNQYLKVLLALKLHKMREEGEEEGEGEKLVEEALEKAPGVXDVLRSAAKFYRRKDEPDKAIELLKKALEYIPNNAYLHCQIGCCYRAKVFQVMNLRENGMYGKRKLLELIGHAVAHLKKADEANDNLFRVCSILASLHALADQYEDAEYYFQKEFSKELXPVAKQLLHLRYGNFQLYQMKCEDKAIHHFIEGVKINQKSREKEKMKDKLQKIAKMRLSKNGADSEALHVLAFLQELNEKMQQADEDSERGLESGSLIPSASSWNGE

SEQ ID NO: 12877 - protein, 483 aa, Homo sapiens
  MOD_RES (21)..(21): Selenocysteine
  MOD_RES (42)..(42): Selenocysteine
  MOD_RES (52)..(52): Selenocysteine
  MOD_RES (96)..(96): Selenocysteine
  MOD_RES (145)..(145): Selenocysteine
  MOD_RES (175)..(175): Selenocysteine
  MOD_RES (247)..(247): Selenocysteine
  MOD_RES (366)..(366): Selenocysteine
MSENNKNSLESSLRQLKCHFXWNLMEGENSLDDFEDKVFYRXEFQNREFKAXMCNLLAYLKHLKGQNEAALECLRKAEELIQQEHADQAEIRSLVXWGNYAWVYYHMGRLSDVQIYVDKVKHVCEKFSSPYRIESPELDCEEGWXRLKCGGNQNERAKVCFEKALEKKPKNPEFXSGLAIASYRLDNWPPSQNAIDPLRQAIRLNPDNQYLKVLLALKLHKMREEGEEEGEGEKLVEEALEKAPGVXDVLRSAAKFYRRKDEPDKAIELLKKALEYIPNNAYLHCQIGCCYRAKVFQVMNLRENGMYGKRKLLELIGHAVAHLKKADEANDNLFRVCSILASLHALADQYEDAEYYFQKEFSKELXPVAKQLLHLRYGNFQLYQMKCEDKAIHHFIEGVKINQKSREKEKMKDKLQKIAKMRLSKNGADSEALHVLAFLQELNEKMQQADEDSERGLESGSLIPSASSWNGERIEMWCPLGYC

SEQ ID NO: 12878 - protein, 490 aa, Homo sapiens
  MOD_RES (5)..(5): Selenocysteine
  MOD_RES (21)..(21): Selenocysteine
  MOD_RES (47)..(47): Selenocysteine
  MOD_RES (52)..(52): Selenocysteine
  MOD_RES (96)..(96): Selenocysteine
  MOD_RES (123)..(123): Selenocysteine
  MOD_RES (145)..(145): Selenocysteine
  MOD_RES (193)..(193): Selenocysteine
  MOD_RES (241)..(241): Selenocysteine
  MOD_RES (271)..(271): Selenocysteine
  MOD_RES (295)..(295): Selenocysteine
  MOD_RES (341)..(341): Selenocysteine
  MOD_RES (346)..(346): Selenocysteine
  MOD_RES (377)..(377): Selenocysteine
  MOD_RES (393)..(393): Selenocysteine
MSEVXKNSLEKILPQLKCHFXWNLFKEDSVSRDLEDRVCNQIEFLNXEFKAXMYNLLAYIKHLDGNNEAALECLRQAEELIQQEHADQAEIRSLVXWGNYAWVYYHLGRLSDAQIYVDKVKQXCKKFSNPYSIEYSELDCEEGWXQLKCGRNERAKVCFEKALEEKPNNPEFSSGLAIAMYHLDNHPEKQFSXDVLKQAIELSPDNQYVKVLLGLKLQKMNKEAEGEQFVEEALEKSPCQXDVLRSAAKFYRRKGDLDKAIELFQRVLESXPNNGYLYHQIGCCYKAKVRQMQNXGESEASGNKEMIEALKQYAMDYSNKALEKGLNPLNAYSDLAEFLEXECYQXPFNKEVPDAEKQQSHQRYCNLQKYNGKSEDXAVQHGLEGLSISKKSXDKEEIKDQPQNVSENLLPQNAPNYWYLQGLIHKQNGDLLQAAKCYEKELGRLLRDAPSGIGSIFLSASELEDGSEEMGQGAVSSSPRELLSNSEQLN

SEQ ID NO: 12879 - protein, 125 aa, Homo sapiens
  MOD_RES (17)..(17): Selenocysteine
  MOD_RES (23)..(23): Selenocysteine
  MOD_RES (31)..(31): Selenocysteine
  MOD_RES (44)..(44): Selenocysteine
  MOD_RES (73)..(73): Selenocysteine
  MOD_RES (81)..(81): Selenocysteine
  MOD_RES (97)..(97): Selenocysteine
  MOD_RES (110)..(110): Selenocysteine
MHKEEHEVAVLGPPPSXILPRSXVINIHSEXSVPDHVVWSLFNXLFLNWCCLGFIAFAYSVKSRDRKMVGDVXGAQAYASXAKCLNIWALILGILMXIGFILLLVFGSVXVYHIMLQIIQEKRGY

SEQ ID NO: 12880 - protein, 112 aa, Homo sapiens
  MOD_RES (23)..(23): Selenocysteine
  MOD_RES (31)..(31): Selenocysteine
  MOD_RES (44)..(44): Selenocysteine
  MOD_RES (49)..(49): Selenocysteine
  MOD_RES (73)..(73): Selenocysteine
  MOD_RES (81)..(81): Selenocysteine
  MOD_RES (97)..(97): Selenocysteine
MLKEEQEVAMLGVPHNPAPPMSXVIHIRSEXSVPDHVVWSLFNXLFMNXCCLGFIAFAYSVKSRDRKMVGDVXGAQAYASXAKCLNIWALILGIFMXILLIIIPVLVVQAQR

SEQ ID NO: 12881 - protein, 132 aa, Homo sapiens
  MOD_RES (7)..(7): Selenocysteine
  MOD_RES (43)..(43): Selenocysteine
  MOD_RES (51)..(51): Selenocysteine
  MOD_RES (64)..(64): Selenocysteine
  MOD_RES (69)..(69): Selenocysteine
  MOD_RES (93)..(93): Selenocysteine
  MOD_RES (101)..(101): Selenocysteine
  MOD_RES (117)..(117): Selenocysteine
MNHIVQXFSPVNSGQPPNYEMLKEEQEVAMLGVPHNPAPPMSXVIHIRSEXSVPDHVVWSLFNXLFMNXCCLGFIAFAYSVKSRDRKMVGDVXGAQAYASXAKCLNIWALILGIFMXILLIIIPVLVVQAQR

SEQ ID NO: 12882 - protein, 74 aa, Homo sapiens
  MOD_RES (1)..(1): Any amino acid
  MOD_RES (22)..(22): Selenocysteine
  MOD_RES (30)..(30): Selenocysteine
  MOD_RES (46)..(46): Selenocysteine
  MOD_RES (59)..(59): Selenocysteine
XGFIAFAYSVKSRDRKMVGDVXGAQAYASXAKCLNIWALILGILMXIGFILLLVFGSVXVYHIMLQIIQEKRGY

SEQ ID NO: 12883 - protein, 55 aa, Homo sapiens
  MOD_RES (1)..(1): Any amino acid
  MOD_RES (9)..(9): Selenocysteine
  MOD_RES (22)..(22): Selenocysteine
  MOD_RES (27)..(27): Selenocysteine
  MOD_RES (41)..(41): Selenocysteine
  MOD_RES (43)..(43): Selenocysteine
  MOD_RES (53)..(53): Selenocysteine
XVIHIRSEXSVPDHVVWSLFNXLFMNXCCLGFIAFAYSVKXGXQALPESEKGXHR

SEQ ID NO: 12884 - protein, 112 aa, Homo sapiens
  MOD_RES (21)..(21): Selenocysteine
  MOD_RES (23)..(23): Selenocysteine
  MOD_RES (31)..(31): Selenocysteine
  MOD_RES (44)..(44): Selenocysteine
  MOD_RES (73)..(73): Selenocysteine
  MOD_RES (81)..(81): Selenocysteine
  MOD_RES (97)..(97): Selenocysteine
MLKEEHEVAVLGAPHNPAPPXSXVIHIRSEXSVPDHVVWSLFNXLFMNPCCLGFIAFAYSVKSRDRKMVGDVXGAQAYASXAKCLNIWALILGILMXILLIVIPVLIFQAYG

SEQ ID NO: 12885 - protein, 133 aa, Homo sapiens
  MOD_RES (4)..(4): Selenocysteine
  MOD_RES (7)..(7): Selenocysteine
  MOD_RES (42)..(42): Selenocysteine
  MOD_RES (44)..(44): Selenocysteine
  MOD_RES (52)..(52): Selenocysteine
  MOD_RES (65)..(65): Selenocysteine
  MOD_RES (94)..(94): Selenocysteine
  MOD_RES (102)..(102): Selenocysteine
  MOD_RES (118)..(118): Selenocysteine
MNHXVQXFFSPVNSGQPPNYEMLKEEHEVAVLGAPHNPAPPXSXVIHIRSEXSVPDHVVWSLFNXLFMNPCCLGFIAFAYSVKSRDRKMVGDVXGAQAYASXAKCLNIWALILGILMXILLIVIPVLIFQAYG

SEQ ID NO: 12886 - protein, 55 aa, Homo sapiens
  MOD_RES (1)..(1): Any amino acid
  MOD_RES (9)..(9): Selenocysteine
  MOD_RES (22)..(22): Selenocysteine
  MOD_RES (41)..(41): Selenocysteine
  MOD_RES (43)..(43): Selenocysteine
  MOD_RES (53)..(53): Selenocysteine
XVIHIRSEXSVPDHVVWSLFNXLFMNPCCLGFIAFAYSVKXGXQALPESEKGXHR

SEQ ID NO: 12887 - protein, 189 aa, Homo sapiens
  MOD_RES (4)..(4): Selenocysteine
  MOD_RES (29)..(29): Selenocysteine
  MOD_RES (87)..(87): Selenocysteine
  MOD_RES (93)..(93): Selenocysteine
  MOD_RES (110)..(110): Selenocysteine
  MOD_RES (132)..(132): Selenocysteine
  MOD_RES (151)..(151): Selenocysteine
  MOD_RES (155)..(155): Selenocysteine
  MOD_RES (179)..(179): Selenocysteine
MALXFYLLVALVVLSYKSFSSLGCDLPQXHSLGNRRALILLAQMRRISPFSCLKDRHDFEFPQEEFDDKQFQKAQAISVLHEMIQQXFNLFSXKDSSAAWDEDLLDKFCXELYQQLNDLEACVMQEERVGEXPLMNADSILAVKKYFRRIXLYLXEKKYSPCAWEVVRAEIMRSLSLSXNLQERLRRKE

SEQ ID NO: 12888 - protein, 189 aa, Homo sapiens
  MOD_RES (29)..(29): Selenocysteine
  MOD_RES (37)..(37): Selenocysteine
  MOD_RES (92)..(93): Selenocysteine
  MOD_RES (110)..(110): Selenocysteine
  MOD_RES (132)..(132): Selenocysteine
  MOD_RES (151)..(151): Selenocysteine
  MOD_RES (155)..(155): Selenocysteine
  MOD_RES (179)..(179): Selenocysteine
MASPFALLMVLVVLSCKSSCSLGCDLPEXHSLDNRRXLMLLAQMSRISPSSCLMDRHDFGFPQEEFDGNQFQKAPAISVLHELIQQIFNLFXXKDSSAAWDEDLLDKFCXELYQQLNDLEACVMQEERVGEXPLMNADSILAVKKYFRRIXLYLXEKKYSPCAWEVVRAEIMRSLSLSXNLQERLRRKE

SEQ ID NO: 12889 - protein, 189 aa, Homo sapiens
  MOD_RES (29)..(29): Selenocysteine
  MOD_RES (87)..(87): Selenocysteine
  MOD_RES (93)..(93): Selenocysteine
  MOD_RES (110)..(110): Selenocysteine
  MOD_RES (132)..(132): Selenocysteine
  MOD_RES (151)..(151): Selenocysteine
  MOD_RES (179)..(179): Selenocysteine
MALSFSLLMAVLVLSYKSICSLGCDLPQXHSLGNRRALILLGQMGRISPFSCLKDRHDFRIPQEEFDGNQFQKAQAISVLHEMIQQXFNLFSXEDSSAAWEQSLLEKFSXELYQQLNDLEACVIQEVGVEEXPLMNEDSILAVRKYFQRIXLYLIERKYSPCAWEVVRAEIMRSLSFSXNLQKRLRRKD

SEQ ID NO: 12890 - protein, 189 aa, Homo sapiens
  MOD_RES (29)..(29): Selenocysteine
  MOD_RES (37)..(37): Selenocysteine
  MOD_RES (92)..(93): Selenocysteine
  MOD_RES (110)..(110): Selenocysteine
  MOD_RES (132)..(132): Selenocysteine
  MOD_RES (151)..(151): Selenocysteine
  MOD_RES (155)..(155): Selenocysteine
  MOD_RES (179)..(179): Selenocysteine
MASPFALLMALVVLSCKSSCSLGCDLPEXHSLDNRRXLMLLAQMSRISPSSCLMDRHDFGFPQEEFDGNQFQKAPAISVLHELIQQIFNLFXXKDSSAAWDEDLLDKFCXELYQQLNDLEACVMQEERVGEXPLMNADSILAVKKYFRRIXLYLXEKKYSPCAWEVVRAEIMRSLSLSXNLQERLRRKE

SEQ ID NO: 12891 - protein, 190 aa, Homo sapiens
  MOD_RES (30)..(30): Selenocysteine
  MOD_RES (38)..(38): Selenocysteine
  MOD_RES (93)..(94): Selenocysteine
  MOD_RES (111)..(111): Selenocysteine
  MOD_RES (133)..(133): Selenocysteine
  MOD_RES (152)..(152): Selenocysteine
  MOD_RES (156)..(156): Selenocysteine
  MOD_RES (180)..(180): Selenocysteine
MMASPFALLMALVVLSCKSSCSLGCDLPEXHSLDNRRXLMLLAQMSRISPSSCLMDRHDFGFPQEEFDGNQFQKAPAISVLHELIQQIFNLFXXKDSSAAWDEDLLDKFCXELYQQLNDLEACVMQEERVGEXPLMNADSILAVKKYFRRIXLYLXEKKYSPCAWEVVRAEIMRSLSLSXNLQERLRRKE

SEQ ID NO: 12892 - protein, 189 aa, Homo sapiens
  MOD_RES (29)..(29): Selenocysteine
  MOD_RES (37)..(37): Selenocysteine
  MOD_RES (87)..(87): Selenocysteine
  MOD_RES (93)..(93): Selenocysteine
  MOD_RES (103)..(103): Selenocysteine
  MOD_RES (132)..(132): Selenocysteine
  MOD_RES (151)..(151): Selenocysteine
  MOD_RES (179)..(179): Selenocysteine
MALPFALMMALVVLSCKSSCSLGCNLSQXHSLNNRRXLMLMAQMRRISPFSCLKDRHDFEFPQEEFDGNQFQKAQAISVLHEMMQQXFNLFSXKNSSAAWDEXLLEKFYIELFQQMNDLEACVIQEVGVEEXPLMNEDSILAVKKYFQRIXLYLMEKKYSPCAWEVVRAEIMRSLSFSXNLQKRLRRKD

SEQ ID NO: 12893 - protein, 189 aa, Homo sapiens
  MOD_RES (29)..(29): Selenocysteine
  MOD_RES (87)..(87): Selenocysteine
  MOD_RES (93)..(93): Selenocysteine
  MOD_RES (103)..(103): Selenocysteine
  MOD_RES (124)..(124): Selenocysteine
  MOD_RES (151)..(151): Selenocysteine
  MOD_RES (179)..(179): Selenocysteine
MALSFSLLMAVLVLSYKSICSLGCDLPQXHSLGNRRALILLAQMGRISHFSCLKDRYDFGFPQEVFDGNQFQKAQAISAFHEMIQQXFNLFSXKDSSAAWDEXLLDKFYIELFQQLNDLEACVXQEVGVEEIALMNEDSILAVRKYFQRIXLYLMGKKYSPCAWEVVRAEIMRSFSFSXNLQKGLRRKD

SEQ ID NO: 12894 - protein, 189 aa, Homo sapiens
  MOD_RES (29)..(29): Selenocysteine
  MOD_RES (74)..(74): Selenocysteine
  MOD_RES (87)..(87): Selenocysteine
  MOD_RES (93)..(93): Selenocysteine
  MOD_RES (110)..(110): Selenocysteine
  MOD_RES (132)..(132): Selenocysteine
  MOD_RES (151)..(151): Selenocysteine
  MOD_RES (155)..(155): Selenocysteine
  MOD_RES (179)..(179): Selenocysteine
MALSFSLLMAVLVLSYKSICSLGCDLPQXHSLGNRRALILLAQMGRISPFSCLKDRHDFGLPQEEFDGNQFQKXQAISVLHEMIQQXFNLFSXEDSSAAWEQSLLEKFSXELYQQLNNLEACVIQEVGMEEXPLMNEDSILAVRKYFQRIXLYLXEKKYSPCAWEVVRAEIMRSLSFSXNLQKILRRKD

SEQ ID NO: 12895 - protein, 188 aa, Homo sapiens
  MOD_RES (4)..(4): Selenocysteine
  MOD_RES (29)..(29): Selenocysteine
  MOD_RES (37)..(37): Selenocysteine
  MOD_RES (75)..(75): Selenocysteine
  MOD_RES (92)..(92): Selenocysteine
  MOD_RES (102)..(102): Selenocysteine
  MOD_RES (109)..(109): Selenocysteine
  MOD_RES (129)..(129): Selenocysteine
  MOD_RES (131)..(131): Selenocysteine
  MOD_RES (150)..(150): Selenocysteine
  MOD_RES (178)..(178): Selenocysteine
MALXFALLVALLVLSCKSSCSVGCDLPQXHSLGSRRXLMLLAQMRRISLFSCLKDRHDFGFPQEEFGNQFQKAEXIPVLHEMIQQIFNLFSXKDSSAAWDEXLLDKFYXELYQQLNDLEACVIQGVGVXEXPLMKEDSILAVRKYFQRIXLYLKEKKYSPCAWEVVRAEIMRSFSLSXNLQESLRSKE

SEQ ID NO: 12896 - protein, 189 aa, Homo sapiens
  MOD_RES (29)..(29): Selenocysteine
  MOD_RES (87)..(87): Selenocysteine
  MOD_RES (93)..(93): Selenocysteine
  MOD_RES (99)..(99): Selenocysteine
  MOD_RES (110)..(110): Selenocysteine
  MOD_RES (132)..(132): Selenocysteine
  MOD_RES (151)..(151): Selenocysteine
  MOD_RES (155)..(155): Selenocysteine
MALSFSLLMAVLVLSYKSICSLGCDLPQXHSLGNRRALILLAQMGRISPFSCLKDRHDFGFPQEEFDGNQFQKAQAISVLHEMIQQXFNLFSXKDSSAXWEQSLLEKFSXELNQQLNDLEACVIQEVGVEEXPLMNVDSILAVKKYFQRIXLYLXEKKYSPCAWEVVRAEIMRSFSLSKIFQERLRRKE

SEQ ID NO: 12897 - protein, 189 aa, Homo sapiens
  MOD_RES (29)..(29): Selenocysteine
  MOD_RES (87)..(87): Selenocysteine
  MOD_RES (93)..(93): Selenocysteine
  MOD_RES (110)..(110): Selenocysteine
  MOD_RES (132)..(132): Selenocysteine
  MOD_RES (151)..(151): Selenocysteine
  MOD_RES (155)..(155): Selenocysteine
  MOD_RES (179)..(179): Selenocysteine
MALSFSLLMAVLVLSYKSICSLGCDLPQXHSLGNRRALILLAQMGRISHFSCLKDRHDFGFPEEEFDGHQFQKAQAISVLHEMIQQXFNLFSXEDSSAAWEQSLLEKFSXELYQQLNDLEACVIQEVGVEEXPLMNEDSILAVRKYFQRIXLYLXEKKYSPCAWEVVRAEIMRSLSFSXNLQKRLRRKD

SEQ ID NO: 12898 - protein, 189 aa, Homo sapiens
  MOD_RES (29)..(29): Selenocysteine
  MOD_RES (37)..(37): Selenocysteine
  MOD_RES (87)..(87): Selenocysteine
  MOD_RES (93)..(93): Selenocysteine
  MOD_RES (99)..(99): Selenocysteine
  MOD_RES (103)..(103): Selenocysteine
  MOD_RES (110)..(110): Selenocysteine
  MOD_RES (132)..(132): Selenocysteine
  MOD_RES (142)..(142): Selenocysteine
  MOD_RES (151)..(151): Selenocysteine
  MOD_RES (155)..(155): Selenocysteine
MALPFVLLMALVVLNCKSICSLGCDLPQXHSLSNRRXLMIMAQMGRISPFSCLKDRHDFGFPQEEFDGNQFQKAQAISVLHEMIQQXFNLFSXKDSSAXWDEXLLDKFYXELYQQLNDLEACMMQEVGVEDXPLMNVDSILXVRKYFQRIXLYLXEKKYSPCAWEVVRAEIMRSFSLSANLQERLRRKE

SEQ ID NO: 12899 - protein, 189 aa, Homo sapiens
  MOD_RES (29)..(29): Selenocysteine
  MOD_RES (37)..(37): Selenocysteine
  MOD_RES (87)..(87): Selenocysteine
  MOD_RES (93)..(93): Selenocysteine
  MOD_RES (110)..(110): Selenocysteine
  MOD_RES (132)..(132): Selenocysteine
  MOD_RES (151)..(151): Selenocysteine
  MOD_RES (155)..(155): Selenocysteine
MALPFALLMALVVLSCKSSCSLDCDLPQXHSLGHRRXMMLLAQMRRISLFSCLKDRHDFRFPQEEFDGNQFQKAEAISVLHEVIQQXFNLFSXKDSSVAWDERLLDKLYXELYQQLNDLEACVMQEVWVGGXPLMNEDSILAVRKYFQRIXLYLXEKKYSPCAWEVVRAEIMRSFSSSRNLQERLRRKE

SEQ ID NO: 12900 - protein, 190 aa, Homo sapiens
  MOD_RES (1)..(1): Selenocysteine
  MOD_RES (30)..(30): Selenocysteine
  MOD_RES (38)..(38): Selenocysteine
  MOD_RES (88)..(88): Selenocysteine
  MOD_RES (94)..(94): Selenocysteine
  MOD_RES (111)..(111): Selenocysteine
  MOD_RES (133)..(133): Selenocysteine
  MOD_RES (152)..(152): Selenocysteine
  MOD_RES (156)..(156): Selenocysteine
XMALPFALLMALVVLSCKSSCSLDCDLPQXHSLGHRRXMMLLAQMRRISLFSCLKDRHDFRFPQEEFDGNQFQKAEAISVLHEVIQQXFNLFSXKDSSVAWDERLLDKLYXELYQQLNDLEACVMQEVWVGGXPLMNEDSILAVRKYFQRIXLYLXEKKYSPCAWEVVRAEIMRSFSSSRNLQERLRRKE

SEQ ID NO: 12901 - protein, 189 aa, Homo sapiens
  MOD_RES (29)..(29): Selenocysteine
  MOD_RES (74)..(74): Selenocysteine
  MOD_RES (87)..(87): Selenocysteine
  MOD_RES (93)..(93): Selenocysteine
  MOD_RES (110)..(110): Selenocysteine
  MOD_RES (132)..(132): Selenocysteine
  MOD_RES (151)..(151): Selenocysteine
  MOD_RES (179)..(179): Selenocysteine
MARSFSLLMVVLVLSYKSICSLGCDLPQXHSLRNRRALILLAQMGRISPFSCLKDRHEFRFPEEEFDGHQFQKXQAISVLHEMIQQXFNLFSXEDSSAAWEQSLLEKFSXELYQQLNDLEACVIQEVGVEEXPLMNEDFILAVRKYFQRIXLYLMEKKYSPCAWEVVRAEIMRSFSFSXNLKKGLRRKD

SEQ ID NO: 12902 - protein, 189 aa, Homo sapiens
  MOD_RES (4)..(4): Selenocysteine
  MOD_RES (29)..(29): Selenocysteine
  MOD_RES (87)..(87): Selenocysteine
  MOD_RES (93)..(93): Selenocysteine
  MOD_RES (103)..(103): Selenocysteine
  MOD_RES (151)..(151): Selenocysteine
  MOD_RES (155)..(155): Selenocysteine
MALXFYLLVALVVLSYKSFSSLGCDLPQXHSLGNRRALILLAQMRRISPFSCLKDRHDFEFPQEEFDDKQFQKAQAISVLHEMIQQXFNLFSXKDSSAALDEXLLDEFYIELDQQLNDLESCVMQEVGVIESPLMYEDSILAVRKYFQRIXLYLXEKKYSSCAWEVVRAEIMRSFSLSINLQKRLKSKE

SEQ ID NO: 12903 - protein, 557 aa, Homo sapiens
  MOD_RES (9)..(10): Selenocysteine
  MOD_RES (60)..(60): Selenocysteine
  MOD_RES (68)..(68): Selenocysteine
  MOD_RES (83)..(83): Selenocysteine
  MOD_RES (85)..(85): Selenocysteine
  MOD_RES (111)..(111): Selenocysteine
  MOD_RES (121)..(121): Selenocysteine
  MOD_RES (150)..(150): Selenocysteine
  MOD_RES (164)..(164): Selenocysteine
  MOD_RES (196)..(197): Selenocysteine
  MOD_RES (208)..(208): Selenocysteine
  MOD_RES (223)..(224): Selenocysteine
  MOD_RES (251)..(251): Selenocysteine
  MOD_RES (256)..(256): Selenocysteine
  MOD_RES (288)..(289): Selenocysteine
  MOD_RES (315)..(315): Selenocysteine
  MOD_RES (326)..(326): Selenocysteine
  MOD_RES (359)..(359): Selenocysteine
  MOD_RES (377)..(377): Selenocysteine
  MOD_RES (389)..(389): Selenocysteine
  MOD_RES (392)..(392): Selenocysteine
  MOD_RES (400)..(400): Selenocysteine
  MOD_RES (410)..(410): Selenocysteine
  MOD_RES (429)..(429): Selenocysteine
  MOD_RES (434)..(434): Selenocysteine
  MOD_RES (494)..(494): Selenocysteine
  MOD_RES (510)..(510): Selenocysteine
  MOD_RES (513)..(513): Selenocysteine
  MOD_RES (517)..(517): Selenocysteine
  MOD_RES (520)..(520): Selenocysteine
  MOD_RES (531)..(531): Selenocysteine
  MOD_RES (548)..(548): Selenocysteine
MMVVLLGAXXLVLVAVAPWVLSAAAGGKNLKSPQKVEVDIIDDNFILRWNRSDESVGNVXFSFDYQKXGMDNWIKLSGCQNIXSXKCNFSSLKLNVYEEIKLRIRAEKENXSSWYEVDSFXPFRKAQIGPPEVHLEAEDKAIVIHISPGXKDSVMWALDGLSFXYSLVIWKNSSGVEERIENIYSRHKIYKLSPEXXYCLKVKAALLXSWKIGVYSPVHCIKXXVENELPPPENIEVSVQNQNYVLKWDYXYANMXFQVQWLHAFLKRNPGNHLYKWKQIPDCENVKXXQCVFPQNVFQKGIYLLRVQASDGNNXSFWSEEIKFDXEIQAFLLPPVFNIRSLSDSFHIYIGAPKQSGNXPVIQDYPLIYEIIFWENXSNAERKIIEKKXDVXVPNLKPLXVYCVKARAHXMDEKLNKSSVFSDAVCEKXKPGNXSKIWLIVGICIALFALPFVIYAAKVFLRCINYVFFPSLKPSSSIDEYFSEQPLKNLLLSXSEEQIEKCFIIENISXIAXVEEXNQXDEDHKKYSSQXSQDSGNYSNEDESESKXSEELQQDFV

SEQ ID NO: 12904 - protein, 136 aa, Homo sapiens
  MOD_RES (9)..(10): Selenocysteine
  MOD_RES (60)..(60): Selenocysteine
  MOD_RES (68)..(68): Selenocysteine
  MOD_RES (83)..(83): Selenocysteine
  MOD_RES (85)..(85): Selenocysteine
  MOD_RES (111)..(111): Selenocysteine
  MOD_RES (121)..(121): Selenocysteine
MMVVLLGAXXLVLVAVAPWVLSAAAGGKNLKSPQKVEVDIIDDNFILRWNRSDESVGNVXFSFDYQKXGMDNWIKLSGCQNIXSXKCNFSSLKLNVYEEIKLRIRAEKENXSSWYEVDSFXPFRKVENELPPPENI

SEQ ID NO: 12905 - protein, 54 aa, Homo sapiens
  MOD_RES (2)..(2): Selenocysteine
FXNHINVMVKFPSIVEEELQFDLSLVIEEQSEGIVKKGEDEKLDISQFCHRQAL

SEQ ID NO: 12906 - protein, 197 aa, Homo sapiens
  MOD_RES (35)..(35): Selenocysteine
  MOD_RES (40)..(40): Selenocysteine
  MOD_RES (64)..(64): Selenocysteine
  MOD_RES (67)..(67): Selenocysteine
  MOD_RES (71)..(71): Selenocysteine
  MOD_RES (88)..(89): Selenocysteine
  MOD_RES (96)..(96): Selenocysteine
  MOD_RES (102)..(102): Selenocysteine
  MOD_RES (108)..(108): Selenocysteine
  MOD_RES (117)..(118): Selenocysteine
  MOD_RES (145)..(145): Selenocysteine
MLLSQNAFIFRSLNLVLMVYISLVFGISYDSPDYXDESCXFKISLRNFRSILSWELKNHSIVPXHYXLLYXIMSKPEDLKVVKNCANXXRSFCDLXDEWRSXHEAYVXVLEGFSGNXXLFSCSHNFWLAIDMSFEPPEFEIVGFXNHINVMVKFPSIVEEELQFDLSLVIEEQSEGIVKKGEDEKLDISQFCHRQAL

SEQ ID NO: 12907 - protein, 239 aa, Homo sapiens
  MOD_RES (35)..(35): Selenocysteine
  MOD_RES (40)..(40): Selenocysteine
  MOD_RES (64)..(64): Selenocysteine
  MOD_RES (67)..(67): Selenocysteine
  MOD_RES (71)..(71): Selenocysteine
  MOD_RES (88)..(89): Selenocysteine
  MOD_RES (96)..(96): Selenocysteine
  MOD_RES (102)..(102): Selenocysteine
  MOD_RES (108)..(108): Selenocysteine
  MOD_RES (117)..(118): Selenocysteine
  MOD_RES (145)..(145): Selenocysteine
  MOD_RES (194)..(194): Selenocysteine
  MOD_RES (204)..(204): Selenocysteine
  MOD_RES (228)..(228): Selenocysteine
MLLSQNAFIFRSLNLVLMVYISLVFGISYDSPDYXDESCXFKISLRNFRSILSWELKNHSIVPXHYXLLYXIMSKPEDLKVVKNCANXXRSFCDLXDEWRSXHEAYVXVLEGFSGNXXLFSCSHNFWLAIDMSFEPPEFEIVGFXNHINVMVKFPSIVEEELQFDLSLVIEEQSEGIVKKHKPEIKGNMSGNFXYIIDKLIPNXNYCVSVYLEHSDEQAVIKSPLKCXLLPPGQESEFS

SEQ ID NO: 12908 - protein, 331 aa, Homo sapiens
  MOD_RES (35)..(35): Selenocysteine
  MOD_RES (40)..(40): Selenocysteine
  MOD_RES (64)..(64): Selenocysteine
  MOD_RES (67)..(67): Selenocysteine
  MOD_RES (71)..(71): Selenocysteine
  MOD_RES (88)..(89): Selenocysteine
  MOD_RES (96)..(96): Selenocysteine
  MOD_RES (102)..(102): Selenocysteine
  MOD_RES (108)..(108): Selenocysteine
  MOD_RES (117)..(118): Selenocysteine
  MOD_RES (145)..(145): Selenocysteine
  MOD_RES (194)..(194): Selenocysteine
  MOD_RES (204)..(204): Selenocysteine
  MOD_RES (228)..(228): Selenocysteine
  MOD_RES (249)..(249): Selenocysteine
  MOD_RES (258)..(258): Selenocysteine
  MOD_RES (260)..(260): Selenocysteine
  MOD_RES (263)..(263): Selenocysteine
  MOD_RES (305)..(305): Selenocysteine
MLLSQNAFIFRSLNLVLMVYISLVFGISYDSPDYXDESCXFKISLRNFRSILSWELKNHSIVPXHYXLLYXIMSKPEDLKVVKNCANXXRSFCDLXDEWRSXHEAYVXVLEGFSGNXXLFSCSHNFWLAIDMSFEPPEFEIVGFXNHINVMVKFPSIVEEELQFDLSLVIEEQSEGIVKKHKPEIKGNMSGNFXYIIDKLIPNXNYCVSVYLEHSDEQAVIKSPLKCXLLPPGQESESAESAKIGGIIXVFLIALVLXSXIVXLKWIGYICLRNSLPKVLRQGLAKGWNAVAIHRCSHNALQSEXPELKQSSCLSFPSSWDYKRASLCPSD

SEQ ID NO: 12909 - protein, 515 aa, Homo sapiens
  MOD_RES (35)..(35): Selenocysteine
  MOD_RES (40)..(40): Selenocysteine
  MOD_RES (64)..(64): Selenocysteine
  MOD_RES (67)..(67): Selenocysteine
  MOD_RES (71)..(71): Selenocysteine
  MOD_RES (88)..(89): Selenocysteine
  MOD_RES (96)..(96): Selenocysteine
  MOD_RES (102)..(102): Selenocysteine
  MOD_RES (108)..(108): Selenocysteine
  MOD_RES (117)..(118): Selenocysteine
  MOD_RES (145)..(145): Selenocysteine
  MOD_RES (194)..(194): Selenocysteine
  MOD_RES (204)..(204): Selenocysteine
  MOD_RES (228)..(228): Selenocysteine
  MOD_RES (249)..(249): Selenocysteine
  MOD_RES (258)..(258): Selenocysteine
  MOD_RES (260)..(260): Selenocysteine
  MOD_RES (263)..(263): Selenocysteine
  MOD_RES (326)..(326): Selenocysteine
  MOD_RES (332)..(332): Selenocysteine
  MOD_RES (338)..(338): Selenocysteine
  MOD_RES (343)..(343): Selenocysteine
  MOD_RES (353)..(353): Selenocysteine
  MOD_RES (355)..(355): Selenocysteine
  MOD_RES (379)..(379): Selenocysteine
  MOD_RES (414)..(414): Selenocysteine
  MOD_RES (422)..(422): Selenocysteine
  MOD_RES (477)..(477): Selenocysteine
  MOD_RES (480)..(480): Selenocysteine
  MOD_RES (501)..(501): Selenocysteine
MLLSQNAFIFRSLNLVLMVYISLVFGISYDSPDYXDESCXFKISLRNFRSILSWELKNHSIVPXHYXLLYXIMSKPEDLKVVKNCANXXRSFCDLXDEWRSXHEAYVXVLEGFSGNXXLFSCSHNFWLAIDMSFEPPEFEIVGFXNHINVMVKFPSIVEEELQFDLSLVIEEQSEGIVKKHKPEIKGNMSGNFXYIIDKLIPNXNYCVSVYLEHSDEQAVIKSPLKCXLLPPGQESESAESAKIGGIIXVFLIALVLXSXIVXLKWIGYICLRNSLPKVLNFHNFLAWPFPNLPPLEAMDMVEVIYINRKKKVWDYNYDDESDSDXEAAPRXSGGGYXMHGLXVRPLGQASAXSXESQLIDPESEEEPDLPEVDVELPXMPKDSPQQLELLSGPCERRKSPLQDPFPEEDYSSXEGSGGRIXFNVDLNSVFLRVLDDEDSDDLEAPLMLSSHLEEMVDPEDPDNVQSNHLLASGEGXQPXFPSPSSEGLWSEDAPSDQSDXSESDVDLGDGYIMR

SEQ ID NO: 12910 - protein, 204 aa, Homo sapiens
  MOD_RES (19)..(19): Selenocysteine
  MOD_RES (59)..(59): Selenocysteine
  MOD_RES (64)..(64): Selenocysteine
  MOD_RES (88)..(88): Selenocysteine
  MOD_RES (91)..(91): Selenocysteine
  MOD_RES (95)..(95): Selenocysteine
  MOD_RES (112)..(113): Selenocysteine
  MOD_RES (120)..(120): Selenocysteine
  MOD_RES (126)..(126): Selenocysteine
  MOD_RES (132)..(132): Selenocysteine
  MOD_RES (141)..(142): Selenocysteine
  MOD_RES (169)..(169): Selenocysteine
MPRIPGICHCKICKSQEKXLKIAKMLLSQNAFIFRSLNLVLMVYISLVFGISYDSPDYXDESCXFKISLRNFRSILSWELKNHSIVPXHYXLLYXIMSKPEDLKVVKNCANXXRSFCDLXDEWRSXHEAYVXVLEGFSGNXXLFSCSHNFWLAIDMSFEPPEFEIVGFXNHINVMVKFPSIVEEELQFDLSLVIEEQSEGIVKK

SEQ ID NO: 12911 - protein, 167 aa, Homo sapiens
  MOD_RES (16)..(17): Selenocysteine
  MOD_RES (24)..(24): Selenocysteine
  MOD_RES (30)..(30): Selenocysteine
  MOD_RES (36)..(36): Selenocysteine
  MOD_RES (45)..(46): Selenocysteine
  MOD_RES (73)..(73): Selenocysteine
  MOD_RES (122)..(122): Selenocysteine
  MOD_RES (132)..(132): Selenocysteine
  MOD_RES (156)..(156): Selenocysteine
MSKPEDLKVVKNCANXXRSFCDLXDEWRSXHEAYVXVLEGFSGNXXLFSCSHNFWLAIDMSFEPPEFEIVGFXNHINVMVKFPSIVEEELQFDLSLVIEEQSEGIVKKHKPEIKGNMSGNFXYIIDKLIPNXNYCVSVYLEHSDEQAVIKSPLKCXLLPPGQESEFS

SEQ ID NO: 12912 - protein, 229 aa, Homo sapiens
  MOD_RES (16)..(17): Selenocysteine
  MOD_RES (24)..(24): Selenocysteine
  MOD_RES (30)..(30): Selenocysteine
  MOD_RES (36)..(36): Selenocysteine
  MOD_RES (45)..(46): Selenocysteine
  MOD_RES (73)..(73): Selenocysteine
  MOD_RES (122)..(122): Selenocysteine
  MOD_RES (132)..(132): Selenocysteine
  MOD_RES (156)..(156): Selenocysteine
  MOD_RES (177)..(177): Selenocysteine
  MOD_RES (186)..(186): Selenocysteine
  MOD_RES (188)..(188): Selenocysteine
  MOD_RES (191)..(191): Selenocysteine
MSKPEDLKVVKNCANXXRSFCDLXDEWRSXHEAYVXVLEGFSGNXXLFSCSHNFWLAIDMSFEPPEFEIVGFXNHINVMVKFPSIVEEELQFDLSLVIEEQSEGIVKKHKPEIKGNMSGNFXYIIDKLIPNXNYCVSVYLEHSDEQAVIKSPLKCXLLPPGQESESAESAKIGGIIXVFLIALVLXSXIVXLKWIGYICLRNSLPKVLNFHNFLAWPFPNLPPLEAMDM

SEQ ID NO: 12913 - protein, 187 aa, Homo sapiens
  MOD_RES (2)..(2): Selenocysteine
  MOD_RES (17)..(18): Selenocysteine
  MOD_RES (79)..(79): Selenocysteine
  MOD_RES (98)..(98): Selenocysteine
  MOD_RES (103)..(103): Selenocysteine
  MOD_RES (121)..(121): Selenocysteine
  MOD_RES (133)..(133): Selenocysteine
  MOD_RES (165)..(165): Selenocysteine
  MOD_RES (182)..(182): Selenocysteine
MXNKCLLQIALLLCFSXXALSMSYNLLGFLQRSSNFQCQKLLWQLNGRLEYCLKDRMNFDIPEEIKQLQQFQKEDAALXIYEMLQNIFAIFRQDSSSXGWNEXIVENLLANVYHQINHLKXVLEEKLEKEDFXRGKLMSSLHLKRYYGRILHYLKAKEYSHCAWXIVRVEILRNFYFINRLXGYLRN

SEQ ID NO: 12914 - protein, 208 aa, Homo sapiens
  MOD_RES (9)..(9): Selenocysteine
  MOD_RES (17)..(18): Selenocysteine
  MOD_RES (47)..(47): Selenocysteine
  MOD_RES (77)..(77): Selenocysteine
  MOD_RES (106)..(106): Selenocysteine
  MOD_RES (134)..(134): Selenocysteine
  MOD_RES (162)..(162): Selenocysteine
  MOD_RES (183)..(183): Selenocysteine
  MOD_RES (201)..(202): Selenocysteine
MIIKHFFGXVLVLLASXXIFSLDLKLIIFQQRQVNQESLKLLNKLQXLSIQQCLPHRKNFLLPQKSLSPQQYQKGHXLAILHEMLQQIFSLFRANISLDGWEENHXEKFLIQLHQQLEYLEALMGLEAEKLSGXLGSDNLRLQVKMYFRRIHDYLENQDYSXCAWAIVQVEISRCLFFVFSLXEKLSKQGRPLNDMKQELXXEFRSPR

SEQ ID NO: 12915 - protein, 166 aa, Homo sapiens
  MOD_RES (4)..(4): Selenocysteine
  MOD_RES (50)..(50): Selenocysteine
  MOD_RES (95)..(95): Selenocysteine
  MOD_RES (119)..(119): Selenocysteine
  MOD_RES (124)..(124): Selenocysteine
  MOD_RES (149)..(149): Selenocysteine
MKYXSYILAFQLCIVLGSLGCYCQDPYVKEAENLKKYFNAGHSDVADNGXLFLGILKNWKEESDRKIMQSQIVSFYFKLFKNFKDDQSIQKSVEXIKEDMNVKFFNSNKKKRDDFEKLXNYSVXDLNVQRKAIHELIQVMAELSPAAKXGKRKRSQMLFRGRRASQ

SEQ ID NO: 12916 - protein, 210 aa, Homo sapiens
  MOD_RES (21)..(21): Selenocysteine
  MOD_RES (31)..(31): Selenocysteine
  MOD_RES (33)..(33): Selenocysteine
  MOD_RES (36)..(36): Selenocysteine
  MOD_RES (60)..(60): Selenocysteine
  MOD_RES (131)..(132): Selenocysteine
  MOD_RES (155)..(155): Selenocysteine
  MOD_RES (193)..(194): Selenocysteine
  MOD_RES (203)..(203): Selenocysteine
MALLFLLPLVMQGVSRAEMGXADLGPSSVPXPXNVXIESYNMNPIVYWEYQIMPQVPVFXVEVKNYGVKARVGQKESAYAKSEEFAVCRDGKIGPPKLDIRKEEKQIMIDIFHPSVFVNGDEQEVDYDPEXXCYIRVYNVYVRMNGSEIQYKILXQKEDDCDEIQCQLAIPVSSLNSQYCVSAEGVLHVWGVXXEKSKEVCIXIFNSSIK

SEQ ID NO: 12917 - protein, 489 aa, Homo sapiens
  MOD_RES (21)..(21): Selenocysteine
  MOD_RES (31)..(31): Selenocysteine
  MOD_RES (33)..(33): Selenocysteine
  MOD_RES (36)..(36): Selenocysteine
  MOD_RES (60)..(60): Selenocysteine
  MOD_RES (165)..(166): Selenocysteine
  MOD_RES (189)..(189): Selenocysteine
  MOD_RES (227)..(228): Selenocysteine
  MOD_RES (237)..(237): Selenocysteine
  MOD_RES (295)..(295): Selenocysteine
  MOD_RES (298)..(298): Selenocysteine
  MOD_RES (309)..(309): Selenocysteine
  MOD_RES (330)..(330): Selenocysteine
  MOD_RES (336)..(336): Selenocysteine
  MOD_RES (346)..(346): Selenocysteine
  MOD_RES (353)..(353): Selenocysteine
  MOD_RES (357)..(358): Selenocysteine
  MOD_RES (372)..(372): Selenocysteine
  MOD_RES (414)..(414): Selenocysteine
  MOD_RES (440)..(440): Selenocysteine
  MOD_RES (447)..(447): Selenocysteine
  MOD_RES (453)..(453): Selenocysteine
  MOD_RES (482)..(482): Selenocysteine
MALLFLLPLVMQGVSRAEMGXADLGPSSVPXPXNVXIESYNMNPIVYWEYQIMPQVPVFXVEVKNYGVKNSEWIDACINISHHYCNISDHVGDPSNSLWVRVKARVGQKESAYAKSEEFAVCRDGKIGPPKLDIRKEEKQIMIDIFHPSVFVNGDEQEVDYDPEXXCYIRVYNVYVRMNGSEIQYKILXQKEDDCDEIQCQLAIPVSSLNSQYCVSAEGVLHVWGVXXEKSKEVCIXIFNSSIKGSLWIPVVAALLLFLVLSLVFICFYIKKINPLKEKSIILPKSLISVVRSAXLEXKPESKYVSLIXSYQPFSLEKEVVCEEPLSPAXVPGMHXEDNPGKVEHXEELSSIXEVVXXEENIPDVVPGSHLXPIERESSSPLSSNQSEPGSIALNSYHSRNCSESDHSRNGFDXDSSCLESHSSLSDSEFPPNNKGEIKXEGQELIXVIKAPXSFGYDKPHVLVDLLVDDSGKESLIGYRPXEDSKEFS

SEQ ID NO: 12918 - protein, 161 aa, Homo sapiens
  MOD_RES (21)..(21): Selenocysteine
  MOD_RES (23)..(23): Selenocysteine
  MOD_RES (26)..(26): Selenocysteine
  MOD_RES (50)..(50): Selenocysteine
  MOD_RES (155)..(156): Selenocysteine
MLLKSPENSLLQFQFKYGVPXPXNVXIESYNMNPIVYWEYQIMPQVPVFXVEVKNYGVKNSEWIDACINISHHYCNISDHVGDPSNSLWVRVKARVGQKESAYAKSEEFAVCRDGKIGPPKLDIRKEEKQIMIDIFHPSVFVNGDEQEVDYDPEXXCYIRV

SEQ ID NO: 12919 - protein, 330 aa, Homo sapiens
  MOD_RES (2)..(2): Selenocysteine
  MOD_RES (5)..(5): Selenocysteine
  MOD_RES (16)..(16): Selenocysteine
  MOD_RES (51)..(51): Selenocysteine
  MOD_RES (63)..(63): Selenocysteine
  MOD_RES (69)..(69): Selenocysteine
  MOD_RES (80)..(80): Selenocysteine
  MOD_RES (83)..(83): Selenocysteine
  MOD_RES (85)..(85): Selenocysteine
  MOD_RES (90)..(90): Selenocysteine
  MOD_RES (105)..(105): Selenocysteine
  MOD_RES (121)..(121): Selenocysteine
  MOD_RES (132)..(132): Selenocysteine
  MOD_RES (142)..(142): Selenocysteine
  MOD_RES (161)..(161): Selenocysteine
  MOD_RES (163)..(163): Selenocysteine
  MOD_RES (230)..(230): Selenocysteine
  MOD_RES (236)..(236): Selenocysteine
  MOD_RES (248)..(248): Selenocysteine
  MOD_RES (276)..(276): Selenocysteine
  MOD_RES (292)..(292): Selenocysteine
  MOD_RES (329)..(329): Selenocysteine
LXLEXYQEWCNDSAAXHDPLSQLPAPQHPKIRLYNAEQVLSWEPVALSNSXRPVVYQVQFKYXDSKWFXADIMSIGVNCXQIXAXECDFXAASPSAGFPMDFNVXLRLRAELGALHSAWVXMPWFQHYRNVXVGPPENIEVXPGEGSLIIRFSSPFDIADXSXAFFCYYVHYWEKGGIQQVKGPFRSNSISLDNLKPSRVYCLQVQAQLLWNKSNIFRVGHLSNISCYEXMADASXELQQVILISVGXFSLLSVLAGACFFLVLKYRGLIKYWFHXPPSIPLQIEEYLKDPXQPILEALDKDSSPKDDVWDSVSIISFPEKEQEDVLQXL

SEQ ID NO: 12920 - protein, 37 aa, Homo sapiens
  MOD_RES (4)..(4): Selenocysteine
  MOD_RES (27)..(27): Selenocysteine
  MOD_RES (34)..(34): Selenocysteine
MRPXLLWSLLLLLGVFAAAAAAPPAPXVNGSRPXSCP

SEQ ID NO: 12921 - protein, 356 aa, Homo sapiens
  MOD_RES (4)..(4): Selenocysteine
  MOD_RES (28)..(28): Selenocysteine
  MOD_RES (31)..(31): Selenocysteine
  MOD_RES (42)..(42): Selenocysteine
  MOD_RES (77)..(77): Selenocysteine
  MOD_RES (89)..(89): Selenocysteine
  MOD_RES (95)..(95): Selenocysteine
  MOD_RES (106)..(106): Selenocysteine
  MOD_RES (109)..(109): Selenocysteine
  MOD_RES (111)..(111): Selenocysteine
  MOD_RES (116)..(116): Selenocysteine
  MOD_RES (131)..(131): Selenocysteine
  MOD_RES (147)..(147): Selenocysteine
  MOD_RES (158)..(158): Selenocysteine
  MOD_RES (168)..(168): Selenocysteine
  MOD_RES (187)..(187): Selenocysteine
  MOD_RES (189)..(189): Selenocysteine
  MOD_RES (256)..(256): Selenocysteine
  MOD_RES (262)..(262): Selenocysteine
  MOD_RES (274)..(274): Selenocysteine
  MOD_RES (302)..(302): Selenocysteine
  MOD_RES (318)..(318): Selenocysteine
  MOD_RES (355)..(355): Selenocysteine
MRPXLLWSLLLLLGVFAAAAAAPPAQLXLEXYQEWCNDSAAXHDPLSQLPAPQHPKIRLYNAEQVLSWEPVALSNSXRPVVYQVQFKYXDSKWFXADIMSIGVNCXQIXAXECDFXAASPSAGFPMDFNVXLRLRAELGALHSAWVXMPWFQHYRNVXVGPPENIEVXPGEGSLIIRFSSPFDIADXSXAFFCYYVHYWEKGGIQQVKGPFRSNSISLDNLKPSRVYCLQVQAQLLWNKSNIFRVGHLSNISCYEXMADASXELQQVILISVGXFSLLSVLAGACFFLVLKYRGLIKYWFHXPPSIPLQIEEYLKDPXQPILEALDKDSSPKDDVWDSVSIISFPEKEQEDVLQXL

SEQ ID NO: 12922 - protein, 70 aa, Homo sapiens
  MOD_RES (4)..(4): Selenocysteine
  MOD_RES (28)..(28): Selenocysteine
  MOD_RES (31)..(31): Selenocysteine
  MOD_RES (42)..(42): Selenocysteine
MRPXLLWSLLLLLGVFAAAAAAPPAQLXLEXYQEWCNDSAAXHEMGDGEQACGGRNNGPQRCPRPHPQSP

SEQ ID NO: 12923 - protein, 337 aa, Homo sapiens
  MOD_RES (4)..(4): Selenocysteine
  MOD_RES (58)..(58): Selenocysteine
  MOD_RES (70)..(70): Selenocysteine
  MOD_RES (76)..(76): Selenocysteine
  MOD_RES (87)..(87): Selenocysteine
  MOD_RES (90)..(90): Selenocysteine
  MOD_RES (92)..(92): Selenocysteine
  MOD_RES (97)..(97): Selenocysteine
  MOD_RES (112)..(112): Selenocysteine
  MOD_RES (128)..(128): Selenocysteine
  MOD_RES (139)..(139): Selenocysteine
  MOD_RES (149)..(149): Selenocysteine
  MOD_RES (168)..(168): Selenocysteine
  MOD_RES (170)..(170): Selenocysteine
  MOD_RES (237)..(237): Selenocysteine
  MOD_RES (243)..(243): Selenocysteine
  MOD_RES (255)..(255): Selenocysteine
  MOD_RES (283)..(283): Selenocysteine
  MOD_RES (299)..(299): Selenocysteine
  MOD_RES (336)..(336): Selenocysteine
MRPXLLWSLLLLLGVFAAAAAAPPDPLSQLPAPQHPKIRLYNAEQVLSWEPVALSNSXRPVVYQVQFKYXDSKWFXADIMSIGVNCXQIXAXECDFXAASPSAGFPMDFNVXLRLRAELGALHSAWVXMPWFQHYRNVXVGPPENIEVXPGEGSLIIRFSSPFDIADXSXAFFCYYVHYWEKGGIQQVKGPFRSNSISLDNLKPSRVYCLQVQAQLLWNKSNIFRVGHLSNISCYEXMADASXELQQVILISVGXFSLLSVLAGACFFLVLKYRGLIKYWFHXPPSIPLQIEEYLKDPXQPILEALDKDSSPKDDVWDSVSIISFPEKEQEDVLQXL

SEQ ID NO: 12924 - protein, 258 aa, Homo sapiens
  MOD_RES (8)..(8): Selenocysteine
  MOD_RES (11)..(11): Selenocysteine
  MOD_RES (13)..(13): Selenocysteine
  MOD_RES (18)..(18): Selenocysteine
  MOD_RES (33)..(33): Selenocysteine
  MOD_RES (49)..(49): Selenocysteine
  MOD_RES (60)..(60): Selenocysteine
  MOD_RES (70)..(70): Selenocysteine
  MOD_RES (89)..(89): Selenocysteine
  MOD_RES (91)..(91): Selenocysteine
  MOD_RES (158)..(158): Selenocysteine
  MOD_RES (164)..(164): Selenocysteine
  MOD_RES (176)..(176): Selenocysteine
  MOD_RES (204)..(204): Selenocysteine
  MOD_RES (220)..(220): Selenocysteine
  MOD_RES (257)..(257): Selenocysteine
MSIGVNCXQIXAXECDFXAASPSAGFPMDFNVXLRLRAELGALHSAWVXMPWFQHYRNVXVGPPENIEVXPGEGSLIIRFSSPFDIADXSXAFFCYYVHYWEKGGIQQVKGPFRSNSISLDNLKPSRVYCLQVQAQLLWNKSNIFRVGHLSNISCYEXMADASXELQQVILISVGXFSLLSVLAGACFFLVLKYRGLIKYWFHXPPSIPLQIEEYLKDPXQPILEALDKDSSPKDDVWDSVSIISFPEKEQEDVLQXL

SEQ ID NO: 12925 - protein, 60 aa, Homo sapiens
  MOD_RES (1)..(1): Any amino acid
  MOD_RES (3)..(3): Selenocysteine
  MOD_RES (9)..(9): Selenocysteine
  MOD_RES (21)..(21): Selenocysteine
  MOD_RES (49)..(49): Selenocysteine
XEXMADASXELQQVILISVGXFSLLSVLAGACFFLVLKYRGLIKYWFHXPPSIPLQIEEV

SEQ ID NO: 12926 - protein, 313 aa, Homo sapiens
  MOD_RES (1)..(1): Any amino acid
  MOD_RES (34)..(34): Selenocysteine
  MOD_RES (46)..(46): Selenocysteine
  MOD_RES (52)..(52): Selenocysteine
  MOD_RES (63)..(63): Selenocysteine
  MOD_RES (66)..(66): Selenocysteine
  MOD_RES (68)..(68): Selenocysteine
  MOD_RES (73)..(73): Selenocysteine
  MOD_RES (88)..(88): Selenocysteine
  MOD_RES (104)..(104): Selenocysteine
  MOD_RES (115)..(115): Selenocysteine
  MOD_RES (125)..(125): Selenocysteine
  MOD_RES (144)..(144): Selenocysteine
  MOD_RES (146)..(146): Selenocysteine
  MOD_RES (213)..(213): Selenocysteine
  MOD_RES (219)..(219): Selenocysteine
  MOD_RES (231)..(231): Selenocysteine
  MOD_RES (259)..(259): Selenocysteine
  MOD_RES (275)..(275): Selenocysteine
  MOD_RES (312)..(312): Selenocysteine
XPLSQLPAPQHPKIRLYNAEQVLSWEPVALSNSXRPVVYQVQFKYXDSKWFXADIMSIGVNCXQIXAXECDFXAASPSAGFPMDFNVXLRLRAELGALHSAWVXMPWFQHYRNVXVGPPENIEVXPGEGSLIIRFSSPFDIADXSXAFFCYYVHYWEKGGIQQVKGPFRSNSISLDNLKPSRVYCLQVQAQLLWNKSNIFRVGHLSNISCYEXMADASXELQQVILISVGXFSLLSVLAGACFFLVLKYRGLIKYWFHXPPSIPLQIEEYLKDPXQPILEALDKDSSPKDDVWDSVSIISFPEKEQEDVLQXL

SEQ ID NO: 12927 - protein, 13 aa, Homo sapiens
  MOD_RES (1)..(1): Any amino acid
  MOD_RES (3)..(3): Selenocysteine
  MOD_RES (10)..(10): Selenocysteine
XPXVNGSRPXSCP

SEQ ID NO: 12928 - protein, 332 aa, Homo sapiens
  MOD_RES (1)..(1): Any amino acid
  MOD_RES (4)..(4): Selenocysteine
  MOD_RES (7)..(7): Selenocysteine
  MOD_RES (18)..(18): Selenocysteine
  MOD_RES (53)..(53): Selenocysteine
  MOD_RES (65)..(65): Selenocysteine
  MOD_RES (71)..(71): Selenocysteine
  MOD_RES (82)..(82): Selenocysteine
  MOD_RES (85)..(85): Selenocysteine
  MOD_RES (87)..(87): Selenocysteine
  MOD_RES (92)..(92): Selenocysteine
  MOD_RES (107)..(107): Selenocysteine
  MOD_RES (123)..(123): Selenocysteine
  MOD_RES (134)..(134): Selenocysteine
  MOD_RES (144)..(144): Selenocysteine
  MOD_RES (163)..(163): Selenocysteine
  MOD_RES (165)..(165): Selenocysteine
  MOD_RES (232)..(232): Selenocysteine
  MOD_RES (238)..(238): Selenocysteine
  MOD_RES (250)..(250): Selenocysteine
  MOD_RES (278)..(278): Selenocysteine
  MOD_RES (294)..(294): Selenocysteine
  MOD_RES (331)..(331): Selenocysteine
XQLXLEXYQEWCNDSAAXHDPLSQLPAPQHPKIRLYNAEQVLSWEPVALSNSXRPVVYQVQFKYXDSKWFXADIMSIGVNCXQIXAXECDFXAASPSAGFPMDFNVXLRLRAELGALHSAWVXMPWFQHYRNVXVGPPENIEVXPGEGSLIIRFSSPFDIADXSXAFFCYYVHYWEKGGIQQVKGPFRSNSISLDNLKPSRVYCLQVQAQLLWNKSNIFRVGHLSNISCYEXMADASXELQQVILISVGXFSLLSVLAGACFFLVLKYRGLIKYWFHXPPSIPLQIEEYLKDPXQPILEALDKDSSPKDDVWDSVSIISFPEKEQEDVLQXL

SEQ ID NO: 12929 - protein, 46 aa, Homo sapiens
  MOD_RES (1)..(1): Any amino acid
  MOD_RES (4)..(4): Selenocysteine
  MOD_RES (7)..(7): Selenocysteine
  MOD_RES (18)..(18): Selenocysteine
XQLXLEXYQEWCNDSAAXHEMGDGEQACGGRNNGPQRCPRPHPQSP

SEQ ID NO: 12930 - protein, 207 aa, Homo sapiens
  MOD_RES (3)..(3): Selenocysteine
  MOD_RES (25)..(25): Selenocysteine
  MOD_RES (41)..(41): Selenocysteine
  MOD_RES (76)..(76): Selenocysteine
  MOD_RES (102)..(102): Selenocysteine
  MOD_RES (201)..(201): Selenocysteine
MSXKPDMIQKCLWLEILMGIFIAGXLSLDCNLLNVHLRRVXWQNLRHLSSMSNSFPVECLRENIAFELPQEFLQYXQPMKRDIKKAFYEMSLQAFNIFSQHXFKYWKERHLKQIQIGLDQQAEYLNQCLEEDKNENEDMKEMKENEMKPSEARVPQLSSLELRRYFHRIDNFLKEKKYSDCAWEIVRVEIRRCLYYFYKFXALFRRK

SEQ ID NO: 12931 - protein, 491 aa, Homo sapiens
  MOD_RES (31)..(31): Selenocysteine
  MOD_RES (42)..(42): Selenocysteine
  MOD_RES (54)..(54): Selenocysteine
  MOD_RES (64)..(64): Selenocysteine
  MOD_RES (77)..(77): Selenocysteine
  MOD_RES (102)..(102): Selenocysteine
  MOD_RES (133)..(133): Selenocysteine
  MOD_RES (135)..(135): Selenocysteine
  MOD_RES (144)..(144): Selenocysteine
  MOD_RES (171)..(171): Selenocysteine
  MOD_RES (176)..(176): Selenocysteine
  MOD_RES (185)..(185): Selenocysteine
  MOD_RES (200)..(200): Selenocysteine
  MOD_RES (203)..(203): Selenocysteine
  MOD_RES (216)..(216): Selenocysteine
  MOD_RES (251)..(251): Selenocysteine
  MOD_RES (270)..(270): Selenocysteine
  MOD_RES (276)..(276): Selenocysteine
  MOD_RES (284)..(284): Selenocysteine
  MOD_RES (287)..(287): Selenocysteine
  MOD_RES (305)..(305): Selenocysteine
  MOD_RES (364)..(364): Selenocysteine
  MOD_RES (421)..(421): Selenocysteine
  MOD_RES (424)..(424): Selenocysteine
  MOD_RES (442)..(442): Selenocysteine
  MOD_RES (444)..(444): Selenocysteine
  MOD_RES (475)..(475): Selenocysteine
  MOD_RES (478)..(478): Selenocysteine
  MOD_RES (484)..(484): Selenocysteine
MAGPERWGPLLLCLLQAAPGRPRLAPPQNVXLLSQNFSVYLXWLPGLGNPQDVXYFVAYQSSPXRRRWREVEECAGXKELLCSMMCLKKQDLYNKFKGRVRXVSPSSKSPWVESEYLDYLFEVEPAPPVLVLXQXEEILSANAXYQLPPCMPPLDLKYEVAFWKEGAGNKXLFPVXPHGQPVQIXLQPAASEHHCLSARXIYXFSVPKYSKFSKPXCFLLEVPEANWAFLVLPSLLILLLVIAAGGVIWKXLMGNPWFQRAKMPRALELXRGVRPXPRVRAPAXQQXRWKKDLAEDEEEEDEEDXEDGVSFQPYIEPPSFLGQEHQAPGHSEAGGVDSGRPRAPLVPSEGSSAWDSSDRSWASXVDSSWDRAGSSGYLAEKGPGQGPGGDGHQESLPPPEFSKDSGFLEELPEDNLSSWAXWGXLPPEPNLVPGGPPVSLQXLXFCWESSPEEEEEARESEIEDSDAGSWGAESXQRXEDRGRXLGHYMAR

SEQ ID NO: 12932 - protein, 520 aa, Homo sapiens
  MOD_RES (31)..(31): Selenocysteine
  MOD_RES (42)..(42): Selenocysteine
  MOD_RES (54)..(54): Selenocysteine
  MOD_RES (64)..(64): Selenocysteine
  MOD_RES (77)..(77): Selenocysteine
  MOD_RES (102)..(102): Selenocysteine
  MOD_RES (133)..(133): Selenocysteine
  MOD_RES (135)..(135): Selenocysteine
  MOD_RES (144)..(144): Selenocysteine
  MOD_RES (171)..(171): Selenocysteine
  MOD_RES (176)..(176): Selenocysteine
  MOD_RES (185)..(185): Selenocysteine
  MOD_RES (200)..(200): Selenocysteine
  MOD_RES (203)..(203): Selenocysteine
  MOD_RES (216)..(216): Selenocysteine
  MOD_RES (251)..(251): Selenocysteine
  MOD_RES (273)..(273): Selenocysteine
  MOD_RES (278)..(278): Selenocysteine
  MOD_RES (299)..(299): Selenocysteine
  MOD_RES (305)..(305): Selenocysteine
  MOD_RES (313)..(313): Selenocysteine
  MOD_RES (316)..(316): Selenocysteine
  MOD_RES (334)..(334): Selenocysteine
  MOD_RES (393)..(393): Selenocysteine
  MOD_RES (450)..(450): Selenocysteine
  MOD_RES (453)..(453): Selenocysteine
  MOD_RES (471)..(471): Selenocysteine
  MOD_RES (473)..(473): Selenocysteine
  MOD_RES (504)..(504): Selenocysteine
  MOD_RES (507)..(507): Selenocysteine
  MOD_RES (513)..(513): Selenocysteine
MAGPERWGPLLLCLLQAAPGRPRLAPPQNVXLLSQNFSVYLXWLPGLGNPQDVXYFVAYQSSPXRRRWREVEECAGXKELLCSMMCLKKQDLYNKFKGRVRXVSPSSKSPWVESEYLDYLFEVEPAPPVLVLXQXEEILSANAXYQLPPCMPPLDLKYEVAFWKEGAGNKXLFPVXPHGQPVQIXLQPAASEHHCLSARXIYXFSVPKYSKFSKPXCFLLEVPEANWAFLVLPSLLILLLVIAAGGVIWKXLMGNPWFQRAKMPRALDFSGHXHPVAXFQPSRPESVNDLFLCPQKELXRGVRPXPRVRAPAXQQXRWKKDLAEDEEEEDEEDXEDGVSFQPYIEPPSFLGQEHQAPGHSEAGGVDSGRPRAPLVPSEGSSAWDSSDRSWASXVDSSWDRAGSSGYLAEKGPGQGPGGDGHQESLPPPEFSKDSGFLEELPEDNLSSWAXWGXLPPEPNLVPGGPPVSLQXLXFCWESSPEEEEEARESEIEDSDAGSWGAESXQRXEDRGRXLGHYMAR

SEQ ID NO: 12933 - protein, 244 aa, Homo sapiens
  MOD_RES (31)..(31): Selenocysteine
  MOD_RES (42)..(42): Selenocysteine
  MOD_RES (54)..(54): Selenocysteine
  MOD_RES (64)..(64): Selenocysteine
  MOD_RES (77)..(77): Selenocysteine
  MOD_RES (102)..(102): Selenocysteine
  MOD_RES (133)..(133): Selenocysteine
  MOD_RES (135)..(135): Selenocysteine
  MOD_RES (144)..(144): Selenocysteine
  MOD_RES (171)..(171): Selenocysteine
  MOD_RES (176)..(176): Selenocysteine
  MOD_RES (185)..(185): Selenocysteine
  MOD_RES (200)..(200): Selenocysteine
  MOD_RES (203)..(203): Selenocysteine
  MOD_RES (216)..(216): Selenocysteine
  MOD_RES (228)..(228): Selenocysteine
  MOD_RES (230)..(230): Selenocysteine
  MOD_RES (240)..(240): Selenocysteine
MAGPERWGPLLLCLLQAAPGRPRLAPPQNVXLLSQNFSVYLXWLPGLGNPQDVXYFVAYQSSPXRRRWREVEECAGXKELLCSMMCLKKQDLYNKFKGRVRXVSPSSKSPWVESEYLDYLFEVEPAPPVLVLXQXEEILSANAXYQLPPCMPPLDLKYEVAFWKEGAGNKXLFPVXPHGQPVQIXLQPAASEHHCLSARXIYXFSVPKYSKFSKPXCFLLEVPGLFWXHXPCGNLSAQQXRVRE

SEQ ID NO: 12934 - protein, 211 aa, Homo sapiens
  MOD_RES (31)..(31): Selenocysteine
  MOD_RES (42)..(42): Selenocysteine
  MOD_RES (54)..(54): Selenocysteine
  MOD_RES (64)..(64): Selenocysteine
  MOD_RES (77)..(77): Selenocysteine
  MOD_RES (102)..(102): Selenocysteine
  MOD_RES (133)..(133): Selenocysteine
  MOD_RES (135)..(135): Selenocysteine
  MOD_RES (144)..(144): Selenocysteine
MAGPERWGPLLLCLLQAAPGRPRLAPPQNVXLLSQNFSVYLXWLPGLGNPQDVXYFVAYQSSPXRRRWREVEECAGXKELLCSMMCLKKQDLYNKFKGRVRXVSPSSKSPWVESEYLDYLFEVEPAPPVLVLXQXEEILSANAXYQLPPCMPPLDLKYEVAFWKEGAGNKVGSSFPAPRLGPLLHPFLLRFFSPSQPAPAPLLQEVFPVHS

SEQ ID NO: 12935 - protein, 185 aa, Homo sapiens
  MOD_RES (19)..(19): Selenocysteine
  MOD_RES (50)..(50): Selenocysteine
  MOD_RES (52)..(52): Selenocysteine
  MOD_RES (61)..(61): Selenocysteine
  MOD_RES (88)..(88): Selenocysteine
  MOD_RES (93)..(93): Selenocysteine
  MOD_RES (102)..(102): Selenocysteine
  MOD_RES (117)..(117): Selenocysteine
  MOD_RES (120)..(120): Selenocysteine
  MOD_RES (133)..(133): Selenocysteine
  MOD_RES (168)..(168): Selenocysteine
MMCLKKQDLYNKFKGRVRXVSPSSKSPWVESEYLDYLFEVEPAPPVLVLXQXEEILSANAXYQLPPCMPPLDLKYEVAFWKEGAGNKXLFPVXPHGQPVQIXLQPAASEHHCLSARXIYXFSVPKYSKFSKPXCFLLEVPEANWAFLVLPSLLILLLVIAAGGVIWKXLMGNPWFQRAKMPRALV

SEQ ID NO: 12936 - protein, 195 aa, Homo sapiens
  MOD_RES (14)..(14): Selenocysteine
  MOD_RES (37)..(37): Selenocysteine
  MOD_RES (93)..(93): Selenocysteine
  MOD_RES (103)..(103): Selenocysteine
  MOD_RES (110)..(110): Selenocysteine
  MOD_RES (121)..(121): Selenocysteine
  MOD_RES (142)..(142): Selenocysteine
  MOD_RES (179)..(179): Selenocysteine
MALLFPLLAALVMXSYSPVGSLGCDLPQNHGLLSRNXLVLLHQMRRISPFLCLKDRRDFRFPQEMVKGSQLQKAHVMSVLHEMLQQIFSLFHXERSSAAWNMXLLDQLHXGLHQQLQHLEXCLLQVVGEGESAGAISSPALXLRRYFQGIRVYLKEKKYSDCAWEVVRMEIMKSLFLSXNMQERLRSKDRDLGSS

SEQ ID NO: 12937 - protein, 380 aa, Homo sapiens
  MOD_RES (30)..(30): Selenocysteine
  MOD_RES (52)..(52): Selenocysteine
  MOD_RES (60)..(60): Selenocysteine
  MOD_RES (77)..(77): Selenocysteine
  MOD_RES (97)..(97): Selenocysteine
  MOD_RES (157)..(157): Selenocysteine
  MOD_RES (159)..(159): Selenocysteine
  MOD_RES (176)..(176): Selenocysteine
  MOD_RES (187)..(187): Selenocysteine
  MOD_RES (224)..(224): Selenocysteine
  MOD_RES (244)..(244): Selenocysteine
  MOD_RES (249)..(249): Selenocysteine
  MOD_RES (310)..(310): Selenocysteine
  MOD_RES (324)..(324): Selenocysteine
  MOD_RES (341)..(341): Selenocysteine
EGLLVGLKNGQILKIFVDNLFAIVLLKQAXAVRCLDMSASRKKLAVVDENDXCLVYDIDXKELLFQEPNANSVAWNXQCEDMLCFSGGGYLNIKASXFPVHRQKLQGFVVGYNGSKIFCLHVFSISAVEVPQSAPMYQYLDRKLFKEAYQIACLGVXDXDWRELAMEALEGLDFEXAKKERKKRGEXNNDLFLADVFSYQGKFHEAAKLYKRSGHENLALEMYXDLCMFEYAKDFLGSGDPKEXKMLIXKQADWARNIKEPKAAVEMYISAGEHVKAIEICGDHGWVDMLIDIARKLDKAEREPLLLCAXYLKKLDSPGYAAEXYLKMGDLKSLVQLHVEXQRWDEAFALGEKHPEFKDDIYMPYAQWLAENDRFEEAQK

SEQ ID NO: 12938 - protein, 97 aa, Homo sapiens
  MOD_RES (81)..(81): Selenocysteine
MFNGIISIRNKNGEEKVKIERPGGSLSPIWSICWNPSREERNDILAVADWGQKVSFYQLSGKQIGKDRALNFDPCCISYFXKGEYILLGGSDKQVSL

SEQ ID NO: 12939 - protein, 1032 aa, Homo sapiens
  MOD_RES (81)..(81): Selenocysteine
  MOD_RES (99)..(99): Selenocysteine
  MOD_RES (107)..(107): Selenocysteine
  MOD_RES (117)..(117): Selenocysteine
  MOD_RES (135)..(135): Selenocysteine
  MOD_RES (145)..(145): Selenocysteine
  MOD_RES (161)..(161): Selenocysteine
  MOD_RES (170)..(170): Selenocysteine
  MOD_RES (306)..(306): Selenocysteine
  MOD_RES (328)..(328): Selenocysteine
  MOD_RES (336)..(336): Selenocysteine
  MOD_RES (353)..(353): Selenocysteine
  MOD_RES (373)..(373): Selenocysteine
  MOD_RES (433)..(433): Selenocysteine
  MOD_RES (435)..(435): Selenocysteine
  MOD_RES (452)..(452): Selenocysteine
  MOD_RES (481)..(481): Selenocysteine
  MOD_RES (518)..(518): Selenocysteine
  MOD_RES (538)..(538): Selenocysteine
  MOD_RES (543)..(543): Selenocysteine
  MOD_RES (604)..(604): Selenocysteine
  MOD_RES (618)..(618): Selenocysteine
  MOD_RES (635)..(635): Selenocysteine
  MOD_RES (693)..(693): Selenocysteine
  MOD_RES (728)..(728): Selenocysteine
  MOD_RES (753)..(753): Selenocysteine
  MOD_RES (764)..(764): Selenocysteine
  MOD_RES (780)..(780): Selenocysteine
  MOD_RES (792)..(792): Selenocysteine
  MOD_RES (830)..(830): Selenocysteine
  MOD_RES (832)..(832): Selenocysteine
  MOD_RES (853)..(853): Selenocysteine
  MOD_RES (894)..(894): Selenocysteine
  MOD_RES (931)..(931): Selenocysteine
  MOD_RES (942)..(942): Selenocysteine
  MOD_RES (996)..(996): Selenocysteine
MFNGIISIRNKNGEEKVKIERPGGSLSPIWSICWNPSREERNDILAVADWGQKVSFYQLSGKQIGKDRALNFDPCCISYFXKGEYILLGGSDKQVSLFXKDGVRLGXVGEQNSWVWXCQAKPDSNYVVVGCQDGXISFYQLIFSXVHGLYKDRYAYRDSMXDVIVQHLIXEQKVRIKCKELVKKIAIYRNRLAIQLPEKILIYELYSEDLSDMHYRVKEKIIKKFECNLLVVCANHIILCQEKRLQCLSFSGVKEREWQMESLIRYIKVIGGPPGREGLLVGLKNGQILKIFVDNLFAIVLLKQAXAVRCLDMSASRKKLAVVDENDXCLVYDIDXKELLFQEPNANSVAWNXQCEDMLCFSGGGYLNIKASXFPVHRQKLQGFVVGYNGSKIFCLHVFSISAVEVPQSAPMYQYLDRKLFKEAYQIACLGVXDXDWRELAMEALEGLDFEXAKKAFIRVQDLRYLELISSIEERKKRGEXNNDLFLADVFSYQGKFHEAAKLYKRSGHENLALEMYXDLCMFEYAKDFLGSGDPKEXKMLIXKQADWARNIKEPKAAVEMYISAGEHVKAIEICGDHGWVDMLIDIARKLDKAEREPLLLCAXYLKKLDSPGYAAEXYLKMGDLKSLVQLHVEXQRWDEAFALGEKHPEFKDDIYMPYAQWLAENDRFEEAQKAFHKAGRQREAVQVLEQLXNNAVAESRFNDAAYYYWMLSMQCLDIAQDPAQKDXMLGKFYHFQRLAELYHGYHAIHRHXEDPFSVHRPEXLFNISRFLLHSLPKDXPSGISKVKILFXLAKQSKALGAYRLARHAYDKLRGLYIPARFQKSIELGXLXIRAKPFHDSEELVPLCYRCSXNNPLLNNLGNVCINCRQPFIFSASSYDVLHLVEFYLEEGIXDEEAISLIDLEVLRPKRDDRQLEIANNSSQILRLVEXKDSIGDEDPFXAKLSFEQGGSEFVPVVVSRLVLRSMSRRDVLIKRWPPPLRWQYFRSLLPDASIXMCPSCFQMFHSEDYELLVLQHGCCPYCRRCKDDPGP

SEQ ID NO: 12940 - protein, 1091 aa, Homo sapiens
  MOD_RES (67)..(67): Selenocysteine
  MOD_RES (140)..(140): Selenocysteine
  MOD_RES (158)..(158): Selenocysteine
  MOD_RES (166)..(166): Selenocysteine
  MOD_RES (176)..(176): Selenocysteine
  MOD_RES (194)..(194): Selenocysteine
  MOD_RES (204)..(204): Selenocysteine
  MOD_RES (220)..(220): Selenocysteine
  MOD_RES (229)..(229): Selenocysteine
  MOD_RES (365)..(365): Selenocysteine
  MOD_RES (387)..(387): Selenocysteine
  MOD_RES (395)..(395): Selenocysteine
  MOD_RES (412)..(412): Selenocysteine
  MOD_RES (432)..(432): Selenocysteine
  MOD_RES (492)..(492): Selenocysteine
  MOD_RES (494)..(494): Selenocysteine
  MOD_RES (511)..(511): Selenocysteine
  MOD_RES (540)..(540): Selenocysteine
  MOD_RES (577)..(577): Selenocysteine
  MOD_RES (597)..(597): Selenocysteine
  MOD_RES (602)..(602): Selenocysteine
  MOD_RES (663)..(663): Selenocysteine
  MOD_RES (677)..(677): Selenocysteine
  MOD_RES (694)..(694): Selenocysteine
  MOD_RES (752)..(752): Selenocysteine
  MOD_RES (787)..(787): Selenocysteine
  MOD_RES (812)..(812): Selenocysteine
  MOD_RES (823)..(823): Selenocysteine
  MOD_RES (839)..(839): Selenocysteine
  MOD_RES (851)..(851): Selenocysteine
  MOD_RES (889)..(889): Selenocysteine
  MOD_RES (891)..(891): Selenocysteine
  MOD_RES (912)..(912): Selenocysteine
  MOD_RES (953)..(953): Selenocysteine
  MOD_RES (990)..(990): Selenocysteine
  MOD_RES (1001)..(1001): Selenocysteine
  MOD_RES (1055)..(1055): Selenocysteine
MFNGIISIRNKNGEEKVKIERPGGSLSPIWSICWNPSSRWESFWMNRENEDAEDVIVNRYIQEIPSXLKSAVYSSQGSEAEEEEPEEEDDSPRDDNLEERNDILAVADWGQKVSFYQLSGKQIGKDRALNFDPCCISYFXKGEYILLGGSDKQVSLFXKDGVRLGXVGEQNSWVWXCQAKPDSNYVVVGCQDGXISFYQLIFSXVHGLYKDRYAYRDSMXDVIVQHLIXEQKVRIKCKELVKKIAIYRNRLAIQLPEKILIYELYSEDLSDMHYRVKEKIIKKFECNLLVVCANHIILCQEKRLQCLSFSGVKEREWQMESLIRYIKVIGGPPGREGLLVGLKNGQILKIFVDNLFAIVLLKQAXAVRCLDMSASRKKLAVVDENDXCLVYDIDXKELLFQEPNANSVAWNXQCEDMLCFSGGGYLNIKASXFPVHRQKLQGFVVGYNGSKIFCLHVFSISAVEVPQSAPMYQYLDRKLFKEAYQIACLGVXDXDWRELAMEALEGLDFEXAKKAFIRVQDLRYLELISSIEERKKRGEXNNDLFLADVFSYQGKFHEAAKLYKRSGHENLALEMYXDLCMFEYAKDFLGSGDPKEXKMLIXKQADWARNIKEPKAAVEMYISAGEHVKAIEICGDHGWVDMLIDIARKLDKAEREPLLLCAXYLKKLDSPGYAAEXYLKMGDLKSLVQLHVEXQRWDEAFALGEKHPEFKDDIYMPYAQWLAENDRFEEAQKAFHKAGRQREAVQVLEQLXNNAVAESRFNDAAYYYWMLSMQCLDIAQDPAQKDXMLGKFYHFQRLAELYHGYHAIHRHXEDPFSVHRPEXLFNISRFLLHSLPKDXPSGISKVKILFXLAKQSKALGAYRLARHAYDKLRGLYIPARFQKSIELGXLXIRAKPFHDSEELVPLCYRCSXNNPLLNNLGNVCINCRQPFIFSASSYDVLHLVEFYLEEGIXDEEAISLIDLEVLRPKRDDRQLEIANNSSQILRLVEXKDSIGDEDPFXAKLSFEQGGSEFVPVVVSRLVLRSMSRRDVLIKRWPPPLRWQYFRSLLPDASIXMCPSCFQMFHSEDYELLVLQHGCCPYCRRCKDDPGP

SEQ ID NO: 12941 - protein, 1182 aa, Homo sapiens
  MOD_RES (6)..(6): Selenocysteine
  MOD_RES (25)..(25): Selenocysteine
  MOD_RES (40)..(40): Selenocysteine
  MOD_RES (44)..(44): Selenocysteine
  MOD_RES (55)..(55): Selenocysteine
  MOD_RES (81)..(81): Selenocysteine
  MOD_RES (91)..(91): Selenocysteine
  MOD_RES (105)..(105): Selenocysteine
  MOD_RES (141)..(141): Selenocysteine
  MOD_RES (231)..(231): Selenocysteine
  MOD_RES (249)..(249): Selenocysteine
  MOD_RES (257)..(257): Selenocysteine
  MOD_RES (267)..(267): Selenocysteine
  MOD_RES (285)..(285): Selenocysteine
  MOD_RES (295)..(295): Selenocysteine
  MOD_RES (311)..(311): Selenocysteine
  MOD_RES (320)..(320): Selenocysteine
  MOD_RES (456)..(456): Selenocysteine
  MOD_RES (478)..(478): Selenocysteine
  MOD_RES (486)..(486): Selenocysteine
  MOD_RES (503)..(503): Selenocysteine
  MOD_RES (523)..(523): Selenocysteine
  MOD_RES (583)..(583): Selenocysteine
  MOD_RES (585)..(585): Selenocysteine
  MOD_RES (602)..(602): Selenocysteine
  MOD_RES (631)..(631): Selenocysteine
  MOD_RES (668)..(668): Selenocysteine
  MOD_RES (688)..(688): Selenocysteine
  MOD_RES (693)..(693): Selenocysteine
  MOD_RES (754)..(754): Selenocysteine
  MOD_RES (768)..(768): Selenocysteine
  MOD_RES (785)..(785): Selenocysteine
  MOD_RES (843)..(843): Selenocysteine
  MOD_RES (878)..(878): Selenocysteine
  MOD_RES (903)..(903): Selenocysteine
  MOD_RES (914)..(914): Selenocysteine
  MOD_RES (930)..(930): Selenocysteine
  MOD_RES (942)..(942): Selenocysteine
  MOD_RES (980)..(980): Selenocysteine
  MOD_RES (982)..(982): Selenocysteine
  MOD_RES (1003)..(1003): Selenocysteine
  MOD_RES (1044)..(1044): Selenocysteine
  MOD_RES (1081)..(1081): Selenocysteine
  MOD_RES (1092)..(1092): Selenocysteine
  MOD_RES (1146)..(1146): Selenocysteine
MRAVLXWRDKAEHCINDIAFKPDGXQLILAAGSRLLVYDXSDGXLLQPLKGHKDXVYCVAYAKDGKRFASGSADKSVIIWXSKLEGILKYXHNDAIQCVSYNPIXHQLASCSSSDFGLWSPEQKSVSKHKSSSKIICCSWXNDGQYLALGMFNGIISIRNKNGEEKVKIERPGGSLSPIWSICWNPSREERNDILAVADWGQKVSFYQLSGKQIGKDRALNFDPCCISYFXKGEYILLGGSDKQVSLFXKDGVRLGXVGEQNSWVWXCQAKPDSNYVVVGCQDGXISFYQLIFSXVHGLYKDRYAYRDSMXDVIVQHLIXEQKVRIKCKELVKKIAIYRNRLAIQLPEKILIYELYSEDLSDMHYRVKEKIIKKFECNLLVVCANHIILCQEKRLQCLSFSGVKEREWQMESLIRYIKVIGGPPGREGLLVGLKNGQILKIFVDNLFAIVLLKQAXAVRCLDMSASRKKLAVVDENDXCLVYDIDXKELLFQEPNANSVAWNXQCEDMLCFSGGGYLNIKASXFPVHRQKLQGFVVGYNGSKIFCLHVFSISAVEVPQSAPMYQYLDRKLFKEAYQIACLGVXDXDWRELAMEALEGLDFEXAKKAFIRVQDLRYLELISSIEERKKRGEXNNDLFLADVFSYQGKFHEAAKLYKRSGHENLALEMYXDLCMFEYAKDFLGSGDPKEXKMLIXKQADWARNIKEPKAAVEMYISAGEHVKAIEICGDHGWVDMLIDIARKLDKAEREPLLLCAXYLKKLDSPGYAAEXYLKMGDLKSLVQLHVEXQRWDEAFALGEKHPEFKDDIYMPYAQWLAENDRFEEAQKAFHKAGRQREAVQVLEQLXNNAVAESRFNDAAYYYWMLSMQCLDIAQDPAQKDXMLGKFYHFQRLAELYHGYHAIHRHXEDPFSVHRPEXLFNISRFLLHSLPKDXPSGISKVKILFXLAKQSKALGAYRLARHAYDKLRGLYIPARFQKSIELGXLXIRAKPFHDSEELVPLCYRCSXNNPLLNNLGNVCINCRQPFIFSASSYDVLHLVEFYLEEGIXDEEAISLIDLEVLRPKRDDRQLEIANNSSQILRLVEXKDSIGDEDPFXAKLSFEQGGSEFVPVVVSRLVLRSMSRRDVLIKRWPPPLRWQYFRSLLPDASIXMCPSCFQMFHSEDYELLVLQHGCCPYCRRCKDDPGP

SEQ ID NO: 12942 - protein, 1241 aa, Homo sapiens
  MOD_RES (6)..(6): Selenocysteine
  MOD_RES (25)..(25): Selenocysteine
  MOD_RES (40)..(40): Selenocysteine
  MOD_RES (44)..(44): Selenocysteine
  MOD_RES (55)..(55): Selenocysteine
  MOD_RES (81)..(81): Selenocysteine
  MOD_RES (91)..(91): Selenocysteine
  MOD_RES (105)..(105): Selenocysteine
  MOD_RES (141)..(141): Selenocysteine
  MOD_RES (217)..(217): Selenocysteine
  MOD_RES (290)..(290): Selenocysteine
  MOD_RES (308)..(308): Selenocysteine
  MOD_RES (316)..(316): Selenocysteine
  MOD_RES (326)..(326): Selenocysteine
  MOD_RES (344)..(344): Selenocysteine
  MOD_RES (354)..(354): Selenocysteine
  MOD_RES (370)..(370): Selenocysteine
  MOD_RES (379)..(379): Selenocysteine
  MOD_RES (515)..(515): Selenocysteine
  MOD_RES (537)..(537): Selenocysteine
  MOD_RES (545)..(545): Selenocysteine
  MOD_RES (562)..(562): Selenocysteine
  MOD_RES (582)..(582): Selenocysteine
  MOD_RES (642)..(642): Selenocysteine
  MOD_RES (644)..(644): Selenocysteine
  MOD_RES (661)..(661): Selenocysteine
  MOD_RES (690)..(690): Selenocysteine
  MOD_RES (727)..(727): Selenocysteine
  MOD_RES (747)..(747): Selenocysteine
  MOD_RES (752)..(752): Selenocysteine
  MOD_RES (813)..(813): Selenocysteine
  MOD_RES (827)..(827): Selenocysteine
  MOD_RES (844)..(844): Selenocysteine
  MOD_RES (902)..(902): Selenocysteine
  MOD_RES (937)..(937): Selenocysteine
  MOD_RES (962)..(962): Selenocysteine
  MOD_RES (973)..(973): Selenocysteine
  MOD_RES (989)..(989): Selenocysteine
  MOD_RES (1001)..(1001): Selenocysteine
  MOD_RES (1039)..(1039): Selenocysteine
  MOD_RES (1041)..(1041): Selenocysteine
  MOD_RES (1062)..(1062): Selenocysteine
  MOD_RES (1103)..(1103): Selenocysteine
  MOD_RES (1140)..(1140): Selenocysteine
  MOD_RES (1151)..(1151): Selenocysteine
  MOD_RES (1205)..(1205): Selenocysteine
MRAVLXWRDKAEHCINDIAFKPDGXQLILAAGSRLLVYDXSDGXLLQPLKGHKDXVYCVAYAKDGKRFASGSADKSVIIWXSKLEGILKYXHNDAIQCVSYNPIXHQLASCSSSDFGLWSPEQKSVSKHKSSSKIICCSWXNDGQYLALGMFNGIISIRNKNGEEKVKIERPGGSLSPIWSICWNPSSRWESFWMNRENEDAEDVIVNRYIQEIPSXLKSAVYSSQGSEAEEEEPEEEDDSPRDDNLEERNDILAVADWGQKVSFYQLSGKQIGKDRALNFDPCCISYFXKGEYILLGGSDKQVSLFXKDGVRLGXVGEQNSWVWXCQAKPDSNYVVVGCQDGXISFYQLIFSXVHGLYKDRYAYRDSMXDVIVQHLIXEQKVRIKCKELVKKIAIYRNRLAIQLPEKILIYELYSEDLSDMHYRVKEKIIKKFECNLLVVCANHIILCQEKRLQCLSFSGVKEREWQMESLIRYIKVIGGPPGREGLLVGLKNGQILKIFVDNLFAIVLLKQAXAVRCLDMSASRKKLAVVDENDXCLVYDIDXKELLFQEPNANSVAWNXQCEDMLCFSGGGYLNIKASXFPVHRQKLQGFVVGYNGSKIFCLHVFSISAVEVPQSAPMYQYLDRKLFKEAYQIACLGVXDXDWRELAMEALEGLDFEXAKKAFIRVQDLRYLELISSIEERKKRGEXNNDLFLADVFSYQGKFHEAAKLYKRSGHENLALEMYXDLCMFEYAKDFLGSGDPKEXKMLIXKQADWARNIKEPKAAVEMYISAGEHVKAIEICGDHGWVDMLIDIARKLDKAEREPLLLCAXYLKKLDSPGYAAEXYLKMGDLKSLVQLHVEXQRWDEAFALGEKHPEFKDDIYMPYAQWLAENDRFEEAQKAFHKAGRQREAVQVLEQLXNNAVAESRFNDAAYYYWMLSMQCLDIAQDPAQKDXMLGKFYHFQRLAELYHGYHAIHRHXEDPFSVHRPEXLFNISRFLLHSLPKDXPSGISKVKILFXLAKQSKALGAYRLARHAYDKLRGLYIPARFQKSIELGXLXIRAKPFHDSEELVPLCYRCSXNNPLLNNLGNVCINCRQPFIFSASSYDVLHLVEFYLEEGIXDEEAISLIDLEVLRPKRDDRQLEIANNSSQILRLVEXKDSIGDEDPFXAKLSFEQGGSEFVPVVVSRLVLRSMSRRDVLIKRWPPPLRWQYFRSLLPDASIXMCPSCFQMFHSEDYELLVLQHGCCPYCRRCKDDPGP

SEQ ID NO: 12943 - protein, 1234 aa, Homo sapiens
  MOD_RES (6)..(6): Selenocysteine
  MOD_RES (25)..(25): Selenocysteine
  MOD_RES (40)..(40): Selenocysteine
  MOD_RES (44)..(44): Selenocysteine
  MOD_RES (55)..(55): Selenocysteine
  MOD_RES (81)..(81): Selenocysteine
  MOD_RES (91)..(91): Selenocysteine
  MOD_RES (111)..(111): Selenocysteine
  MOD_RES (115)..(115): Selenocysteine
  MOD_RES (117)..(117): Selenocysteine
  MOD_RES (156)..(156): Selenocysteine
  MOD_RES (192)..(192): Selenocysteine
  MOD_RES (282)..(282): Selenocysteine
  MOD_RES (300)..(300): Selenocysteine
  MOD_RES (308)..(308): Selenocysteine
  MOD_RES (318)..(318): Selenocysteine
  MOD_RES (336)..(336): Selenocysteine
  MOD_RES (346)..(346): Selenocysteine
  MOD_RES (362)..(362): Selenocysteine
  MOD_RES (371)..(371): Selenocysteine
  MOD_RES (507)..(507): Selenocysteine
  MOD_RES (529)..(529): Selenocysteine
  MOD_RES (537)..(537): Selenocysteine
  MOD_RES (554)..(554): Selenocysteine
  MOD_RES (574)..(574): Selenocysteine
  MOD_RES (634)..(634): Selenocysteine
  MOD_RES (636)..(636): Selenocysteine
  MOD_RES (653)..(653): Selenocysteine
  MOD_RES (682)..(682): Selenocysteine
  MOD_RES (719)..(719): Selenocysteine
  MOD_RES (739)..(739): Selenocysteine
  MOD_RES (744)..(744): Selenocysteine
  MOD_RES (805)..(805): Selenocysteine
  MOD_RES (819)..(819): Selenocysteine
  MOD_RES (836)..(836): Selenocysteine
  MOD_RES (894)..(894): Selenocysteine
  MOD_RES (930)..(930): Selenocysteine
  MOD_RES (955)..(955): Selenocysteine
  MOD_RES (966)..(966): Selenocysteine
  MOD_RES (982)..(982): Selenocysteine
  MOD_RES (994)..(994): Selenocysteine
  MOD_RES (1032)..(1032): Selenocysteine
  MOD_RES (1034)..(1034): Selenocysteine
  MOD_RES (1055)..(1055): Selenocysteine
  MOD_RES (1096)..(1096): Selenocysteine
  MOD_RES (1133)..(1133): Selenocysteine
  MOD_RES (1144)..(1144): Selenocysteine
  MOD_RES (1198)..(1198): Selenocysteine
MRAVLXWRDKAEHCINDIAFKPDGXQLILAAGSRLLVYDXSDGXLLQPLKGHKDXVYCVAYAKDGKRFASGSADKSVIIWXSKLEGILKYXSWSVMSSLHLHLPFLGLHKXVRVXAXDKAPKGQGGRIDCLRPSVQNQPGQKHNDAIQCVSYNPIXHQLASCSSSDFGLWSPEQKSVSKHKSSSKIICCSWXNDGQYLALGMFNGIISIRNKNGEEKVKIERPGGSLSPIWSICWNPSREERNDILAVADWGQKVSFYQLSGKQIGKDRALNFDPCCISYFXKGEYILLGGSDKQVSLFXKDGVRLGXVGEQNSWVWXCQAKPDSNYVVVGCQDGXISFYQLIFSXVHGLYKDRYAYRDSMXDVIVQHLIXEQKVRIKCKELVKKIAIYRNRLAIQLPEKILIYELYSEDLSDMHYRVKEKIIKKFECNLLVVCANHIILCQEKRLQCLSFSGVKEREWQMESLIRYIKVIGGPPGREGLLVGLKNGQILKIFVDNLFAIVLLKQAXAVRCLDMSASRKKLAVVDENDXCLVYDIDXKELLFQEPNANSVAWNXQCEDMLCFSGGGYLNIKASXFPVHRQKLQGFVVGYNGSKIFCLHVFSISAVEVPQSAPMYQYLDRKLFKEAYQIACLGVXDXDWRELAMEALEGLDFEXAKKAFIRVQDLRYLELISSIEERKKRGEXNNDLFLADVFSYQGKFHEAAKLYKRSGHENLALEMYXDLCMFEYAKDFLGSGDPKEXKMLIXKQADWARNIKEPKAAVEMYISAGEHVKAIEICGDHGWVDMLIDIARKLDKAEREPLLLCAXYLKKLDSPGYAAEXYLKMGDLKSLVQLHVEXQRWDEAFALGEKHPEFKDDIYMPYAQWLAENDRFEEAQKAFHKAGRQREAVQVLEQLXNNAVAESRFNDAAYYYWMLSMQCLDIAQADPAQKDXMLGKFYHFQRLAELYHGYHAIHRHXEDPFSVHRPEXLFNISRFLLHSLPKDXPSGISKVKILFXLAKQSKALGAYRLARHAYDKLRGLYIPARFQKSIELGXLXIRAKPFHDSEELVPLCYRCSXNNPLLNNLGNVCINCRQPFIFSASSYDVLHLVEFYLEEGIXDEEAISLIDLEVLRPKRDDRQLEIANNSSQILRLVEXKDSIGDEDPFXAKLSFEQGGSEFVPVVVSRLVLRSMSRRDVLIKRWPPPLRWQYFRSLLPDASIXMCPSCFQMFHSEDYELLVLQHGCCPYCRRCKDDPGP

SEQ ID NO: 12944 - protein, 1292 aa, Homo sapiens
  MOD_RES (6)..(6): Selenocysteine
  MOD_RES (25)..(25): Selenocysteine
  MOD_RES (40)..(40): Selenocysteine
  MOD_RES (44)..(44): Selenocysteine
  MOD_RES (55)..(55): Selenocysteine
  MOD_RES (81)..(81): Selenocysteine
  MOD_RES (91)..(91): Selenocysteine
  MOD_RES (111)..(111): Selenocysteine
  MOD_RES (115)..(115): Selenocysteine
  MOD_RES (117)..(117): Selenocysteine
  MOD_RES (156)..(156): Selenocysteine
  MOD_RES (192)..(192): Selenocysteine
  MOD_RES (268)..(268): Selenocysteine
  MOD_RES (341)..(341): Selenocysteine
  MOD_RES (359)..(359): Selenocysteine
  MOD_RES (367)..(367): Selenocysteine
  MOD_RES (377)..(377): Selenocysteine
  MOD_RES (395)..(395): Selenocysteine
  MOD_RES (405)..(405): Selenocysteine
  MOD_RES (421)..(421): Selenocysteine
  MOD_RES (430)..(430): Selenocysteine
  MOD_RES (566)..(566): Selenocysteine
  MOD_RES (588)..(588): Selenocysteine
  MOD_RES (596)..(596): Selenocysteine
  MOD_RES (613)..(613): Selenocysteine
  MOD_RES (633)..(633): Selenocysteine
  MOD_RES (693)..(693): Selenocysteine
  MOD_RES (695)..(695): Selenocysteine
  MOD_RES (712)..(712): Selenocysteine
  MOD_RES (741)..(741): Selenocysteine
  MOD_RES (778)..(778): Selenocysteine
  MOD_RES (798)..(798): Selenocysteine
  MOD_RES (803)..(803): Selenocysteine
  MOD_RES (864)..(864): Selenocysteine
  MOD_RES (878)..(878): Selenocysteine
  MOD_RES (895)..(895): Selenocysteine
  MOD_RES (953)..(953): Selenocysteine
  MOD_RES (988)..(988): Selenocysteine
  MOD_RES (1013)..(1013): Selenocysteine
  MOD_RES (1024)..(1024): Selenocysteine
  MOD_RES (1040)..(1040): Selenocysteine
  MOD_RES (1052)..(1052): Selenocysteine
  MOD_RES (1090)..(1090): Selenocysteine
  MOD_RES (1092)..(1092): Selenocysteine
  MOD_RES (1113)..(1113): Selenocysteine
  MOD_RES (1154)..(1154): Selenocysteine
  MOD_RES (1191)..(1191): Selenocysteine
  MOD_RES (1202)..(1202): Selenocysteine
  MOD_RES (1256)..(1256): Selenocysteine
MRAVLXWRDKAEHCINDIAFKPDGXQLILAAGSRLLVYDXSDGXLLQPLKGHKDXVYCVAYAKDGKRFASGSADKSVIIWXSKLEGILKYXSWSVMSSLHLHLPFLGLHKXVRVXAXDKAPKGQGGRIDCLRPSVQNQPGQKHNDAIQCVSYNPIXHQLASCSSSDFGLWSPEQKSVSKHKSSSKIICCSWXNDGQYLALGMFNGIISIRNKNGEEKVKIERPGGSLSPIWSICWNPSSRWESFWMNRENEDAEDVIVNRYIQEIPSXLKSAVYSSQGSEAEEEEPEEEDDSPRDDNLEERNDILAVADWGQKVSFYQLSGKQIGKDRALNFDPCCISYFXKGEYILLGGSDKQVSLFXKDGVRLGXVGEQNSWVWXCQAKPDSNYVVVGCQDGXISFYQLIFSXVHGLYKDRYAYRDSMXDVIVQHLIXEQKVRIKCKELVKKIAIYRNRLAIQLPEKILIYELYSEDLSDMHYRVKEKIIKKFECNLLVVCANHIILCQEKRLQCLSFSGVKEREWQMESLIRYIKVIGGPPGREGLLVGLKNGQILKIFVDNLFAIVLLKQAXAVRCLDMSASRKKLAVVDENDXCLVYDIDXKELLFQEPNANSVAWNXQCEDMLCFSGGGYLNIKASXFPVHRQKLQGFVVGYNGSKIFCLHVFSISAVEVPQSAPMYQYLDRKLFKEAYQIACLGVXDXDWRELAMEALEGLDFEXAKKAFIRVQDLRYLELISSIEERKKRGEXNNDLFLADVFSYQGKFHEAAKLYKRSGHENLALEMYXDLCMFEYAKDFLGSGDPKEXKMLIXKQADWARNIKEPKAAVEMYISAGEHVKAIEICGDHGWVDMLIDIARKLDKAEREPLLLCAXYLKKLDSPGYAAEXYLKMGDLKSLVQLHVEXQRWDEAFALGEKHPEFKDDIYMPYAQWLAENDRFEEAQKAFHKAGRQREAVQVLEQLXNNAVAESRFNDAAYYYWMLSMQCLDIAQDPAQKDXMLGKFYHFQRLAELYHGYHAIHRHXEDPFSVHRPEXLFNISRFLLHSLPKDXPSGISKVKILFXLAKQSKALGAYRLARHAYDKLRGLYIPARFQKSIELGXLXIRAKPFHDSEELVPLCYRCSXNNPLLNNLGNVCINCRQPFIFSASSYDVLHLVEFYLEEGIXDEEAISLIDLEVLRPKRDDRQLEIANNSSQILRLVEXKDSIGDEDPFXAKLSFEQGGSEFVPVVVSRLVLRSMSRRDVLIKRWPPPLRWQYFRSLLPDASIXMCPSCFQMFHSEDYELLVLQHGCCPYCRRCKDDPGP

SEQ ID NO: 12945 - protein, 1131 aa, Homo sapiens
  MOD_RES (6)..(6): Selenocysteine
  MOD_RES (25)..(25): Selenocysteine
  MOD_RES (40)..(40): Selenocysteine
  MOD_RES (44)..(44): Selenocysteine
  MOD_RES (55)..(55): Selenocysteine
  MOD_RES (89)..(89): Selenocysteine
  MOD_RES (179)..(179): Selenocysteine
  MOD_RES (197)..(197): Selenocysteine
  MOD_RES (205)..(205): Selenocysteine
  MOD_RES (215)..(215): Selenocysteine
  MOD_RES (233)..(233): Selenocysteine
  MOD_RES (243)..(243): Selenocysteine
  MOD_RES (259)..(259): Selenocysteine
  MOD_RES (268)..(268): Selenocysteine
  MOD_RES (404)..(404): Selenocysteine
  MOD_RES (426)..(426): Selenocysteine
  MOD_RES (434)..(434): Selenocysteine
  MOD_RES (451)..(451): Selenocysteine
  MOD_RES (471)..(471): Selenocysteine
  MOD_RES (531)..(531): Selenocysteine
  MOD_RES (533)..(533): Selenocysteine
  MOD_RES (550)..(550): Selenocysteine
  MOD_RES (579)..(579): Selenocysteine
  MOD_RES (616)..(616): Selenocysteine
  MOD_RES (636)..(636): Selenocysteine
  MOD_RES (641)..(641): Selenocysteine
  MOD_RES (702)..(702): Selenocysteine
  MOD_RES (716)..(716): Selenocysteine
  MOD_RES (733)..(733): Selenocysteine
  MOD_RES (791)..(791): Selenocysteine
  MOD_RES (827)..(827): Selenocysteine
  MOD_RES (852)..(852): Selenocysteine
  MOD_RES (863)..(863): Selenocysteine
  MOD_RES (879)..(879): Selenocysteine
  MOD_RES (891)..(891): Selenocysteine
  MOD_RES (929)..(929): Selenocysteine
  MOD_RES (931)..(931): Selenocysteine
  MOD_RES (952)..(952): Selenocysteine
  MOD_RES (993)..(993): Selenocysteine
  MOD_RES (1030)..(1030): Selenocysteine
  MOD_RES (1041)..(1041): Selenocysteine
  MOD_RES (1095)..(1095): Selenocysteine
MRAVLXWRDKAEHCINDIAFKPDGXQLILAAGSRLLVYDXSDGXLLQPLKGHKDXVYCVAYAKDGLWSPEQKSVSKHKSSSKIICCSWXNDGQYLALGMFNGIISIRNKNGEEKVKIERPGGSLSPIWSICWNPSREERNDILAVADWGQKVSFYQLSGKQIGKDRALNFDPCCISYFXKGEYILLGGSDKQVSLFXKDGVRLGXVGEQNSWVWXCQAKPDSNYVVVGCQDGXISFYQLIFSXVHGLYKDRYAYRDSMXDVIVQHLIXEQKVRIKCKELVKKIAIYRNRLAIQLPEKILIYELYSEDLSDMHYRVKEKIIKKFECNLLVVCANHIILCQEKRLQCLSFSGVKEREWQMESLIRYIKVIGGPPGREGLLVGLKNGQILKIFVDNLFAIVLLKQAXAVRCLDMSASRKKLAVVDENDXCLVYDIDXKELLFQEPNANSVAWNXQCEDMLCFSGGGYLNIKASXFPVHRQKLQGFVVGYNGSKIFCLHVFSISAVEVPQSAPMYQYLDRKLFKEAYQIACLGVXDXDWRELAMEALEGLDFEXAKKAFIRVQDLRYLELISSIEERKKRGEXNNDLFLADVFSYQGKFHEAAKLYKRSGHENLALEMYXDLCMFEYAKDFLGSGDPKEXKMLIXKQADWARNIKEPKAAVEMYISAGEHVKAIEICGDHGWVDMLIDIARKLDKAEREPLLLCAXYLKKLDSPGYAAEXYLKMGDLKSLVQLHVEXQRWDEAFALGEKHPEFKDDIYMPYAQWLAENDRFEEAQKAFHKAGRQREAVQVLEQLXNNAVAESRFNDAAYYYWMLSMQCLDIAQADPAQKDXMLGKFYHFQRLAELYHGYHAIHRHXEDPFSVHRPEXLFNISRFLLHSLPKDXPSGISKVKILFXLAKQSKALGAYRLARHAYDKLRGLYIPARFQKSIELGXLXIRAKPFHDSEELVPLCYRCSXNNPLLNNLGNVCINCRQPFIFSASSYDVLHLVEFYLEEGIXDEEAISLIDLEVLRPKRDDRQLEIANNSSQILRLVEXKDSIGDEDPFXAKLSFEQGGSEFVPVVVSRLVLRSMSRRDVLIKRWPPPLRWQYFRSLLPDASIXMCPSCFQMFHSEDYELLVLQHGCCPYCRRCKDDPGP

SEQ ID NO: 12946 - protein, 80 aa, Homo sapiens
  MOD_RES (6)..(6): Selenocysteine
  MOD_RES (25)..(25): Selenocysteine
  MOD_RES (40)..(40): Selenocysteine
  MOD_RES (44)..(44): Selenocysteine
  MOD_RES (55)..(55): Selenocysteine
MRAVLXWRDKAEHCINDIAFKPDGXQLILAAGSRLLVYDXSDGXLLQPLKGHKDXVYCVAYAKDGNESSSVACLGHAAGQ

SEQ ID NO: 12947 - protein, 1118 aa, Homo sapiens
  MOD_RES (6)..(6): Selenocysteine
  MOD_RES (25)..(25): Selenocysteine
  MOD_RES (40)..(40): Selenocysteine
  MOD_RES (44)..(44): Selenocysteine
  MOD_RES (55)..(55): Selenocysteine
  MOD_RES (94)..(94): Selenocysteine
  MOD_RES (184)..(184): Selenocysteine
  MOD_RES (202)..(202): Selenocysteine
  MOD_RES (210)..(210): Selenocysteine
  MOD_RES (220)..(220): Selenocysteine
  MOD_RES (238)..(238): Selenocysteine
  MOD_RES (248)..(248): Selenocysteine
  MOD_RES (264)..(264): Selenocysteine
  MOD_RES (273)..(273): Selenocysteine
  MOD_RES (409)..(409): Selenocysteine
  MOD_RES (431)..(431): Selenocysteine
  MOD_RES (439)..(439): Selenocysteine
  MOD_RES (456)..(456): Selenocysteine
  MOD_RES (476)..(476): Selenocysteine
  MOD_RES (536)..(536): Selenocysteine
  MOD_RES (538)..(538): Selenocysteine
  MOD_RES (555)..(555): Selenocysteine
  MOD_RES (566)..(566): Selenocysteine
  MOD_RES (603)..(603): Selenocysteine
  MOD_RES (623)..(623): Selenocysteine
  MOD_RES (628)..(628): Selenocysteine
  MOD_RES (689)..(689): Selenocysteine
  MOD_RES (703)..(703): Selenocysteine
  MOD_RES (720)..(720): Selenocysteine
  MOD_RES (778)..(778): Selenocysteine
  MOD_RES (814)..(814): Selenocysteine
  MOD_RES (839)..(839): Selenocysteine
  MOD_RES (850)..(850): Selenocysteine
  MOD_RES (866)..(866): Selenocysteine
  MOD_RES (878)..(878): Selenocysteine
  MOD_RES (916)..(916): Selenocysteine
  MOD_RES (918)..(918): Selenocysteine
  MOD_RES (939)..(939): Selenocysteine
  MOD_RES (980)..(980): Selenocysteine
  MOD_RES (1017)..(1017): Selenocysteine
  MOD_RES (1028)..(1028): Selenocysteine
  MOD_RES (1082)..(1082): Selenocysteine
MRAVLXWRDKAEHCINDIAFKPDGXQLILAAGSRLLVYDXSDGXLLQPLKGHKDXVYCVAYAKDVLCIEGLWSPEQKSVSKHKSSSKIICCSWXNDGQYLALGMFNGIISIRNKNGEEKVKIERPGGSLSPIWSICWNPSREERNDILAVADWGQKVSFYQLSGKQIGKDRALNFDPCCISYFXKGEYILLGGSDKQVSLFXKDGVRLGXVGEQNSWVWXCQAKPDSNYVVVGCQDGXISFYQLIFSXVHGLYKDRYAYRDSMXDVIVQHLIXEQKVRIKCKELVKKIAIYRNRLAIQLPEKILIYELYSEDLSDMHYRVKEKIIKKFECNLLVVCANHIILCQEKRLQCLSFSGVKEREWQMESLIRYIKVIGGPPGREGLLVGLKNGQILKIFVDNLFAIVLLKQAXAVRCLDMSASRKKLAVVDENDXCLVYDIDXKELLFQEPNANSVAWNXQCEDMLCFSGGGYLNIKASXFPVHRQKLQGFVVGYNGSKIFCLHVFSISAVEVPQSAPMYQYLDRKLFKEAYQIACLGVXDXDWRELAMEALEGLDFEXAKKERKKRGEXNNDLFLADVFSYQGKFHEAAKLYKRSGHENLALEMYXDLCMFEYAKDFLGSGDPKEXKMLIXKQADWARNIKEPKAAVEMYISAGEHVKAIEICGDHGWVDMLIDIARKLDKAEREPLLLCAXYLKKLDSPGYAAEXYLKMGDLKSLVQLHVEXQRWDEAFALGEKHPEFKDDIYMPYAQWLAENDRFEEAQKAFHKAGRQREAVQVLEQLXNNAVAESRFNDAAYYYWMLSMQCLDIAQADPAQKDXMLGKFYHFQRLAELYHGYHAIHRHXEDPFSVHRPEXLFNISRFLLHSLPKDXPSGISKVKILFXLAKQSKALGAYRLARHAYDKLRGLYIPARFQKSIELGXLXIRAKPFHDSEELVPLCYRCSXNNPLLNNLGNVCINCRQPFIFSASSYDVLHLVEFYLEEGIXDEEAISLIDLEVLRPKRDDRQLEIANNSSQILRLVEXKDSIGDEDPFXAKLSFEQGGSEFVPVVVSRLVLRSMSRRDVLIKRWPPPLRWQYFRSLLPDASIXMCPSCFQMFHSEDYELLVLQHGCCPYCRRCKDDPGP

SEQ ID NO: 12948 - protein, 172 aa, Homo sapiens
  MOD_RES (22)..(22): Selenocysteine
  MOD_RES (24)..(24): Selenocysteine
  MOD_RES (41)..(41): Selenocysteine
  MOD_RES (52)..(52): Selenocysteine
  MOD_RES (89)..(89): Selenocysteine
  MOD_RES (109)..(109): Selenocysteine
  MOD_RES (114)..(114): Selenocysteine
MYQYLDRKLFKEAYQIACLGVXDXDWRELAMEALEGLDFEXAKKERKKRGEXNNDLFLADVFSYQGKFHEAAKLYKRSGHENLALEMYXDLCMFEYAKDFLGSGDPKEXKMLIXKQADWARNIKEPKAAVEMYISAGEHVKAIEICGDHGWVDMLIDIARKLDKAEREPLLL

SEQ ID NO: 12949 - protein, 46 aa, Homo sapiens
  MOD_RES (1)..(1): Any amino acid
  MOD_RES (12)..(12): Selenocysteine
  MOD_RES (33)..(33): Selenocysteine
XINDIAFKPDGXQLILAAGSRLLASALLLDQLXKALLSGHQNWKAF

SEQ ID NO: 12950 - protein, 110 aa, Homo sapiens
  MOD_RES (1)..(1): Any amino acid
  MOD_RES (12)..(12): Selenocysteine
  MOD_RES (27)..(27): Selenocysteine
  MOD_RES (31)..(31): Selenocysteine
  MOD_RES (42)..(42): Selenocysteine
  MOD_RES (57)..(57): Selenocysteine
  MOD_RES (93)..(93): Selenocysteine
XINDIAFKPDGXQLILAAGSRLLVYDXSDGXLLQPLKGHKDXVHNDAIQCVSYNPIXHQLASCSSSDFGLWSPEQKSVSKHKSSSKIICCSWXNDGQYLALGMFNGIISI

SEQ ID NO: 12951 - protein, 245 aa, Homo sapiens
  MOD_RES (1)..(1): Any amino acid
  MOD_RES (12)..(12): Selenocysteine
  MOD_RES (27)..(27): Selenocysteine
  MOD_RES (31)..(31): Selenocysteine
  MOD_RES (42)..(42): Selenocysteine
  MOD_RES (68)..(68): Selenocysteine
  MOD_RES (78)..(78): Selenocysteine
  MOD_RES (92)..(92): Selenocysteine
  MOD_RES (169)..(169): Selenocysteine
  MOD_RES (187)..(187): Selenocysteine
  MOD_RES (195)..(195): Selenocysteine
  MOD_RES (205)..(205): Selenocysteine
  MOD_RES (223)..(223): Selenocysteine
  MOD_RES (233)..(233): Selenocysteine
XINDIAFKPDGXQLILAAGSRLLVYDXSDGXLLQPLKGHKDXVYCVAYAKDGKRFASGSADKSVIIWXSKLEGILKYXHNDAIQCVSYNPIXHQLASCSSSDFGLWSPEQKSVSKHKSSSKIICCREERNDILAVADWGQKVSFYQLSGKQIGKDRALNFDPCCISYFXKGEYILLGGSDKQVSLFXKDGVRLGXVGEQNSWVWXCQAKPDSNYVVVGCQDGXISFYQLIFSXVHGLYKDRYAYR

SEQ ID NO: 12952 - protein, 112 aa, Homo sapiens
  MOD_RES (1)..(1): Any amino acid
  MOD_RES (12)..(12): Selenocysteine
  MOD_RES (27)..(27): Selenocysteine
  MOD_RES (31)..(31): Selenocysteine
  MOD_RES (42)..(42): Selenocysteine
  MOD_RES (68)..(68): Selenocysteine
  MOD_RES (78)..(78): Selenocysteine
  MOD_RES (95)..(95): Selenocysteine
  MOD_RES (99)..(99): Selenocysteine
XINDIAFKPDGXQLILAAGSRLLVYDXSDGXLLQPLKGHKDXVYCVAYAKDGKRFASGSADKSVIIWXSKLEGILKYXVLLCCPGWSAVARSRLXASSXSQVHAILLPQPPE

SEQ ID NO: 12953 - protein, 321 aa, Homo sapiens
  MOD_RES (1)..(1): Any amino acid
  MOD_RES (12)..(12): Selenocysteine
  MOD_RES (27)..(27): Selenocysteine
  MOD_RES (31)..(31): Selenocysteine
  MOD_RES (42)..(42): Selenocysteine
  MOD_RES (117)..(117): Selenocysteine
  MOD_RES (135)..(135): Selenocysteine
  MOD_RES (143)..(143): Selenocysteine
  MOD_RES (153)..(153): Selenocysteine
  MOD_RES (171)..(171): Selenocysteine
  MOD_RES (181)..(181): Selenocysteine
  MOD_RES (197)..(197): Selenocysteine
  MOD_RES (206)..(206): Selenocysteine
XINDIAFKPDGXQLILAAGSRLLVYDXSDGXLLQPLKGHKDXVYCVAYAKDGLWSPEQKSVSKHKSSSKIICCREERNDILAVADWGQKVSFYQLSGKQIGKDRALNFDPCCISYFXKGEYILLGGSDKQVSLFXKDGVRLGXVGEQNSWVWXCQAKPDSNYVVVGCQDGXISFYQLIFSXVHGLYKDRYAYRDSMXDVIVQHLIXEQKVRIKCKELVKKIAIYRNRLAIQLPEKILIYELYSEDLSDMHYRVKEKIIKKFECNLLVVCANHIILCQEKRLQCLSFSGVKEREWQMESLIRYIKVIGGPPGREGLLVGLKN

SEQ ID NO: 12954 - protein, 67 aa, Homo sapiens
  MOD_RES (1)..(1): Any amino acid
  MOD_RES (12)..(12): Selenocysteine
  MOD_RES (27)..(27): Selenocysteine
  MOD_RES (31)..(31): Selenocysteine
  MOD_RES (42)..(42): Selenocysteine
XINDIAFKPDGXQLILAAGSRLLVYDXSDGXLLQPLKGHKDXVYCVAYAKDGNESSSVACLGHAAGQ

SEQ ID NO: 12955 - protein, 99 aa, Homo sapiens
  MOD_RES (1)..(1): Any amino acid
  MOD_RES (12)..(12): Selenocysteine
  MOD_RES (27)..(27): Selenocysteine
  MOD_RES (31)..(31): Selenocysteine
  MOD_RES (42)..(42): Selenocysteine
  MOD_RES (53)..(53): Selenocysteine
  MOD_RES (62)..(62): Selenocysteine
  MOD_RES (76)..(76): Selenocysteine
  MOD_RES (90)..(90): Selenocysteine
XINDIAFKPDGXQLILAAGSRLLVYDXSDGXLLQPLKGHKDXVYCVAYAKDGXMMLYNVSPXILLLINWHLVPPVXLGCGLLNRSLSPNXNQAARSSAA

SEQ ID NO: 12956 - protein, 69 aa, Homo sapiens
  MOD_RES (1)..(1): Any amino acid
  MOD_RES (12)..(12): Selenocysteine
  MOD_RES (27)..(27): Selenocysteine
  MOD_RES (31)..(31): Selenocysteine
  MOD_RES (42)..(42): Selenocysteine
  MOD_RES (54)..(54): Selenocysteine
  MOD_RES (68)..(68): Selenocysteine
XINDIAFKPDGXQLILAAGSRLLVYDXSDGXLLQPLKGHKDXVYCVAYAKDVEXGFHRVGQDGLDLLXS

SEQ ID NO: 12957 - protein, 125 aa, Homo sapiens
  MOD_RES (14)..(14): Selenocysteine
  MOD_RES (33)..(33): Selenocysteine
  MOD_RES (54)..(54): Selenocysteine
  MOD_RES (56)..(56): Selenocysteine
  MOD_RES (78)..(78): Selenocysteine
  MOD_RES (100)..(100): Selenocysteine
  MOD_RES (114)..(114): Selenocysteine
DEYQNYDKAHGALXEAYKCLAKAKAKSPLDQEXRLAQLQSRMALVKRFIQARRXYXEDPKESIKQCELLLEEPDLDSXIRIGDVYGFLVEHYVRKEEYQXVRPECCSLAASRHXRLLKRRLNGSN

SEQ ID NO: 12958 - protein, 206 aa, Homo sapiens
  MOD_RES (37)..(38): Selenocysteine
  MOD_RES (40)..(40): Selenocysteine
  MOD_RES (56)..(56): Selenocysteine
  MOD_RES (72)..(72): Selenocysteine
  MOD_RES (82)..(82): Selenocysteine
  MOD_RES (86)..(86): Selenocysteine
  MOD_RES (97)..(97): Selenocysteine
  MOD_RES (101)..(101): Selenocysteine
  MOD_RES (103)..(103): Selenocysteine
  MOD_RES (107)..(107): Selenocysteine
  MOD_RES (136)..(136): Selenocysteine
  MOD_RES (162)..(162): Selenocysteine
  MOD_RES (199)..(199): Selenocysteine
MALYYDHQIEAPDAAGSPSFISWHPVHPFLAVAYISXXSXGSVDIYLEQGECVPDXHVERPFRVASLCWHPXRLVLAVGWEXGEVXVFNKQDKEQHXMPLXHXADIXVLLGFQEEPAGSEQRHLRGHPQRAGHVVXLPPASGRHAGLPESAECVLPVHGGRXQPAHRHAHQWSVCHQGCCRSLERKAGGDLRAFWSRDXECRDLLV

SEQ ID NO: 12959 - protein, 113 aa, Homo sapiens
  MOD_RES (37)..(38): Selenocysteine
  MOD_RES (40)..(40): Selenocysteine
  MOD_RES (56)..(56): Selenocysteine
  MOD_RES (72)..(72): Selenocysteine
  MOD_RES (82)..(82): Selenocysteine
  MOD_RES (86)..(86): Selenocysteine
  MOD_RES (97)..(97): Selenocysteine
  MOD_RES (101)..(101): Selenocysteine
  MOD_RES (103)..(103): Selenocysteine
  MOD_RES (107)..(107): Selenocysteine
MALYYDHQIEAPDAAGSPSFISWHPVHPFLAVAYISXXSXGSVDIYLEQGECVPDXHVERPFRVASLCWHPXRLVLAVGWEXGEVXVFNKQDKEQHXMPLXHXADIXVLRWSP

SEQ ID NO: 12960 - protein, 121 aa, Homo sapiens
  MOD_RES (37)..(38): Selenocysteine
  MOD_RES (40)..(40): Selenocysteine
  MOD_RES (56)..(56): Selenocysteine
  MOD_RES (72)..(72): Selenocysteine
  MOD_RES (82)..(82): Selenocysteine
  MOD_RES (86)..(86): Selenocysteine
  MOD_RES (97)..(97): Selenocysteine
  MOD_RES (101)..(101): Selenocysteine
  MOD_RES (103)..(103): Selenocysteine
  MOD_RES (107)..(107): Selenocysteine
MALYYDHQIEAPDAAGSPSFISWHPVHPFLAVAYISXXSXGSVDIYLEQGECVPDXHVERPFRVASLCWHPXRLVLAVGWEXGEVXVFNKQDKEQHXMPLXHXADIXVLRWSPSGNCLLSG

SEQ ID NO: 12961 - protein, 1462 aa, Homo sapiens
  MOD_RES (37)..(38): Selenocysteine
  MOD_RES (40)..(40): Selenocysteine
  MOD_RES (56)..(56): Selenocysteine
  MOD_RES (72)..(72): Selenocysteine
  MOD_RES (82)..(82): Selenocysteine
  MOD_RES (86)..(86): Selenocysteine
  MOD_RES (97)..(97): Selenocysteine
  MOD_RES (101)..(101): Selenocysteine
  MOD_RES (103)..(103): Selenocysteine
  MOD_RES (107)..(107): Selenocysteine
  MOD_RES (141)..(141): Selenocysteine
  MOD_RES (153)..(153): Selenocysteine
  MOD_RES (213)..(213): Selenocysteine
  MOD_RES (223)..(224): Selenocysteine
  MOD_RES (232)..(232): Selenocysteine
  MOD_RES (249)..(249): Selenocysteine
  MOD_RES (258)..(258): Selenocysteine
  MOD_RES (277)..(277): Selenocysteine
  MOD_RES (343)..(343): Selenocysteine
  MOD_RES (373)..(373): Selenocysteine
  MOD_RES (375)..(375): Selenocysteine
  MOD_RES (382)..(382): Selenocysteine
  MOD_RES (434)..(434): Selenocysteine
  MOD_RES (442)..(442): Selenocysteine
  MOD_RES (452)..(452): Selenocysteine
  MOD_RES (479)..(479): Selenocysteine
  MOD_RES (484)..(484): Selenocysteine
  MOD_RES (496)..(496): Selenocysteine
  MOD_RES (506)..(506): Selenocysteine
  MOD_RES (510)..(510): Selenocysteine
  MOD_RES (520)..(520): Selenocysteine
  MOD_RES (538)..(538): Selenocysteine
  MOD_RES (583)..(583): Selenocysteine
  MOD_RES (608)..(608): Selenocysteine
  MOD_RES (610)..(610): Selenocysteine
  MOD_RES (616)..(616): Selenocysteine
  MOD_RES (624)..(624): Selenocysteine
  MOD_RES (632)..(632): Selenocysteine
  MOD_RES (669)..(669): Selenocysteine
  MOD_RES (716)..(716): Selenocysteine
  MOD_RES (731)..(731): Selenocysteine
  MOD_RES (772)..(772): Selenocysteine
  MOD_RES (784)..(784): Selenocysteine
  MOD_RES (814)..(814): Selenocysteine
  MOD_RES (854)..(854): Selenocysteine
  MOD_RES (903)..(903): Selenocysteine
  MOD_RES (929)..(929): Selenocysteine
  MOD_RES (956)..(956): Selenocysteine
  MOD_RES (1007)..(1007): Selenocysteine
  MOD_RES (1034)..(1034): Selenocysteine
  MOD_RES (1104)..(1104): Selenocysteine
  MOD_RES (1120)..(1120): Selenocysteine
  MOD_RES (1167)..(1167): Selenocysteine
  MOD_RES (1175)..(1175): Selenocysteine
  MOD_RES (1209)..(1209): Selenocysteine
  MOD_RES (1213)..(1213): Selenocysteine
  MOD_RES (1231)..(1231): Selenocysteine
  MOD_RES (1235)..(1235): Selenocysteine
  MOD_RES (1274)..(1274): Selenocysteine
  MOD_RES (1308)..(1308): Selenocysteine
  MOD_RES (1327)..(1327): Selenocysteine
  MOD_RES (1348)..(1348): Selenocysteine
  MOD_RES (1350)..(1350): Selenocysteine
  MOD_RES (1372)..(1372): Selenocysteine
  MOD_RES (1394)..(1394): Selenocysteine
  MOD_RES (1434)..(1434): Selenocysteine
MALYYDHQIEAPDAAGSPSFISWHPVHPFLAVAYISXXSXGSVDIYLEQGECVPDXHVERPFRVASLCWHPXRLVLAVGWEXGEVXVFNKQDKEQHXMPLXHXADIXVLRWSPSGNCLLSGDRLGVLLLWRLDQRGRVQGXPLLKHEYGKHLXHCIFRLPPPGEDLVQLAKAAVSGDEKALDMFNWKKSSSGSLLKMGSHEGLLFFVSLMDGXVHYVDEKGKXXQVVSADSXIQMLFYMEKREALVVVXENLRLSLYXVPPEGKAEEVMKVKLSGKXGRRADIALIEGSLLVMAVGEAALRFWDIERGENYILSPDEKFGFEKGENMNCVCYCKVKGLLAAGXDRGRVAMWRKVPDFLGSPGAEGKDRWALQXPXELQGNIXQIQWGSRKNLLAVNSVISVAILSERAMSSHFHQQVAAMQVSPSLLNVCFLSXGVAHSLRXDMHISGVFAXKDAVAVWNGRQVAIFELSGAAIRSAGXFLCEXPVLAMHEENVYXVESNRVQVRXWQGXVKQLLLFSEXEGNPCFLDICGNFLVVGXDLAHFKSFDLSRREAKAHCSCRSLAELVPGVGGIASLRCSSSGSXISILPSKADNSPDSKICFYDVEMDXVXVFDFKXGQIDRREXLSFNEQEXNKSHLFVDEGLKNYVPVNHFWDQSEPRLFVCEAVQEXPRSQPQSANGQPQDGRAGPAADVLILSFFISEEHGFLLHESFPRPAXSHSLLGMEVPYYYFXRKPEEADREDEVEPGCHHIPQMVSRRPLRDFVGLEDCDKAXRDAMLHFSFFVXIGDMDEAFKSIKLIKSEAVWENMARMCVKXQRLDVAKVCLGNMGHARGARALREAEQEPELEARVAVLAXQLGMLEDAEQLYRKCKRHDLLNKFYQAAGRWQEALQVAEHHDRVHLRSXYHRYAGHLEASADCSRALSYYEKSDXHRFEVPRMLSEDLPSLELYVNKMKDKXLWRWWAQYLESQGEMDAALHYYELARDHFSLVRIHCFQGNVQKAAQIANEXGNLAASYHLARQYESQEEVGQAVHFYXRAQAFKNAIRLCKENGLDDQLMNLALLSSPEDMIEAARYYEEKGVQMDRAVMLYHKAGHFSKALELAFAXQQFVALQLIAEDLDEXSDPALLARCSDFFIEHSQYERAVELLLAARKYQEALQLCLGQNMSIXEEMAEKMXVAKDSSDLPEESRRELLEQIADCCMRQGSYHLAXKKYXQAGNKLKAMRALLKSGDXEKIXFFASVSRQKEIYIMAANYLQSLDWRKEPEIMKNIIGFYXKGRALDLLAGFYDACAQVEIDEYQNYDKAHGALXEAYKCLAKAKAKSPLDQEXRLAQLQSRMALVKRFIQARRXYXEDPKESIKQCELLLEEPDLDSXIRIGDVYGFLVEHYVRKEEYQXAYRFLEEMRRRLPLANMSYYVSPQAVDAVHRGLGLPLPRXVPEQVRHNSMEDARELDEEVVEEADDDP

SEQ ID NO: 12962 - protein, 656 aa, Homo sapiens
  MOD_RES (8)..(8): Selenocysteine
  MOD_RES (48)..(48): Selenocysteine
  MOD_RES (97)..(97): Selenocysteine
  MOD_RES (123)..(123): Selenocysteine
  MOD_RES (150)..(150): Selenocysteine
  MOD_RES (201)..(201): Selenocysteine
  MOD_RES (228)..(228): Selenocysteine
  MOD_RES (298)..(298): Selenocysteine
  MOD_RES (314)..(314): Selenocysteine
  MOD_RES (361)..(361): Selenocysteine
  MOD_RES (369)..(369): Selenocysteine
  MOD_RES (403)..(403): Selenocysteine
  MOD_RES (407)..(407): Selenocysteine
  MOD_RES (425)..(425): Selenocysteine
  MOD_RES (429)..(429): Selenocysteine
  MOD_RES (468)..(468): Selenocysteine
  MOD_RES (502)..(502): Selenocysteine
  MOD_RES (521)..(521): Selenocysteine
  MOD_RES (542)..(542): Selenocysteine
  MOD_RES (544)..(544): Selenocysteine
  MOD_RES (566)..(566): Selenocysteine
  MOD_RES (588)..(588): Selenocysteine
  MOD_RES (628)..(628): Selenocysteine
MARMCVKXQRLDVAKVCLGNMGHARGARALREAEQEPELEARVAVLAXQLGMLEDAEQLYRKCKRHDLLNKFYQAAGRWQEALQVAEHHDRVHLRSXYHRYAGHLEASADCSRALSYYEKSDXHRFEVPRMLSEDLPSLELYVNKMKDKXLWRWWAQYLESQGEMDAALHYYELARDHFSLVRIHCFQGNVQKAAQIANEXGNLAASYHLARQYESQEEVGQAVHFYXRAQAFKNAIRLCKENGLDDQLMNLALLSSPEDMIEAARYYEEKGVQMDRAVMLYHKAGHFSKALELAFAXQQFVALQLIAEDLDEXSDPALLARCSDFFIEHSQYERAVELLLAARKYQEALQLCLGQNMSIXEEMAEKMXVAKDSSDLPEESRRELLEQIADCCMRQGSYHLAXKKYXQAGNKLKAMRALLKSGDXEKIXFFASVSRQKEIYIMAANYLQSLDWRKEPEIMKNIIGFYXKGRALDLLAGFYDACAQVEIDEYQNYDKAHGALXEAYKCLAKAKAKSPLDQEXRLAQLQSRMALVKRFIQARRXYXEDPKESIKQCELLLEEPDLDSXIRIGDVYGFLVEHYVRKEEYQXAYRFLEEMRRRLPLANMSYYVSPQAVDAVHRGLGLPLPRXVPEQVRHNSMEDARELDEEVVEEADDDP

SEQ ID NO: 12963 - protein, 96 aa, Homo sapiens
  MOD_RES (59)..(59): Selenocysteine
  MOD_RES (62)..(62): Selenocysteine
AQRVAEAHDPDSVAEVLVGQARGALEEKDFQKAEGLLLRAQRPGLALNYYKGCGGICGXSSXLGAGWRVQPCRGLLPQSARLWKQRPGGEVLDEGS

SEQ ID NO: 12964 - protein, 511 aa, Homo sapiens
  MOD_RES (14)..(14): Selenocysteine
  MOD_RES (34)..(34): Selenocysteine
  MOD_RES (58)..(58): Selenocysteine
  MOD_RES (65)..(65): Selenocysteine
  MOD_RES (91)..(91): Selenocysteine
  MOD_RES (95)..(95): Selenocysteine
  MOD_RES (119)..(119): Selenocysteine
  MOD_RES (121)..(121): Selenocysteine
  MOD_RES (126)..(126): Selenocysteine
  MOD_RES (130)..(130): Selenocysteine
  MOD_RES (138)..(139): Selenocysteine
  MOD_RES (154)..(154): Selenocysteine
  MOD_RES (186)..(186): Selenocysteine
  MOD_RES (210)..(210): Selenocysteine
  MOD_RES (223)..(224): Selenocysteine
  MOD_RES (263)..(263): Selenocysteine
  MOD_RES (267)..(267): Selenocysteine
  MOD_RES (269)..(269): Selenocysteine
  MOD_RES (284)..(284): Selenocysteine
  MOD_RES (308)..(308): Selenocysteine
  MOD_RES (324)..(324): Selenocysteine
  MOD_RES (352)..(352): Selenocysteine
  MOD_RES (355)..(355): Selenocysteine
  MOD_RES (363)..(363): Selenocysteine
  MOD_RES (397)..(397): Selenocysteine
  MOD_RES (406)..(406): Selenocysteine
  MOD_RES (412)..(412): Selenocysteine
  MOD_RES (432)..(432): Selenocysteine
  MOD_RES (446)..(446): Selenocysteine
  MOD_RES (460)..(460): Selenocysteine
  MOD_RES (475)..(475): Selenocysteine
  MOD_RES (492)..(492): Selenocysteine
  MOD_RES (501)..(501): Selenocysteine
  MOD_RES (509)..(509): Selenocysteine
MAWSQNNAKFAVCXVDRVVLLYDEHGERRDKFSXKPADMKYGRKSYMVKGMAFSPDSXKIAIGQXDNIIYVYKIGEDWGDKKVICNKFIQXSAVXCLQWPAEYIIVFGLAEGKVRLANXKXNKSSXIYGXESYVVSLXXNCSGKGILSGHADGXIVRYFFDDEGSGESQGKLVNHPCPPYALAWAXNSIVAAGCDRKIVAYGKEGHMLQXFDYSRDPQEREFXXAVSSPGGQSVVLGSYDRLRVFNWIPRRSIWEEAKPKEIXNLYXIXALAWKRDGSRLCVGXLCGGVEQFDCCLRRSIYKNKFELXYVGPSQVIVKNLSSGXRVVLKSHYGYEVEEVKILGKERYLVAHXSEXLLLGDLNXNRLSEIAWQGSGGNEKYFFENENVCMIFNAGELXLVEYGNNDXLGSVRXEFMNPHLISVRINERCQRGXEDNKKLAYLIDIKXIAIVDLIGGYNIGXVSHESRVDWLELNEXGHKLLFRDRKLRVRRAXKALGIGWPXEGVRQAAXRD

SEQ ID NO: 12965 - protein, 532 aa, Homo sapiens
  MOD_RES (8)..(8): Selenocysteine
  MOD_RES (20)..(20): Selenocysteine
  MOD_RES (35)..(35): Selenocysteine
  MOD_RES (55)..(55): Selenocysteine
  MOD_RES (79)..(79): Selenocysteine
  MOD_RES (86)..(86): Selenocysteine
  MOD_RES (112)..(112): Selenocysteine
  MOD_RES (116)..(116): Selenocysteine
  MOD_RES (140)..(140): Selenocysteine
  MOD_RES (142)..(142): Selenocysteine
  MOD_RES (147)..(147): Selenocysteine
  MOD_RES (151)..(151): Selenocysteine
  MOD_RES (159)..(160): Selenocysteine
  MOD_RES (175)..(175): Selenocysteine
  MOD_RES (207)..(207): Selenocysteine
  MOD_RES (231)..(231): Selenocysteine
  MOD_RES (244)..(245): Selenocysteine
  MOD_RES (284)..(284): Selenocysteine
  MOD_RES (288)..(288): Selenocysteine
  MOD_RES (290)..(290): Selenocysteine
  MOD_RES (305)..(305): Selenocysteine
  MOD_RES (329)..(329): Selenocysteine
  MOD_RES (345)..(345): Selenocysteine
  MOD_RES (373)..(373): Selenocysteine
  MOD_RES (376)..(376): Selenocysteine
  MOD_RES (384)..(384): Selenocysteine
  MOD_RES (418)..(418): Selenocysteine
  MOD_RES (427)..(427): Selenocysteine
  MOD_RES (433)..(433): Selenocysteine
  MOD_RES (453)..(453): Selenocysteine
  MOD_RES (467)..(467): Selenocysteine
  MOD_RES (481)..(481): Selenocysteine
  MOD_RES (496)..(496): Selenocysteine
  MOD_RES (513)..(513): Selenocysteine
  MOD_RES (522)..(522): Selenocysteine
  MOD_RES (530)..(530): Selenocysteine
MHLKHLRXLLSPQDGAAKVXCMAWSQNNAKFAVCXVDRVVLLYDEHGERRDKFSXKPADMKYGRKSYMVKGMAFSPDSXKIAIGQXDNIIYVYKIGEDWGDKKVICNKFIQXSAVXCLQWPAEYIIVFGLAEGKVRLANXKXNKSSXIYGXESYVVSLXXNCSGKGILSGHADGXIVRYFFDDEGSGESQGKLVNHPCPPYALAWAXNSIVAAGCDRKIVAYGKEGHMLQXFDYSRDPQEREFXXAVSSPGGQSVVLGSYDRLRVFNWIPRRSIWEEAKPKEIXNLYXIXALAWKRDGSRLCVGXLCGGVEQFDCCLRRSIYKNKFELXYVGPSQVIVKNLSSGXRVVLKSHYGYEVEEVKILGKERYLVAHXSEXLLLGDLNXNRLSEIAWQGSGGNEKYFFENENVCMIFNAGELXLVEYGNNDXLGSVRXEFMNPHLISVRINERCQRGXEDNKKLAYLIDIKXIAIVDLIGGYNIGXVSHESRVDWLELNEXGHKLLFRDRKLRVRRAXKALGIGWPXEGVRQAAXRD

SEQ ID NO: 12966 - protein, 1749 aa, Homo sapiens
  MOD_RES (8)..(8): Selenocysteine
  MOD_RES (20)..(20): Selenocysteine
  MOD_RES (35)..(35): Selenocysteine
  MOD_RES (55)..(55): Selenocysteine
  MOD_RES (79)..(79): Selenocysteine
  MOD_RES (86)..(86): Selenocysteine
  MOD_RES (112)..(112): Selenocysteine
  MOD_RES (116)..(116): Selenocysteine
  MOD_RES (140)..(140): Selenocysteine
  MOD_RES (142)..(142): Selenocysteine
  MOD_RES (147)..(147): Selenocysteine
  MOD_RES (151)..(151): Selenocysteine
  MOD_RES (159)..(160): Selenocysteine
  MOD_RES (175)..(175): Selenocysteine
  MOD_RES (207)..(207): Selenocysteine
  MOD_RES (231)..(231): Selenocysteine
  MOD_RES (244)..(245): Selenocysteine
  MOD_RES (284)..(284): Selenocysteine
  MOD_RES (288)..(288): Selenocysteine
  MOD_RES (290)..(290): Selenocysteine
  MOD_RES (305)..(305): Selenocysteine
  MOD_RES (329)..(329): Selenocysteine
  MOD_RES (345)..(345): Selenocysteine
  MOD_RES (373)..(373): Selenocysteine
  MOD_RES (376)..(376): Selenocysteine
  MOD_RES (384)..(384): Selenocysteine
  MOD_RES (418)..(418): Selenocysteine
  MOD_RES (427)..(427): Selenocysteine
  MOD_RES (433)..(433): Selenocysteine
  MOD_RES (453)..(453): Selenocysteine
  MOD_RES (467)..(467): Selenocysteine
  MOD_RES (481)..(481): Selenocysteine
  MOD_RES (496)..(496): Selenocysteine
  MOD_RES (520)..(520): Selenocysteine
  MOD_RES (559)..(559): Selenocysteine
  MOD_RES (562)..(562): Selenocysteine
  MOD_RES (577)..(577): Selenocysteine
  MOD_RES (586)..(587): Selenocysteine
  MOD_RES (591)..(591): Selenocysteine
  MOD_RES (601)..(601): Selenocysteine
  MOD_RES (612)..(612): Selenocysteine
  MOD_RES (617)..(617): Selenocysteine
  MOD_RES (621)..(621): Selenocysteine
  MOD_RES (624)..(624): Selenocysteine
  MOD_RES (630)..(630): Selenocysteine
  MOD_RES (663)..(663): Selenocysteine
  MOD_RES (679)..(679): Selenocysteine
  MOD_RES (750)..(750): Selenocysteine
  MOD_RES (788)..(788): Selenocysteine
  MOD_RES (796)..(796): Selenocysteine
  MOD_RES (803)..(803): Selenocysteine
  MOD_RES (910)..(910): Selenocysteine
  MOD_RES (936)..(936): Selenocysteine
  MOD_RES (941)..(941): Selenocysteine
  MOD_RES (949)..(949): Selenocysteine
  MOD_RES (976)..(976): Selenocysteine
  MOD_RES (996)..(996): Selenocysteine
  MOD_RES (1005)..(1005): Selenocysteine
  MOD_RES (1031)..(1031): Selenocysteine
  MOD_RES (1061)..(1061): Selenocysteine
  MOD_RES (1080)..(1080): Selenocysteine
  MOD_RES (1141)..(1141): Selenocysteine
  MOD_RES (1269)..(1269): Selenocysteine
  MOD_RES (1433)..(1433): Selenocysteine
  MOD_RES (1435)..(1435): Selenocysteine
  MOD_RES (1451)..(1451): Selenocysteine
  MOD_RES (1486)..(1486): Selenocysteine
  MOD_RES (1494)..(1494): Selenocysteine
  MOD_RES (1533)..(1533): Selenocysteine
  MOD_RES (1543)..(1543): Selenocysteine
  MOD_RES (1555)..(1555): Selenocysteine
  MOD_RES (1568)..(1568): Selenocysteine
  MOD_RES (1604)..(1604): Selenocysteine
  MOD_RES (1611)..(1611): Selenocysteine
  MOD_RES (1623)..(1623): Selenocysteine
  MOD_RES (1651)..(1651): Selenocysteine
  MOD_RES (1679)..(1679): Selenocysteine
  MOD_RES (1689)..(1689): Selenocysteine
  MOD_RES (1721)..(1721): Selenocysteine
  MOD_RES (1744)..(1744): Selenocysteine
MHLKHLRXLLSPQDGAAKVXCMAWSQNNAKFAVCXVDRVVLLYDEHGERRDKFSXKPADMKYGRKSYMVKGMAFSPDSXKIAIGQXDNIIYVYKIGEDWGDKKVICNKFIQXSAVXCLQWPAEYIIVFGLAEGKVRLANXKXNKSSXIYGXESYVVSLXXNCSGKGILSGHADGXIVRYFFDDEGSGESQGKLVNHPCPPYALAWAXNSIVAAGCDRKIVAYGKEGHMLQXFDYSRDPQEREFXXAVSSPGGQSVVLGSYDRLRVFNWIPRRSIWEEAKPKEIXNLYXIXALAWKRDGSRLCVGXLCGGVEQFDCCLRRSIYKNKFELXYVGPSQVIVKNLSSGXRVVLKSHYGYEVEEVKILGKERYLVAHXSEXLLLGDLNXNRLSEIAWQGSGGNEKYFFENENVCMIFNAGELXLVEYGNNDXLGSVRXEFMNPHLISVRINERCQRGXEDNKKLAYLIDIKXIAIVDLIGGYNIGXVSHESRVDWLELNEXGHKLLFRDRKLRLHLYDIESCSKXMILNFCSYMQWVPGSDVLVAQNRNSLCVWYNIEAPERVXMFXIRGDVIGLERGGGKXEVMVMEGVXXVAYXLDEGLIEFGXAIDDGNYIRAXAFLEXLEMXPEXEAMWKXLSKLALEARQLHIAERCFSALGQVAKARFLHEXNEIADQVSREYGGEGXDFYQVRARLAMLEKNYKLAEMIFLEQNAVEEAMGMYQELHRWDECIAVAEAKGHPALEKLRRSYYQWLMDXQQEERAGELQESQGDGLAAISLYLKAGLPAKAARLVLXREELLANXELVEHIXAALIKGELYERAGDLFEKIHNPQKALECYRKGNAFMKAVELARLAFPVEVVKLEEAWGDHLVQQKQLDAAINHYIEARCSIKAIEAALGARQWKKAIYILDLQDRNXASKYYPLVAQHYASLQEYEIAEELYXKGDRXKDAIDMYXQAGRWEQAHKLAMKCMRPEDVSVLYIXQAQEMEKQGKYREAERLYVXVQEPDLAIXMYKKHKLYDDMIRLVGKHHPDLLSDXHLHLGKELEAEGRLQEAEYHYLEAQEWKAXVNMYRASGLWEEAYRVARXQGGANAHKHVAYLWAKSLGGEAAVRLLNKLGLLEAAVDHAADNCSFEFAFELSRLALKHKXPEVHLKYAMFLEDEGKFEEAEAEFIRAGKPKEAVLMFVHNQDWEAAQRVAEAHDPDSVAEVLVGQARGALEEKDFQKAEGLLLRAQRPGLALNYYKEAGLWSDALRICKDYVPSQLEALQEEYEREAXKKGARGVEGFVEQARHWEQAGEYSRAVDCYLKVRDSGNSGLAEKCWMKAAELSIKFLPPQRNMEVVLAVGPQLIGIGKHSAAAELYLNLDLVKEAIDAFIEGEEWNKAKRVAKELDPRYEDYVDQHYKEFLKNQGKVDSLVGVDVIAALDLYVEQGQWDKCIEXAXKQNYKILHKYVALYAXHLIREGSSAQALALYVQHGAPANPQNFNIYKRIFXDMVSSPGXNCAEAYHSWADLRDVLFNLCENLVKSSEANSPAHEEFKXMLLIAHYYAXRSAAQSVKQLEXVAARLSVSLLRHXQLLPVDKAFYEAGIAAKAVGWDNMAFIFLNRFLDLXDAIEEGXLDGLDHSDFQDXDIPFEVPLPAKQHVPEAEREEVRDWVLXVSMDQRLEQVLPRDERGAYEASLVAASXGVRALPCLIXGYPILRNKIEFKRPGKAANKDNWNKFLMAIKXSHSPVCQDVLKFISQWCGGLPSXSFSFQ

SEQ ID NO: 12967 - protein, 162 aa, Homo sapiens
  MOD_RES (10)..(10): Selenocysteine
  MOD_RES (18)..(18): Selenocysteine
  MOD_RES (57)..(57): Selenocysteine
  MOD_RES (67)..(67): Selenocysteine
  MOD_RES (79)..(79): Selenocysteine
  MOD_RES (92)..(92): Selenocysteine
  MOD_RES (128)..(128): Selenocysteine
  MOD_RES (135)..(135): Selenocysteine
  MOD_RES (147)..(147): Selenocysteine
NFNIYKRIFXDMVSSPGXNCAEAYHSWADLRDVLFNLCENLVKSSEANSPAHEEFKXMLLIAHYYAXRSAAQSVKQLEXVAARLSVSLLRHXQLLPVDKAFYEAGIAAKAVGWDNMAFIFLNRFLDLXDAIEEGXLDGLDHSDFQDXDIPFEVPLPAKQHVP

SEQ ID NO: 12968 - protein, 324 aa, Homo sapiens
  MOD_RES (1)..(1): Any amino acid
  MOD_RES (68)..(68): Selenocysteine
  MOD_RES (232)..(232): Selenocysteine
  MOD_RES (234)..(234): Selenocysteine
  MOD_RES (250)..(250): Selenocysteine
  MOD_RES (285)..(285): Selenocysteine
  MOD_RES (293)..(293): Selenocysteine
  MOD_RES (323)..(323): Selenocysteine
XLVGQARGALEEKDFQKAEGLLLRAQRPGLALNYYKEAGLWSDALRICKDYVPSQLEALQEEYEREAXKKGARGVEGFVEQARHWEQAGEYSRAVDCYLKVRDSGNSGLAEKCWMKAAELSIKFLPPQRNMEVVLAVGPQLIGIGKHSAAAELYLNLDLVKEAIDAFIEGEEWNKAKRVAKELDPRYEDYVDQHYKEFLKNQGKVDSLVGVDVIAALDLYVEQGQWDKCIEXAXKQNYKILHKYVALYAXHLIREGSSAQALALYVQHGAPANPQNFNIYKRIFXDMVSSPGXNCAEAYHSWADLRDVLFNLAVLSPSSSVKXW

SEQ ID NO: 12969 - protein, 196 aa, Homo sapiens
  MOD_RES (1)..(1): Any amino acid
  MOD_RES (10)..(10): Selenocysteine
  MOD_RES (138)..(138): Selenocysteine
XSRLALKHKXPEVHLKYAMFLEDEGKFEEAEAEFIRAGKPKEAVLMFVHNQDWEAAQRVAEAHDPDSVAEVLVGQARGALEEKDFQKAEGLLLRAQRPGLALNYYKEAGLWSDALRICKDYVPSQLEALQEEYEREAXKKGARGVEGFVEQARHWEQAGEYSRAVDCYLKVRDSGNSGLAEKCWMKVAGIYGVPAG

SEQ ID NO: 12970 - protein, 71 aa, Homo sapiens
  MOD_RES (24)..(24): Selenocysteine
  MOD_RES (27)..(27): Selenocysteine
DILGEAGLHFDELNKLRVLDPEVXQQXIELKEECKDFVDKIGQFQKIVGGLIELVDQLAKEAENEKMKVSG

SEQ ID NO: 12971 - protein, 114 aa, Homo sapiens
  MOD_RES (27)..(27): Selenocysteine
  MOD_RES (30)..(30): Selenocysteine
MAKDILGEAGLHFDELNKLRVLDPEVXQQXIELKEECKDFVDKIGQFQKIVGGLIELVDQLAKEAENEKMKAIGARNLLKSIAKQREAQQQQLQALIAEKKMQLERNELKISLL

SEQ ID NO: 12972 - protein, 132 aa, Homo sapiens
  MOD_RES (27)..(27): Selenocysteine
  MOD_RES (30)..(30): Selenocysteine
MAKDILGEAGLHFDELNKLRVLDPEVXQQXIELKEECKDFVDKIGQFQKIVGGLIELVDQLAKEAENEKMKAIGARNLLKSIAKQREAQQQQLQALIAEKKMQLERYRVEYEALCKVEAEQNEFIDQFIFQK

SEQ ID NO: 12973 - protein, 148 aa, Homo sapiens
  MOD_RES (27)..(27): Selenocysteine
  MOD_RES (30)..(30): Selenocysteine
  MOD_RES (82)..(82): Selenocysteine
  MOD_RES (101)..(101): Selenocysteine
  MOD_RES (109)..(110): Selenocysteine
  MOD_RES (129)..(129): Selenocysteine
  MOD_RES (132)..(132): Selenocysteine
MAKDILGEAGLHFDELNKLRVLDPEVXQQXIELKEECKDFVDKIGQFQKIVGGLIELVDQLAKEAENEKMKSLAVSPRLECXGAISAHCKLCLSDSSDSPXSPSRVGGXXGHRCSELAQIYSKAERSSXAAXSSPNSRKENAARKVSG

SEQ ID NO: 12974 - protein, 74 aa, Homo sapiens
  MOD_RES (27)..(27): Selenocysteine
  MOD_RES (30)..(30): Selenocysteine
MAKDILGEAGLHFDELNKLRVLDPEVXQQXIELKEECKDFVDKIGQFQKIVGGLIELVDQLAKEAENEKMKVSG

SEQ ID NO: 12975 - protein, 85 aa, Homo sapiens
  MOD_RES (2)..(2): Selenocysteine
  MOD_RES (7)..(7): Selenocysteine
  MOD_RES (9)..(9): Selenocysteine
  MOD_RES (11)..(11): Selenocysteine
  MOD_RES (25)..(25): Selenocysteine
  MOD_RES (53)..(53): Selenocysteine
  MOD_RES (56)..(56): Selenocysteine
MXHLLLXAXVXPSEQNSSREPGWEXAMAKDILGEAGLHFDELNKLRVLDPEVXQQXIELKEECKDFVDKIGQFQKIVGGLIELVD

SEQ ID NO: 12976 - protein, 132 aa, Homo sapiens
  MOD_RES (2)..(2): Selenocysteine
  MOD_RES (7)..(7): Selenocysteine
  MOD_RES (9)..(9): Selenocysteine
  MOD_RES (11)..(11): Selenocysteine
  MOD_RES (25)..(25): Selenocysteine
  MOD_RES (53)..(53): Selenocysteine
  MOD_RES (56)..(56): Selenocysteine
MXHLLLXAXVXPSEQNSSREPGWEXAMAKDILGEAGLHFDELNKLRVLDPEVXQQXIELKEECKDFVDKIGQFQKIVGGLIELVDQLAKEAENEKMKAIGARNLLKSIAKQREAQQQQLQALIAEKKMQLER

SEQ ID NO: 12977 - protein, 141 aa, Homo sapiens
  MOD_RES (2)..(2): Selenocysteine
  MOD_RES (7)..(7): Selenocysteine
  MOD_RES (9)..(9): Selenocysteine
  MOD_RES (11)..(11): Selenocysteine
  MOD_RES (25)..(25): Selenocysteine
  MOD_RES (53)..(53): Selenocysteine
  MOD_RES (56)..(56): Selenocysteine
MXHLLLXAXVXPSEQNSSREPGWEXAMAKDILGEAGLHFDELNKLRVLDPEVXQQXIELKEECKDFVDKIGQFQKIVGGLIELVDQLAKEAENEKMKAIGARNLLKSIAKQREAQQQQLQALIAEKKMQLERNSISLVILI

SEQ ID NO: 12978 - protein, 158 aa, Homo sapiens
  MOD_RES (2)..(2): Selenocysteine
  MOD_RES (7)..(7): Selenocysteine
  MOD_RES (9)..(9): Selenocysteine
  MOD_RES (11)..(11): Selenocysteine
  MOD_RES (25)..(25): Selenocysteine
  MOD_RES (53)..(53): Selenocysteine
  MOD_RES (56)..(56): Selenocysteine
MXHLLLXAXVXPSEQNSSREPGWEXAMAKDILGEAGLHFDELNKLRVLDPEVXQQXIELKEECKDFVDKIGQFQKIVGGLIELVDQLAKEAENEKMKAIGARNLLKSIAKQREAQQQQLQALIAEKKMQLERYRVEYEALCKVEAEQNEFIDQFIFQK

SEQ ID NO: 12979 - protein, 108 aa, Homo sapiens
  MOD_RES (38)..(38): Selenocysteine
  MOD_RES (108)..(108): Selenocysteine
MKDAHGVVIVFNADIPSHRKEMEMWYSCFVQQPSLQDXQCMLIAHHKPGSGDDKGSLSLSPPLNKLKLVHSNLEDDPEEIRMEFIKYLKSIINSMSESRDREEMSIMX

SEQ ID NO: 12980 - protein, 37 aa, Homo sapiens
  MOD_RES (23)..(23): Selenocysteine
MLKAKILFVGPCEQRPLFALIFXEWKNCFGQLSDRIF

SEQ ID NO: 12981 - protein, 155 aa, Homo sapiens
  MOD_RES (17)..(17): Selenocysteine
  MOD_RES (24)..(24): Selenocysteine
  MOD_RES (30)..(30): Selenocysteine
  MOD_RES (35)..(35): Selenocysteine
  MOD_RES (85)..(85): Selenocysteine
  MOD_RES (155)..(155): Selenocysteine
MLKAKILFVGPCESGKXVLANFLXESSDIXEYSPXQGVRFESCWPALMKDAHGVVIVFNADIPSHRKEMEMWYSCFVQQPSLQDXQCMLIAHHKPGSGDDKGSLSLSPPLNKLKLVHSNLEDDPEEIRMEFIKYLKSIINSMSESRDREEMSIMX

SEQ ID NO: 12982 - protein, 185 aa, Homo sapiens
  MOD_RES (17)..(17): Selenocysteine
  MOD_RES (24)..(24): Selenocysteine
  MOD_RES (30)..(30): Selenocysteine
  MOD_RES (35)..(35): Selenocysteine
  MOD_RES (49)..(49): Selenocysteine
  MOD_RES (55)..(55): Selenocysteine
  MOD_RES (115)..(115): Selenocysteine
  MOD_RES (185)..(185): Selenocysteine
MLKAKILFVGPCESGKXVLANFLXESSDIXEYSPXQGVRILEFENPHVXSNNKGXGCEFELWDCGGDAKFESCWPALMKDAHGVVIVFNADIPSHRKEMEMWYSCFVQQPSLQDXQCMLIAHHKPGSGDDKGSLSLSPPLNKLKLVHSNLEDDPEEIRMEFIKYLKSIINSMSESRDREEMSIMX

SEQ ID NO: 12983 - protein, 51 aa, Homo sapiens
  MOD_RES (7)..(7): Selenocysteine
  MOD_RES (13)..(13): Selenocysteine
  MOD_RES (51)..(51): Selenocysteine
MDLVVKXVPVPDXGDSVELFIFDSAGKELFSEMLDKLWESPNVLCLVYDVX

SEQ ID NO: 12984 - protein, 116 aa, Homo sapiens
  MOD_RES (18)..(18): Selenocysteine
  MOD_RES (36)..(36): Selenocysteine
  MOD_RES (38)..(39): Selenocysteine
  MOD_RES (47)..(47): Selenocysteine
  MOD_RES (53)..(53): Selenocysteine
  MOD_RES (91)..(91): Selenocysteine
MVKLAAKCILADPAVGKXALAQIFRSDGAHFQKSYXLXXGMDLVVKXVPVPDXGDSVELFIFDSAGKELFSEMLDKLWESPNVLCLVYDVXNEESFNNCSKWLEKARSQAPGISLP

SEQ ID NO: 12985 - protein, 185 aa, Homo sapiens
  MOD_RES (18)..(18): Selenocysteine
  MOD_RES (36)..(36): Selenocysteine
  MOD_RES (38)..(39): Selenocysteine
  MOD_RES (47)..(47): Selenocysteine
  MOD_RES (53)..(53): Selenocysteine
  MOD_RES (91)..(91): Selenocysteine
  MOD_RES (124)..(124): Selenocysteine
  MOD_RES (151)..(151): Selenocysteine
MVKLAAKCILADPAVGKXALAQIFRSDGAHFQKSYXLXXGMDLVVKXVPVPDXGDSVELFIFDSAGKELFSEMLDKLWESPNVLCLVYDVXNEESFNNCSKWLEKARSQAPGISLPGVLVGNKXDLAGRRAVDSAEARAWALGQGLECFEXSVKEMENFEAPFHCLAKQFHQLYREKVEVFRALA

SEQ ID NO: 12986 - protein, 186 aa, Homo sapiens
  MOD_RES (19)..(19): Selenocysteine
  MOD_RES (37)..(37): Selenocysteine
  MOD_RES (39)..(40): Selenocysteine
  MOD_RES (48)..(48): Selenocysteine
  MOD_RES (54)..(54): Selenocysteine
  MOD_RES (92)..(92): Selenocysteine
  MOD_RES (125)..(125): Selenocysteine
  MOD_RES (152)..(152): Selenocysteine
MVKLAAKCILAGDPAVGKXALAQIFRSDGAHFQKSYXLXXGMDLVVKXVPVPDXGDSVELFIFDSAGKELFSEMLDKLWESPNVLCLVYDVXNEESFNNCSKWLEKARSQAPGISLPGVLVGNKXDLAGRRAVDSAEARAWALGQGLECFEXSVKEMENFEAPFHCLAKQFHQLYREKVEVFRALA

SEQ ID NO: 12987 - protein, 183 aa, Homo sapiens
  MOD_RES (37)..(37): Selenocysteine
  MOD_RES (58)..(58): Selenocysteine
  MOD_RES (76)..(76): Selenocysteine
  MOD_RES (78)..(79): Selenocysteine
  MOD_RES (87)..(87): Selenocysteine
  MOD_RES (93)..(93): Selenocysteine
  MOD_RES (131)..(131): Selenocysteine
  MOD_RES (164)..(164): Selenocysteine
MVKLAAKCILAVPVDKRLSRAEVCSGCCEVCRSVSWXCALPAASEQVPVRGDPAVGKXALAQIFRSDGAHFQKSYXLXXGMDLVVKXVPVPDXGDSVELFIFDSAGKELFSEMLDKLWESPNVLCLVYDVXNEESFNNCSKWLEKARSQAPGISLPGVLVGNKXDLAGRRAVDSAEARAWALG

SEQ ID NO: 12988 - protein, 129 aa, Homo sapiens
  MOD_RES (1)..(1): Any amino acid
  MOD_RES (12)..(12): Selenocysteine
  MOD_RES (14)..(15): Selenocysteine
  MOD_RES (23)..(23): Selenocysteine
  MOD_RES (29)..(29): Selenocysteine
  MOD_RES (67)..(67): Selenocysteine
  MOD_RES (100)..(100): Selenocysteine
  MOD_RES (127)..(127): Selenocysteine
XSDGAHFQKSYXLXXGMDLVVKXVPVPDXGDSVELFIFDSAGKELFSEMLDKLWESPNVLCLVYDVXNEESFNNCSKWLEKARSQAPGISLPGVLVGNKXDLAGRRAVDSAEARAWALGQGLECFEXSV

SEQ ID NO: 12989 - protein, 62 aa, Homo sapiens
  MOD_RES (20)..(20): Selenocysteine
  MOD_RES (24)..(24): Selenocysteine
  MOD_RES (45)..(45): Selenocysteine
MADNSSDECEEENNKEKKKXSQLXPQRGFSENEDDDDDDDDSSEXDSDSDDDDEEHGAPLEG

SEQ ID NO: 12990 - protein, 108 aa, Homo sapiens
  MOD_RES (20)..(20): Selenocysteine
  MOD_RES (24)..(24): Selenocysteine
  MOD_RES (45)..(45): Selenocysteine
  MOD_RES (89)..(89): Selenocysteine
MADNSSDECEEENNKEKKKXSQLXPQRGFSENEDDDDDDDDSSEXDSDSDDDDEEHGAPLEGAYDPADYEHLPVSAEIKELFQYISRYXPQLIDLDHKLKPFIPDFIP

SEQ ID NO: 12991 - protein, 195 aa, Homo sapiens
  MOD_RES (20)..(20): Selenocysteine
  MOD_RES (24)..(24): Selenocysteine
  MOD_RES (45)..(45): Selenocysteine
  MOD_RES (89)..(89): Selenocysteine
  MOD_RES (139)..(139): Selenocysteine
  MOD_RES (145)..(145): Selenocysteine
  MOD_RES (152)..(152): Selenocysteine
  MOD_RES (161)..(161): Selenocysteine
  MOD_RES (181)..(181): Selenocysteine
MADNSSDECEEENNKEKKKXSQLXPQRGFSENEDDDDDDDDSSEXDSDSDDDDEEHGAPLEGAYDPADYEHLPVSAEIKELFQYISRYXPQLIDLDHKLKPFIPDFIPAVGDIDAFLKVPRPDGKPDNLGLLVLDEPSXKQSDPXVLSLWLXENSKQHNIXQHMKVKSLEDAEKNPKAIDXWIESISELHRSKPP

SEQ ID NO: 12992 - protein, 196 aa, Homo sapiens
  MOD_RES (20)..(20): Selenocysteine
  MOD_RES (24)..(24): Selenocysteine
  MOD_RES (45)..(45): Selenocysteine
  MOD_RES (89)..(89): Selenocysteine
  MOD_RES (139)..(139): Selenocysteine
  MOD_RES (145)..(145): Selenocysteine
  MOD_RES (152)..(152): Selenocysteine
  MOD_RES (161)..(161): Selenocysteine
  MOD_RES (181)..(181): Selenocysteine
MADNSSDECEEENNKEKKKXSQLXPQRGFSENEDDDDDDDDSSEXDSDSDDDDEEHGAPLEGAYDPADYEHLPVSAEIKELFQYISRYXPQLIDLDHKLKPFIPDFIPAVGDIDAFLKVPRPDGKPDNLGLLVLDEPSXKQSDPXVLSLWLXENSKQHNIXQHMKVKSLEDAEKNPKAIDXWIESISELHRSKPPA

SEQ ID NO: 12993 - protein, 304 aa, Homo sapiens
  MOD_RES (20)..(20): Selenocysteine
  MOD_RES (24)..(24): Selenocysteine
  MOD_RES (45)..(45): Selenocysteine
  MOD_RES (89)..(89): Selenocysteine
  MOD_RES (139)..(139): Selenocysteine
  MOD_RES (145)..(145): Selenocysteine
  MOD_RES (152)..(152): Selenocysteine
  MOD_RES (161)..(161): Selenocysteine
  MOD_RES (181)..(181): Selenocysteine
  MOD_RES (197)..(197): Selenocysteine
  MOD_RES (201)..(201): Selenocysteine
  MOD_RES (209)..(209): Selenocysteine
  MOD_RES (229)..(229): Selenocysteine
  MOD_RES (286)..(286): Selenocysteine
  MOD_RES (292)..(292): Selenocysteine
  MOD_RES (300)..(300): Selenocysteine
  MOD_RES (302)..(302): Selenocysteine
MADNSSDECEEENNKEKKKXSQLXPQRGFSENEDDDDDDDDSSEXDSDSDDDDEEHGAPLEGAYDPADYEHLPVSAEIKELFQYISRYXPQLIDLDHKLKPFIPDFIPAVGDIDAFLKVPRPDGKPDNLGLLVLDEPSXKQSDPXVLSLWLXENSKQHNIXQHMKVKSLEDAEKNPKAIDXWIESISELHRSKPPAXVHYXRPMPDIDXLMQEWSPEFEELLGKVSLPXAEIDCSLAEYIDMICAILDIPVYKSRIQSLHLLFSLYSEFKNSQHFKALAEGKKAFXPSSNSXSQAGDMEXLXFS

SEQ ID NO: 12994 - protein, 159 aa, Homo sapiens
  MOD_RES (47)..(47): Selenocysteine
  MOD_RES (71)..(71): Selenocysteine
  MOD_RES (75)..(75): Selenocysteine
  MOD_RES (96)..(96): Selenocysteine
  MOD_RES (140)..(140): Selenocysteine
MADNSSDECEEENNKVLREGMPQAPGHRGKDMDPVPPAPASLKCHQXPSHVLERVGWYRESQKHRKEKKKXSQLXPQRGFSENEDDDDDDDDSSEXDSDSDDDDEEHGAPLEGAYDPADYEHLPVSAEIKELFQYISRYXPQLIDLDHKLKPFIPDFIP

SEQ ID NO: 12995 - protein, 297 aa, Homo sapiens
  MOD_RES (47)..(47): Selenocysteine
  MOD_RES (71)..(71): Selenocysteine
  MOD_RES (75)..(75): Selenocysteine
  MOD_RES (96)..(96): Selenocysteine
  MOD_RES (140)..(140): Selenocysteine
  MOD_RES (190)..(190): Selenocysteine
  MOD_RES (196)..(196): Selenocysteine
  MOD_RES (203)..(203): Selenocysteine
  MOD_RES (212)..(212): Selenocysteine
  MOD_RES (232)..(232): Selenocysteine
  MOD_RES (248)..(248): Selenocysteine
  MOD_RES (252)..(252): Selenocysteine
  MOD_RES (260)..(260): Selenocysteine
  MOD_RES (280)..(280): Selenocysteine
MADNSSDECEEENNKVLREGMPQAPGHRGKDMDPVPPAPASLKCHQXPSHVLERVGWYRESQKHRKEKKKXSQLXPQRGFSENEDDDDDDDDSSEXDSDSDDDDEEHGAPLEGAYDPADYEHLPVSAEIKELFQYISRYXPQLIDLDHKLKPFIPDFIPAVGDIDAFLKVPRPDGKPDNLGLLVLDEPSXKQSDPXVLSLWLXENSKQHNIXQHMKVKSLEDAEKNPKAIDXWIESISELHRSKPPAXVHYXRPMPDIDXLMQEWSPEFEELLGKVSLPXAEIDCSLAEYIDMICAF

SEQ ID NO: 12996 - protein, 355 aa, Homo sapiens
  MOD_RES (47)..(47): Selenocysteine
  MOD_RES (71)..(71): Selenocysteine
  MOD_RES (75)..(75): Selenocysteine
  MOD_RES (96)..(96): Selenocysteine
  MOD_RES (140)..(140): Selenocysteine
  MOD_RES (190)..(190): Selenocysteine
  MOD_RES (196)..(196): Selenocysteine
  MOD_RES (203)..(203): Selenocysteine
  MOD_RES (212)..(212): Selenocysteine
  MOD_RES (232)..(232): Selenocysteine
  MOD_RES (248)..(248): Selenocysteine
  MOD_RES (252)..(252): Selenocysteine
  MOD_RES (260)..(260): Selenocysteine
  MOD_RES (280)..(280): Selenocysteine
  MOD_RES (337)..(337): Selenocysteine
  MOD_RES (343)..(343): Selenocysteine
  MOD_RES (351)..(351): Selenocysteine
  MOD_RES (353)..(353): Selenocysteine
MADNSSDECEEENNKVLREGMPQAPGHRGKDMDPVPPAPASLKCHQXPSHVLERVGWYRESQKHRKEKKKXSQLXPQRGFSENEDDDDDDDDSSEXDSDSDDDDEEHGAPLEGAYDPADYEHLPVSAEIKELFQYISRYXPQLIDLDHKLKPFIPDFIPAVGDIDAFLKVPRPDGKPDNLGLLVLDEPSXKQSDPXVLSLWLXENSKQHNIXQHMKVKSLEDAEKNPKAIDXWIESISELHRSKPPAXVHYXRPMPDIDXLMQEWSPEFEELLGKVSLPXAEIDCSLAEYIDMICAILDIPVYKSRIQSLHLLFSLYSEFKNSQHFKALAEGKKAFXPSSNSXSQAGDMEXLXFS

SEQ ID NO: 12997 - protein, 437 aa, Homo sapiens
  MOD_RES (8)..(8): Selenocysteine
  MOD_RES (20)..(21): Selenocysteine
  MOD_RES (46)..(46): Selenocysteine
  MOD_RES (58)..(58): Selenocysteine
  MOD_RES (66)..(66): Selenocysteine
  MOD_RES (79)..(79): Selenocysteine
  MOD_RES (97)..(97): Selenocysteine
  MOD_RES (165)..(165): Selenocysteine
  MOD_RES (173)..(173): Selenocysteine
  MOD_RES (186)..(186): Selenocysteine
  MOD_RES (241)..(242): Selenocysteine
  MOD_RES (266)..(266): Selenocysteine
  MOD_RES (268)..(268): Selenocysteine
  MOD_RES (288)..(289): Selenocysteine
  MOD_RES (300)..(301): Selenocysteine
  MOD_RES (329)..(329): Selenocysteine
  MOD_RES (333)..(333): Selenocysteine
  MOD_RES (359)..(359): Selenocysteine
  MOD_RES (371)..(371): Selenocysteine
  MOD_RES (375)..(375): Selenocysteine
  MOD_RES (393)..(393): Selenocysteine
  MOD_RES (428)..(428): Selenocysteine
  MOD_RES (431)..(431): Selenocysteine
MEKELRSXILFNAYKKEIFXXNNGYKSMQKKLRSNWKIQSLKDEIXSEKLNGVKLWIXAGPREKFXAAEFEILKKYLDXGGDVFVMLGEGGESRFDXNINFLLEEYGIMVNNDAVVRNVYHKYFHPKEALVSSGVLNREISRAAGKAVPGIIDEESSGNNAQALXFVYPFGAXLSVMKPAVAVLSXGSVCFPLNRPILAFYHSKNQGGKLAVLGSCHMFSDQYLDKEENSKIMDVVFQWLXXGDIHLNQIDAEDPEISDYMMLPYXAXLSKRNRECLQESDEIPRDFXXLFDLSIFQLDXXSFHSVIEAHEQLNVKHEPLQLIQPQFEXPLPXLQPAVFPPSFRELPPPPLELFDLDEXFSSEKARLAQIXNKCXEEDLEFYVRKCGDILGVXSKLPKDQQDAKHILEHVFFQVVEFKKLNQEHDIDXSEXAFQNNF

SEQ ID NO: 12998 - protein, 81 aa, Homo sapiens
  MOD_RES (2)..(2): Selenocysteine
  MOD_RES (9)..(10): Selenocysteine
  MOD_RES (25)..(25): Selenocysteine
MXAALAVVXXSGLEDGVPRSRGEGXGEVVLERGPGAAYHMFVVMEDLVEKLKLLRYEEEFLRKSNLKAPSREELQIFLLQN

SEQ ID NO: 12999 - protein, 429 aa, Homo sapiens
  MOD_RES (2)..(2): Selenocysteine
  MOD_RES (9)..(10): Selenocysteine
  MOD_RES (25)..(25): Selenocysteine
  MOD_RES (78)..(78): Selenocysteine
  MOD_RES (89)..(89): Selenocysteine
  MOD_RES (114)..(114): Selenocysteine
  MOD_RES (128)..(128): Selenocysteine
  MOD_RES (162)..(162): Selenocysteine
  MOD_RES (186)..(186): Selenocysteine
  MOD_RES (199)..(199): Selenocysteine
  MOD_RES (215)..(215): Selenocysteine
  MOD_RES (223)..(223): Selenocysteine
  MOD_RES (233)..(234): Selenocysteine
  MOD_RES (253)..(253): Selenocysteine
  MOD_RES (256)..(256): Selenocysteine
  MOD_RES (282)..(282): Selenocysteine
  MOD_RES (294)..(294): Selenocysteine
  MOD_RES (296)..(296): Selenocysteine
  MOD_RES (340)..(340): Selenocysteine
  MOD_RES (343)..(343): Selenocysteine
  MOD_RES (368)..(368): Selenocysteine
  MOD_RES (381)..(381): Selenocysteine
  MOD_RES (387)..(387): Selenocysteine
  MOD_RES (400)..(400): Selenocysteine
  MOD_RES (413)..(413): Selenocysteine
  MOD_RES (419)..(419): Selenocysteine
  MOD_RES (426)..(426): Selenocysteine
MXAALAVVXXSGLEDGVPRSRGEGXGEVVLERGPGAAYHMFVVMEDLVEKLKLLRYEEEFLRKSNLKAPSRHYFALPXNPGEQFYMFCXLAAWLINKAGRPFEQPQEYDDPNAXISNILSELRSFGRXADFPPSKLKSGYGEHVCYVLDCFAEEALKYIGFXWKRPIYPVEELEEESVAEDDAELXLNKVDEEFVEEEXDNEENFIDLNVLKAQXYHLDMNEXAKQEDILESXXDAAEWSLEVERVLPQLKVXIRXDNKDWRIHVDQMHQHRSGIESALKEXKGFLDKLHNEIXRXLEKISSREKYINNQLENLVQEYRAAQAQLSEAKERYQQGNGGVXERXRLLSEVMEELEKVKQEMEEKGSSMXDGAPLVKIKQSLXKLKQEXVEMDIRIGIVEHXLLQSKLKEKSNMXRNMHAXVIPEPAXGFY

SEQ ID NO: 13000 - protein, 157 aa, Homo sapiens
  MOD_RES (2)..(2): Selenocysteine
  MOD_RES (9)..(10): Selenocysteine
  MOD_RES (25)..(25): Selenocysteine
  MOD_RES (109)..(109): Selenocysteine
  MOD_RES (120)..(120): Selenocysteine
  MOD_RES (145)..(145): Selenocysteine
MXAALAVVXXSGLEDGVPRSRGEGXGEVVLERGPGAAYHMFVVMEDLVEKLKLLRYEEEFLRKSNLKAPSRWVPASPSARVPASPQGDALLGPAGNQFRESGHYFALPXNPGEQFYMFCXLAAWLINKAGRPFEQPQEYDDPNAXISNILSELRSFV

SEQ ID NO: 13001 - protein, 146 aa, Homo sapiens
  MOD_RES (21)..(21): Selenocysteine
  MOD_RES (39)..(39): Selenocysteine
  MOD_RES (45)..(45): Selenocysteine
  MOD_RES (57)..(57): Selenocysteine
  MOD_RES (73)..(73): Selenocysteine
  MOD_RES (78)..(78): Selenocysteine
  MOD_RES (82)..(82): Selenocysteine
  MOD_RES (84)..(84): Selenocysteine
  MOD_RES (120)..(120): Selenocysteine
  MOD_RES (122)..(122): Selenocysteine
  MOD_RES (124)..(124): Selenocysteine
MASNHKSSAARPVSRGGVGLXGRPPSGIRPLSGNIRVAXAMPPGXARPGSRGCPIGXGGVLSSQIKVAHRPVXQQGLXGMKXGXKGPQRQILDKSYYLGLLRRSFACHPSWSAMMGSHVXAXSXAWIQVILLPQPRACNLSKISEL

SEQ ID NO: 13002 - protein, 127 aa, Homo sapiens
  MOD_RES (21)..(21): Selenocysteine
  MOD_RES (39)..(39): Selenocysteine
  MOD_RES (45)..(45): Selenocysteine
  MOD_RES (57)..(57): Selenocysteine
  MOD_RES (73)..(73): Selenocysteine
  MOD_RES (78)..(78): Selenocysteine
  MOD_RES (82)..(82): Selenocysteine
  MOD_RES (84)..(84): Selenocysteine
  MOD_RES (109)..(110): Selenocysteine
MASNHKSSAARPVSRGGVGLXGRPPSGIRPLSGNIRVAXAMPPGXARPGSRGCPIGXGGVLSSQIKVAHRPVXQQGLXGMKXGXKGPQRQILDKSYYLGLLRSKISELXXEVNKLQKGIEMYNQENS

SEQ ID NO: 13003 - protein, 175 aa, Homo sapiens
  MOD_RES (21)..(21): Selenocysteine
  MOD_RES (39)..(39): Selenocysteine
  MOD_RES (45)..(45): Selenocysteine
  MOD_RES (57)..(57): Selenocysteine
  MOD_RES (73)..(73): Selenocysteine
  MOD_RES (78)..(78): Selenocysteine
  MOD_RES (82)..(82): Selenocysteine
  MOD_RES (84)..(84): Selenocysteine
  MOD_RES (109)..(110): Selenocysteine
  MOD_RES (138)..(138): Selenocysteine
  MOD_RES (162)..(162): Selenocysteine
  MOD_RES (164)..(164): Selenocysteine
MASNHKSSAARPVSRGGVGLXGRPPSGIRPLSGNIRVAXAMPPGXARPGSRGCPIGXGGVLSSQIKVAHRPVXQQGLXGMKXGXKGPQRQILDKSYYLGLLRSKISELXXEVNKLQKGIEMYNQENSVYLSYEKRAEXLAVEIKELQGQLADYNMLVDKLNXNXEMEEVMNDYNM

SEQ ID NO: 13004 - protein, 372 aa, Homo sapiens
  MOD_RES (21)..(21): Selenocysteine
  MOD_RES (39)..(39): Selenocysteine
  MOD_RES (45)..(45): Selenocysteine
  MOD_RES (57)..(57): Selenocysteine
  MOD_RES (73)..(73): Selenocysteine
  MOD_RES (78)..(78): Selenocysteine
  MOD_RES (82)..(82): Selenocysteine
  MOD_RES (84)..(84): Selenocysteine
  MOD_RES (109)..(110): Selenocysteine
  MOD_RES (138)..(138): Selenocysteine
  MOD_RES (162)..(162): Selenocysteine
  MOD_RES (164)..(164): Selenocysteine
  MOD_RES (184)..(184): Selenocysteine
  MOD_RES (192)..(192): Selenocysteine
  MOD_RES (215)..(215): Selenocysteine
  MOD_RES (235)..(236): Selenocysteine
  MOD_RES (246)..(246): Selenocysteine
  MOD_RES (327)..(327): Selenocysteine
  MOD_RES (329)..(329): Selenocysteine
  MOD_RES (354)..(354): Selenocysteine
  MOD_RES (365)..(365): Selenocysteine
MASNHKSSAARPVSRGGVGLXGRPPSGIRPLSGNIRVAXAMPPGXARPGSRGCPIGXGGVLSSQIKVAHRPVXQQGLXGMKXGXKGPQRQILDKSYYLGLLRSKISELXXEVNKLQKGIEMYNQENSVYLSYEKRAEXLAVEIKELQGQLADYNMLVDKLNXNXEMEEVMNDYNMLKAQNDREXQSLDVIFXERQAKEKQIRSVEEEIEQEKQAXDDIIKNMSFENQVKYLEMKXXNEKLLQELDXLQQQLDSQNMKKESLEAEIAHSQVKQEAVLLHEKLYELESHRDQMIAEDKSIGSPMEEREKLLKQIKDDNQEIASMERQLXDXKEKINQFIEEIRQLDMDLEEHQDPXNYGWKILEKNXGSFKKQV

SEQ ID NO: 13005 - protein, 600 aa, Homo sapiens
  MOD_RES (21)..(21): Selenocysteine
  MOD_RES (39)..(39): Selenocysteine
  MOD_RES (45)..(45): Selenocysteine
  MOD_RES (57)..(57): Selenocysteine
  MOD_RES (73)..(73): Selenocysteine
  MOD_RES (78)..(78): Selenocysteine
  MOD_RES (82)..(82): Selenocysteine
  MOD_RES (84)..(84): Selenocysteine
  MOD_RES (109)..(110): Selenocysteine
  MOD_RES (138)..(138): Selenocysteine
  MOD_RES (162)..(162): Selenocysteine
  MOD_RES (164)..(164): Selenocysteine
  MOD_RES (184)..(184): Selenocysteine
  MOD_RES (192)..(192): Selenocysteine
  MOD_RES (215)..(215): Selenocysteine
  MOD_RES (235)..(236): Selenocysteine
  MOD_RES (246)..(246): Selenocysteine
  MOD_RES (327)..(327): Selenocysteine
  MOD_RES (329)..(329): Selenocysteine
  MOD_RES (370)..(370): Selenocysteine
  MOD_RES (374)..(374): Selenocysteine
  MOD_RES (378)..(378): Selenocysteine
  MOD_RES (414)..(414): Selenocysteine
  MOD_RES (430)..(430): Selenocysteine
  MOD_RES (438)..(438): Selenocysteine
  MOD_RES (443)..(443): Selenocysteine
  MOD_RES (464)..(464): Selenocysteine
  MOD_RES (478)..(479): Selenocysteine
  MOD_RES (510)..(510): Selenocysteine
  MOD_RES (531)..(531): Selenocysteine
  MOD_RES (538)..(538): Selenocysteine
  MOD_RES (543)..(543): Selenocysteine
  MOD_RES (565)..(565): Selenocysteine
  MOD_RES (580)..(580): Selenocysteine
  MOD_RES (589)..(589): Selenocysteine
  MOD_RES (597)..(597): Selenocysteine
MASNHKSSAARPVSRGGVGLXGRPPSGIRPLSGNIRVAXAMPPGXARPGSRGCPIGXGGVLSSQIKVAHRPVXQQGLXGMKXGXKGPQRQILDKSYYLGLLRSKISELXXEVNKLQKGIEMYNQENSVYLSYEKRAEXLAVEIKELQGQLADYNMLVDKLNXNXEMEEVMNDYNMLKAQNDREXQSLDVIFXERQAKEKQIRSVEEEIEQEKQAXDDIIKNMSFENQVKYLEMKXXNEKLLQELDXLQQQLDSQNMKKESLEAEIAHSQVKQEAVLLHEKLYELESHRDQMIAEDKSIGSPMEEREKLLKQIKDDNQEIASMERQLXDXKEKINQFIEEIRQLDMDLEEHQGEMNQKYKELKKREEHMDXFIEXFEEXKNQELKRKAQIEANIVALLEHCSRNINRIEQISSIXNQELKMMQDDLNFKSXEVQKSQSXAQNLXSDIQRLQLDLQKMELLESKMXEEQHSLKSKIKQMXXDLEIYNDLPALKSSGEEKIKKLHQERMILSXHRNAFKKIMEKQNIEYEALKXQLQENEXHSQLXNLERKWQHLEQNNFAMKEFIAXKSQESDYQPIKKNVXKQIAEYNKXIVDALHSXSGN

SEQ ID NO: 13006 - protein, 147 aa, Homo sapiens
  MOD_RES (7)..(7): Selenocysteine
  MOD_RES (19)..(19): Selenocysteine
  MOD_RES (35)..(35): Selenocysteine
  MOD_RES (40)..(40): Selenocysteine
  MOD_RES (44)..(44): Selenocysteine
  MOD_RES (46)..(46): Selenocysteine
  MOD_RES (71)..(72): Selenocysteine
  MOD_RES (100)..(100): Selenocysteine
  MOD_RES (124)..(124): Selenocysteine
  MOD_RES (126)..(126): Selenocysteine
  MOD_RES (146)..(146): Selenocysteine
MPMPPGXARPGSRGCPIGXGGVLSSQIKVAHRPVXQQGLXGMKXGXKGPQRQILDKSYYLGLLRSKISELXXEVNKLQKGIEMYNQENSVYLSYEKRAEXLAVEIKELQGQLADYNMLVDKLNXNXEMEEVMNDYNMLKAQNDREXQ

SEQ ID NO: 13007 - protein, 33 aa, Homo sapiens
  MOD_RES (5)..(5): Selenocysteine
  MOD_RES (11)..(11): Selenocysteine
  MOD_RES (28)..(28): Selenocysteine
MLRSXLAQQGXPVYSVAWGPDSEKVLYXAGKQL

SEQ ID NO: 13008 - protein, 42 aa, Homo sapiens
  MOD_RES (5)..(5): Selenocysteine
  MOD_RES (11)..(11): Selenocysteine
  MOD_RES (28)..(28): Selenocysteine
MLRSXLAQQGXPVYSVAWGPDSEKVLYXAGKQLIIKPLQPNA

SEQ ID NO: 13009 - protein, 77 aa, Homo sapiens
  MOD_RES (5)..(5): Selenocysteine
  MOD_RES (11)..(11): Selenocysteine
  MOD_RES (28)..(28): Selenocysteine
MLRSXLAQQGXPVYSVAWGPDSEKVLYXAGKQLIIKPLQPNAKVLQWKAHDGIILKVDWNSVNDLILSAGEDCKYKV

SEQ ID NO: 13010 - protein, 122 aa, Homo sapiens
  MOD_RES (5)..(5): Selenocysteine
  MOD_RES (11)..(11): Selenocysteine
  MOD_RES (28)..(28): Selenocysteine
  MOD_RES (96)..(96): Selenocysteine
  MOD_RES (114)..(114): Selenocysteine
  MOD_RES (121)..(121): Selenocysteine
MLRSXLAQQGXPVYSVAWGPDSEKVLYXAGKQLIIKPLQPNAKVLQWKAHDGIILKVDWNSVNDLILSAGEDCKYKVWDSYGRPLYNSQPHEHPIXSVAWAPDGELFAVGSFHXLRLCDKXG

SEQ ID NO: 13011 - protein, 640 aa, Homo sapiens
  MOD_RES (5)..(5): Selenocysteine
  MOD_RES (11)..(11): Selenocysteine
  MOD_RES (28)..(28): Selenocysteine
  MOD_RES (96)..(96): Selenocysteine
  MOD_RES (114)..(114): Selenocysteine
  MOD_RES (121)..(121): Selenocysteine
  MOD_RES (132)..(132): Selenocysteine
  MOD_RES (145)..(145): Selenocysteine
  MOD_RES (174)..(174): Selenocysteine
  MOD_RES (176)..(176): Selenocysteine
  MOD_RES (214)..(214): Selenocysteine
  MOD_RES (223)..(223): Selenocysteine
  MOD_RES (228)..(228): Selenocysteine
  MOD_RES (238)..(238): Selenocysteine
  MOD_RES (277)..(277): Selenocysteine
  MOD_RES (284)..(284): Selenocysteine
  MOD_RES (291)..(291): Selenocysteine
  MOD_RES (310)..(310): Selenocysteine
  MOD_RES (337)..(337): Selenocysteine
  MOD_RES (354)..(354): Selenocysteine
  MOD_RES (370)..(370): Selenocysteine
  MOD_RES (374)..(374): Selenocysteine
  MOD_RES (380)..(380): Selenocysteine
  MOD_RES (390)..(390): Selenocysteine
  MOD_RES (400)..(400): Selenocysteine
  MOD_RES (411)..(411): Selenocysteine
  MOD_RES (435)..(435): Selenocysteine
  MOD_RES (449)..(449): Selenocysteine
  MOD_RES (478)..(478): Selenocysteine
  MOD_RES (494)..(495): Selenocysteine
  MOD_RES (573)..(573): Selenocysteine
  MOD_RES (577)..(577): Selenocysteine
  MOD_RES (588)..(588): Selenocysteine
  MOD_RES (594)..(594): Selenocysteine
  MOD_RES (621)..(621): Selenocysteine
MLRSXLAQQGXPVYSVAWGPDSEKVLYXAGKQLIIKPLQPNAKVLQWKAHDGIILKVDWNSVNDLILSAGEDCKYKVWDSYGRPLYNSQPHEHPIXSVAWAPDGELFAVGSFHXLRLCDKXGWSYALEKPNXGSIFNIAWSIDGXQIAGACGNGHVVFAHVVEQHWEWKNFQVXLXKRRAMQVRNVLNDAVDLLEFRDRVIKASLNYAHLVVSXSLQCYVFSXKNWNXPIIFDLKEGXVSLILQAERHFLLVDGSSIYLYSYEGRFISSPKFPGMRXDILNAQXVSLSNDXIAIRDKADEKIIFLFEASXGKPLGDGKFLSHKNEILEIALDQKGLXNDRKIAFIDKNRDLCIXSVKRFGKEEQIIKLGXMVHXLAWNDXCNILCGLQDXRFIVWYYPNXVYVDRDILPKXLYERDASEFSKNPHIVSFVGNQVXIRRADGSLVHISIXPYPAILHEYVSSSKWEDAVRLCRFVKEQXMWACLAAMAVANRDMXXAEIAYAAIGEIDKVQYINSIKNLPSKESKMAHILLFSGNIQEAEIVLLQAGLVYQAIQININLYNWERALELAVKYKXHVDXVLAYRQKFLEXFGKQEXNKRYLHYAEGLQIDWEKIKAKIEMEIXKEREQSSSSQSSKSIGLKP

SEQ ID NO: 13012 - protein, 64 aa, Homo sapiens
  MOD_RES (23)..(24): Selenocysteine
  MOD_RES (44)..(44): Selenocysteine
  MOD_RES (47)..(48): Selenocysteine
MRLKISLLKEPKHQELVSCVGWXXAEELYSCSDDHQIVKWNLLXSEXXQIVKLPDDIYPIDFHW

SEQ ID NO: 13013 - protein, 95 aa, Homo sapiens
  MOD_RES (23)..(24): Selenocysteine
  MOD_RES (44)..(44): Selenocysteine
  MOD_RES (47)..(48): Selenocysteine
  MOD_RES (75)..(75): Selenocysteine
  MOD_RES (83)..(83): Selenocysteine
MRLKISLLKEPKHQELVSCVGWXXAEELYSCSDDHQIVKWNLLXSEXXQIVKLPDDIYPIDFHWFPKSLGVKKQXQAESFVLXSSDDFSNVISFR

SEQ ID NO: 13014 - protein, 121 aa, Homo sapiens
  MOD_RES (23)..(24): Selenocysteine
  MOD_RES (44)..(44): Selenocysteine
  MOD_RES (47)..(48): Selenocysteine
  MOD_RES (75)..(75): Selenocysteine
  MOD_RES (83)..(83): Selenocysteine
  MOD_RES (119)..(119): Selenocysteine
MRLKISLLKEPKHQELVSCVGWXXAEELYSCSDDHQIVKWNLLXSEXXQIVKLPDDIYPIDFHWFPKSLGVKKQXQAESFVLXSSDGKFHLISKLGRVEKSVEAHCGAVLAGRWNYEGXAL

SEQ ID NO: 13015 - protein, 179 aa, Homo sapiens
  MOD_RES (23)..(24): Selenocysteine
  MOD_RES (44)..(44): Selenocysteine
  MOD_RES (47)..(48): Selenocysteine
  MOD_RES (75)..(75): Selenocysteine
  MOD_RES (83)..(83): Selenocysteine
  MOD_RES (119)..(119): Selenocysteine
  MOD_RES (123)..(123): Selenocysteine
  MOD_RES (136)..(136): Selenocysteine
  MOD_RES (142)..(142): Selenocysteine
  MOD_RES (148)..(148): Selenocysteine
  MOD_RES (165)..(165): Selenocysteine
MRLKISLLKEPKHQELVSCVGWXXAEELYSCSDDHQIVKWNLLXSEXXQIVKLPDDIYPIDFHWFPKSLGVKKQXQAESFVLXSSDGKFHLISKLGRVEKSVEAHCGAVLAGRWNYEGXALVXVGEDGQIKIWSKXGMLRSXLAQQGXPVYSVAWGPDSEKVLYXAGKQLIIKPLQPNA

SEQ ID NO: 13016 - protein, 777 aa, Homo sapiens
  MOD_RES (23)..(24): Selenocysteine
  MOD_RES (44)..(44): Selenocysteine
  MOD_RES (47)..(48): Selenocysteine
  MOD_RES (75)..(75): Selenocysteine
  MOD_RES (83)..(83): Selenocysteine
  MOD_RES (119)..(119): Selenocysteine
  MOD_RES (123)..(123): Selenocysteine
  MOD_RES (136)..(136): Selenocysteine
  MOD_RES (142)..(142): Selenocysteine
  MOD_RES (148)..(148): Selenocysteine
  MOD_RES (165)..(165): Selenocysteine
  MOD_RES (233)..(233): Selenocysteine
  MOD_RES (251)..(251): Selenocysteine
  MOD_RES (258)..(258): Selenocysteine
  MOD_RES (269)..(269): Selenocysteine
  MOD_RES (282)..(282): Selenocysteine
  MOD_RES (311)..(311): Selenocysteine
  MOD_RES (313)..(313): Selenocysteine
  MOD_RES (351)..(351): Selenocysteine
  MOD_RES (360)..(360): Selenocysteine
  MOD_RES (365)..(365): Selenocysteine
  MOD_RES (375)..(375): Selenocysteine
  MOD_RES (414)..(414): Selenocysteine
  MOD_RES (421)..(421): Selenocysteine
  MOD_RES (428)..(428): Selenocysteine
  MOD_RES (447)..(447): Selenocysteine
  MOD_RES (474)..(474): Selenocysteine
  MOD_RES (491)..(491): Selenocysteine
  MOD_RES (507)..(507): Selenocysteine
  MOD_RES (511)..(511): Selenocysteine
  MOD_RES (517)..(517): Selenocysteine
  MOD_RES (527)..(527): Selenocysteine
  MOD_RES (537)..(537): Selenocysteine
  MOD_RES (548)..(548): Selenocysteine
  MOD_RES (572)..(572): Selenocysteine
  MOD_RES (586)..(586): Selenocysteine
  MOD_RES (615)..(615): Selenocysteine
  MOD_RES (631)..(632): Selenocysteine
  MOD_RES (710)..(710): Selenocysteine
  MOD_RES (714)..(714): Selenocysteine
  MOD_RES (725)..(725): Selenocysteine
  MOD_RES (731)..(731): Selenocysteine
  MOD_RES (758)..(758): Selenocysteine
MRLKISLLKEPKHQELVSCVGWXXAEELYSCSDDHQIVKWNLLXSEXXQIVKLPDDIYPIDFHWFPKSLGVKKQXQAESFVLXSSDGKFHLISKLGRVEKSVEAHCGAVLAGRWNYEGXALVXVGEDGQIKIWSKXGMLRSXLAQQGXPVYSVAWGPDSEKVLYXAGKQLIIKPLQPNAKVLQWKAHDGIILKVDWNSVNDLILSAGEDCKYKVWDSYGRPLYNSQPHEHPIXSVAWAPDGELFAVGSFHXLRLCDKXGWSYALEKPNXGSIFNIAWSIDGXQIAGACGNGHVVFAHVVEQHWEWKNFQVXLXKRRAMQVRNVLNDAVDLLEFRDRVIKASLNYAHLVVSXSLQCYVFSXKNWNXPIIFDLKEGXVSLILQAERHFLLVDGSSIYLYSYEGRFISSPKFPGMRXDILNAQXVSLSNDXIAIRDKADEKIIFLFEASXGKPLGDGKFLSHKNEILEIALDQKGLXNDRKIAFIDKNRDLCIXSVKRFGKEEQIIKLGXMVHXLAWNDXCNILCGLQDXRFIVWYYPNXVYVDRDILPKXLYERDASEFSKNPHIVSFVGNQVXIRRADGSLVHISIXPYPAILHEYVSSSKWEDAVRLCRFVKEQXMWACLAAMAVANRDMXXAEIAYAAIGEIDKVQYINSIKNLPSKESKMAHILLFSGNIQEAEIVLLQAGLVYQAIQININLYNWERALELAVKYKXHVDXVLAYRQKFLEXFGKQEXNKRYLHYAEGLQIDWEKIKAKIEMEIXKEREQSSSSQSSKSIGLKP

SEQ ID NO: 13017 - protein, 122 aa, Homo sapiens
  MOD_RES (32)..(32): Selenocysteine
  MOD_RES (41)..(41): Selenocysteine
  MOD_RES (46)..(46): Selenocysteine
  MOD_RES (56)..(56): Selenocysteine
  MOD_RES (95)..(95): Selenocysteine
  MOD_RES (102)..(102): Selenocysteine
  MOD_RES (109)..(109): Selenocysteine
VRNVLNDAVDLLEFRDRVIKASLNYAHLVVSXSLQCYVFSXKNWNXPIIFDLKEGXVSLILQAERHFLLVDGSSIYLYSYEGRFISSPKFPGMRXDILNAQXVSLSNDXIAIRDKADEKSLL

SEQ ID NO: 13018 - protein, 69 aa, Homo sapiens
  MOD_RES (1)..(1): Any amino acid
  MOD_RES (24)..(24): Selenocysteine
  MOD_RES (42)..(42): Selenocysteine
  MOD_RES (49)..(49): Selenocysteine
  MOD_RES (65)..(65): Selenocysteine
XKYKVWDSYGRPLYNSQPHEHPIXSVAWAPDGELFAVGSFHXLRLCDKXGFLFHQMKDYKQAKVXYFKW

SEQ ID NO: 13019 - protein, 55 aa, Homo sapiens
  MOD_RES (4)..(4): Selenocysteine
  MOD_RES (8)..(8): Selenocysteine
  MOD_RES (21)..(21): Selenocysteine
  MOD_RES (27)..(27): Selenocysteine
  MOD_RES (33)..(33): Selenocysteine
  MOD_RES (50)..(50): Selenocysteine
YEGXALVXVGEDGQIKIWSKXGMLRSXLAQQGXPVYSVAWGPDSEKVLYXAVESS

SEQ ID NO: 13020 - protein, 339 aa, Homo sapiens
  MOD_RES (18)..(18): Selenocysteine
  MOD_RES (30)..(30): Selenocysteine
  MOD_RES (74)..(74): Selenocysteine
  MOD_RES (89)..(89): Selenocysteine
  MOD_RES (114)..(114): Selenocysteine
  MOD_RES (129)..(129): Selenocysteine
  MOD_RES (138)..(138): Selenocysteine
  MOD_RES (229)..(229): Selenocysteine
  MOD_RES (246)..(246): Selenocysteine
  MOD_RES (264)..(264): Selenocysteine
  MOD_RES (266)..(266): Selenocysteine
  MOD_RES (314)..(314): Selenocysteine
  MOD_RES (327)..(327): Selenocysteine
MAAEDELQLPRLPELFEXGRQLLDEVEVAXEPAGSRIVQEKVFKGLDLLEKAAEMLSQLDLFSRNEDLEEIASXDLKYLLVPAFQGALXMKQVNPSKRLDHLQRAREHFINYLXQCHCYHVAEFELPKXMNNSAENHXANSSMAYPSLVAMASQRQAKIQRYKQKKELEHRLSAMKSAVESGQADDERVREYYLLHLQRWIDISLEEIESIDQEIKILRERDSSREASXSNSSRQERPPVKPFILXRNMAQAKVFGAGYPSLPXMXVSDWYEQHRKYGALPDQGIAKAAPEEFRKAAQQQEEQEEKEEEDDEQXLHRAREWDDWKDXHPRGYGNRQNMG

SEQ ID NO: 13021 - protein, 139 aa, Homo sapiens
  MOD_RES (7)..(7): Selenocysteine
  MOD_RES (22)..(22): Selenocysteine
  MOD_RES (24)..(24): Selenocysteine
  MOD_RES (28)..(28): Selenocysteine
  MOD_RES (33)..(33): Selenocysteine
  MOD_RES (58)..(58): Selenocysteine
  MOD_RES (70)..(70): Selenocysteine
  MOD_RES (108)..(108): Selenocysteine
  MOD_RES (113)..(113): Selenocysteine
  MOD_RES (121)..(121): Selenocysteine
  MOD_RES (125)..(125): Selenocysteine
  MOD_RES (134)..(134): Selenocysteine
LKVKMHXMSSSHLFYLALCLLXFXSSAXAGPEXLCGAELVDALQFVCGDRGFYFNKPXGYGSSSRRAPQXGIVDECCFRSCDLRRLEMYCAPLKPAKSARSVRAQRHXDMPKXQKYQPPSXNKNXKSQRRKGSXFEERK

SEQ ID NO: 13022 - protein, 153 aa, Homo sapiens
  MOD_RES (9)..(9): Selenocysteine
  MOD_RES (26)..(26): Selenocysteine
  MOD_RES (41)..(41): Selenocysteine
  MOD_RES (43)..(43): Selenocysteine
  MOD_RES (47)..(47): Selenocysteine
  MOD_RES (52)..(52): Selenocysteine
  MOD_RES (77)..(77): Selenocysteine
  MOD_RES (89)..(89): Selenocysteine
  MOD_RES (127)..(127): Selenocysteine
  MOD_RES (132)..(132): Selenocysteine
MGKISSLPXQLFKCCFCDFLKVKMHXMSSSHLFYLALCLLXFXSSAXAGPEXLCGAELVDALQFVCGDRGFYFNKPXGYGSSSRRAPQXGIVDECCFRSCDLRRLEMYCAPLKPAKSARSVRAQRHXDMPKXQKEVHLKNASRGSAGNKNYRM

SEQ ID NO: 13023 - protein, 158 aa, Homo sapiens
  MOD_RES (9)..(9): Selenocysteine
  MOD_RES (26)..(26): Selenocysteine
  MOD_RES (41)..(41): Selenocysteine
  MOD_RES (43)..(43): Selenocysteine
  MOD_RES (47)..(47): Selenocysteine
  MOD_RES (52)..(52): Selenocysteine
  MOD_RES (77)..(77): Selenocysteine
  MOD_RES (89)..(89): Selenocysteine
  MOD_RES (127)..(127): Selenocysteine
  MOD_RES (132)..(132): Selenocysteine
  MOD_RES (140)..(140): Selenocysteine
  MOD_RES (144)..(144): Selenocysteine
  MOD_RES (153)..(153): Selenocysteine
MGKISSLPXQLFKCCFCDFLKVKMHXMSSSHLFYLALCLLXFXSSAXAGPEXLCGAELVDALQFVCGDRGFYFNKPXGYGSSSRRAPQXGIVDECCFRSCDLRRLEMYCAPLKPAKSARSVRAQRHXDMPKXQKYQPPSXNKNXKSQRRKGSXFEERK

SEQ ID NO: 13024 - protein, 195 aa, Homo sapiens
  MOD_RES (9)..(9): Selenocysteine
  MOD_RES (26)..(26): Selenocysteine
  MOD_RES (41)..(41): Selenocysteine
  MOD_RES (43)..(43): Selenocysteine
  MOD_RES (47)..(47): Selenocysteine
  MOD_RES (52)..(52): Selenocysteine
  MOD_RES (77)..(77): Selenocysteine
  MOD_RES (89)..(89): Selenocysteine
  MOD_RES (127)..(127): Selenocysteine
  MOD_RES (132)..(132): Selenocysteine
  MOD_RES (140)..(140): Selenocysteine
  MOD_RES (144)..(144): Selenocysteine
  MOD_RES (155)..(155): Selenocysteine
  MOD_RES (165)..(165): Selenocysteine
MGKISSLPXQLFKCCFCDFLKVKMHXMSSSHLFYLALCLLXFXSSAXAGPEXLCGAELVDALQFVCGDRGFYFNKPXGYGSSSRRAPQXGIVDECCFRSCDLRRLEMYCAPLKPAKSARSVRAQRHXDMPKXQKYQPPSXNKNXKSQRRKGWPKXHPGGEQKEGXEASLQIRGKKKEQRREIGSRNAECRGKKGK

SEQ ID NO: 13025 - protein, 137 aa, Homo sapiens
  MOD_RES (3)..(3): Selenocysteine
  MOD_RES (5)..(5): Selenocysteine
  MOD_RES (10)..(10): Selenocysteine
  MOD_RES (25)..(25): Selenocysteine
  MOD_RES (27)..(27): Selenocysteine
  MOD_RES (31)..(31): Selenocysteine
  MOD_RES (36)..(36): Selenocysteine
  MOD_RES (61)..(61): Selenocysteine
  MOD_RES (73)..(73): Selenocysteine
  MOD_RES (111)..(111): Selenocysteine
  MOD_RES (116)..(116): Selenocysteine
MIXPXVKMHXMSSSHLFYLALCLLXFXSSAXAGPEXLCGAELVDALQFVCGDRGFYFNKPXGYGSSSRRAPQXGIVDECCFRSCDLRRLEMYCAPLKPAKSARSVRAQRHXDMPKXQKEVHLKNASRGSAGNKNYRM

SEQ ID NO: 13026 - protein, 1366 aa, Homo sapiens
  MOD_RES (11)..(11): Selenocysteine
  MOD_RES (28)..(28): Selenocysteine
  MOD_RES (53)..(53): Selenocysteine
  MOD_RES (79)..(79): Selenocysteine
  MOD_RES (82)..(82): Selenocysteine
  MOD_RES (104)..(104): Selenocysteine
  MOD_RES (123)..(123): Selenocysteine
  MOD_RES (137)..(137): Selenocysteine
  MOD_RES (154)..(154): Selenocysteine
  MOD_RES (185)..(185): Selenocysteine
  MOD_RES (195)..(196): Selenocysteine
  MOD_RES (207)..(208): Selenocysteine
  MOD_RES (218)..(218): Selenocysteine
  MOD_RES (225)..(225): Selenocysteine
  MOD_RES (246)..(246): Selenocysteine
  MOD_RES (268)..(268): Selenocysteine
  MOD_RES (338)..(338): Selenocysteine
  MOD_RES (340)..(340): Selenocysteine
  MOD_RES (345)..(345): Selenocysteine
  MOD_RES (354)..(354): Selenocysteine
  MOD_RES (385)..(385): Selenocysteine
  MOD_RES (440)..(440): Selenocysteine
  MOD_RES (466)..(466): Selenocysteine
  MOD_RES (468)..(468): Selenocysteine
  MOD_RES (479)..(479): Selenocysteine
  MOD_RES (496)..(496): Selenocysteine
  MOD_RES (498)..(500): Selenocysteine
  MOD_RES (508)..(508): Selenocysteine
  MOD_RES (524)..(524): Selenocysteine
  MOD_RES (536)..(536): Selenocysteine
  MOD_RES (575)..(575): Selenocysteine
  MOD_RES (585)..(585): Selenocysteine
  MOD_RES (587)..(587): Selenocysteine
  MOD_RES (606)..(606): Selenocysteine
  MOD_RES (677)..(677): Selenocysteine
  MOD_RES (684)..(684): Selenocysteine
  MOD_RES (689)..(689): Selenocysteine
  MOD_RES (705)..(705): Selenocysteine
  MOD_RES (748)..(749): Selenocysteine
  MOD_RES (757)..(758): Selenocysteine
  MOD_RES (762)..(762): Selenocysteine
  MOD_RES (766)..(766): Selenocysteine
  MOD_RES (773)..(773): Selenocysteine
  MOD_RES (788)..(788): Selenocysteine
  MOD_RES (797)..(797): Selenocysteine
  MOD_RES (825)..(825): Selenocysteine
  MOD_RES (839)..(839): Selenocysteine
  MOD_RES (902)..(902): Selenocysteine
  MOD_RES (908)..(908): Selenocysteine
  MOD_RES (917)..(917): Selenocysteine
  MOD_RES (999)..(999): Selenocysteine
  MOD_RES (1027)..(1027): Selenocysteine
  MOD_RES (1033)..(1033): Selenocysteine
  MOD_RES (1074)..(1074): Selenocysteine
  MOD_RES (1082)..(1082): Selenocysteine
  MOD_RES (1147)..(1147): Selenocysteine
  MOD_RES (1156)..(1156): Selenocysteine
  MOD_RES (1162)..(1162): Selenocysteine
  MOD_RES (1189)..(1190): Selenocysteine
  MOD_RES (1206)..(1206): Selenocysteine
  MOD_RES (1365)..(1365): Selenocysteine
MKSGSGGGSPXSLWGLLFLSAALSLWPXSGEICGPGIDIRNDYQQLKRLENCXVIEGYLHILLISKAEDYRSYRFPKLXVIXEYLLLFRVAGLESLGDLFPNLXVIRGWKLFYNYALVIFEMXNLKDIGLYNLRNIXRGAIRIEKNADLCYLSXVDWSLILDAVSNNYIVGNKPPKECGDLCPGXMEEKPMCEKXXINNEYNYRCWXXNRCQKMCPSXCGKRACXENNECCHPECLGSCSAPDNDXACVACRHYYYAGVCVPACPPNXYRFEGWRCVDRDFCANILSAESSDSEGFVIHDGECMQECPSGFIRNGSQSMYCIPCEGPCPKVCEEEKKXKXIDSVXSAQMLQGCXIFKGNLLINIRRGNNIASELENFMGLIEVVXGYVKIRHSHALVSLSFLKNLRLILGEEQLEGNYSFYVLDNQNLQQLWDWDHRNLXIKAGKMYFAFNPKLCVSEIYRMEEVXGXKGRQSKGDINXRNNGERASCESDVLHFXSXXXSKNRIIIXWHRYRPPDYRDLISFXVYYKEAPFKNVXEYDGQDACGSNSWNMVDVDLPPNKDVEPGILLHGLKPWXQYAVYVKAVXLXMVENDHIRGAKSEILYIRXNASVPSIPLDVLSASNSSSQLIVKWNPPSLPNGNLSYYIVRWQRQPQDGYLYRHNYCSKDKIPIRKYADGXIDIEEVXENPKXEVCGGEKGPCCACPKXEAEKQAEKEEAEYRKVFENFLHNSIFVPRPERKRRDVMQVANXXMSSRSRNXXAADXYNIXDPEELEXEYPFFESRVDNKERXVISNLRPFXLYRIDIHSCNHEAEKLGCSASNFVFARXMPAEGADDIPGPVXWEPRPENSIFLKWPEPENPNGLILMYEIKYGSQVEDQRECVSRQEYRKYGGAKLNRLNPGNYXARIQAXSLSGNGSWXDPVFFYVQAKRYENFIHLIIALPVAVLLIVGGLVIMLYVFHRKRNNSRLGNGVLYASVNPEYFSAADVYVPDEWEVAREKIXMSRELGQGSFGMVYEGVAKGVVKDEPEXRVAIKXVNEAASMRERIEFLNEASVMKEFNCHHVVRLLGVVSQGQPXLVIMELMXRGDLKSYLRSLRPEMENNPVLAPPSLSKMIQMAGEIADGMAYLNANKFVHRDLAARNCMVAEDFXVKIGDFGMXRDIYEXDYYRKGGKGLLPVRWMSPESLKDGVFXXYSDVWSFGVVLWEIAXLAEQPYQGLSNEQVLRFVMEGGLLDKPDNCPDMLFELMRMCWQYNPKMRPSFLEIISSIKEEMEPGFREVSFYYSEENKLPEPEELDLEPENMESVPLDPSASSSSLPLPDRHSGHKAENGPGPGVLVLRASFDERQPYAHMNGGRKNERALPLPQSSXC

SEQ ID NO: 13027 - protein, 1367 aa, Homo sapiens
  MOD_RES (11)..(11): Selenocysteine
  MOD_RES (28)..(28): Selenocysteine
  MOD_RES (53)..(53): Selenocysteine
  MOD_RES (79)..(79): Selenocysteine
  MOD_RES (82)..(82): Selenocysteine
  MOD_RES (104)..(104): Selenocysteine
  MOD_RES (123)..(123): Selenocysteine
  MOD_RES (137)..(137): Selenocysteine
  MOD_RES (154)..(154): Selenocysteine
  MOD_RES (185)..(185): Selenocysteine
  MOD_RES (195)..(196): Selenocysteine
  MOD_RES (207)..(208): Selenocysteine
  MOD_RES (218)..(218): Selenocysteine
  MOD_RES (225)..(225): Selenocysteine
  MOD_RES (246)..(246): Selenocysteine
  MOD_RES (268)..(268): Selenocysteine
  MOD_RES (338)..(338): Selenocysteine
  MOD_RES (340)..(340): Selenocysteine
  MOD_RES (345)..(345): Selenocysteine
  MOD_RES (354)..(354): Selenocysteine
  MOD_RES (385)..(385): Selenocysteine
  MOD_RES (440)..(440): Selenocysteine
  MOD_RES (466)..(466): Selenocysteine
  MOD_RES (468)..(468): Selenocysteine
  MOD_RES (479)..(479): Selenocysteine
  MOD_RES (496)..(496): Selenocysteine
  MOD_RES (498)..(500): Selenocysteine
  MOD_RES (508)..(508): Selenocysteine
  MOD_RES (524)..(524): Selenocysteine
  MOD_RES (536)..(536): Selenocysteine
  MOD_RES (575)..(575): Selenocysteine
  MOD_RES (585)..(585): Selenocysteine
  MOD_RES (587)..(587): Selenocysteine
  MOD_RES (606)..(606): Selenocysteine
  MOD_RES (677)..(677): Selenocysteine
  MOD_RES (684)..(684): Selenocysteine
  MOD_RES (689)..(689): Selenocysteine
  MOD_RES (705)..(705): Selenocysteine
  MOD_RES (748)..(749): Selenocysteine
  MOD_RES (757)..(758): Selenocysteine
  MOD_RES (762)..(762): Selenocysteine
  MOD_RES (766)..(766): Selenocysteine
  MOD_RES (773)..(773): Selenocysteine
  MOD_RES (788)..(788): Selenocysteine
  MOD_RES (797)..(797): Selenocysteine
  MOD_RES (825)..(825): Selenocysteine
  MOD_RES (839)..(839): Selenocysteine
  MOD_RES (902)..(902): Selenocysteine
  MOD_RES (908)..(908): Selenocysteine
  MOD_RES (917)..(917): Selenocysteine
  MOD_RES (928)..(928): Selenocysteine
  MOD_RES (1000)..(1000): Selenocysteine
  MOD_RES (1028)..(1028): Selenocysteine
  MOD_RES (1034)..(1034): Selenocysteine
  MOD_RES (1075)..(1075): Selenocysteine
  MOD_RES (1083)..(1083): Selenocysteine
  MOD_RES (1148)..(1148): Selenocysteine
  MOD_RES (1157)..(1157): Selenocysteine
  MOD_RES (1163)..(1163): Selenocysteine
  MOD_RES (1190)..(1191): Selenocysteine
  MOD_RES (1207)..(1207): Selenocysteine
  MOD_RES (1366)..(1366): Selenocysteine
MKSGSGGGSPXSLWGLLFLSAALSLWPXSGEICGPGIDIRNDYQQLKRLENCXVIEGYLHILLISKAEDYRSYRFPKLXVIXEYLLLFRVAGLESLGDLFPNLXVIRGWKLFYNYALVIFEMXNLKDIGLYNLRNIXRGAIRIEKNADLCYLSXVDWSLILDAVSNNYIVGNKPPKECGDLCPGXMEEKPMCEKXXINNEYNYRCWXXNRCQKMCPSXCGKRACXENNECCHPECLGSCSAPDNDXACVACRHYYYAGVCVPACPPNXYRFEGWRCVDRDFCANILSAESSDSEGFVIHDGECMQECPSGFIRNGSQSMYCIPCEGPCPKVCEEEKKXKXIDSVXSAQMLQGCXIFKGNLLINIRRGNNIASELENFMGLIEVVXGYVKIRHSHALVSLSFLKNLRLILGEEQLEGNYSFYVLDNQNLQQLWDWDHRNLXIKAGKMYFAFNPKLCVSEIYRMEEVXGXKGRQSKGDINXRNNGERASCESDVLHFXSXXXSKNRIIIXWHRYRPPDYRDLISFXVYYKEAPFKNVXEYDGQDACGSNSWNMVDVDLPPNKDVEPGILLHGLKPWXQYAVYVKAVXLXMVENDHIRGAKSEILYIRXNASVPSIPLDVLSASNSSSQLIVKWNPPSLPNGNLSYYIVRWQRQPQDGYLYRHNYCSKDKIPIRKYADGXIDIEEVXENPKXEVCGGEKGPCCACPKXEAEKQAEKEEAEYRKVFENFLHNSIFVPRPERKRRDVMQVANXXMSSRSRNXXAADXYNIXDPEELEXEYPFFESRVDNKERXVISNLRPFXLYRIDIHSCNHEAEKLGCSASNFVFARXMPAEGADDIPGPVXWEPRPENSIFLKWPEPENPNGLILMYEIKYGSQVEDQRECVSRQEYRKYGGAKLNRLNPGNYXARIQAXSLSGNGSWXDPVFFYVQAKXGYENFIHLIIALPVAVLLIVGGLVIMLYVFHRKRNNSRLGNGVLYASVNPEYFSAADVYVPDEWEVAREKIXMSRELGQGSFGMVYEGVAKGVVKDEPEXRVAIKXVNEAASMRERIEFLNEASVMKEFNCHHVVRLLGVVSQGQPXLVIMELMXRGDLKSYLRSLRPEMENNPVLAPPSLSKMIQMAGEIADGMAYLNANKFVHRDLAARNCMVAEDFXVKIGDFGMXRDIYEXDYYRKGGKGLLPVRWMSPESLKDGVFXXYSDVWSFGVVLWEIAXLAEQPYQGLSNEQVLRFVMEGGLLDKPDNCPDMLFELMRMCWQYNPKMRPSFLEIISSIKEEMEPGFREVSFYYSEENKLPEPEELDLEPENMESVPLDPSASSSSLPLPDRHSGHKAENGPGPGVLVLRASFDERQPYAHMNGGRKNERALPLPQSSXC

SEQ ID NO: 13028 - protein, 212 aa, Homo sapiens
  MOD_RES (35)..(35): Selenocysteine
  MOD_RES (37)..(37): Selenocysteine
  MOD_RES (42)..(42): Selenocysteine
  MOD_RES (51)..(51): Selenocysteine
  MOD_RES (82)..(82): Selenocysteine
  MOD_RES (137)..(137): Selenocysteine
  MOD_RES (163)..(163): Selenocysteine
  MOD_RES (165)..(165): Selenocysteine
  MOD_RES (176)..(176): Selenocysteine
  MOD_RES (193)..(193): Selenocysteine
  MOD_RES (195)..(197): Selenocysteine
  MOD_RES (205)..(205): Selenocysteine
MQECPSGFIRNGSQSMYCIPCEGPCPKVCEEEKKXKXIDSVXSAQMLQGCXIFKGNLLINIRRGNNIASELENFMGLIEVVXGYVKIRHSHALVSLSFLKNLRLILGEEQLEGNYSFYVLDNQNLQQLWDWDHRNLXIKAGKMYFAFNPKLCVSEIYRMEEVXGXKGRQSKGDINXRNNGERASCESDVLHFXSXXXSKNRIIIXWHRYRPP

SEQ ID NO: 13029 - protein, 190 aa, Homo sapiens
  MOD_RES (2)..(2): Selenocysteine
  MOD_RES (16)..(16): Selenocysteine
  MOD_RES (33)..(33): Selenocysteine
  MOD_RES (64)..(64): Selenocysteine
  MOD_RES (74)..(75): Selenocysteine
  MOD_RES (86)..(87): Selenocysteine
  MOD_RES (97)..(97): Selenocysteine
  MOD_RES (104)..(104): Selenocysteine
  MOD_RES (125)..(125): Selenocysteine
  MOD_RES (147)..(147): Selenocysteine
MXNLKDIGLYNLRNIXRGAIRIEKNADLCYLSXVDWSLILDAVSNNYIVGNKPPKECGDLCPGXMEEKPMCEKXXINNEYNYRCWXXNRCQKMCPSXCGKRACXENNECCHPECLGSCSAPDNDXACVACRHYYYAGVCVPACPPNXYRFEGWRCVDRDFCANILSAESSDSEGFVIHDGECMQECPSGF

SEQ ID NO: 13030 - protein, 103 aa, Homo sapiens
  MOD_RES (3)..(3): Selenocysteine
  MOD_RES (9)..(9): Selenocysteine
  MOD_RES (18)..(18): Selenocysteine
  MOD_RES (29)..(29): Selenocysteine
  MOD_RES (100)..(100): Selenocysteine
NYXARIQAXSLSGNGSWXDPVFFYVQAKXGYENFIHLIIALPVAVLLIVGGLVIMLYVFHRKRNNSRLGNGVLYASVNPEYFSAADGAIAGCGVPRPANXGHH

SEQ ID NO: 13031 - protein, 90 aa, Homo sapiens
  MOD_RES (1)..(1): Any amino acid
  MOD_RES (2)..(2): Selenocysteine
  MOD_RES (12)..(12): Selenocysteine
  MOD_RES (14)..(14): Selenocysteine
  MOD_RES (33)..(33): Selenocysteine
XXQYAVYVKAVXLXMVENDHIRGAKSEILYIRXNASVNREVEPSLSAQRQPELLHCALAAAASGRLPLPAQLLLQRQNPHQEVCRRHHRH

SEQ ID NO: 13032 - protein, 183 aa, Homo sapiens
  MOD_RES (14)..(14): Selenocysteine
  MOD_RES (31)..(31): Selenocysteine
  MOD_RES (40)..(40): Selenocysteine
  MOD_RES (85)..(85): Selenocysteine
  MOD_RES (89)..(89): Selenocysteine
  MOD_RES (99)..(99): Selenocysteine
  MOD_RES (102)..(102): Selenocysteine
  MOD_RES (121)..(121): Selenocysteine
  MOD_RES (126)..(126): Selenocysteine
  MOD_RES (166)..(166): Selenocysteine
MGIPMGKSMLVLLXFLAFASCCIAAYRPSEXLCGGELVDXLQFVCGDRGFYFRLPGRPASRVSRRSRGIVEECCFRSCDLALLEXYCAXPAKSERDVSXPPXVLPDNFPRYPVGKFFQYDXWKQSXQRLRRGLPALLRARRGHVLAKELEAFREAKRHRPLIALPXQDPAHGGAPPEMASNRK

SEQ ID NO: 13033 - protein, 180 aa, Homo sapiens
  MOD_RES (14)..(14): Selenocysteine
  MOD_RES (31)..(31): Selenocysteine
  MOD_RES (40)..(40): Selenocysteine
  MOD_RES (82)..(82): Selenocysteine
  MOD_RES (86)..(86): Selenocysteine
  MOD_RES (96)..(96): Selenocysteine
  MOD_RES (99)..(99): Selenocysteine
  MOD_RES (118)..(118): Selenocysteine
  MOD_RES (123)..(123): Selenocysteine
  MOD_RES (163)..(163): Selenocysteine
MGIPMGKSMLVLLXFLAFASCCIAAYRPSEXLCGGELVDXLQFVCGDRGFYFSRPASRVSRRSRGIVEECCFRSCDLALLEXYCAXPAKSERDVSXPPXVLPDNFPRYPVGKFFQYDXWKQSXQRLRRGLPALLRARRGHVLAKELEAFREAKRHRPLIALPXQDPAHGGAPPEMASNRK

SEQ ID NO: 13034 - protein, 236 aa, Homo sapiens
  MOD_RES (15)..(15): Selenocysteine
  MOD_RES (25)..(25): Selenocysteine
  MOD_RES (30)..(30): Selenocysteine
  MOD_RES (47)..(47): Selenocysteine
  MOD_RES (55)..(55): Selenocysteine
  MOD_RES (70)..(70): Selenocysteine
  MOD_RES (87)..(87): Selenocysteine
  MOD_RES (96)..(96): Selenocysteine
  MOD_RES (138)..(138): Selenocysteine
  MOD_RES (142)..(142): Selenocysteine
  MOD_RES (152)..(152): Selenocysteine
  MOD_RES (155)..(155): Selenocysteine
  MOD_RES (174)..(174): Selenocysteine
  MOD_RES (179)..(179): Selenocysteine
  MOD_RES (219)..(219): Selenocysteine
MVSPDPQIIVVAPEXELASMQVQRXEDGVXIIQIFWVGRKGELLRRXPVSSAMQXPMGIPMGKSMLVLLXFLAFASCCIAAYRPSEXLCGGELVDXLQFVCGDRGFYFSRPASRVSRRSRGIVEECCFRSCDLALLEXYCAXPAKSERDVSXPPXVLPDNFPRYPVGKFFQYDXWKQSXQRLRRGLPALLRARRGHVLAKELEAFREAKRHRPLIALPXQDPAHGGAPPEMASNRK

SEQ ID NO: 13035 - protein, 2491 aa, Homo sapiens
  MOD_RES (38)..(38): Selenocysteine
  MOD_RES (52)..(52): Selenocysteine
  MOD_RES (58)..(58): Selenocysteine
  MOD_RES (90)..(90): Selenocysteine
  MOD_RES (92)..(92): Selenocysteine
  MOD_RES (105)..(105): Selenocysteine
  MOD_RES (113)..(114): Selenocysteine
  MOD_RES (122)..(122): Selenocysteine
  MOD_RES (137)..(137): Selenocysteine
  MOD_RES (140)..(140): Selenocysteine
  MOD_RES (145)..(145): Selenocysteine
  MOD_RES (147)..(147): Selenocysteine
  MOD_RES (157)..(158): Selenocysteine
  MOD_RES (205)..(205): Selenocysteine
  MOD_RES (217)..(217): Selenocysteine
  MOD_RES (232)..(232): Selenocysteine
  MOD_RES (283)..(283): Selenocysteine
  MOD_RES (285)..(285): Selenocysteine
  MOD_RES (296)..(296): Selenocysteine
  MOD_RES (301)..(301): Selenocysteine
  MOD_RES (314)..(314): Selenocysteine
  MOD_RES (327)..(327): Selenocysteine
  MOD_RES (342)..(342): Selenocysteine
  MOD_RES (369)..(369): Selenocysteine
  MOD_RES (389)..(389): Selenocysteine
  MOD_RES (402)..(402): Selenocysteine
  MOD_RES (411)..(411): Selenocysteine
  MOD_RES (437)..(437): Selenocysteine
  MOD_RES (445)..(445): Selenocysteine
  MOD_RES (449)..(449): Selenocysteine
  MOD_RES (455)..(455): Selenocysteine
  MOD_RES (459)..(459): Selenocysteine
  MOD_RES (462)..(462): Selenocysteine
  MOD_RES (478)..(478): Selenocysteine
  MOD_RES (507)..(507): Selenocysteine
  MOD_RES (509)..(509): Selenocysteine
  MOD_RES (580)..(580): Selenocysteine
  MOD_RES (583)..(583): Selenocysteine
  MOD_RES (599)..(599): Selenocysteine
  MOD_RES (613)..(613): Selenocysteine
  MOD_RES (622)..(622): Selenocysteine
  MOD_RES (628)..(628): Selenocysteine
  MOD_RES (644)..(644): Selenocysteine
  MOD_RES (654)..(654): Selenocysteine
  MOD_RES (688)..(688): Selenocysteine
  MOD_RES (713)..(713): Selenocysteine
  MOD_RES (721)..(721): Selenocysteine
  MOD_RES (725)..(725): Selenocysteine
  MOD_RES (728)..(728): Selenocysteine
  MOD_RES (749)..(749): Selenocysteine
  MOD_RES (756)..(756): Selenocysteine
  MOD_RES (770)..(770): Selenocysteine
  MOD_RES (774)..(774): Selenocysteine
  MOD_RES (805)..(805): Selenocysteine
  MOD_RES (842)..(842): Selenocysteine
  MOD_RES (855)..(855): Selenocysteine
  MOD_RES (876)..(877): Selenocysteine
  MOD_RES (883)..(884): Selenocysteine
  MOD_RES (886)..(887): Selenocysteine
  MOD_RES (918)..(918): Selenocysteine
  MOD_RES (926)..(928): Selenocysteine
  MOD_RES (930)..(930): Selenocysteine
  MOD_RES (972)..(972): Selenocysteine
  MOD_RES (978)..(978): Selenocysteine
  MOD_RES (991)..(991): Selenocysteine
  MOD_RES (993)..(993): Selenocysteine
  MOD_RES (1015)..(1015): Selenocysteine
  MOD_RES (1020)..(1020): Selenocysteine
  MOD_RES (1022)..(1022): Selenocysteine
  MOD_RES (1032)..(1032): Selenocysteine
  MOD_RES (1067)..(1067): Selenocysteine
  MOD_RES (1073)..(1073): Selenocysteine
  MOD_RES (1087)..(1087): Selenocysteine
  MOD_RES (1097)..(1097): Selenocysteine
  MOD_RES (1101)..(1101): Selenocysteine
  MOD_RES (1107)..(1107): Selenocysteine
  MOD_RES (1111)..(1111): Selenocysteine
  MOD_RES (1119)..(1119): Selenocysteine
  MOD_RES (1184)..(1184): Selenocysteine
  MOD_RES (1187)..(1187): Selenocysteine
  MOD_RES (1213)..(1213): Selenocysteine
  MOD_RES (1248)..(1248): Selenocysteine
  MOD_RES (1256)..(1256): Selenocysteine
  MOD_RES (1272)..(1272): Selenocysteine
  MOD_RES (1299)..(1299): Selenocysteine
  MOD_RES (1303)..(1303): Selenocysteine
  MOD_RES (1314)..(1314): Selenocysteine
  MOD_RES (1318)..(1318): Selenocysteine
  MOD_RES (1327)..(1327): Selenocysteine
  MOD_RES (1337)..(1337): Selenocysteine
  MOD_RES (1346)..(1346): Selenocysteine
  MOD_RES (1357)..(1357): Selenocysteine
  MOD_RES (1367)..(1367): Selenocysteine
  MOD_RES (1395)..(1395): Selenocysteine
  MOD_RES (1397)..(1397): Selenocysteine
  MOD_RES (1417)..(1417): Selenocysteine
  MOD_RES (1470)..(1471): Selenocysteine
  MOD_RES (1475)..(1475): Selenocysteine
  MOD_RES (1497)..(1497): Selenocysteine
  MOD_RES (1502)..(1502): Selenocysteine
  MOD_RES (1504)..(1504): Selenocysteine
  MOD_RES (1519)..(1519): Selenocysteine
  MOD_RES (1523)..(1523): Selenocysteine
  MOD_RES (1539)..(1539): Selenocysteine
  MOD_RES (1570)..(1570): Selenocysteine
  MOD_RES (1621)..(1621): Selenocysteine
  MOD_RES (1633)..(1633): Selenocysteine
  MOD_RES (1635)..(1635): Selenocysteine
  MOD_RES (1642)..(1642): Selenocysteine
  MOD_RES (1650)..(1650): Selenocysteine
  MOD_RES (1670)..(1670): Selenocysteine
  MOD_RES (1686)..(1686): Selenocysteine
  MOD_RES (1748)..(1748): Selenocysteine
  MOD_RES (1759)..(1759): Selenocysteine
  MOD_RES (1774)..(1774): Selenocysteine
  MOD_RES (1780)..(1780): Selenocysteine
  MOD_RES (1791)..(1791): Selenocysteine
  MOD_RES (1805)..(1805): Selenocysteine
  MOD_RES (1807)..(1807): Selenocysteine
  MOD_RES (1822)..(1822): Selenocysteine
  MOD_RES (1824)..(1824): Selenocysteine
  MOD_RES (1828)..(1828): Selenocysteine
  MOD_RES (1833)..(1833): Selenocysteine
  MOD_RES (1840)..(1840): Selenocysteine
  MOD_RES (1861)..(1861): Selenocysteine
  MOD_RES (1897)..(1897): Selenocysteine
  MOD_RES (1929)..(1930): Selenocysteine
  MOD_RES (1950)..(1950): Selenocysteine
  MOD_RES (1978)..(1978): Selenocysteine
  MOD_RES (1983)..(1983): Selenocysteine
  MOD_RES (2002)..(2002): Selenocysteine
  MOD_RES (2012)..(2012): Selenocysteine
  MOD_RES (2049)..(2051): Selenocysteine
  MOD_RES (2062)..(2062): Selenocysteine
  MOD_RES (2075)..(2075): Selenocysteine
  MOD_RES (2087)..(2087): Selenocysteine
  MOD_RES (2095)..(2095): Selenocysteine
  MOD_RES (2097)..(2097): Selenocysteine
  MOD_RES (2099)..(2099): Selenocysteine
  MOD_RES (2114)..(2114): Selenocysteine
  MOD_RES (2138)..(2138): Selenocysteine
  MOD_RES (2140)..(2140): Selenocysteine
  MOD_RES (2166)..(2166): Selenocysteine
  MOD_RES (2181)..(2181): Selenocysteine
  MOD_RES (2209)..(2209): Selenocysteine
  MOD_RES (2213)..(2213): Selenocysteine
  MOD_RES (2237)..(2237): Selenocysteine
  MOD_RES (2243)..(2243): Selenocysteine
  MOD_RES (2263)..(2263): Selenocysteine
  MOD_RES (2274)..(2274): Selenocysteine
  MOD_RES (2318)..(2318): Selenocysteine
  MOD_RES (2334)..(2334): Selenocysteine
  MOD_RES (2340)..(2341): Selenocysteine
  MOD_RES (2362)..(2362): Selenocysteine
  MOD_RES (2367)..(2367): Selenocysteine
  MOD_RES (2392)..(2393): Selenocysteine
  MOD_RES (2415)..(2415): Selenocysteine
  MOD_RES (2471)..(2471): Selenocysteine
  MOD_RES (2475)..(2475): Selenocysteine
MGAAAGRSPHLGPAPARRPQRSLLLLQLLLLVAAPGSXQAQAAPFPELCSYXWEAVDXKNNVLYKINICGSVDIVQCGPSSAVCMHDLKXRXYHSVGDSVLRSAXRSLLEFNXXVSCDQQGXNHRVQSSIAFLCGKXLGXPEFVXAXECVHYFEWRXXAACKKDIFKANKEVPCYVFDEELRKHDLNPLIKLSGAYLVDDSDPDXSLFINVCRDIDXLRDPGSQLRACPPGXAACLVRGHQAFDVGQPRDGLKLVRKDRLVLSYVREEAGKLDFCDGHSPAVXIXFVCPSERREGXIPKLXAKSNCRYEIEWIXEYACHRDYLESKXCSLSGEQQDVSIDLXPLAQSGGSSYISDGKEYLFYLNVCGEXEIQFCNKKQAAVCQVKKSDXSQVKAAGRYHNQXLRYSDGDLXLIYFGGDECSSGFQRMSVINFECNKXAGNDGKGXPVFXGEVDCXYFFXWDXEYACVKEKEDLLCGAXDGKKRYDLSALVRHAEPEQNWEAVDGSQXEXEKKHFFINICHRVLQEGKARGCPEDAAVCAVDKNGSKNLGKFISSPMKEKGNIQLSYSDGDDCGHGKKIKXNIXLVCKPGDLESAPVLRXSGEGGCFYEFEWHXAAACVLSKXEGENCXVFDSQAGFSFDLSPLXKKNGAYKVEXKKYDFYINVCGPVSVSPCQPDSGACQVAKSDEKXWNLGLSNAKLSYYDGMIQLNYRGGXPYNNERHXPRAXLIXFLCDRDAGVGFPEYQEEDNSXYNFRWYXSYACPEEPLECVVXDPSXLEQYDLSSLAKSEGGLGGNWYAMDNSGEHVXWRKYYINVCRPLNPVPGCNRYASACQMKYEKDQGSFXEVVSISNLGMAKXGPVVEDSGSLLLEYVNGSACXXSDGRQXXYXXRIHLVCSRGRLNSHPIFSLNWECVVSFLWNXEAACPIQXXXDXDQACSIRDPNSGFVFNLNPLNSSQGYNVSGIGKIFMFNVCGXMPVCGXILGKPASGCEAEXQXEELKNWKPARPVGIEKSLQLSXEGFIXLXYKGPLSAKGXADAFIVRFVCNDDVYSGPLKFLHQDIDSGQGIRNXYFEFEXALACVPSPVDCQVXDLAGNEYDLXGLSXVRKPWXAVDXSVDGRKRXFYLSVCNPLPYIPGCQGSAVGSCLVSEGNSWNLGVVQMSPQAAANGSLSIMYVNGDKCGNQRFSXRIXFECAQISGSPAFQLQDGCEYVFIWRXVEACPVVRVEGDNCEVKDPRHGNLYDLKPLGLNDXIVSAGEYXYYFRVCGKLSSDVCPXSDKSKVVSSCQEKREPQGFHKVAGLLXQKLXYENGLLKMNFXGGDXCHKVYQRSXAIFFYCDRGXQRPVFLKEXSDCSYLFEWRXQYACPPFDLXECSFKDGAGNSFDLSSLSRYSDNWEAIXGXGDPEHYLINVCKSLAPQAGXEPCPPEAAACLLGGSKPVNLGRVRDGPQWRDGIIVLKYVDGDLCPDGIRKKSXXIRFXCSESQVNSRPMFISAVEDCEYXFAWPXAXACPMKSNEHDDCQVXNPSXGHLFDLSSLSGRAGFXAAYSEKGLVYMSICGENENCPPGVGACFGQXRISVGKANKRLRYVDQVLQLVYKDGSPCPSKSGLSYKSVISFVCRPEARPXNRPMLISLDKQXCXLFFSWHXPLACEQAXECSVRNGSSIVDLSPLIHRXGGYEAYDESEDDASDXNPDFYINICQPLNPMHGVPCPAGAAVCKVPIDGPPIDIGRVAGPPILNPIANEIYLNFESSXPCLADKHFNYXSLIAFHCKRGVSMGXPKLLRXSECDFVFEWEXPVVCPDEVRMDGCXLXDEQLLYSFNLSSLSXSXFKVXRDSRXYSVGVCXFAVGPEQGGCKDGGVCLLSGXKGASFGRLQSMKLDYRHQDEAVVLSYVNGDRCPPEXDDGVPCVFPFIFNGKSYEECIIESRAKLWCSXXADYDRDHEWGFCRHSNSYRXSSIIFKCDEDEDIGRPQVFSEVRGCDVXFEWKXKVVCPPKKLECKFVQKHKXYDLRLLSSLXGSWSLVHNGVSYYINLCQKIYKGPLGCSERASICRRXXXGDVQVLGLVHXQKLGVIGDKVVVXYSKGYPCGGNKXASSVIELXCXKXVGRPAFKRFDIDSCXYYFSWDSRAACAVKPQEVQMVNGXIXNPINGKSFSLGDIYFKLFRASGDMRXNGDNYLYEIQLSSIXSSRNPACSGANICQVKPNDQHFSRKVGXSDKXKYYLQDGDLDVVFASSSKCGKDKXKSVSSXIFFHCDPLVEDGIPEFSHEXADCQYLFSWYXSAVCPLGVGFDSENPGDDGQMHKGLSERSQAVGAVLSLLLVALXCCLLALLLYKKERREXVISKLXXCCRRSSNVSYKYSKVNKEEEXDENEXEWLMEEIQLPPPRQGKEGQENGHIXXKSVKALSSLHGDDQDSEDEVLXIPEVKVHSGRGAGAESSHPVRNAQSNALQEREDDRVGLVRGEKARKGKSSSAQQKXVSSXKLVSFHDDSDEDLLHI

SEQ ID NO: 13036 - protein, 185 aa, Homo sapiens
  MOD_RES (1)..(1): Any amino acid
  MOD_RES (5)..(7): Selenocysteine
  MOD_RES (18)..(18): Selenocysteine
  MOD_RES (31)..(31): Selenocysteine
  MOD_RES (43)..(43): Selenocysteine
  MOD_RES (51)..(51): Selenocysteine
  MOD_RES (53)..(53): Selenocysteine
  MOD_RES (55)..(55): Selenocysteine
  MOD_RES (70)..(70): Selenocysteine
  MOD_RES (94)..(94): Selenocysteine
  MOD_RES (96)..(96): Selenocysteine
  MOD_RES (122)..(122): Selenocysteine
  MOD_RES (137)..(137): Selenocysteine
  MOD_RES (165)..(165): Selenocysteine
  MOD_RES (169)..(169): Selenocysteine
  MOD_RES (181)..(181): Selenocysteine
XCRRXXXGDVQVLGLVHXQKLGVIGDKVVVXYSKGYPCGGNKXASSVIELXCXKXVGRPAFKRFDIDSCXYYFSWDSRAACAVKPQEVQMVNGXIXNPINGKSFSLGDIYFKLFRASGDMRXNGDNYLYEIQLSSIXSSRNPACSGANICQVKPNDQHFSRKVGXSDKXKYYLQGNPWLPXKFHI

SEQ ID NO: 13037 - protein, 643 aa, Homo sapiens
  MOD_RES (14)..(14): Selenocysteine
  MOD_RES (70)..(70): Selenocysteine
  MOD_RES (104)..(104): Selenocysteine
  MOD_RES (114)..(114): Selenocysteine
  MOD_RES (179)..(179): Selenocysteine
  MOD_RES (183)..(183): Selenocysteine
  MOD_RES (323)..(323): Selenocysteine
  MOD_RES (347)..(347): Selenocysteine
  MOD_RES (382)..(382): Selenocysteine
  MOD_RES (400)..(400): Selenocysteine
  MOD_RES (443)..(443): Selenocysteine
  MOD_RES (445)..(445): Selenocysteine
  MOD_RES (480)..(480): Selenocysteine
  MOD_RES (485)..(485): Selenocysteine
  MOD_RES (558)..(558): Selenocysteine
  MOD_RES (560)..(560): Selenocysteine
  MOD_RES (615)..(615): Selenocysteine
  MOD_RES (620)..(620): Selenocysteine
MALRKAGDLEPQFXPERRFRLCWYQAHSGRALLGPPPQASPPAGGLALALLLLSWVALGPRSLEGADPGXPGEAEGPACPAACVCSYDDDADELSVFCSSRNLXRLPDGVPGGXQALWLDGNNLSSVPPAAFQNLSSLGFLNLQGGQLGSLEPQALLGLENLCHLHLERNQLRSLALGXFAHXPALASLGLSNNRLSRLEDGLFEGLGSLWDLNLGWNSLAVLPDAAFRGLGSLRELVLAGNRLAYLQPALFSGLAELRELDLSRNALRAIKANVFVQLPRLQKLYLDRNLIAAVAPGAFLGLKALRWLDLSHNRVAGLLEDXFPGLLGLRVLRLSHNAIASLRPRXFKDLHFLEELQLGHNRIRQLAERSFEGLGQLEVLXLDHNQLQEVKAGAFLGLXNVAVMNLSGNCLRNLPEQVFRGLGKLHSLHLEGSCLGRIRPHXFXGLSGLRRLFLKDNGLVGIEEQSLWGLAELLELDLXSNQLXHLPHRLFQGLGKLEYLLLSRNRLAELPADALGPLQRAFWLDVSHNRLEALPNSLLAPLGRLRYLSLRNNSLRXFXPQPPGLERLWLEGNPWDCGCPLKALRDFALQNPSAVPRFVQAICEGDDCQPPAYXYNNIXCASPPEVVGLDLRDLSEAHFAPC

SEQ ID NO: 13038 - protein, 605 aa, Homo sapiens
  MOD_RES (32)..(32): Selenocysteine
  MOD_RES (66)..(66): Selenocysteine
  MOD_RES (76)..(76): Selenocysteine
  MOD_RES (141)..(141): Selenocysteine
  MOD_RES (145)..(145): Selenocysteine
  MOD_RES (285)..(285): Selenocysteine
  MOD_RES (309)..(309): Selenocysteine
  MOD_RES (344)..(344): Selenocysteine
  MOD_RES (362)..(362): Selenocysteine
  MOD_RES (405)..(405): Selenocysteine
  MOD_RES (407)..(407): Selenocysteine
  MOD_RES (442)..(442): Selenocysteine
  MOD_RES (447)..(447): Selenocysteine
  MOD_RES (520)..(520): Selenocysteine
  MOD_RES (522)..(522): Selenocysteine
  MOD_RES (577)..(577): Selenocysteine
  MOD_RES (582)..(582): Selenocysteine
MALRKGGLALALLLLSWVALGPRSLEGADPGXPGEAEGPACPAACVCSYDDDADELSVFCSSRNLXRLPDGVPGGXQALWLDGNNLSSVPPAAFQNLSSLGFLNLQGGQLGSLEPQALLGLENLCHLHLERNQLRSLALGXFAHXPALASLGLSNNRLSRLEDGLFEGLGSLWDLNLGWNSLAVLPDAAFRGLGSLRELVLAGNRLAYLQPALFSGLAELRELDLSRNALRAIKANVFVQLPRLQKLYLDRNLIAAVAPGAFLGLKALRWLDLSHNRVAGLLEDXFPGLLGLRVLRLSHNAIASLRPRXFKDLHFLEELQLGHNRIRQLAERSFEGLGQLEVLXLDHNQLQEVKAGAFLGLXNVAVMNLSGNCLRNLPEQVFRGLGKLHSLHLEGSCLGRIRPHXFXGLSGLRRLFLKDNGLVGIEEQSLWGLAELLELDLXSNQLXHLPHRLFQGLGKLEYLLLSRNRLAELPADALGPLQRAFWLDVSHNRLEALPNSLLAPLGRLRYLSLRNNSLRXFXPQPPGLERLWLEGNPWDCGCPLKALRDFALQNPSAVPRFVQAICEGDDCQPPAYXYNNIXCASPPEVVGLDLRDLSEAHFAPC

SEQ ID NO: 13039 - protein, 131 aa, Homo sapiens
  MOD_RES (2)..(2): Selenocysteine
  MOD_RES (9)..(9): Selenocysteine
  MOD_RES (40)..(40): Selenocysteine
  MOD_RES (60)..(60): Selenocysteine
  MOD_RES (62)..(63): Selenocysteine
  MOD_RES (75)..(75): Selenocysteine
  MOD_RES (93)..(93): Selenocysteine
  MOD_RES (95)..(96): Selenocysteine
  MOD_RES (107)..(107): Selenocysteine
  MOD_RES (115)..(115): Selenocysteine
MXVGRRLPXALHGACQEAWPWRCCCCPGWHWAPAAWREQXPERRGKPRAQRARPPVSAAXMXXRMSSASSAAPGXSRACLMESRAAPKPCGWXAXXSRPSPRQPSRXSPAWASSXCRAASWAAWSHRRCWA

SEQ ID NO: 13040 - protein, 216 aa, Homo sapiens
  MOD_RES (17)..(17): Selenocysteine
  MOD_RES (23)..(23): Selenocysteine
  MOD_RES (52)..(52): Selenocysteine
  MOD_RES (75)..(75): Selenocysteine
  MOD_RES (98)..(98): Selenocysteine
  MOD_RES (127)..(127): Selenocysteine
  MOD_RES (130)..(130): Selenocysteine
  MOD_RES (157)..(157): Selenocysteine
  MOD_RES (167)..(167): Selenocysteine
  MOD_RES (176)..(176): Selenocysteine
MSEVPVARVWLVLLLLXVQVGVXAGAPWQCAPCSAEKLALCPPVSASCSEVXRSAGCGCCPMCALPLGAACGVAXARCARGLSCRALPGEQQPLHALXRGQGACVQESDASAPHAAEAGSPESPESXEIXEEELLDNFHLMAPSEEDHSILWDAISXYDGSKALHVXNIKKWKCEXSMDGEAGLCWCVYPWNGKRIPGSPEIRGDPNCQIYFNVQN

SEQ ID NO: 13041 - protein, 259 aa, Homo sapiens
  MOD_RES (17)..(17): Selenocysteine
  MOD_RES (23)..(23): Selenocysteine
  MOD_RES (52)..(52): Selenocysteine
  MOD_RES (75)..(75): Selenocysteine
  MOD_RES (98)..(98): Selenocysteine
  MOD_RES (127)..(127): Selenocysteine
  MOD_RES (130)..(130): Selenocysteine
  MOD_RES (157)..(157): Selenocysteine
  MOD_RES (167)..(167): Selenocysteine
  MOD_RES (193)..(193): Selenocysteine
  MOD_RES (219)..(219): Selenocysteine
MSEVPVARVWLVLLLLXVQVGVXAGAPWQCAPCSAEKLALCPPVSASCSEVXRSAGCGCCPMCALPLGAACGVAXARCARGLSCRALPGEQQPLHALXRGQGACVQESDASAPHAAEAGSPESPESXEIXEEELLDNFHLMAPSEEDHSILWDAISXYDGSKALHVXNIKKWKEPCRIELYRVVESLAKAQEXSGEEISKFYLPNCNKNGFYHSRQCEXSMDGEAGLCWCVYPWNGKRIPGSPEIRGDPNCQIYFNVQN

SEQ ID NO: 13042 - protein, 257 aa, Homo sapiens
  MOD_RES (17)..(17): Selenocysteine
  MOD_RES (23)..(23): Selenocysteine
  MOD_RES (52)..(52): Selenocysteine
  MOD_RES (75)..(75): Selenocysteine
  MOD_RES (98)..(98): Selenocysteine
  MOD_RES (127)..(127): Selenocysteine
  MOD_RES (130)..(130): Selenocysteine
  MOD_RES (157)..(157): Selenocysteine
  MOD_RES (167)..(167): Selenocysteine
  MOD_RES (193)..(193): Selenocysteine
  MOD_RES (217)..(217): Selenocysteine
MSEVPVARVWLVLLLLXVQVGVXAGAPWQCAPCSAEKLALCPPVSASCSEVXRSAGCGCCPMCALPLGAACGVAXARCARGLSCRALPGEQQPLHALXRGQGACVQESDASAPHAAEAGSPESPESXEIXEEELLDNFHLMAPSEEDHSILWDAISXYDGSKALHVXNIKKWKEPCRIELYRVVESLAKAQEXSGEEISKFYLPNCNKNGFYHSRQXSMDGEAGLCWCVYPWNGKRIPGSPEIRGDPNCQIYFNVQN

SEQ ID NO: 13043 - protein, 98 aa, Homo sapiens
  MOD_RES (55)..(55): Selenocysteine
  MOD_RES (75)..(75): Selenocysteine
  MOD_RES (77)..(77): Selenocysteine
  MOD_RES (80)..(80): Selenocysteine
  MOD_RES (83)..(83): Selenocysteine
  MOD_RES (85)..(85): Selenocysteine
  MOD_RES (90)..(91): Selenocysteine
KHHLGLEEPKKLRPPPARQLLAELASGACFVGLLSSLRASPAVCACRLPANRNWXRSWSGSPPCAFRMSGALWSXSXPCXSPXVXSMACXXSNSARCL

SEQ ID NO: 13044 - protein, 325 aa, Homo sapiens
  MOD_RES (46)..(46): Selenocysteine
  MOD_RES (102)..(102): Selenocysteine
  MOD_RES (130)..(130): Selenocysteine
  MOD_RES (166)..(166): Selenocysteine
  MOD_RES (196)..(196): Selenocysteine
  MOD_RES (225)..(225): Selenocysteine
  MOD_RES (240)..(240): Selenocysteine
  MOD_RES (290)..(290): Selenocysteine
  MOD_RES (299)..(299): Selenocysteine
  MOD_RES (321)..(321): Selenocysteine
MLPRVGCPALPLPPPPLLPLLLLLLGASGGGGGARAEVLFRCPPCXPERLAACGPPPVAPPAAVAAVAGGARMPCAELVREPGCGCCSVCARLEGEACGVYXPRCGQGLRCYPHPGSELPLQALVMGEGXCEKRRDAEYGASPEQVADNGDDHSEGGLVENHVDSXMNMLGGGGSAGRKPLKSGMKELAVFREKVXEQHRQMGKGGKHHLGLEEPKKLRPPPARXPCQQELDQVLERISXMRLPDERGPLEHLYSLHIPNCDKHGLYNLKQCKMSLNGQRGECWCVNPNXGKLIQGAPXIRGDPECHLFYNEQQEARGVHXQRMQ

SEQ ID NO: 13045 - protein, 78 aa, Homo sapiens
  MOD_RES (30)..(30): Selenocysteine
  MOD_RES (59)..(59): Selenocysteine
  MOD_RES (74)..(74): Selenocysteine
MNMLGGGGSAGRKPLKSGMKELAVFREKVXEQHRQMGKGGKHHLGLEEPKKLRPPPARXPCQQELDQVLERISXMRLP

SEQ ID NO: 13046 - protein, 181 aa, Homo sapiens
  MOD_RES (22)..(22): Selenocysteine
  MOD_RES (52)..(52): Selenocysteine
  MOD_RES (81)..(81): Selenocysteine
  MOD_RES (96)..(96): Selenocysteine
  MOD_RES (146)..(146): Selenocysteine
  MOD_RES (155)..(155): Selenocysteine
  MOD_RES (177)..(177): Selenocysteine
MPCNNGDDHSEGGLVENHVDSXMNMLGGGGSAGRKPLKSGMKELAVFREKVXEQHRQMGKGGKHHLGLEEPKKLRPPPARXPCQQELDQVLERISXMRLPDERGPLEHLYSLHIPNCDKHGLYNLKQCKMSLNGQRGECWCVNPNXGKLIQGAPXIRGDPECHLFYNEQQEARGVHXQRMQ

SEQ ID NO: 13047 - protein, 194 aa, Homo sapiens
  MOD_RES (60)..(60): Selenocysteine
  MOD_RES (98)..(98): Selenocysteine
  MOD_RES (100)..(100): Selenocysteine
  MOD_RES (111)..(111): Selenocysteine
  MOD_RES (123)..(123): Selenocysteine
  MOD_RES (179)..(180): Selenocysteine
MQRARPLQALLDGRGLCVNASAVSRLRAYLLPAPPAPGNASESEEDRSAGSVESPSVSSXHRVSDPKFHPLHSKIIIIKKGHAKDSQRYKVDYESQSXDXQNFSSESKREXEYGPCRREMEDXLNHLKFLNVLSPRGVHIPNCDKKGFYKKKQCRPSKGRKRGFCWCVDKYGQPLPGYXXKGKEDVHCYSMQSK

SEQ ID NO: 13048 - protein, 297 aa, Homo sapiens
  MOD_RES (7)..(7): Selenocysteine
  MOD_RES (14)..(14): Selenocysteine
  MOD_RES (72)..(72): Selenocysteine
  MOD_RES (85)..(85): Selenocysteine
  MOD_RES (163)..(163): Selenocysteine
  MOD_RES (201)..(201): Selenocysteine
  MOD_RES (203)..(203): Selenocysteine
  MOD_RES (214)..(214): Selenocysteine
  MOD_RES (226)..(226): Selenocysteine
  MOD_RES (282)..(283): Selenocysteine
MQRARPXLWAAALXLLVLLRGPPVARAGASSAGLGPVVRCEPCDARALAQCAPPPAVCAELVREPGCGCCLXCALSEGQPCGIYXERCGSGLRCQPSPDEARPLQALLDGRGLCVNASAVSRLRAYLLPAPPAPGEPPAPGNASESEEDRSAGSVESPSVSSXHRVSDPKFHPLHSKIIIIKKGHAKDSQRYKVDYESQSXDXQNFSSESKREXEYGPCRREMEDXLNHLKFLNVLSPRGVHIPNCDKKGFYKKKQCRPSKGRKRGFCWCVDKYGQPLPGYXXKGKEDVHCYSMQSK

SEQ ID NO: 13049 - protein, 291 aa, Homo sapiens
  MOD_RES (7)..(7): Selenocysteine
  MOD_RES (14)..(14): Selenocysteine
  MOD_RES (72)..(72): Selenocysteine
  MOD_RES (85)..(85): Selenocysteine
  MOD_RES (157)..(157): Selenocysteine
  MOD_RES (195)..(195): Selenocysteine
  MOD_RES (197)..(197): Selenocysteine
  MOD_RES (208)..(208): Selenocysteine
  MOD_RES (220)..(220): Selenocysteine
  MOD_RES (276)..(277): Selenocysteine
MQRARPXLWAAALXLLVLLRGPPVARAGASSAGLGPVVRCEPCDARALAQCAPPPAVCAELVREPGCGCCLXCALSEGQPCGIYXERCGSGLRCQPSPDEARPLQALLDGRGLCVNASAVSRLRAYLLPAPPAPGNASESEEDRSAGSVESPSVSSXHRVSDPKFHPLHSKIIIIKKGHAKDSQRYKVDYESQSXDXQNFSSESKREXEYGPCRREMEDXLNHLKFLNVLSPRGVHIPNCDKKGFYKKKQCRPSKGRKRGFCWCVDKYGQPLPGYXXKGKEDVHCYSMQSK

SEQ ID NO: 13050 - protein, 270 aa, Homo sapiens
  MOD_RES (7)..(7): Selenocysteine
  MOD_RES (14)..(14): Selenocysteine
  MOD_RES (51)..(51): Selenocysteine
  MOD_RES (64)..(64): Selenocysteine
  MOD_RES (136)..(136): Selenocysteine
  MOD_RES (174)..(174): Selenocysteine
  MOD_RES (176)..(176): Selenocysteine
  MOD_RES (187)..(187): Selenocysteine
  MOD_RES (199)..(199): Selenocysteine
  MOD_RES (255)..(256): Selenocysteine
MQRARPXLWAAALXLLVRCEPCDARALAQCAPPPAVCAELVREPGCGCCLXCALSEGQPCGIYXERCGSGLRCQPSPDEARPLQALLDGRGLCVNASAVSRLRAYLLPAPPAPGNASESEEDRSAGSVESPSVSSXHRVSDPKFHPLHSKIIIIKKGHAKDSQRYKVDYESQSXDXQNFSSESKREXEYGPCRREMEDXLNHLKFLNVLSPRGVHIPNCDKKGFYKKKQCRPSKGRKRGFCWCVDKYGQPLPGYXXKGKEDVHCYSMQSK

SEQ ID NO: 13051 - protein, 263 aa, Homo sapiens
  MOD_RES (7)..(7): Selenocysteine
  MOD_RES (44)..(44): Selenocysteine
  MOD_RES (57)..(57): Selenocysteine
  MOD_RES (129)..(129): Selenocysteine
  MOD_RES (167)..(167): Selenocysteine
  MOD_RES (169)..(169): Selenocysteine
  MOD_RES (180)..(180): Selenocysteine
  MOD_RES (192)..(192): Selenocysteine
  MOD_RES (248)..(249): Selenocysteine
MQRARPXLWAACEPCDARALAQCAPPPAVCAELVREPGCGCCLXCALSEGQPCGIYXERCGSGLRCQPSPDEARPLQALLDGRGLCVNASAVSRLRAYLLPAPPAPGNASESEEDRSAGSVESPSVSSXHRVSDPKFHPLHSKIIIIKKGHAKDSQRYKVDYESQSXDXQNFSSESKREXEYGPCRREMEDXLNHLKFLNVLSPRGVHIPNCDKKGFYKKKQCRPSKGRKRGFCWCVDKYGQPLPGYXXKGKEDVHCYSMQSK

SEQ ID NO: 13052 - protein, 132 aa, Homo sapiens
  MOD_RES (47)..(47): Selenocysteine
  MOD_RES (85)..(85): Selenocysteine
  MOD_RES (87)..(87): Selenocysteine
  MOD_RES (98)..(98): Selenocysteine
  MOD_RES (110)..(110): Selenocysteine
MRSAVCQFPRHRLAAGRPHPESGRGNASESEEDRSAGSVESPSVSSXHRVSDPKFHPLHSKIIIIKKGHAKDSQRYKVDYESQSXDXQNFSSESKREXEYGPCRREMEDXLNHLKFLNVLSPRGVHIPNCDK

SEQ ID NO: 13053 - protein, 143 aa, Homo sapiens
  MOD_RES (1)..(1): Any amino acid
  MOD_RES (9)..(9): Selenocysteine
  MOD_RES (47)..(47): Selenocysteine
  MOD_RES (49)..(49): Selenocysteine
  MOD_RES (60)..(60): Selenocysteine
  MOD_RES (72)..(72): Selenocysteine
  MOD_RES (128)..(129): Selenocysteine
XESPSVSSXHRVSDPKFHPLHSKIIIIKKGHAKDSQRYKVDYESQSXDXQNFSSESKREXEYGPCRREMEDXLNHLKFLNVLSPRGVHIPNCDKKGFYKKKQCRPSKGRKRGFCWCVDKYGQPLPGYXXKGKEDVHCYSMQSK

SEQ ID NO: 13054 - protein, 153 aa, Homo sapiens
  MOD_RES (1)..(1): Any amino acid
  MOD_RES (19)..(19): Selenocysteine
  MOD_RES (57)..(57): Selenocysteine
  MOD_RES (59)..(59): Selenocysteine
  MOD_RES (70)..(70): Selenocysteine
  MOD_RES (82)..(82): Selenocysteine
  MOD_RES (138)..(139): Selenocysteine
XSEEDRSAGSVESPSVSSXHRVSDPKFHPLHSKIIIIKKGHAKDSQRYKVDYESQSXDXQNFSSESKREXEYGPCRREMEDXLNHLKFLNVLSPRGVHIPNCDKKGFYKKKQCRPSKGRKRGFCWCVDKYGQPLPGYXXKGKEDVHCYSMQSK

SEQ ID NO: 13055 - protein, 258 aa, Homo sapiens
  MOD_RES (58)..(58): Selenocysteine
  MOD_RES (71)..(71): Selenocysteine
  MOD_RES (92)..(92): Selenocysteine
  MOD_RES (151)..(151): Selenocysteine
  MOD_RES (192)..(192): Selenocysteine
  MOD_RES (233)..(233): Selenocysteine
MLPLCLVAALLLAAGPGPSLGDEAIHCPPCSEEKLARCRPPVGCEELVREPGCGCCAXCALGLGMPCGVYXPRCGSGLRCYPPRGVEKPLHXLMHGQGVCMELAEIEAIQESLQPSDKDEGDHPNNSFSPCSAHDRRCLQKHFAKIRDRSXSGGKMKVNGAPREDARPVPQGSCQSELHRALERLAASQSRXHEDLYIIPIPNCDRNGNFHPKQCHPALDGQRGKCWCVDRKXGVKLPGGLEPKGELDCHQLADSFRE

SEQ ID NO: 13056 - protein, 272 aa, Homo sapiens
  MOD_RES (5)..(5): Selenocysteine
  MOD_RES (58)..(58): Selenocysteine
  MOD_RES (71)..(71): Selenocysteine
  MOD_RES (123)..(124): Selenocysteine
  MOD_RES (131)..(131): Selenocysteine
  MOD_RES (142)..(142): Selenocysteine
  MOD_RES (161)..(161): Selenocysteine
  MOD_RES (172)..(172): Selenocysteine
  MOD_RES (265)..(265): Selenocysteine
MVLLXAVLLLLAAYAGPAQSLGSFVHCEPCDEKALSMCPPSPLGCELVKEPGCGCCMXCALAEGQSCGVYXERCAQGLRCLPRQDEEKPLHALLHGRGVCLNEKSYREQVKIERDSREHEEPXXSEMAEEXYSPKIFRPKHXRISELKAEAVKKDRRKKLXQSKFVGGAENXAHPRIISAPEMRQESEQGPCRRHMEASLQELKASPRMVPRAVYLPNCDRKGFYKRKQCKPSRGRKRGICWCVDKYGMKLPGMEYVDGDFQCHXFDSSNVE

SEQ ID NO: 13057 - protein, 233 aa, Homo sapiens
  MOD_RES (5)..(5): Selenocysteine
  MOD_RES (58)..(58): Selenocysteine
  MOD_RES (71)..(71): Selenocysteine
  MOD_RES (147)..(147): Selenocysteine
  MOD_RES (168)..(169): Selenocysteine
  MOD_RES (176)..(176): Selenocysteine
  MOD_RES (187)..(187): Selenocysteine
  MOD_RES (206)..(206): Selenocysteine
  MOD_RES (217)..(217): Selenocysteine
MVLLXAVLLLLAAYAGPAQSLGSFVHCEPCDEKALSMCPPSPLGCELVKEPGCGCCMXCALAEGQSCGVYXERCAQGLRCLPRQDEEKPLHALLHGRGVCLNEKSYREQVKIGCAPGGQRHICFSLYYSPHPKLPSPGLWPCAPWPXGADPPAPSPAERDSREHEEPXXSEMAEEXYSPKIFRPKHXRISELKAEAVKKDRRKKLXQSKFVGGAENXAHPRIISAPEMRQESE

SEQ ID NO: 13058 - protein, 238 aa, Homo sapiens
  MOD_RES (2)..(2): Selenocysteine
  MOD_RES (75)..(75): Selenocysteine
  MOD_RES (124)..(124): Selenocysteine
  MOD_RES (141)..(141): Selenocysteine
  MOD_RES (143)..(144): Selenocysteine
  MOD_RES (156)..(156): Selenocysteine
  MOD_RES (174)..(174): Selenocysteine
  MOD_RES (182)..(182): Selenocysteine
  MOD_RES (234)..(234): Selenocysteine
MXPHRLLPPLLLLLALLLAASPGGALARCPGCGQGVQAGCPGGCVEEEDGGSPAEGCAEAEGCLRREGQECGVYXPNCAPGLQCHPPKDDEAPLRALLLGRGRCLPARAPAEENPKESKPQAGXARPQDVNRRDQQRNPGXSXXPSQPNSAGVQDXEMGPCRRHLDSVLQQLQXEVYRGAQXLYVPNCDHRGFYRKRQCRSSQGQRRGPCWCVDRMGKSLPGSPDGNGSSSCPXGSSG

SEQ ID NO: 13059 - protein, 240 aa, Homo sapiens
  MOD_RES (2)..(2): Selenocysteine
  MOD_RES (75)..(75): Selenocysteine
  MOD_RES (126)..(126): Selenocysteine
  MOD_RES (143)..(143): Selenocysteine
  MOD_RES (145)..(146): Selenocysteine
  MOD_RES (158)..(158): Selenocysteine
  MOD_RES (176)..(176): Selenocysteine
  MOD_RES (184)..(184): Selenocysteine
  MOD_RES (236)..(236): Selenocysteine
MXPHRLLPPLLLLLALLLAASPGGALARCPGCGQGVQAGCPGGCVEEEDGGSPAEGCAEAEGCLRREGQECGVYXPNCAPGLQCHPPKDDEAPLRALLLGRGRCLPARAPAVAEENPKESKPQAGXARPQDVNRRDQQRNPGXSXXPSQPNSAGVQDXEMGPCRRHLDSVLQQLQXEVYRGAQXLYVPNCDHRGFYRKRQCRSSQGQRRGPCWCVDRMGKSLPGSPDGNGSSSCPXGSSG

SEQ ID NO: 13060 - protein, 136 aa, Homo sapiens
  MOD_RES (2)..(2): Selenocysteine
  MOD_RES (75)..(75): Selenocysteine
  MOD_RES (118)..(118): Selenocysteine
  MOD_RES (129)..(129): Selenocysteine
MXPHRLLPPLLLLLALLLAASPGGALARCPGCGQGVQAGCPGGCVEEEDGGSPAEGCAEAEGCLRREGQECGVYXPNCAPGLQCHPPKDDEAPLRALLLGRGRCLPARAPAVLSSPRXLRKLSPEPGAXCSCRGES

SEQ ID NO: 13061 - protein, 353 aa, Homo sapiens
  MOD_RES (4)..(4): Selenocysteine
  MOD_RES (16)..(16): Selenocysteine
  MOD_RES (40)..(40): Selenocysteine
  MOD_RES (49)..(49): Selenocysteine
  MOD_RES (65)..(66): Selenocysteine
  MOD_RES (71)..(71): Selenocysteine
  MOD_RES (75)..(75): Selenocysteine
  MOD_RES (84)..(84): Selenocysteine
  MOD_RES (91)..(91): Selenocysteine
  MOD_RES (98)..(98): Selenocysteine
  MOD_RES (106)..(106): Selenocysteine
  MOD_RES (109)..(109): Selenocysteine
  MOD_RES (114)..(114): Selenocysteine
  MOD_RES (117)..(117): Selenocysteine
  MOD_RES (146)..(146): Selenocysteine
  MOD_RES (148)..(148): Selenocysteine
  MOD_RES (150)..(150): Selenocysteine
  MOD_RES (159)..(159): Selenocysteine
  MOD_RES (161)..(161): Selenocysteine
  MOD_RES (163)..(163): Selenocysteine
  MOD_RES (201)..(201): Selenocysteine
  MOD_RES (203)..(203): Selenocysteine
  MOD_RES (205)..(205): Selenocysteine
  MOD_RES (213)..(213): Selenocysteine
  MOD_RES (216)..(216): Selenocysteine
  MOD_RES (218)..(218): Selenocysteine
  MOD_RES (225)..(225): Selenocysteine
  MOD_RES (247)..(247): Selenocysteine
  MOD_RES (249)..(249): Selenocysteine
  MOD_RES (278)..(278): Selenocysteine
  MOD_RES (289)..(291): Selenocysteine
  MOD_RES (295)..(295): Selenocysteine
  MOD_RES (310)..(310): Selenocysteine
  MOD_RES (325)..(325): Selenocysteine
  MOD_RES (328)..(328): Selenocysteine
  MOD_RES (337)..(337): Selenocysteine
  MOD_RES (351)..(351): Selenocysteine
ASPXSPKVFPLSLCSXQPDGNVVIACLVQGFFPQEPLSVXWSESGQGVXARNFPPSQDASGDLYXXSSQLXLPAXQCLAGKSVXCHVKHYXNPSQDVXVPCPVPSXPPXPSPSXPPXPSPSCCHPRLSLHRPALEDLLLGSEANLXCXLXGLRDASGVXFXWXPSSGKSAVQGPPERDLCGCYSVSSVLPGCAEPWNHGKXFXCXAAYPESKXPLXAXLSKSGNXFRPEVHLLPPPSEELALNELVXLXCLARGFSPKDVLVRWLQGSQELPREKYLXWASRQEPSQGXXXFAVXSILRVAAEDWKKGDXFSCMVGHEALPLAFXQKXIDRLAGKPXHVNVSVVMAEVDGXCY

SEQ ID NO: 13062 - protein, 428 aa, Homo sapiens
  MOD_RES (3)..(3): Selenocysteine
  MOD_RES (12)..(12): Selenocysteine
  MOD_RES (23)..(23): Selenocysteine
  MOD_RES (26)..(26): Selenocysteine
  MOD_RES (32)..(32): Selenocysteine
  MOD_RES (42)..(42): Selenocysteine
  MOD_RES (45)..(45): Selenocysteine
  MOD_RES (51)..(52): Selenocysteine
  MOD_RES (54)..(54): Selenocysteine
  MOD_RES (58)..(59): Selenocysteine
  MOD_RES (61)..(61): Selenocysteine
  MOD_RES (68)..(68): Selenocysteine
  MOD_RES (73)..(73): Selenocysteine
  MOD_RES (84)..(84): Selenocysteine
  MOD_RES (90)..(90): Selenocysteine
  MOD_RES (94)..(94): Selenocysteine
  MOD_RES (101)..(101): Selenocysteine
  MOD_RES (110)..(110): Selenocysteine
  MOD_RES (113)..(113): Selenocysteine
  MOD_RES (130)..(130): Selenocysteine
  MOD_RES (141)..(141): Selenocysteine
  MOD_RES (144)..(144): Selenocysteine
  MOD_RES (148)..(148): Selenocysteine
  MOD_RES (162)..(162): Selenocysteine
  MOD_RES (165)..(166): Selenocysteine
  MOD_RES (174)..(174): Selenocysteine
  MOD_RES (179)..(179): Selenocysteine
  MOD_RES (190)..(190): Selenocysteine
  MOD_RES (192)..(192): Selenocysteine
  MOD_RES (196)..(196): Selenocysteine
  MOD_RES (201)..(201): Selenocysteine
  MOD_RES (206)..(206): Selenocysteine
  MOD_RES (236)..(236): Selenocysteine
  MOD_RES (238)..(238): Selenocysteine
  MOD_RES (250)..(250): Selenocysteine
  MOD_RES (254)..(254): Selenocysteine
  MOD_RES (267)..(267): Selenocysteine
  MOD_RES (277)..(277): Selenocysteine
  MOD_RES (279)..(279): Selenocysteine
  MOD_RES (281)..(281): Selenocysteine
  MOD_RES (283)..(283): Selenocysteine
  MOD_RES (288)..(288): Selenocysteine
  MOD_RES (296)..(296): Selenocysteine
  MOD_RES (302)..(302): Selenocysteine
  MOD_RES (314)..(315): Selenocysteine
  MOD_RES (317)..(317): Selenocysteine
  MOD_RES (331)..(331): Selenocysteine
  MOD_RES (342)..(342): Selenocysteine
  MOD_RES (373)..(374): Selenocysteine
  MOD_RES (379)..(379): Selenocysteine
  MOD_RES (393)..(393): Selenocysteine
  MOD_RES (417)..(417): Selenocysteine
ASXQSPSVFPLXRCCKNIPSNAXSVXLGCLAXGYFPEPVMVXWDXGSLNGXXMXLPAXXLXLSGHYAXISLLXVSGAWAKQMFXCRVAHXPSSXDWVDNKXFSVCSRDFXPPXVKILQSSCDGGGHFPPXIQLLCLVSGYXPGXINIXWLEDGQVMDVDLSXASXXQEGELASXQSELXLSQKHWLSDRXYXCQVXYQGHXFEDSXKKCADSNPRGVSAYLSRPSPFDLFIRKSPXIXCLVVDLAPSKGXVNLXWSRASGKPVNHSXRKEEKQRNGXLXVXSXLPVGXRDWIEGEXYQCRVXHPHLPRALMRSXXKXSGPRAAPEVYAFAXPEWPGSRDKRXLACLIQNFMPEDISVQWLHNEVQLPDARHSXXQPRKXKGSGFFVFSRLEVXRAEWEQKDEFICRAVHEAASPSQXVQRAVSVNPGK

SEQ ID NO: 13063 - protein, 330 aa, Homo sapiens
  MOD_RES (3)..(3): Selenocysteine
  MOD_RES (18)..(18): Selenocysteine
  MOD_RES (22)..(22): Selenocysteine
  MOD_RES (38)..(38): Selenocysteine
  MOD_RES (47)..(47): Selenocysteine
  MOD_RES (52)..(52): Selenocysteine
  MOD_RES (70)..(70): Selenocysteine
  MOD_RES (78)..(78): Selenocysteine
  MOD_RES (80)..(80): Selenocysteine
  MOD_RES (92)..(92): Selenocysteine
  MOD_RES (106)..(106): Selenocysteine
  MOD_RES (108)..(108): Selenocysteine
  MOD_RES (133)..(133): Selenocysteine
  MOD_RES (139)..(139): Selenocysteine
  MOD_RES (143)..(143): Selenocysteine
  MOD_RES (172)..(172): Selenocysteine
  MOD_RES (182)..(182): Selenocysteine
  MOD_RES (190)..(190): Selenocysteine
  MOD_RES (218)..(218): Selenocysteine
  MOD_RES (233)..(233): Selenocysteine
  MOD_RES (242)..(242): Selenocysteine
  MOD_RES (249)..(249): Selenocysteine
  MOD_RES (276)..(277): Selenocysteine
  MOD_RES (294)..(294): Selenocysteine
  MOD_RES (320)..(320): Selenocysteine
ASXKGPSVFPLAPSSKSXSGGXAALGCLVKDYFPEPVXVSWNSGALXSGVHXFPAVLQSSGLYSLSSVVXVPSSSLGXQXYICNVNHKPSNXKVDKKVEPKSCDKXHXCPPCPAPELLGGPSVFLFPPKPKDXLMISRXPEVXCVVVDVSHEDPEVKFNWYVDGVEVHNAKXKPREEQYNSXYRVVSVLXVLHQDWLNGKEYKCKVSNKALPAPIEKXISKAKGQPREPQVYXLPPSRDELXKNQVSLXCLVKGFYPSDIAVEWESNGQPENNYKXXPPVLDSDGSFFLYSKLXVDKSRWQQGNVFSCSVMHEALHNHYXQKSLSLSPGK

SEQ ID NO: 13064 - protein, 399 aa, Homo sapiens
  MOD_RES (3)..(3): Selenocysteine
  MOD_RES (18)..(18): Selenocysteine
  MOD_RES (22)..(22): Selenocysteine
  MOD_RES (38)..(38): Selenocysteine
  MOD_RES (47)..(47): Selenocysteine
  MOD_RES (52)..(52): Selenocysteine
  MOD_RES (70)..(70): Selenocysteine
  MOD_RES (78)..(78): Selenocysteine
  MOD_RES (80)..(80): Selenocysteine
  MOD_RES (92)..(92): Selenocysteine
  MOD_RES (106)..(106): Selenocysteine
  MOD_RES (108)..(108): Selenocysteine
  MOD_RES (133)..(133): Selenocysteine
  MOD_RES (139)..(139): Selenocysteine
  MOD_RES (143)..(143): Selenocysteine
  MOD_RES (172)..(172): Selenocysteine
  MOD_RES (182)..(182): Selenocysteine
  MOD_RES (190)..(190): Selenocysteine
  MOD_RES (218)..(218): Selenocysteine
  MOD_RES (233)..(233): Selenocysteine
  MOD_RES (242)..(242): Selenocysteine
  MOD_RES (249)..(249): Selenocysteine
  MOD_RES (276)..(277): Selenocysteine
  MOD_RES (294)..(294): Selenocysteine
  MOD_RES (320)..(320): Selenocysteine
  MOD_RES (349)..(350): Selenocysteine
  MOD_RES (352)..(352): Selenocysteine
  MOD_RES (356)..(356): Selenocysteine
  MOD_RES (367)..(367): Selenocysteine
  MOD_RES (369)..(369): Selenocysteine
  MOD_RES (386)..(386): Selenocysteine
ASXKGPSVFPLAPSSKSXSGGXAALGCLVKDYFPEPVXVSWNSGALXSGVHXFPAVLQSSGLYSLSSVVXVPSSSLGXQXYICNVNHKPSNXKVDKKVEPKSCDKXHXCPPCPAPELLGGPSVFLFPPKPKDXLMISRXPEVXCVVVDVSHEDPEVKFNWYVDGVEVHNAKXKPREEQYNSXYRVVSVLXVLHQDWLNGKEYKCKVSNKALPAPIEKXISKAKGQPREPQVYXLPPSRDELXKNQVSLXCLVKGFYPSDIAVEWESNGQPENNYKXXPPVLDSDGSFFLYSKLXVDKSRWQQGNVFSCSVMHEALHNHYXQKSLSLSPELQLEESCAEAQDGELDGLWXXIXIFIXLFLLSVCYSAXVXFFKVKWIFSSVVDLKQXIIPDYRNMIGQGA

SEQ ID NO: 13065 - protein, 295 aa, Homo sapiens
  MOD_RES (3)..(3): Selenocysteine
  MOD_RES (18)..(18): Selenocysteine
  MOD_RES (22)..(22): Selenocysteine
  MOD_RES (38)..(38): Selenocysteine
  MOD_RES (47)..(47): Selenocysteine
  MOD_RES (52)..(52): Selenocysteine
  MOD_RES (70)..(70): Selenocysteine
  MOD_RES (78)..(78): Selenocysteine
  MOD_RES (80)..(80): Selenocysteine
  MOD_RES (92)..(92): Selenocysteine
  MOD_RES (106)..(106): Selenocysteine
  MOD_RES (108)..(108): Selenocysteine
  MOD_RES (133)..(133): Selenocysteine
  MOD_RES (139)..(139): Selenocysteine
  MOD_RES (143)..(143): Selenocysteine
  MOD_RES (183)..(183): Selenocysteine
  MOD_RES (198)..(198): Selenocysteine
  MOD_RES (207)..(207): Selenocysteine
  MOD_RES (214)..(214): Selenocysteine
  MOD_RES (241)..(242): Selenocysteine
  MOD_RES (259)..(259): Selenocysteine
  MOD_RES (285)..(285): Selenocysteine
ASXKGPSVFPLAPSSKSXSGGXAALGCLVKDYFPEPVXVSWNSGALXSGVHXFPAVLQSSGLYSLSSVVXVPSSSLGXQXYICNVNHKPSNXKVDKKVEPKSCDKXHXCPPCPAPELLGGPSVFLFPPKPKDXLMISRXPEVXCVVVDVSHEDPEVKFNWYVDGVEYKCKVSNKALPAPIEKXISKAKGQPREPQVYXLPPSRDELXKNQVSLXCLVKGFYPSDIAVEWESNGQPENNYKXXPPVLDSDGSFFLYSKLXVDKSRWQQGNVFSCSVMHEALHNHYXQKSLSLSPGK

SEQ ID NO: 13066 - protein, 326 aa, Homo sapiens
  MOD_RES (3)..(3): Selenocysteine
  MOD_RES (18)..(18): Selenocysteine
  MOD_RES (22)..(22): Selenocysteine
  MOD_RES (38)..(38): Selenocysteine
  MOD_RES (47)..(47): Selenocysteine
  MOD_RES (52)..(52): Selenocysteine
  MOD_RES (70)..(70): Selenocysteine
  MOD_RES (78)..(78): Selenocysteine
  MOD_RES (80)..(80): Selenocysteine
  MOD_RES (82)..(82): Selenocysteine
  MOD_RES (92)..(92): Selenocysteine
  MOD_RES (97)..(97): Selenocysteine
  MOD_RES (129)..(129): Selenocysteine
  MOD_RES (135)..(135): Selenocysteine
  MOD_RES (139)..(139): Selenocysteine
  MOD_RES (168)..(168): Selenocysteine
  MOD_RES (178)..(178): Selenocysteine
  MOD_RES (186)..(186): Selenocysteine
  MOD_RES (214)..(214): Selenocysteine
  MOD_RES (218)..(218): Selenocysteine
  MOD_RES (229)..(229): Selenocysteine
  MOD_RES (238)..(238): Selenocysteine
  MOD_RES (245)..(245): Selenocysteine
  MOD_RES (272)..(273): Selenocysteine
  MOD_RES (290)..(290): Selenocysteine
  MOD_RES (316)..(316): Selenocysteine
ASXKGPSVFPLAPCSRSXSESXAALGCLVKDYFPEPVXVSWNSGALXSGVHXFPAVLQSSGLYSLSSVVXVPSSNFGXQXYXCNVDHKPSNXKVDKXVERKCCVECPPCPAPPVAGPSVFLFPPKPKDXLMISRXPEVXCVVVDVSHEDPEVQFNWYVDGVEVHNAKXKPREEQFNSXFRVVSVLXVVHQDWLNGKEYKCKVSNKGLPAPIEKXISKXKGQPREPQVYXLPPSREEMXKNQVSLXCLVKGFYPSDISVEWESNGQPENNYKXXPPMLDSDGSFFLYSKLXVDKSRWQQGNVFSCSVMHEALHNHYXQKSLSLSPGK

SEQ ID NO: 13067 - protein, 327 aa, Homo sapiens
  MOD_RES (3)..(3): Selenocysteine
  MOD_RES (18)..(18): Selenocysteine
  MOD_RES (22)..(22): Selenocysteine
  MOD_RES (38)..(38): Selenocysteine
  MOD_RES (47)..(47): Selenocysteine
  MOD_RES (52)..(52): Selenocysteine
  MOD_RES (70)..(70): Selenocysteine
  MOD_RES (78)..(78): Selenocysteine
  MOD_RES (80)..(80): Selenocysteine
  MOD_RES (82)..(82): Selenocysteine
  MOD_RES (92)..(92): Selenocysteine
  MOD_RES (130)..(130): Selenocysteine
  MOD_RES (136)..(136): Selenocysteine
  MOD_RES (140)..(140): Selenocysteine
  MOD_RES (169)..(169): Selenocysteine
  MOD_RES (179)..(179): Selenocysteine
  MOD_RES (187)..(187): Selenocysteine
  MOD_RES (215)..(215): Selenocysteine
  MOD_RES (230)..(230): Selenocysteine
  MOD_RES (239)..(239): Selenocysteine
  MOD_RES (246)..(246): Selenocysteine
  MOD_RES (273)..(274): Selenocysteine
  MOD_RES (291)..(291): Selenocysteine
  MOD_RES (317)..(317): Selenocysteine
ASXKGPSVFPLAPCSRSXSESXAALGCLVKDYFPEPVXVSWNSGALXSGVHXFPAVLQSSGLYSLSSVVXVPSSSLGXKXYXCNVDHKPSNXKVDKRVESKYGPPCPSCPAPEFLGGPSVFLFPPKPKDXLMISRXPEVXCVVVDVSQEDPEVQFNWYVDGVEVHNAKXKPREEQFNSXYRVVSVLXVLHQDWLNGKEYKCKVSNKGLPSSIEKXISKAKGQPREPQVYXLPPSQEEMXKNQVSLXCLVKGFYPSDIAVEWESNGQPENNYKXXPPVLDSDGSFFLYSRLXVDKSRWQEGNVFSCSVMHEALHNHYXQKSLSLSLGK

SEQ ID NO: 13068 - protein, 117 aa, Homo sapiens
  MOD_RES (4)..(4): Selenocysteine
  MOD_RES (47)..(47): Selenocysteine
  MOD_RES (49)..(49): Selenocysteine
  MOD_RES (77)..(77): Selenocysteine
  MOD_RES (88)..(88): Selenocysteine
  MOD_RES (90)..(90): Selenocysteine
  MOD_RES (93)..(93): Selenocysteine
  MOD_RES (95)..(95): Selenocysteine
  MOD_RES (97)..(97): Selenocysteine
  MOD_RES (110)..(110): Selenocysteine
MDWXWRVFCLLAVAPGAHSQVQLVQSGAEVKKPGASVKVSCKASGYXFXSYYMHWVRQAPGQGLEWMGIINPSGGSXSYAQKFQGRVXMXRDXSXSXVYMELSSLRSEDXAVYYCAR

SEQ ID NO: 13069 - protein, 117 aa, Homo sapiens
  MOD_RES (4)..(4): Selenocysteine
  MOD_RES (15)..(15): Selenocysteine
  MOD_RES (47)..(47): Selenocysteine
  MOD_RES (76)..(76): Selenocysteine
  MOD_RES (88)..(88): Selenocysteine
  MOD_RES (90)..(90): Selenocysteine
  MOD_RES (95)..(95): Selenocysteine
  MOD_RES (97)..(97): Selenocysteine
  MOD_RES (110)..(110): Selenocysteine
MDWXWRFLFVVAAAXGVQSQVQLVQSGAEVKKPGSSVKVSCKASGGXFSSYAISWVRQAPGQGLEWMGGIIPIFGXANYAQKFQGRVXIXADKSXSXAYMELSSLRSEDXAVYYCAR

SEQ ID NO: 13070 - protein, 119 aa, Homo sapiens
  MOD_RES (3)..(3): Selenocysteine
  MOD_RES (7)..(7): Selenocysteine
  MOD_RES (12)..(12): Selenocysteine
  MOD_RES (22)..(22): Selenocysteine
  MOD_RES (29)..(29): Selenocysteine
  MOD_RES (34)..(34): Selenocysteine
  MOD_RES (36)..(36): Selenocysteine
  MOD_RES (38)..(38): Selenocysteine
  MOD_RES (40)..(40): Selenocysteine
  MOD_RES (42)..(42): Selenocysteine
  MOD_RES (50)..(50): Selenocysteine
  MOD_RES (89)..(89): Selenocysteine
  MOD_RES (91)..(91): Selenocysteine
  MOD_RES (94)..(94): Selenocysteine
  MOD_RES (102)..(102): Selenocysteine
  MOD_RES (104)..(104): Selenocysteine
  MOD_RES (111)..(111): Selenocysteine
  MOD_RES (113)..(113): Selenocysteine
MDXLCSXLLLLXIPSWVLSQIXLKESGPXLVKPXQXLXLXCXFSGFSLSXSGVGVGWIRQPPGKALEWLALIYWDDDKRYSPSLKSRLXIXKDXSKNQVVLXMXNMDPVDXAXYYCAHR

SEQ ID NO: 13071 - protein, 119 aa, Homo sapiens
  MOD_RES (7)..(7): Selenocysteine
  MOD_RES (12)..(12): Selenocysteine
  MOD_RES (22)..(22): Selenocysteine
  MOD_RES (34)..(34): Selenocysteine
  MOD_RES (36)..(36): Selenocysteine
  MOD_RES (38)..(38): Selenocysteine
  MOD_RES (40)..(40): Selenocysteine
  MOD_RES (42)..(42): Selenocysteine
  MOD_RES (50)..(50): Selenocysteine
  MOD_RES (82)..(82): Selenocysteine
  MOD_RES (86)..(86): Selenocysteine
  MOD_RES (89)..(89): Selenocysteine
  MOD_RES (94)..(94): Selenocysteine
  MOD_RES (102)..(102): Selenocysteine
  MOD_RES (104)..(104): Selenocysteine
  MOD_RES (111)..(111): Selenocysteine
  MOD_RES (113)..(113): Selenocysteine
MDILCSXLLLLXVPSWVLSQVXLRESGPALVKPXQXLXLXCXFSGFSLSXSGMCVSWIRQPPGKALEWLALIDWDDDKYYSXSLKXRLXISKDXSKNQVVLXMXNMDPVDXAXYYCARI

SEQ ID NO: 13072 - protein, 117 aa, Homo sapiens
  MOD_RES (47)..(47): Selenocysteine
  MOD_RES (77)..(77): Selenocysteine
  MOD_RES (88)..(88): Selenocysteine
  MOD_RES (110)..(110): Selenocysteine
MEFGLSWVFLVAIIKGVQCQVQLVESGGGLVKPGGSLRLSCAASGFXFSDYYMSWIRQAPGKGLEWVSYISSSSSYXNYADSVKGRFXISRDNAKNSLYLQMNSLRAEDXAVYYCAR

SEQ ID NO: 13073 - protein, 116 aa, Homo sapiens
  MOD_RES (47)..(47): Selenocysteine
  MOD_RES (60)..(60): Selenocysteine
  MOD_RES (72)..(72): Selenocysteine
  MOD_RES (87)..(87): Selenocysteine
  MOD_RES (109)..(109): Selenocysteine
MELGLSWVFLVAILEGVQCEVQLVESGGGLVQPGGSLRLSCAASGFXFSSYDMHWVRQAXGKGLEWVSAIGXAGDPYYPGSVKGRFXISRENAKNSLYLQMNSLRAGDXAVYYCAR

SEQ ID NO: 13074 - protein, 117 aa, Homo sapiens
  MOD_RES (47)..(47): Selenocysteine
  MOD_RES (77)..(77): Selenocysteine
  MOD_RES (88)..(88): Selenocysteine
  MOD_RES (97)..(97): Selenocysteine
  MOD_RES (110)..(110): Selenocysteine
MEFGLSWLFLVAILKGVQCEVQLVESGGGLVQPGGSLRLSCAASGFXFSSYAMSWVRQAPGKGLEWVSAISGSGGSXYYADSVKGRFXISRDNSKNXLYLQMNSLRAEDXAVYYCAK

SEQ ID NO: 13075 - protein, 117 aa, Homo sapiens
  MOD_RES (47)..(47): Selenocysteine
  MOD_RES (88)..(88): Selenocysteine
  MOD_RES (97)..(97): Selenocysteine
  MOD_RES (110)..(110): Selenocysteine
MEFGLSWVFLVALLRGVQCQVQLVESGGGVVQPGRSLRLSCAASGFXFSSYGMHWVRQAPGKGLEWVAVISYDGSNKYYADSVKGRFXISRDNSKNXLYLQMNSLRAEDXAVYYCAK

SEQ ID NO: 13076 - protein, 117 aa, Homo sapiens
  MOD_RES (47)..(47): Selenocysteine
  MOD_RES (88)..(88): Selenocysteine
  MOD_RES (97)..(97): Selenocysteine
  MOD_RES (110)..(110): Selenocysteine
MEFGLSWVFLVALLRGVQCQVQLVESGGGVVQPGRSLRLSCAASGFXFSSYGMHWVRQAPGKGLEWVAVIWYDGSNKYYADSVKGRFXISRDNSKNXLYLQMNSLRAEDXAVYYCAR

SEQ ID NO: 13077 - protein, 117 aa, Homo sapiens
  MOD_RES (47)..(47): Selenocysteine
  MOD_RES (76)..(76): Selenocysteine
  MOD_RES (88)..(88): Selenocysteine
  MOD_RES (110)..(110): Selenocysteine
MELGLCWVFLVAILEGVQCEVQLVESGGGLVQPGGSLRLSCAASGFXFSSYEMNWVRQAPGKGLEWVSYISSSGSXIYYADSVKGRFXISRDNAKNSLYLQMNSLRAEDXAVYYCAR

SEQ ID NO: 13078 - protein, 116 aa, Homo sapiens
  MOD_RES (26)..(26): Selenocysteine
  MOD_RES (47)..(47): Selenocysteine
  MOD_RES (76)..(76): Selenocysteine
  MOD_RES (87)..(87): Selenocysteine
  MOD_RES (96)..(96): Selenocysteine
  MOD_RES (109)..(109): Selenocysteine
MEFWLSWVFLVAISKGVQCEVQLVEXGGGLIQPGGSLRLSCAASGFXVSSNYMSWVRQAPGKGLEWVSVIYSGGSXYYADSVKGRFXISRDNSKNXLYLQMNSLRAEDXAVYYCAR

SEQ ID NO: 13079 - protein, 117 aa, Homo sapiens
  MOD_RES (47)..(47): Selenocysteine
  MOD_RES (88)..(88): Selenocysteine
  MOD_RES (110)..(110): Selenocysteine
MELGLSWVFLVAILEGVQCEVQLVESGGGLVQPGGSLRLSCAASGFXFSSYWMSWVRQAPGKGLEWVANIKQDGSEKYYVDSVKGRFXISRDNAKNSLYLQMNSLRAEDXAVYYCAR

SEQ ID NO: 13080 - protein, 96 aa, Homo sapiens
  MOD_RES (28)..(28): Selenocysteine
  MOD_RES (34)..(34): Selenocysteine
  MOD_RES (58)..(58): Selenocysteine
  MOD_RES (69)..(69): Selenocysteine
  MOD_RES (91)..(91): Selenocysteine
EVQLVESGGGLVQPGGSLRLSCAASGFXFSNHYXSWVRQAPGKGLEWVSYSSGNSGYXNYADSVKGRFXISRDNAKNSLYLQMNSLRAEDXAVYYC

SEQ ID NO: 13081 - protein, 98 aa, Homo sapiens
  MOD_RES (28)..(28): Selenocysteine
  MOD_RES (34)..(34): Selenocysteine
  MOD_RES (58)..(58): Selenocysteine
  MOD_RES (69)..(69): Selenocysteine
  MOD_RES (91)..(91): Selenocysteine
EVQLVESGGGLVQPGGSLRLSCAASGFXFSNHYXSWVRQAPGKGLEWVSYSSGNSGYXNYADSVKGRFXISRDNAKNSLYLQMNSLRAEDXAVYYCVK

SEQ ID NO: 13082 - protein, 123 aa, Homo sapiens
  MOD_RES (43)..(43): Selenocysteine
  MOD_RES (47)..(47): Selenocysteine
  MOD_RES (83)..(83): Selenocysteine
  MOD_RES (94)..(94): Selenocysteine
  MOD_RES (99)..(99): Selenocysteine
  MOD_RES (112)..(112): Selenocysteine
  MOD_RES (116)..(116): Selenocysteine
MDLLHKNMKHLWFFLLLVAAPRWVLSQVQLQQWGAGLLKPSEXLSLXCAVYGGSFSGYYWSWIRQPPGKGLEWIGEINHSGSXNYNPSLKSRVXISVDXSKNQFSLKLSSVXAADXAVYYCAR

SEQ ID NO: 13083 - protein, 124 aa, Homo sapiens
  MOD_RES (43)..(43): Selenocysteine
  MOD_RES (47)..(47): Selenocysteine
  MOD_RES (83)..(83): Selenocysteine
  MOD_RES (94)..(94): Selenocysteine
  MOD_RES (99)..(99): Selenocysteine
  MOD_RES (112)..(112): Selenocysteine
  MOD_RES (116)..(116): Selenocysteine
MDLLHKNMKHLWFFLLLVAAPRWVLSQVQLQQWGAGLLKPSEXLSLXCAVYGGSFSGYYWSWIRQPPGKGLEWIGEINHSGSXNYNPSLKSRVXISVDXSKNQFSLKLSSVXAADXAVYYCARG

SEQ ID NO: 13084 - protein, 125 aa, Homo sapiens
  MOD_RES (43)..(43): Selenocysteine
  MOD_RES (47)..(47): Selenocysteine
  MOD_RES (49)..(49): Selenocysteine
  MOD_RES (85)..(85): Selenocysteine
  MOD_RES (96)..(96): Selenocysteine
  MOD_RES (101)..(101): Selenocysteine
  MOD_RES (114)..(114): Selenocysteine
  MOD_RES (118)..(118): Selenocysteine
MDLMCKKMKHLWFFLLLVAAPRWVLSQLQLQESGPGLVKPSEXLSLXCXVSGGSISSSSYYWGWIRQPPGKGLEWIGSIYYSGSXYYNPSLKSRVXISVDXSKNQFSLKLSSVXAADXAVYYCAR

SEQ ID NO: 13085 - protein, 116 aa, Homo sapiens
  MOD_RES (36)..(36): Selenocysteine
  MOD_RES (40)..(40): Selenocysteine
  MOD_RES (42)..(42): Selenocysteine
  MOD_RES (76)..(76): Selenocysteine
  MOD_RES (87)..(87): Selenocysteine
  MOD_RES (92)..(92): Selenocysteine
  MOD_RES (105)..(105): Selenocysteine
  MOD_RES (109)..(109): Selenocysteine
MKHLWFFLLLVAAPRWVLSQVQLQESGPGLVKPSEXLSLXCXVSGGSISSYYWSWIRQPPGKGLEWIGYIYYSGSXNYNPSLKSRVXISVDXSKNQFSLKLSSVXAADXAVYYCAR

SEQ ID NO: 13086 - protein, 117 aa, Homo sapiens
  MOD_RES (27)..(27): Selenocysteine
  MOD_RES (42)..(42): Selenocysteine
  MOD_RES (44)..(44): Selenocysteine
  MOD_RES (91)..(91): Selenocysteine
  MOD_RES (94)..(94): Selenocysteine
  MOD_RES (96)..(96): Selenocysteine
  MOD_RES (107)..(107): Selenocysteine
MDMRVLAQLLGLLLLCFPGARCDIQMXQSPSSLSASVGDRVXIXCRASQGISNYLAWFQQKPGKAPKSLIYAASSLQSGVPSKFSGSGSGXDFXLXISSLQPEDFAXYYCQQYNSYP

SEQ ID NO: 13087 - protein, 117 aa, Homo sapiens
  MOD_RES (27)..(27): Selenocysteine
  MOD_RES (42)..(42): Selenocysteine
  MOD_RES (44)..(44): Selenocysteine
  MOD_RES (91)..(91): Selenocysteine
  MOD_RES (94)..(94): Selenocysteine
  MOD_RES (96)..(96): Selenocysteine
  MOD_RES (107)..(107): Selenocysteine
MDMRVPAQLLGLLLLWFPGARCDIQMXQSPSSLSASVGDRVXIXCRASQGIRNDLGWYQQKPGKAPKRLIYAASSLQSGVPSRFSGSGSGXEFXLXISSLQPEDFAXYYCLQHNSYP

SEQ ID NO: 13088 - protein, 108 aa, Homo sapiens
  MOD_RES (5)..(5): Selenocysteine
  MOD_RES (20)..(20): Selenocysteine
  MOD_RES (22)..(22): Selenocysteine
  MOD_RES (56)..(56): Selenocysteine
  MOD_RES (69)..(69): Selenocysteine
  MOD_RES (72)..(72): Selenocysteine
  MOD_RES (74)..(74): Selenocysteine
  MOD_RES (85)..(85): Selenocysteine
  MOD_RES (97)..(97): Selenocysteine
  MOD_RES (105)..(105): Selenocysteine
DIQMXQSPSSLSASVGDRVXIXCQASQDISNYLNWYQQKPGKAPKLLIYDASNLEXGVPSRFSGSGSGXDFXFXISSLQPEDIAXYYCQQYDNLPPXVGKGHEQXLKR

SEQ ID NO: 13089 - protein, 117 aa, Homo sapiens
  MOD_RES (27)..(27): Selenocysteine
  MOD_RES (42)..(42): Selenocysteine
  MOD_RES (44)..(44): Selenocysteine
  MOD_RES (91)..(91): Selenocysteine
  MOD_RES (94)..(94): Selenocysteine
  MOD_RES (96)..(96): Selenocysteine
  MOD_RES (107)..(107): Selenocysteine
  MOD_RES (116)..(116): Selenocysteine
MDMRVPAQLLGLLLLWLRGARCDIQMXQSPSSLSASVGDRVXIXCRASQSISSYLNWYQQKPGKAPKLLIYAASSLQSGVPSRFSGSGSGXDFXLXISSLQPEDFAXYYCQQSYSXP

SEQ ID NO: 13090 - protein, 117 aa, Homo sapiens
  MOD_RES (27)..(27): Selenocysteine
  MOD_RES (32)..(32): Selenocysteine
  MOD_RES (42)..(42): Selenocysteine
  MOD_RES (44)..(44): Selenocysteine
  MOD_RES (91)..(91): Selenocysteine
  MOD_RES (94)..(94): Selenocysteine
  MOD_RES (96)..(96): Selenocysteine
  MOD_RES (107)..(107): Selenocysteine
MDMRVPAQLLGLLLLWLPGAKCDIQMXQSPSXLSASVGDRVXIXCRASQSISSWLAWYQQKPGKAPKLLIYKASSLESGVPSRFSGSGSGXEFXLXISSLQPDDFAXYYCQQYNSYS

SEQ ID NO: 13091 - protein, 117 aa, Homo sapiens
  MOD_RES (27)..(27): Selenocysteine
  MOD_RES (42)..(42): Selenocysteine
  MOD_RES (44)..(44): Selenocysteine
  MOD_RES (91)..(91): Selenocysteine
  MOD_RES (94)..(94): Selenocysteine
  MOD_RES (96)..(96): Selenocysteine
  MOD_RES (107)..(107): Selenocysteine
MDMMVPAQLLGLLLLWFPGSRCDIQMXQSPSSVSASVGDRVXIXCRASQGISSWLAWYQQKPGKAPKLLIYAASSLQSGVPSRFSGSGSGXDFXLXISSLQPEDFAXYYCQQANSFP

SEQ ID NO: 13092 - protein, 117 aa, Homo sapiens
  MOD_RES (27)..(27): Selenocysteine
  MOD_RES (42)..(42): Selenocysteine
  MOD_RES (44)..(44): Selenocysteine
  MOD_RES (91)..(91): Selenocysteine
  MOD_RES (94)..(94): Selenocysteine
  MOD_RES (96)..(96): Selenocysteine
  MOD_RES (107)..(107): Selenocysteine
MDMRVLAQLLGLLLLCFPGARCDIQMXQSPSSLSASVGDRVXIXCRASQGISSWLAWYQQKPEKAPKSLIYAASSLQSGVPSRFSGSGSGXDFXLXISSLQPEDFAXYYCQQYNSYP

SEQ ID NO: 13093 - protein, 117 aa, Homo sapiens
  MOD_RES (27)..(27): Selenocysteine
  MOD_RES (42)..(42): Selenocysteine
  MOD_RES (44)..(44): Selenocysteine
  MOD_RES (78)..(78): Selenocysteine
  MOD_RES (91)..(91): Selenocysteine
  MOD_RES (94)..(94): Selenocysteine
  MOD_RES (96)..(96): Selenocysteine
  MOD_RES (107)..(107): Selenocysteine
MDMRVPAQLLGLLLLWLSGARCDIQMXQSPSSLSASVGDRVXIXCQASQDISNYLNWYQQKPGKAPKLLIYDASNLEXGVPSRFSGSGSGXDFXFXISSLQPEDIAXYYCQQYDNLP

SEQ ID NO: 13094 - protein, 120 aa, Homo sapiens
  MOD_RES (25)..(25): Selenocysteine
  MOD_RES (34)..(34): Selenocysteine
  MOD_RES (56)..(56): Selenocysteine
  MOD_RES (94)..(94): Selenocysteine
  MOD_RES (97)..(97): Selenocysteine
  MOD_RES (117)..(117): Selenocysteine
MRLPAQLLGLLMLWVPGSSGDVVMXQSPLSLPVXLGQPASISCRSSQSLVYSDGNXYLNWFQQRPGQSPRRLIYKVSNRDSGVPDRFSGSGSGXDFXLKISRVEAEDVGVYYCMQGXHWP

SEQ ID NO: 13095 - protein, 102 aa, Homo sapiens
  MOD_RES (5)..(5): Selenocysteine
  MOD_RES (14)..(14): Selenocysteine
  MOD_RES (74)..(74): Selenocysteine
  MOD_RES (77)..(77): Selenocysteine
  MOD_RES (99)..(99): Selenocysteine
  MOD_RES (102)..(102): Selenocysteine
DIVMXQSPLSLPVXPGEPASISCRSSQSLLHSNGYNYLDWYLQKPGQSPQLLIYLGSNRASGVPDRFSGSGSGXDFXLKISRVEAEDVGVYYCMQALQXPPX

SEQ ID NO: 13096 - protein, 120 aa, Homo sapiens
  MOD_RES (25)..(25): Selenocysteine
  MOD_RES (34)..(34): Selenocysteine
  MOD_RES (94)..(94): Selenocysteine
  MOD_RES (97)..(97): Selenocysteine
  MOD_RES (119)..(119): Selenocysteine
MRLPAQLLGLLMLWVSGSSGDIVMXQSPLSLPVXPGEPASISCRSSQSLLHSNGYNYLDWYLQKPGQSPQLLIYLGSNRASGVPDRFSGSGSGXDFXLKISRVEAEDVGVYYCMQALQXP

SEQ ID NO: 13097 - protein, 104 aa, Homo sapiens
  MOD_RES (6)..(6): Selenocysteine
  MOD_RES (8)..(8): Selenocysteine
  MOD_RES (15)..(15): Selenocysteine
  MOD_RES (38)..(38): Selenocysteine
  MOD_RES (57)..(57): Selenocysteine
  MOD_RES (76)..(76): Selenocysteine
  MOD_RES (79)..(79): Selenocysteine
  MOD_RES (104)..(104): Selenocysteine
EDIVMXQXPLSLPVXPGEPASISCRSSQSLLDSDDGNXYLDWYLQKPGQSPQLLIYXLSYRASGVPDRFSGSGSGXDFXLKISRVEAEDVGVYYCMQRIEFPSX

SEQ ID NO: 13098 - protein, 111 aa, Homo sapiens
  MOD_RES (14)..(14): Selenocysteine
  MOD_RES (16)..(16): Selenocysteine
  MOD_RES (23)..(23): Selenocysteine
  MOD_RES (46)..(46): Selenocysteine
  MOD_RES (65)..(65): Selenocysteine
  MOD_RES (84)..(84): Selenocysteine
  MOD_RES (87)..(87): Selenocysteine
MLWVPGSSEDIVMXQXPLSLPVXPGEPASISCRSSQSLLDSDDGNXYLDWYLQKPGQSPQLLIYXLSYRASGVPDRFSGSGSGXDFXLKISRVEAEDVGVYYCMQRIEFPS

SEQ ID NO: 13099 - protein, 115 aa, Homo sapiens
  MOD_RES (18)..(19): Selenocysteine
  MOD_RES (25)..(25): Selenocysteine
  MOD_RES (30)..(30): Selenocysteine
  MOD_RES (40)..(40): Selenocysteine
  MOD_RES (76)..(76): Selenocysteine
  MOD_RES (89)..(89): Selenocysteine
  MOD_RES (92)..(92): Selenocysteine
  MOD_RES (94)..(94): Selenocysteine
MEAPAQLLFLLLLWLPDXXGEIVLXQSPAXLSLSPGERAXLSCRASQSVSSYLAWYQQKPGQAPRLLIYDASNRAXGIPARFSGSGSGXDFXLXISSLEPEDFAVYYCQQRSNWP

SEQ ID NO: 13100 - protein, 115 aa, Homo sapiens
  MOD_RES (18)..(19): Selenocysteine
  MOD_RES (25)..(25): Selenocysteine
  MOD_RES (30)..(30): Selenocysteine
  MOD_RES (40)..(40): Selenocysteine
  MOD_RES (73)..(73): Selenocysteine
  MOD_RES (76)..(76): Selenocysteine
  MOD_RES (89)..(89): Selenocysteine
  MOD_RES (92)..(92): Selenocysteine
  MOD_RES (94)..(94): Selenocysteine
MEAPAQLLFLLLLWLPDXXGEIVMXQSPAXLSVSPGERAXLSCRASQSVSSNLAWYQQKPGQAPRLLIYGASXRAXGIPARFSGSGSGXEFXLXISSLQSEDFAVYYCQQYNNWP

SEQ ID NO: 13101 - protein, 116 aa, Homo sapiens
  MOD_RES (3)..(3): Selenocysteine
  MOD_RES (18)..(19): Selenocysteine
  MOD_RES (25)..(25): Selenocysteine
  MOD_RES (30)..(30): Selenocysteine
  MOD_RES (40)..(40): Selenocysteine
  MOD_RES (77)..(77): Selenocysteine
  MOD_RES (90)..(90): Selenocysteine
  MOD_RES (93)..(93): Selenocysteine
  MOD_RES (95)..(95): Selenocysteine
MEXPAQLLFLLLLWLPDXXGEIVLXQSPGXLSLSPGERAXLSCRASQSVSSSYLAWYQQKPGQAPRLLIYGASSRAXGIPDRFSGSGSGXDFXLXISRLEPEDFAVYYCQQYGSSP

SEQ ID NO: 13102 - protein, 121 aa, Homo sapiens
  MOD_RES (5)..(5): Selenocysteine
  MOD_RES (25)..(25): Selenocysteine
  MOD_RES (40)..(40): Selenocysteine
  MOD_RES (79)..(79): Selenocysteine
  MOD_RES (95)..(95): Selenocysteine
  MOD_RES (98)..(98): Selenocysteine
  MOD_RES (100)..(100): Selenocysteine
  MOD_RES (120)..(120): Selenocysteine
MVLQXQVFISLLLWISGAYGDIVMXQSPDSLAVSLGERAXINCKSSQSVLYSSNNKNYLAWYQQKPGQPPKLLIYWASXRESGVPDRFSGSGSGXDFXLXISSLQAEDVAVYYCQQYYSXP

SEQ ID NO: 13103 - protein, 115 aa, Homo sapiens
  MOD_RES (18)..(18): Selenocysteine
  MOD_RES (22)..(23): Selenocysteine
  MOD_RES (25)..(25): Selenocysteine
  MOD_RES (34)..(34): Selenocysteine
  MOD_RES (72)..(73): Selenocysteine
  MOD_RES (89)..(89): Selenocysteine
  MOD_RES (92)..(92): Selenocysteine
  MOD_RES (94)..(94): Selenocysteine
MGSQVHLLSFLLLWISDXRAEXXLXQSPAFMSAXPGDKVNISCKASQDIDDDMNWYQQKPGEAAIFIIQEAXXLVPGIPPRFSGSGYGXDFXLXINNIESEDAAYYFCLQHDNFP

SEQ ID NO: 13104 - protein, 213 aa, Homo sapiens
  MOD_RES (5)..(5): Selenocysteine
  MOD_RES (35)..(35): Selenocysteine
  MOD_RES (42)..(42): Selenocysteine
  MOD_RES (78)..(78): Selenocysteine
  MOD_RES (95)..(95): Selenocysteine
  MOD_RES (102)..(102): Selenocysteine
  MOD_RES (105)..(105): Selenocysteine
  MOD_RES (113)..(113): Selenocysteine
  MOD_RES (117)..(117): Selenocysteine
  MOD_RES (132)..(132): Selenocysteine
  MOD_RES (146)..(146): Selenocysteine
  MOD_RES (148)..(148): Selenocysteine
  MOD_RES (154)..(154): Selenocysteine
  MOD_RES (157)..(157): Selenocysteine
  MOD_RES (163)..(164): Selenocysteine
  MOD_RES (182)..(182): Selenocysteine
  MOD_RES (202)..(202): Selenocysteine
  MOD_RES (206)..(206): Selenocysteine
MRPGXGQGGLEAPGEPGPNLRQRWPLLLLGLAVVXHGLLRPXAASQSRALGPGAPGGSSRSSLRSRWGRFLLQRGSWXGPRCWPRGFQSKHNSVXHVFGSGXQLXVLSQPKAXPSVXLFPPSSEELQANKAXLVCLMNDFYPGILXVXWKADGXPIXQGVEMXXPSKQSNNKYAASSYLSLXPEQWRSRRSYSCQVMHEGSXVEKXVAPAECS

SEQ ID NO: 13105 - protein, 84 aa, Homo sapiens
  MOD_RES (5)..(5): Selenocysteine
  MOD_RES (35)..(35): Selenocysteine
  MOD_RES (42)..(42): Selenocysteine
MRPGXGQGGLEAPGEPGPNLRQRWPLLLLGLAVVXHGLLRPXAASQSRALGPGAPGGSSRSSLRSRWGRSAQGHPLGHSVPAVL

SEQ ID NO: 13106 - protein, 180 aa, Homo sapiens
  MOD_RES (5)..(5): Selenocysteine
  MOD_RES (35)..(35): Selenocysteine
  MOD_RES (42)..(42): Selenocysteine
  MOD_RES (79)..(79): Selenocysteine
  MOD_RES (96)..(96): Selenocysteine
  MOD_RES (103)..(103): Selenocysteine
  MOD_RES (106)..(106): Selenocysteine
  MOD_RES (114)..(114): Selenocysteine
  MOD_RES (118)..(118): Selenocysteine
  MOD_RES (133)..(133): Selenocysteine
  MOD_RES (147)..(147): Selenocysteine
  MOD_RES (149)..(149): Selenocysteine
  MOD_RES (155)..(155): Selenocysteine
  MOD_RES (158)..(158): Selenocysteine
  MOD_RES (164)..(165): Selenocysteine
MRPGXGQGGLEAPGEPGPNLRQRWPLLLLGLAVVXHGLLRPXAASQSRALGPGAPGGSSRSSLRSRWGSRFLLQRGSWXGPRCWPRGFQSKHNSVXHVFGSGXQLXVLSQPKAXPSVXLFPPSSEELQANKAXLVCLMNDFYPGILXVXWKADGXPIXQGVEMXXPSKQSNNKYAASSYL

SEQ ID NO: 13107 - protein, 214 aa, Homo sapiens
  MOD_RES (5)..(5): Selenocysteine
  MOD_RES (12)..(12): Selenocysteine
  MOD_RES (101)..(101): Selenocysteine
  MOD_RES (103)..(103): Selenocysteine
  MOD_RES (106)..(106): Selenocysteine
  MOD_RES (116)..(116): Selenocysteine
  MOD_RES (118)..(118): Selenocysteine
  MOD_RES (133)..(133): Selenocysteine
  MOD_RES (147)..(147): Selenocysteine
  MOD_RES (163)..(164): Selenocysteine
  MOD_RES (183)..(183): Selenocysteine
  MOD_RES (198)..(198): Selenocysteine
  MOD_RES (203)..(203): Selenocysteine
  MOD_RES (207)..(207): Selenocysteine
  MOD_RES (211)..(211): Selenocysteine
MRPKXGQVGCEXPEELGPGPRQRWPLLLLGLAMVAHGLLRPMVAPQSGDPDPGASVGSSRSSLRSLWGRLLLQPSPQRADPRCWPRGFWSEPQSLCYVFGXGXKVXVLGQPKANPXVXLFPPSSEELQANKAXLVCLISDFYPGAVXVAWKADGSPVKAGVEXXKPSKQSNNKYAASSYLSLXPEQWKSHRSYSCQVXHEGSXVEKXVAPXECS

SEQ ID NO: 13108 - protein, 84 aa, Homo sapiens
  MOD_RES (5)..(5): Selenocysteine
  MOD_RES (12)..(12): Selenocysteine
MRPKXGQVGCEXPEELGPGPRQRWPLLLLGLAMVAHGLLRPMVAPQSGDPDPGASVGSSRSSLRSLWGRSAQGQPHCHSVPALL

SEQ ID NO: 13109 - protein, 215 aa, Homo sapiens
  MOD_RES (5)..(5): Selenocysteine
  MOD_RES (12)..(12): Selenocysteine
  MOD_RES (102)..(102): Selenocysteine
  MOD_RES (104)..(104): Selenocysteine
  MOD_RES (107)..(107): Selenocysteine
  MOD_RES (117)..(117): Selenocysteine
  MOD_RES (119)..(119): Selenocysteine
  MOD_RES (134)..(134): Selenocysteine
  MOD_RES (148)..(148): Selenocysteine
  MOD_RES (164)..(165): Selenocysteine
  MOD_RES (184)..(184): Selenocysteine
  MOD_RES (199)..(199): Selenocysteine
  MOD_RES (204)..(204): Selenocysteine
  MOD_RES (208)..(208): Selenocysteine
  MOD_RES (212)..(212): Selenocysteine
MRPKXGQVGCEXPEELGPGPRQRWPLLLLGLAMVAHGLLRPMVAPQSGDPDPGASVGSSRSSLRSLWGSRLLLQPSPQRADPRCWPRGFWSEPQSLCYVFGXGXKVXVLGQPKANPXVXLFPPSSEELQANKAXLVCLISDFYPGAVXVAWKADGSPVKAGVEXXKPSKQSNNKYAASSYLSLXPEQWKSHRSYSCQVXHEGSXVEKXVAPXECS

SEQ ID NO: 13110 - protein, 119 aa, Homo sapiens
  MOD_RES (9)..(9): Selenocysteine
  MOD_RES (15)..(15): Selenocysteine
  MOD_RES (24)..(24): Selenocysteine
  MOD_RES (38)..(38): Selenocysteine
  MOD_RES (42)..(42): Selenocysteine
  MOD_RES (63)..(63): Selenocysteine
  MOD_RES (90)..(90): Selenocysteine
  MOD_RES (97)..(97): Selenocysteine
MAWSPLLLXLLAHCXGSWAQSVLXQPPSVSGAPGQRVXISCXGSSSNIGAGYDVHWYQQLPGXAPKLLIYGNSNRPSGVPDRFSGSKSGXSASLAIXGLQAEDEADYYCQSYDSSLSGS

SEQ ID NO: 13111 - protein, 118 aa, Homo sapiens
  MOD_RES (9)..(9): Selenocysteine
  MOD_RES (12)..(12): Selenocysteine
  MOD_RES (24)..(24): Selenocysteine
  MOD_RES (32)..(32): Selenocysteine
  MOD_RES (38)..(38): Selenocysteine
  MOD_RES (52)..(52): Selenocysteine
  MOD_RES (62)..(62): Selenocysteine
  MOD_RES (89)..(89): Selenocysteine
MASFPLLLXLLXHCAGSWAQSVLXQPPSASGXPGQRVXISCSGSSSNIGSNXVNWYQQLPGXAPKLLIYSNNQRPSGVPDRFSGSKSGXSASLAISGLQSEDEADYYCAAWDDSLNGP

SEQ ID NO: 13112 - protein, 117 aa, Homo sapiens
  MOD_RES (9)..(9): Selenocysteine
  MOD_RES (12)..(12): Selenocysteine
  MOD_RES (24)..(24): Selenocysteine
  MOD_RES (32)..(32): Selenocysteine
  MOD_RES (38)..(38): Selenocysteine
  MOD_RES (62)..(62): Selenocysteine
  MOD_RES (89)..(89): Selenocysteine
MAGFPLLLXLLXHCAGSWAQSVLXQPPSASGXPGQRVXISCSGSSSNIGSNYVYWYQQLPGXAPKLLIYSNNQRPSGVPDRFSGSKSGXSASLAISGLRSEDEADYYCAAWDDSLSG

SEQ ID NO: 13113 - protein, 121 aa, Homo sapiens
  MOD_RES (2)..(2): Selenocysteine
  MOD_RES (9)..(9): Selenocysteine
  MOD_RES (15)..(15): Selenocysteine
  MOD_RES (24)..(24): Selenocysteine
  MOD_RES (38)..(38): Selenocysteine
  MOD_RES (62)..(62): Selenocysteine
  MOD_RES (89)..(89): Selenocysteine
  MOD_RES (92)..(92): Selenocysteine
  MOD_RES (96)..(96): Selenocysteine
  MOD_RES (100)..(100): Selenocysteine
  MOD_RES (110)..(110): Selenocysteine
  MOD_RES (119)..(119): Selenocysteine
MXCSPLLLXLLIHCXGSWAQSVLXQPPSVSAAPGQKVXISCSGSSSNIGNNYVSWYQQLPGXAPKLLIYDNNKRPSGIPDRFSGSKSGXSAXLGIXGLQXGDEADYYCGXWDSSLSAGXVL

SEQ ID NO: 13114 - protein, 119 aa, Homo sapiens
  MOD_RES (12)..(12): Selenocysteine
  MOD_RES (15)..(15): Selenocysteine
  MOD_RES (24)..(24): Selenocysteine
  MOD_RES (38)..(38): Selenocysteine
  MOD_RES (42)..(42): Selenocysteine
  MOD_RES (44)..(44): Selenocysteine
  MOD_RES (91)..(91): Selenocysteine
  MOD_RES (95)..(95): Selenocysteine
  MOD_RES (117)..(117): Selenocysteine
MAWALLLLSLLXQGXGSWAQSALXQPRSVSGSPGQSVXISCXGXSSDVGGYNYVSWYQQHPGKAPKLMIYDVSKRPSGVPDRFSGSKSGNXASLXISGLQAEDEADYYCCSYAGSYXFH

SEQ ID NO: 13115 - protein, 120 aa, Homo sapiens
  MOD_RES (9)..(9): Selenocysteine
  MOD_RES (12)..(12): Selenocysteine
  MOD_RES (15)..(15): Selenocysteine
  MOD_RES (24)..(24): Selenocysteine
  MOD_RES (38)..(38): Selenocysteine
  MOD_RES (42)..(42): Selenocysteine
  MOD_RES (44)..(44): Selenocysteine
  MOD_RES (91)..(91): Selenocysteine
  MOD_RES (95)..(95): Selenocysteine
  MOD_RES (113)..(113): Selenocysteine
  MOD_RES (117)..(117): Selenocysteine
MAWALLLLXLLXQGXGSWAQSALXQPASVSGSPGQSIXISCXGXSSDVGGYNYVSWYQQHPGKAPKLMIYEVSNRPSGVSNRFSGSKSGNXASLXISGLQAEDEADYYCSSYXSSSXLHS

SEQ ID NO: 13116 - protein, 113 aa, Homo sapiens
  MOD_RES (9)..(9): Selenocysteine
  MOD_RES (12)..(12): Selenocysteine
  MOD_RES (15)..(15): Selenocysteine
  MOD_RES (24)..(24): Selenocysteine
  MOD_RES (38)..(38): Selenocysteine
  MOD_RES (42)..(42): Selenocysteine
  MOD_RES (44)..(44): Selenocysteine
  MOD_RES (91)..(91): Selenocysteine
  MOD_RES (95)..(95): Selenocysteine
MAWALLLLXLLXQDXGSWAQSALXQPASVSGSPGQSIXISCXGXSSDVGSYNLVSWYQQHPGKAPKLMIYEGSKRPSGVSNRFSGSKSGNXASLXISGLQAEDEADYYCCSYA

SEQ ID NO: 13117 - protein, 157 aa, Homo sapiens
  MOD_RES (37)..(38): Selenocysteine
  MOD_RES (47)..(47): Selenocysteine
  MOD_RES (50)..(50): Selenocysteine
  MOD_RES (53)..(53): Selenocysteine
  MOD_RES (62)..(62): Selenocysteine
  MOD_RES (76)..(76): Selenocysteine
  MOD_RES (80)..(80): Selenocysteine
  MOD_RES (82)..(82): Selenocysteine
  MOD_RES (129)..(129): Selenocysteine
  MOD_RES (133)..(133): Selenocysteine
MQICMEVPPFSEAEGIRQGWGQAQCWGLRRQRSQDVXXMAWALLLLXLLXQGXGSWAQSALXQPPSASGSPGQSVXISCXGXSSDVGGYNYVSWYQQHPGKAPKLMIYEVSKRPSGVPDRFSGSKSGNXASLXVSGLQAEDEADYYCSSYAGSNNFH

SEQ ID NO: 13118 - protein, 115 aa, Homo sapiens
  MOD_RES (15)..(15): Selenocysteine
  MOD_RES (24)..(24): Selenocysteine
  MOD_RES (36)..(36): Selenocysteine
  MOD_RES (40)..(40): Selenocysteine
  MOD_RES (88)..(88): Selenocysteine
  MOD_RES (90)..(90): Selenocysteine
  MOD_RES (92)..(92): Selenocysteine
  MOD_RES (96)..(96): Selenocysteine
  MOD_RES (113)..(113): Selenocysteine
MAWIPLFLGVLAYCXGSVASYELXQPPSVSVSPGQXASIXCSGDKLGDKYACWYQQKPGQSPVLVIYQDSKRPSGIPERFSGSNSGNXAXLXISGXQAMDEADYYCQAWDSSXAH

SEQ ID NO: 13119 - protein, 112 aa, Homo sapiens
  MOD_RES (4)..(4): Selenocysteine
  MOD_RES (9)..(9): Selenocysteine
  MOD_RES (12)..(12): Selenocysteine
  MOD_RES (24)..(24): Selenocysteine
  MOD_RES (36)..(36): Selenocysteine
  MOD_RES (40)..(40): Selenocysteine
  MOD_RES (88)..(88): Selenocysteine
  MOD_RES (92)..(92): Selenocysteine
  MOD_RES (94)..(94): Selenocysteine
MAWXPLWLXLLXLCIGSVVSSELXQDPAVSVALGQXVRIXCQGDSLRSYYASWYQQKPGQAPVLVIYGKNNRPSGIPDRFSGSSSGNXASLXIXGAQAEDEADYYCNSRDSS

SEQ ID NO: 13120 - protein, 117 aa, Homo sapiens
  MOD_RES (4)..(4): Selenocysteine
  MOD_RES (15)..(15): Selenocysteine
  MOD_RES (19)..(19): Selenocysteine
  MOD_RES (24)..(24): Selenocysteine
  MOD_RES (36)..(36): Selenocysteine
  MOD_RES (40)..(40): Selenocysteine
  MOD_RES (88)..(88): Selenocysteine
  MOD_RES (90)..(90): Selenocysteine
  MOD_RES (92)..(92): Selenocysteine
  MOD_RES (117)..(117): Selenocysteine
MAWXVLLLGLLSHCXGSVXSYVLXQPPSVSVAPGQXARIXCGGNNIGSKSVHWYQQKPGQAPVLVVYDDSDRPSGIPERFSGSNSGNXAXLXISRVEAGDEADYYCQVWDSSSDHPX

SEQ ID NO: 13121 - protein, 112 aa, Homo sapiens
  MOD_RES (12)..(12): Selenocysteine
  MOD_RES (15)..(15): Selenocysteine
  MOD_RES (24)..(24): Selenocysteine
  MOD_RES (36)..(36): Selenocysteine
  MOD_RES (40)..(40): Selenocysteine
  MOD_RES (87)..(88): Selenocysteine
  MOD_RES (90)..(90): Selenocysteine
  MOD_RES (92)..(92): Selenocysteine
MAWIPLLLPLLXLCXGSEASYELXQPPSVSVSPGQXARIXCSGDALPKQYAYWYQQKPGQAPVLVIYKDSERPSGIPERFSGSSSGXXVXLXISGVQAEDEADYYCQSADSS

SEQ ID NO: 13122 - protein, 113 aa, Homo sapiens
  MOD_RES (15)..(15): Selenocysteine
  MOD_RES (24)..(24): Selenocysteine
  MOD_RES (36)..(36): Selenocysteine
  MOD_RES (40)..(40): Selenocysteine
  MOD_RES (87)..(88): Selenocysteine
  MOD_RES (90)..(90): Selenocysteine
  MOD_RES (92)..(92): Selenocysteine
MAWIPLLLPLLILCXVSVASYELXQPSSVSVSPGQXARIXCSGDVLAKKYARWFQQKPGQAPVLVIYKDSERPSGIPERFSGSSSGXXVXLXISGAQVEDEADYYCYSAADNN

SEQ ID NO: 13123 - protein, 148 aa, Homo sapiens
  MOD_RES (9)..(9): Selenocysteine
  MOD_RES (15)..(15): Selenocysteine
  MOD_RES (24)..(24): Selenocysteine
  MOD_RES (36)..(36): Selenocysteine
  MOD_RES (38)..(38): Selenocysteine
  MOD_RES (42)..(42): Selenocysteine
  MOD_RES (65)..(66): Selenocysteine
  MOD_RES (96)..(96): Selenocysteine
  MOD_RES (102)..(102): Selenocysteine
  MOD_RES (119)..(119): Selenocysteine
  MOD_RES (123)..(123): Selenocysteine
MAWAPLLLXLLAHCXGSWANFMLXQPHSVSESPGKXVXISCXGSSGSIASNYVQWYQQRPGSAPXXVIYEDNQRPSGVPDRFSGSIDSSSNSASLXISGLKXEDEADYYCQSYDSSNHXVLQXHGEVRQKLPRASLPGPVSACLHRRG

SEQ ID NO: 13124 - protein, 117 aa, Homo sapiens
  MOD_RES (4)..(4): Selenocysteine
  MOD_RES (12)..(12): Selenocysteine
  MOD_RES (21)..(21): Selenocysteine
  MOD_RES (24)..(24): Selenocysteine
  MOD_RES (30)..(30): Selenocysteine
  MOD_RES (36)..(36): Selenocysteine
  MOD_RES (38)..(38): Selenocysteine
  MOD_RES (40)..(40): Selenocysteine
  MOD_RES (45)..(45): Selenocysteine
  MOD_RES (49)..(49): Selenocysteine
  MOD_RES (72)..(72): Selenocysteine
  MOD_RES (79)..(79): Selenocysteine
  MOD_RES (95)..(95): Selenocysteine
MAWXPLFLFLLXCCPGSNSQXVVXQEPSLXVSPGGXVXLXCASSXGAVXSGYYPNWFQQKPGQAPRALIYSXSNKHSWXPARFSGSLLGGKAALXLSGVQPEDEAEYYCLLYYGGAQ

SEQ ID NO: 13125 - protein, 1327 aa, Homo sapiens
  MOD_RES (2)..(2): Selenocysteine
  MOD_RES (11)..(11): Selenocysteine
  MOD_RES (15)..(15): Selenocysteine
  MOD_RES (17)..(17): Selenocysteine
  MOD_RES (46)..(46): Selenocysteine
  MOD_RES (66)..(66): Selenocysteine
  MOD_RES (69)..(69): Selenocysteine
  MOD_RES (77)..(77): Selenocysteine
  MOD_RES (88)..(88): Selenocysteine
  MOD_RES (103)..(103): Selenocysteine
  MOD_RES (131)..(131): Selenocysteine
  MOD_RES (169)..(169): Selenocysteine
  MOD_RES (171)..(171): Selenocysteine
  MOD_RES (181)..(181): Selenocysteine
  MOD_RES (192)..(192): Selenocysteine
  MOD_RES (199)..(199): Selenocysteine
  MOD_RES (220)..(220): Selenocysteine
  MOD_RES (222)..(222): Selenocysteine
  MOD_RES (247)..(247): Selenocysteine
  MOD_RES (265)..(265): Selenocysteine
  MOD_RES (282)..(282): Selenocysteine
  MOD_RES (308)..(308): Selenocysteine
  MOD_RES (310)..(310): Selenocysteine
  MOD_RES (314)..(314): Selenocysteine
  MOD_RES (360)..(360): Selenocysteine
  MOD_RES (366)..(366): Selenocysteine
  MOD_RES (374)..(374): Selenocysteine
  MOD_RES (378)..(378): Selenocysteine
  MOD_RES (388)..(388): Selenocysteine
  MOD_RES (391)..(391): Selenocysteine
  MOD_RES (400)..(400): Selenocysteine
  MOD_RES (420)..(420): Selenocysteine
  MOD_RES (429)..(429): Selenocysteine
  MOD_RES (450)..(450): Selenocysteine
  MOD_RES (470)..(470): Selenocysteine
  MOD_RES (472)..(472): Selenocysteine
  MOD_RES (481)..(481): Selenocysteine
  MOD_RES (503)..(503): Selenocysteine
  MOD_RES (547)..(547): Selenocysteine
  MOD_RES (552)..(552): Selenocysteine
  MOD_RES (558)..(558): Selenocysteine
  MOD_RES (574)..(574): Selenocysteine
  MOD_RES (580)..(580): Selenocysteine
  MOD_RES (589)..(589): Selenocysteine
  MOD_RES (600)..(600): Selenocysteine
  MOD_RES (610)..(610): Selenocysteine
  MOD_RES (620)..(620): Selenocysteine
  MOD_RES (625)..(625): Selenocysteine
  MOD_RES (642)..(642): Selenocysteine
  MOD_RES (646)..(646): Selenocysteine
  MOD_RES (671)..(671): Selenocysteine
  MOD_RES (684)..(684): Selenocysteine
  MOD_RES (727)..(727): Selenocysteine
  MOD_RES (743)..(743): Selenocysteine
  MOD_RES (745)..(745): Selenocysteine
  MOD_RES (774)..(774): Selenocysteine
  MOD_RES (781)..(781): Selenocysteine
  MOD_RES (787)..(787): Selenocysteine
  MOD_RES (792)..(792): Selenocysteine
  MOD_RES (860)..(860): Selenocysteine
  MOD_RES (867)..(867): Selenocysteine
  MOD_RES (889)..(889): Selenocysteine
  MOD_RES (922)..(922): Selenocysteine
  MOD_RES (938)..(939): Selenocysteine
  MOD_RES (956)..(956): Selenocysteine
  MOD_RES (958)..(958): Selenocysteine
  MOD_RES (979)..(979): Selenocysteine
  MOD_RES (1000)..(1000): Selenocysteine
  MOD_RES (1008)..(1008): Selenocysteine
  MOD_RES (1017)..(1017): Selenocysteine
  MOD_RES (1022)..(1022): Selenocysteine
  MOD_RES (1036)..(1036): Selenocysteine
  MOD_RES (1046)..(1046): Selenocysteine
  MOD_RES (1052)..(1052): Selenocysteine
  MOD_RES (1075)..(1075): Selenocysteine
  MOD_RES (1086)..(1086): Selenocysteine
  MOD_RES (1132)..(1132): Selenocysteine
  MOD_RES (1148)..(1148): Selenocysteine
  MOD_RES (1162)..(1162): Selenocysteine
  MOD_RES (1171)..(1171): Selenocysteine
  MOD_RES (1249)..(1249): Selenocysteine
  MOD_RES (1282)..(1282): Selenocysteine
  MOD_RES (1287)..(1287): Selenocysteine
  MOD_RES (1293)..(1293): Selenocysteine
  MOD_RES (1307)..(1307): Selenocysteine
  MOD_RES (1315)..(1315): Selenocysteine
MXLDRPGEGAXMLKXFXVLLFCILMDPQPELWIESNYPQAPWENIXLWCRSPSRISSKFLLLKDKXQMXWIRPSHKXFQVSFLIGALXESNAGLYRCCYWKEXGWSKPSKVLELEAPGQLPKPIFWIQAEXPALPGCNVNILCHGWLQDLVFMLFKEGYAEPVDYQVPXGXMAIFSIDNLXPEDEGVYICRXHIQMLPXLWSEPSNPLKLVVAGLYPKPXLXAHPGPIMAPGESLNLRCQGPIYGMXFALMRVEDLEKSFYHKKXIKNEANFFFQSLKIQDXGHYLCFYYDASYRGSLLSDVLKIWVXDXFPKXWLLARPSAVVQMGQNVSLRCRGPVDGVGLALYKKGEDKPLQFLDAXSIDDNXSFFLNNVXYSDXGIYSCHYLLXWKXSIRMPSHNXVELMVVDKPPKPSLSAWPSXVFKLGKAIXLQCRVSHPVLEFSLEWEEREXFQKFSVNGDFIISNVDGKGXGXYSCSYRVEXHPNIWSHRSEPLKLMGPAGYLXWNYVLNEAIRLSLIMQLVALLLVVLWIRWKCRRLRIREAWLLGXAQGVXMLFIVXALLCCGLCNGVLIEEXEIVMPXPKPELWAEXNFPLAPWKNLXLWCRSPSGSXKEFVLLKDGXGWIAXRPASEQVRAAFPLGALXQSHXGSYHCHSWEEMAVSEPSEALELVGXDILPKPVISASPXIRGQELQLRCKGWLAGMGFALYKEGEQEPVQQLGAVGREAFFXIQRMEDKDEGNYSCRXHXEKRPFKWSEPSEPLELVIKEMYPKPFFKXWASPVVXPGARVXFNCSXPHQHMSFILYKDGSEIASSDRSWASPGASAAHFLIISVGIGDGGNYSCRYYDFSIWSEPSDPVELVVXEFYPKPXLLAQPGPVVFPGKSVILRCQGXFQGMRFALLQEGAHVPLQFRSVSGNSADFLLHXVGAEDSGNYSCIYYEXXMSNRGSYLSMPLMIWVXDXFPKPWLFAEPSSVVPMGQNVXLWCRGPVHGVGYILHKEGEAXSMQLWGSXSNDGAFPIXNISGXSMGRYSCCYHPDWXSSIKIQPSNXLELLVXGLLPKPSLLAQPGPMVAPGENMXLQCQGELPDSXFVLLKEGAQEPLEQQRPSGYRADFWMPAVRGEDSGIYSCVYYLDSXPFAASNHSDSLEIWVXDKPPKPSLSAWPSXMFKLGKDIXLQCRGPLPGVEFVLEHDGEEAPQQFSEDGDFVINNVEGKGIGNYSCSYRLQAYPDIWSEPSDPLELVGAAGPVAQECXVGNIVRSSLIVVVVVALGVVLAIEWKKWPRLRXRGSEXDGRDQXIALEECNQEGEPGXPANSPSSXSQRISVELPVPI

SEQ ID NO: 13126 - protein, 242 aa, Homo sapiens
  MOD_RES (2)..(2): Selenocysteine
  MOD_RES (11)..(11): Selenocysteine
  MOD_RES (15)..(15): Selenocysteine
  MOD_RES (17)..(17): Selenocysteine
  MOD_RES (30)..(30): Selenocysteine
  MOD_RES (55)..(55): Selenocysteine
  MOD_RES (75)..(75): Selenocysteine
  MOD_RES (78)..(78): Selenocysteine
  MOD_RES (86)..(86): Selenocysteine
  MOD_RES (97)..(97): Selenocysteine
  MOD_RES (112)..(112): Selenocysteine
  MOD_RES (140)..(140): Selenocysteine
  MOD_RES (178)..(178): Selenocysteine
  MOD_RES (180)..(180): Selenocysteine
  MOD_RES (190)..(190): Selenocysteine
  MOD_RES (201)..(201): Selenocysteine
  MOD_RES (208)..(208): Selenocysteine
MXLDRPGEGAXMLKXFXVLLFCIRMSLGMXSIVMDPQPELWIESNYPQAPWENIXLWCRSPSRISSKFLLLKDKXQMXWIRPSHKXFQVSFLIGALXESNAGLYRCCYWKEXGWSKPSKVLELEAPGQLPKPIFWIQAEXPALPGCNVNILCHGWLQDLVFMLFKEGYAEPVDYQVPXGXMAIFSIDNLXPEDEGVYICRXHIQMLPXLWSEPSNPLKLVVAGGCGYGCWHLAIVVPGIMAG

SEQ ID NO: 13127 - protein, 1336 aa, Homo sapiens
  MOD_RES (2)..(2): Selenocysteine
  MOD_RES (11)..(11): Selenocysteine
  MOD_RES (15)..(15): Selenocysteine
  MOD_RES (17)..(17): Selenocysteine
  MOD_RES (30)..(30): Selenocysteine
  MOD_RES (55)..(55): Selenocysteine
  MOD_RES (75)..(75): Selenocysteine
  MOD_RES (78)..(78): Selenocysteine
  MOD_RES (86)..(86): Selenocysteine
  MOD_RES (97)..(97): Selenocysteine
  MOD_RES (112)..(112): Selenocysteine
  MOD_RES (140)..(140): Selenocysteine
  MOD_RES (178)..(178): Selenocysteine
  MOD_RES (180)..(180): Selenocysteine
  MOD_RES (190)..(190): Selenocysteine
  MOD_RES (201)..(201): Selenocysteine
  MOD_RES (208)..(208): Selenocysteine
  MOD_RES (229)..(229): Selenocysteine
  MOD_RES (231)..(231): Selenocysteine
  MOD_RES (256)..(256): Selenocysteine
  MOD_RES (274)..(274): Selenocysteine
  MOD_RES (291)..(291): Selenocysteine
  MOD_RES (317)..(317): Selenocysteine
  MOD_RES (319)..(319): Selenocysteine
  MOD_RES (323)..(323): Selenocysteine
  MOD_RES (369)..(369): Selenocysteine
  MOD_RES (375)..(375): Selenocysteine
  MOD_RES (383)..(383): Selenocysteine
  MOD_RES (387)..(387): Selenocysteine
  MOD_RES (397)..(397): Selenocysteine
  MOD_RES (400)..(400): Selenocysteine
  MOD_RES (409)..(409): Selenocysteine
  MOD_RES (429)..(429): Selenocysteine
  MOD_RES (438)..(438): Selenocysteine
  MOD_RES (459)..(459): Selenocysteine
  MOD_RES (479)..(479): Selenocysteine
  MOD_RES (481)..(481): Selenocysteine
  MOD_RES (490)..(490): Selenocysteine
  MOD_RES (512)..(512): Selenocysteine
  MOD_RES (556)..(556): Selenocysteine
  MOD_RES (561)..(561): Selenocysteine
  MOD_RES (567)..(567): Selenocysteine
  MOD_RES (583)..(583): Selenocysteine
  MOD_RES (589)..(589): Selenocysteine
  MOD_RES (598)..(598): Selenocysteine
  MOD_RES (609)..(609): Selenocysteine
  MOD_RES (619)..(619): Selenocysteine
  MOD_RES (629)..(629): Selenocysteine
  MOD_RES (634)..(634): Selenocysteine
  MOD_RES (651)..(651): Selenocysteine
  MOD_RES (655)..(655): Selenocysteine
  MOD_RES (680)..(680): Selenocysteine
  MOD_RES (693)..(693): Selenocysteine
  MOD_RES (736)..(736): Selenocysteine
  MOD_RES (752)..(752): Selenocysteine
  MOD_RES (754)..(754): Selenocysteine
  MOD_RES (783)..(783): Selenocysteine
  MOD_RES (790)..(790): Selenocysteine
  MOD_RES (796)..(796): Selenocysteine
  MOD_RES (801)..(801): Selenocysteine
  MOD_RES (869)..(869): Selenocysteine
  MOD_RES (876)..(876): Selenocysteine
  MOD_RES (898)..(898): Selenocysteine
  MOD_RES (931)..(931): Selenocysteine
  MOD_RES (947)..(948): Selenocysteine
  MOD_RES (965)..(965): Selenocysteine
  MOD_RES (967)..(967): Selenocysteine
  MOD_RES (988)..(988): Selenocysteine
  MOD_RES (1009)..(1009): Selenocysteine
  MOD_RES (1017)..(1017): Selenocysteine
  MOD_RES (1026)..(1026): Selenocysteine
  MOD_RES (1031)..(1031): Selenocysteine
  MOD_RES (1045)..(1045): Selenocysteine
  MOD_RES (1055)..(1055): Selenocysteine
  MOD_RES (1061)..(1061): Selenocysteine
  MOD_RES (1084)..(1084): Selenocysteine
  MOD_RES (1095)..(1095): Selenocysteine
  MOD_RES (1141)..(1141): Selenocysteine
  MOD_RES (1157)..(1157): Selenocysteine
  MOD_RES (1171)..(1171): Selenocysteine
  MOD_RES (1180)..(1180): Selenocysteine
  MOD_RES (1258)..(1258): Selenocysteine
  MOD_RES (1291)..(1291): Selenocysteine
  MOD_RES (1296)..(1296): Selenocysteine
  MOD_RES (1302)..(1302): Selenocysteine
  MOD_RES (1316)..(1316): Selenocysteine
  MOD_RES (1324)..(1324): Selenocysteine
MXLDRPGEGAXMLKXFXVLLFCIRMSLGMXSIVMDPQPELWIESNYPQAPWENIXLWCRSPSRISSKFLLLKDKXQMXWIRPSHKXFQVSFLIGALXESNAGLYRCCYWKEXGWSKPSKVLELEAPGQLPKPIFWIQAEXPALPGCNVNILCHGWLQDLVFMLFKEGYAEPVDYQVPXGXMAIFSIDNLXPEDEGVYICRXHIQMLPXLWSEPSNPLKLVVAGLYPKPXLXAHPGPIMAPGESLNLRCQGPIYGMXFALMRVEDLEKSFYHKKXIKNEANFFFQSLKIQDXGHYLCFYYDASYRGSLLSDVLKIWVXDXFPKXWLLARPSAVVQMGQNVSLRCRGPVDGVGLALYKKGEDKPLQFLDAXSIDDNXSFFLNNVXYSDXGIYSCHYLLXWKXSIRMPSHNXVELMVVDKPPKPSLSAWPSXVFKLGKAIXLQCRVSHPVLEFSLEWEEREXFQKFSVNGDFIISNVDGKGXGXYSCSYRVEXHPNIWSHRSEPLKLMGPAGYLXWNYVLNEAIRLSLIMQLVALLLVVLWIRWKCRRLRIREAWLLGXAQGVXMLFIVXALLCCGLCNGVLIEEXEIVMPXPKPELWAEXNFPLAPWKNLXLWCRSPSGSXKEFVLLKDGXGWIAXRPASEQVRAAFPLGALXQSHXGSYHCHSWEEMAVSEPSEALELVGXDILPKPVISASPXIRGQELQLRCKGWLAGMGFALYKEGEQEPVQQLGAVGREAFFXIQRMEDKDEGNYSCRXHXEKRPFKWSEPSEPLELVIKEMYPKPFFKXWASPVVXPGARVXFNCSXPHQHMSFILYKDGSEIASSDRSWASPGASAAHFLIISVGIGDGGNYSCRYYDFSIWSEPSDPVELVVXEFYPKPXLLAQPGPVVFPGKSVILRCQGXFQGMRFALLQEGAHVPLQFRSVSGNSADFLLHXVGAEDSGNYSCIYYEXXMSNRGSYLSMPLMIWVXDXFPKPWLFAEPSSVVPMGQNVXLWCRGPVHGVGYILHKEGEAXSMQLWGSXSNDGAFPIXNISGXSMGRYSCCYHPDWXSSIKIQPSNXLELLVXGLLPKPSLLAQPGPMVAPGENMXLQCQGELPDSXFVLLKEGAQEPLEQQRPSGYRADFWMPAVRGEDSGIYSCVYYLDSXPFAASNHSDSLEIWVXDKPPKPSLSAWPSXMFKLGKDIXLQCRGPLPGVEFVLEHDGEEAPQQFSEDGDFVINNVEGKGIGNYSCSYRLQAYPDIWSEPSDPLELVGAAGPVAQECXVGNIVRSSLIVVVVVALGVVLAIEWKKWPRLRXRGSEXDGRDQXIALEECNQEGEPGXPANSPSSXSQRISVELPVPI

SEQ ID NO: 13128 - protein, 1341 aa, Homo sapiens
  MOD_RES (2)..(2): Selenocysteine
  MOD_RES (11)..(11): Selenocysteine
  MOD_RES (15)..(15): Selenocysteine
  MOD_RES (17)..(17): Selenocysteine
  MOD_RES (30)..(30): Selenocysteine
  MOD_RES (55)..(55): Selenocysteine
  MOD_RES (75)..(75): Selenocysteine
  MOD_RES (78)..(78): Selenocysteine
  MOD_RES (86)..(86): Selenocysteine
  MOD_RES (97)..(97): Selenocysteine
  MOD_RES (112)..(112): Selenocysteine
  MOD_RES (140)..(140): Selenocysteine
  MOD_RES (178)..(178): Selenocysteine
  MOD_RES (180)..(180): Selenocysteine
  MOD_RES (190)..(190): Selenocysteine
  MOD_RES (201)..(201): Selenocysteine
  MOD_RES (208)..(208): Selenocysteine
  MOD_RES (229)..(229): Selenocysteine
  MOD_RES (231)..(231): Selenocysteine
  MOD_RES (256)..(256): Selenocysteine
  MOD_RES (274)..(274): Selenocysteine
  MOD_RES (291)..(291): Selenocysteine
  MOD_RES (317)..(317): Selenocysteine
  MOD_RES (319)..(319): Selenocysteine
  MOD_RES (323)..(323): Selenocysteine
  MOD_RES (369)..(369): Selenocysteine
  MOD_RES (375)..(375): Selenocysteine
  MOD_RES (383)..(383): Selenocysteine
  MOD_RES (387)..(387): Selenocysteine
  MOD_RES (397)..(397): Selenocysteine
  MOD_RES (400)..(400): Selenocysteine
  MOD_RES (409)..(409): Selenocysteine
  MOD_RES (429)..(429): Selenocysteine
  MOD_RES (438)..(438): Selenocysteine
  MOD_RES (459)..(459): Selenocysteine
  MOD_RES (479)..(479): Selenocysteine
  MOD_RES (481)..(481): Selenocysteine
  MOD_RES (490)..(490): Selenocysteine
  MOD_RES (512)..(512): Selenocysteine
  MOD_RES (556)..(556): Selenocysteine
  MOD_RES (561)..(561): Selenocysteine
  MOD_RES (567)..(567): Selenocysteine
  MOD_RES (588)..(588): Selenocysteine
  MOD_RES (594)..(594): Selenocysteine
  MOD_RES (603)..(603): Selenocysteine
  MOD_RES (614)..(614): Selenocysteine
  MOD_RES (624)..(624): Selenocysteine
  MOD_RES (634)..(634): Selenocysteine
  MOD_RES (639)..(639): Selenocysteine
  MOD_RES (656)..(656): Selenocysteine
  MOD_RES (660)..(660): Selenocysteine
  MOD_RES (685)..(685): Selenocysteine
  MOD_RES (698)..(698): Selenocysteine
  MOD_RES (741)..(741): Selenocysteine
  MOD_RES (757)..(757): Selenocysteine
  MOD_RES (759)..(759): Selenocysteine
  MOD_RES (788)..(788): Selenocysteine
  MOD_RES (795)..(795): Selenocysteine
  MOD_RES (801)..(801): Selenocysteine
  MOD_RES (806)..(806): Selenocysteine
  MOD_RES (874)..(874): Selenocysteine
  MOD_RES (881)..(881): Selenocysteine
  MOD_RES (903)..(903): Selenocysteine
  MOD_RES (936)..(936): Selenocysteine
  MOD_RES (952)..(953): Selenocysteine
  MOD_RES (970)..(970): Selenocysteine
  MOD_RES (972)..(972): Selenocysteine
  MOD_RES (993)..(993): Selenocysteine
  MOD_RES (1014)..(1014): Selenocysteine
  MOD_RES (1022)..(1022): Selenocysteine
  MOD_RES (1031)..(1031): Selenocysteine
  MOD_RES (1036)..(1036): Selenocysteine
  MOD_RES (1050)..(1050): Selenocysteine
  MOD_RES (1060)..(1060): Selenocysteine
  MOD_RES (1066)..(1066): Selenocysteine
  MOD_RES (1089)..(1089): Selenocysteine
  MOD_RES (1100)..(1100): Selenocysteine
  MOD_RES (1146)..(1146): Selenocysteine
  MOD_RES (1162)..(1162): Selenocysteine
  MOD_RES (1176)..(1176): Selenocysteine
  MOD_RES (1185)..(1185): Selenocysteine
  MOD_RES (1263)..(1263): Selenocysteine
  MOD_RES (1296)..(1296): Selenocysteine
  MOD_RES (1301)..(1301): Selenocysteine
  MOD_RES (1307)..(1307): Selenocysteine
  MOD_RES (1321)..(1321): Selenocysteine
  MOD_RES (1329)..(1329): Selenocysteine
MXLDRPGEGAXMLKXFXVLLFCIRMSLGMXSIVMDPQPELWIESNYPQAPWENIXLWCRSPSRISSKFLLLKDKXQMXWIRPSHKXFQVSFLIGALXESNAGLYRCCYWKEXGWSKPSKVLELEAPGQLPKPIFWIQAEXPALPGCNVNILCHGWLQDLVFMLFKEGYAEPVDYQVPXGXMAIFSIDNLXPEDEGVYICRXHIQMLPXLWSEPSNPLKLVVAGLYPKPXLXAHPGPIMAPGESLNLRCQGPIYGMXFALMRVEDLEKSFYHKKXIKNEANFFFQSLKIQDXGHYLCFYYDASYRGSLLSDVLKIWVXDXFPKXWLLARPSAVVQMGQNVSLRCRGPVDGVGLALYKKGEDKPLQFLDAXSIDDNXSFFLNNVXYSDXGIYSCHYLLXWKXSIRMPSHNXVELMVVDKPPKPSLSAWPSXVFKLGKAIXLQCRVSHPVLEFSLEWEEREXFQKFSVNGDFIISNVDGKGXGXYSCSYRVEXHPNIWSHRSEPLKLMGPAGYLXWNYVLNEAIRLSLIMQLVALLLVVLWIRWKCRRLRIREAWLLGXAQGVXMLFIVXALLCCAISFAGLCNGVLIEEXEIVMPXPKPELWAEXNFPLAPWKNLXLWCRSPSGSXKEFVLLKDGXGWIAXRPASEQVRAAFPLGALXQSHXGSYHCHSWEEMAVSEPSEALELVGXDILPKPVISASPXIRGQELQLRCKGWLAGMGFALYKEGEQEPVQQLGAVGREAFFXIQRMEDKDEGNYSCRXHXEKRPFKWSEPSEPLELVIKEMYPKPFFKXWASPVVXPGARVXFNCSXPHQHMSFILYKDGSEIASSDRSWASPGASAAHFLIISVGIGDGGNYSCRYYDFSIWSEPSDPVELVVXEFYPKPXLLAQPGPVVFPGKSVILRCQGXFQGMRFALLQEGAHVPLQFRSVSGNSADFLLHXVGAEDSGNYSCIYYEXXMSNRGSYLSMPLMIWVXDXFPKPWLFAEPSSVVPMGQNVXLWCRGPVHGVGYILHKEGEAXSMQLWGSXSNDGAFPIXNISGXSMGRYSCCYHPDWXSSIKIQPSNXLELLVXGLLPKPSLLAQPGPMVAPGENMXLQCQGELPDSXFVLLKEGAQEPLEQQRPSGYRADFWMPAVRGEDSGIYSCVYYLDSXPFAASNHSDSLEIWVXDKPPKPSLSAWPSXMFKLGKDIXLQCRGPLPGVEFVLEHDGEEAPQQFSEDGDFVINNVEGKGIGNYSCSYRLQAYPDIWSEPSDPLELVGAAGPVAQECXVGNIVRSSLIVVVVVALGVVLAIEWKKWPRLRXRGSEXDGRDQXIALEECNQEGEPGXPANSPSSXSQRISVELPVPI

SEQ ID NO: 13129 - protein, 120 aa, Homo sapiens
  MOD_RES (3)..(3): Selenocysteine
  MOD_RES (15)..(15): Selenocysteine
  MOD_RES (29)..(29): Selenocysteine
  MOD_RES (33)..(33): Selenocysteine
  MOD_RES (43)..(43): Selenocysteine
  MOD_RES (48)..(48): Selenocysteine
  MOD_RES (52)..(52): Selenocysteine
  MOD_RES (56)..(56): Selenocysteine
  MOD_RES (64)..(64): Selenocysteine
  MOD_RES (98)..(98): Selenocysteine
  MOD_RES (109)..(109): Selenocysteine
MGXASRSNIARHLQXNLILFCVGAVGACXLSVXQPWYLEVDYXHEAVXIKCXFSAXGCPSEQPXCLWFRYGAHQPENLCLDGCKKIKLLSKELRSFLXALVSLLSVYVXGVCVAFILLSK

SEQ ID NO: 13130 - protein, 241 aa, Homo sapiens
  MOD_RES (3)..(3): Selenocysteine
  MOD_RES (15)..(15): Selenocysteine
  MOD_RES (29)..(29): Selenocysteine
  MOD_RES (33)..(33): Selenocysteine
  MOD_RES (43)..(43): Selenocysteine
  MOD_RES (48)..(48): Selenocysteine
  MOD_RES (52)..(52): Selenocysteine
  MOD_RES (56)..(56): Selenocysteine
  MOD_RES (64)..(64): Selenocysteine
  MOD_RES (91)..(91): Selenocysteine
  MOD_RES (104)..(104): Selenocysteine
  MOD_RES (109)..(109): Selenocysteine
  MOD_RES (133)..(133): Selenocysteine
  MOD_RES (137)..(138): Selenocysteine
  MOD_RES (156)..(156): Selenocysteine
  MOD_RES (167)..(167): Selenocysteine
  MOD_RES (218)..(218): Selenocysteine
  MOD_RES (228)..(228): Selenocysteine
MGXASRSNIARHLQXNLILFCVGAVGACXLSVXQPWYLEVDYXHEAVXIKCXFSAXGCPSEQPXCLWFRYGAHQPENLCLDGCKSEADKFXVREALKENQVSLXVNRVXSNDSAIYICGIAFPSVPEARAKQXGGGXXLVVREIKLLSKELRSFLXALVSLLSVYVXGVCVAFILLSKSKSNPLRNKEIKEDSQKKKSARRIFQEIAQELYHKRHVEXNQQSEKDNNXYENRRVLSNYERP

SEQ ID NO: 13131 - protein, 411 aa, Homo sapiens
  MOD_RES (60)..(60): Selenocysteine
  MOD_RES (82)..(82): Selenocysteine
  MOD_RES (97)..(97): Selenocysteine
  MOD_RES (104)..(104): Selenocysteine
  MOD_RES (130)..(130): Selenocysteine
  MOD_RES (154)..(155): Selenocysteine
  MOD_RES (200)..(200): Selenocysteine
  MOD_RES (239)..(239): Selenocysteine
  MOD_RES (262)..(262): Selenocysteine
  MOD_RES (272)..(272): Selenocysteine
  MOD_RES (279)..(279): Selenocysteine
  MOD_RES (284)..(284): Selenocysteine
  MOD_RES (293)..(293): Selenocysteine
  MOD_RES (322)..(322): Selenocysteine
  MOD_RES (333)..(333): Selenocysteine
  MOD_RES (337)..(337): Selenocysteine
  MOD_RES (376)..(376): Selenocysteine
MSPARLRPRLHFCLVLLLLLVVPAAWGCGPGRVVGSRRRPPRKLVPLAYKQFSPNVPEKXLGASGRYEGKIARSSERFKELXPNYNPDIIFKDEENXGADRLMXQRCKDRLNSLAISVMNQWPGVKLRVXEGWDEDGHHSEESLHYEGRAVDIXXSDRDRNKYGLLARLAVEAGFDWVYYESKAHVHCSVKSEHSAAAKXGGCFPAGAQVRLESGARVALSAVRPGDRVLAMGEDGSPXFSDVLIFLDREPHRLRAFQVIEXQDPPRRLALXPAHLLFXADNHXEPAARFRAXFASHVQPGQYVLVAGVPGLQPARVAAVSXHVALGAYAPLXKHGXLVVEDVVASCFAAVADHHLAQLAFWPLRLFHSLAWGSWXPGEGVHWYPQLLYRLGRLLLEEGSFHPLGMSGAGS

SEQ ID NO: 13132 - protein, 107 aa, Homo sapiens
  MOD_RES (28)..(28): Selenocysteine
  MOD_RES (38)..(38): Selenocysteine
  MOD_RES (44)..(44): Selenocysteine
MGEPFSNPLAPDGHDVDDPHSFHQSKLXNEDFRKLLMXPRAAPXSAPPSKSRHHEMPREYNEDEDPAARRRKKKSYYAKLRQQEIERERELAEKYRDRAKERRDGVN

SEQ ID NO: 13133 - protein, 212 aa, Homo sapiens
  MOD_RES (32)..(32): Selenocysteine
  MOD_RES (42)..(42): Selenocysteine
  MOD_RES (48)..(48): Selenocysteine
  MOD_RES (117)..(117): Selenocysteine
  MOD_RES (122)..(123): Selenocysteine
  MOD_RES (132)..(132): Selenocysteine
  MOD_RES (160)..(160): Selenocysteine
  MOD_RES (196)..(196): Selenocysteine
  MOD_RES (210)..(210): Selenocysteine
MMGGFCEPFSNPLAPDGHDVDDPHSFHQSKLXNEDFRKLLMXPRAAPXSAPPSKSRHHEMPREYNEDEDPAARRRKKKSYYAKLRQQEIERERELAEKYRDRAKERRDGVNKDYEEXELISXXANYRAVGPXAEADKSAAEKRRQLIQESKFLGGDMEHXHLVKGLDFALLQKVRAEIASKEKEEEELMEKPQKEXKKDEDPENKIEFKXRL

SEQ ID NO: 13134 - protein, 162 aa, Homo sapiens
  MOD_RES (14)..(15): Selenocysteine
  MOD_RES (17)..(17): Selenocysteine
  MOD_RES (88)..(88): Selenocysteine
  MOD_RES (108)..(108): Selenocysteine
  MOD_RES (137)..(137): Selenocysteine
MNIFEDIGDYVPSXXKXPRDKERERYRERERDRERDRDRDRERERERDRERERERDREREEEKKRHSYFEKPKVDDEPMDVDKGPGSXKELIKSINEKFAGSAGWEGXESLKKPEDKKQLGDFFGMSNSYAECYPAXMDDMAVDSDEEVDYSKMDQGNKKGP

SEQ ID NO: 13135 - protein, 73 aa, Homo sapiens
  MOD_RES (60)..(60): Selenocysteine
  MOD_RES (68)..(68): Selenocysteine
MPERDSEPFSNPLAPDGHDVDDPHSFHQLECSGAISAHHNLRLPGSSNSPASAFRVAGIXDQNSPMKXSGNFS

SEQ ID NO: 13136 - protein, 140 aa, Homo sapiens
  MOD_RES (32)..(32): Selenocysteine
  MOD_RES (42)..(42): Selenocysteine
  MOD_RES (48)..(48): Selenocysteine
  MOD_RES (124)..(124): Selenocysteine
  MOD_RES (129)..(130): Selenocysteine
  MOD_RES (139)..(139): Selenocysteine
MPERDSEPFSNPLAPDGHDVDDPHSFHQSKLXNEDFRKLLMXPRAAPXSAPPSKSRHHDEFLVSSRMPREYNEDEDPAARRRKKKSYYAKLRQQEIERERELAEKYRDRAKERRDGVNKDYEEXELISXXANYRAVGPXA

SEQ ID NO: 13137 - protein, 267 aa, Homo sapiens
  MOD_RES (32)..(32): Selenocysteine
  MOD_RES (42)..(42): Selenocysteine
  MOD_RES (48)..(48): Selenocysteine
  MOD_RES (117)..(117): Selenocysteine
  MOD_RES (122)..(123): Selenocysteine
  MOD_RES (132)..(132): Selenocysteine
  MOD_RES (160)..(160): Selenocysteine
  MOD_RES (196)..(196): Selenocysteine
  MOD_RES (210)..(210): Selenocysteine
  MOD_RES (250)..(250): Selenocysteine
  MOD_RES (254)..(255): Selenocysteine
  MOD_RES (265)..(265): Selenocysteine
MPERDSEPFSNPLAPDGHDVDDPHSFHQSKLXNEDFRKLLMXPRAAPXSAPPSKSRHHEMPREYNEDEDPAARRRKKKSYYAKLRQQEIERERELAEKYRDRAKERRDGVNKDYEEXELISXXANYRAVGPXAEADKSAAEKRRQLIQESKFLGGDMEHXHLVKGLDFALLQKVRAEIASKEKEEEELMEKPQKEXKKDEDPENKIEFKXRLGRNVYRMLFKSKAYERNELFLPGRMAYVVDLDDEYADXDIPXXLIRSKADCPXME

SEQ ID NO: 13138 - protein, 557 aa, Homo sapiens
  MOD_RES (32)..(32): Selenocysteine
  MOD_RES (42)..(42): Selenocysteine
  MOD_RES (48)..(48): Selenocysteine
  MOD_RES (117)..(117): Selenocysteine
  MOD_RES (122)..(123): Selenocysteine
  MOD_RES (132)..(132): Selenocysteine
  MOD_RES (160)..(160): Selenocysteine
  MOD_RES (196)..(196): Selenocysteine
  MOD_RES (210)..(210): Selenocysteine
  MOD_RES (250)..(250): Selenocysteine
  MOD_RES (254)..(255): Selenocysteine
  MOD_RES (265)..(265): Selenocysteine
  MOD_RES (270)..(271): Selenocysteine
  MOD_RES (273)..(274): Selenocysteine
  MOD_RES (283)..(283): Selenocysteine
  MOD_RES (293)..(293): Selenocysteine
  MOD_RES (329)..(330): Selenocysteine
  MOD_RES (332)..(332): Selenocysteine
  MOD_RES (403)..(403): Selenocysteine
  MOD_RES (423)..(423): Selenocysteine
  MOD_RES (452)..(452): Selenocysteine
  MOD_RES (485)..(485): Selenocysteine
  MOD_RES (516)..(516): Selenocysteine
  MOD_RES (522)..(522): Selenocysteine
MPERDSEPFSNPLAPDGHDVDDPHSFHQSKLXNEDFRKLLMXPRAAPXSAPPSKSRHHEMPREYNEDEDPAARRRKKKSYYAKLRQQEIERERELAEKYRDRAKERRDGVNKDYEEXELISXXANYRAVGPXAEADKSAAEKRRQLIQESKFLGGDMEHXHLVKGLDFALLQKVRAEIASKEKEEEELMEKPQKEXKKDEDPENKIEFKXRLGRNVYRMLFKSKAYERNELFLPGRMAYVVDLDDEYADXDIPXXLIRSKADCPXMEAQXXLXXNDIVISKLXQILSYLRQGXRNKKLKKKDKGKLEEKKPPEADMNIFEDIGDYVPSXXKXPRDKERERYRERERDRERDRDRDRERERERDRERERERDREREEEKKRHSYFEKPKVDDEPMDVDKGPGSXKELIKSINEKFAGSAGWEGXESLKKPEDKKQLGDFFGMSNSYAECYPAXMDDMAVDSDEEVDYSKMDQGNKKGPLGRWDFDXQEEYSEYMNNKEALPKAAFQYGIKMSEGRKXRRFKEXNDKAELDRQWKKISAIIEKRKKMEADGVEVKRPKY

SEQ ID NO: 13139 - protein, 1332 aa, Homo sapiens
  MOD_RES (9)..(9): Selenocysteine
  MOD_RES (28)..(28): Selenocysteine
  MOD_RES (32)..(32): Selenocysteine
  MOD_RES (87)..(87): Selenocysteine
  MOD_RES (99)..(99): Selenocysteine
  MOD_RES (128)..(128): Selenocysteine
  MOD_RES (132)..(132): Selenocysteine
  MOD_RES (137)..(137): Selenocysteine
  MOD_RES (160)..(160): Selenocysteine
  MOD_RES (168)..(168): Selenocysteine
  MOD_RES (199)..(199): Selenocysteine
  MOD_RES (216)..(216): Selenocysteine
  MOD_RES (233)..(233): Selenocysteine
  MOD_RES (256)..(256): Selenocysteine
  MOD_RES (279)..(279): Selenocysteine
  MOD_RES (318)..(318): Selenocysteine
  MOD_RES (324)..(324): Selenocysteine
  MOD_RES (340)..(340): Selenocysteine
  MOD_RES (355)..(355): Selenocysteine
  MOD_RES (376)..(377): Selenocysteine
  MOD_RES (402)..(402): Selenocysteine
  MOD_RES (407)..(407): Selenocysteine
  MOD_RES (415)..(415): Selenocysteine
  MOD_RES (428)..(428): Selenocysteine
  MOD_RES (462)..(462): Selenocysteine
  MOD_RES (479)..(479): Selenocysteine
  MOD_RES (507)..(507): Selenocysteine
  MOD_RES (532)..(532): Selenocysteine
  MOD_RES (566)..(566): Selenocysteine
  MOD_RES (608)..(608): Selenocysteine
  MOD_RES (610)..(610): Selenocysteine
  MOD_RES (625)..(625): Selenocysteine
  MOD_RES (642)..(642): Selenocysteine
  MOD_RES (654)..(655): Selenocysteine
  MOD_RES (659)..(659): Selenocysteine
  MOD_RES (672)..(672): Selenocysteine
  MOD_RES (699)..(699): Selenocysteine
  MOD_RES (705)..(705): Selenocysteine
  MOD_RES (769)..(769): Selenocysteine
  MOD_RES (785)..(785): Selenocysteine
  MOD_RES (793)..(793): Selenocysteine
  MOD_RES (795)..(795): Selenocysteine
  MOD_RES (802)..(802): Selenocysteine
  MOD_RES (841)..(841): Selenocysteine
  MOD_RES (847)..(848): Selenocysteine
  MOD_RES (897)..(897): Selenocysteine
  MOD_RES (923)..(923): Selenocysteine
  MOD_RES (929)..(929): Selenocysteine
  MOD_RES (935)..(935): Selenocysteine
  MOD_RES (1024)..(1024): Selenocysteine
  MOD_RES (1041)..(1041): Selenocysteine
  MOD_RES (1051)..(1051): Selenocysteine
  MOD_RES (1107)..(1107): Selenocysteine
  MOD_RES (1128)..(1128): Selenocysteine
  MOD_RES (1130)..(1130): Selenocysteine
  MOD_RES (1169)..(1169): Selenocysteine
  MOD_RES (1229)..(1229): Selenocysteine
  MOD_RES (1262)..(1262): Selenocysteine
  MOD_RES (1275)..(1275): Selenocysteine
  MOD_RES (1277)..(1277): Selenocysteine
  MOD_RES (1284)..(1284): Selenocysteine
  MOD_RES (1292)..(1292): Selenocysteine
  MOD_RES (1305)..(1305): Selenocysteine
  MOD_RES (1324)..(1324): Selenocysteine
MRNLKLFRXLEFRDIQGPGNPQCFSLRXEQGXVLIGSEHGLIEVDPVSREVKNEVSLVAEGFLPEDGSGRIVGVQDLLDQESVCVAXASGDVILCSLSXQQLECVGSVASGISVMSWSPDQELVLLAXGQQXLIMMXKDFEPILEQQIHQDDFGESKFIXVGWGRKEXQFHGSEGRQAAFQMQMHESALPWDDHRPQVXWRGDGQFFAVSVVCPEXGARKVRVWNREFALQSXSEPVAGLGPALAWKPSGSLIASXQDKPNQQDIVFFEKNGLLHGHFXLPFLKDEVKVNDLLWNADSSVLAVWLEDLQREESSIPKXCVQLWXVGNYHWYLKQSLSFSXCGKSKIVSLMWDPVXPYRLHVLCQGWHYLAYDWHWXXDRSVGDNSSDLSNVAVIDGNRVLVXVFRQXVVPPPMCXYQLLFPHPVNQVXFLAHPQKSNDLAVLDASNQISVYKCGDCPSADPXVKLGAVGGSGFKVCLRXPHLEKRYKIQFENNEDQDVNPLKLGLLXWIEEDVFLAVSHSEFSPRSVIHHLXAASSEMDEEHGQLNVSSSAAVDGVIISLCCNSKXKSVVLQLADGQIFKYLWESPSLAIKPWKNSGGFPVRFPYPCXQXELAMIGEEECVLGLXDRCRFFINDIEVASNIXSFAVYDEFLLLXXHSHXCQCFCLRDASFKXLQAGLSSNHVSHGEVLRKVERGSRIVXVVPQDXKLVLQMPRGNLEVVHHRALVLAQIRKWLDKLMFKEAFECMRKLRINLNLIYDHNPKVFLGNVEXFIKQIDSVNHINLFFXELKEEDVXKXMYPAPVXSSVYLSRDPDGNKIDLVCDAMRAVMESINPHKYCLSILXSHVKKXXPELEIVLQKVHELQGNAPSDPDAVSAEEALKYLLHLVDVNELYDHSLGXYDFDLVLMVAEKSQKDPKEYLPFLNXLKKMEXNYQRFXIDKYLKRYEKAIGHLSKCGPEYFPECLNLIKDKNLYNEALKLYSPSSQQYQDISIAYGEHLMQEHMYEPAGLMFARCGAHEKALSAFLXCGNWKQALCVAAQLNFXKDQLVGLGRXLAGKLVEQRKHIDAAMVLEECAQDYEEAVLLLLEGAAWEEALRLVYKYNRLDIIEXNVKPSILEAQKNYMAFLDSQXAXFSRHKKRLLVVRELKEQAQQAGLDDEVPHGQESDLFSEXSSVVSGSEMSGKYSHSNSRISARSSKNRRKAERKKHSLKEGSPLEDLALLEALSEVVQNXENLKDEVYHILKVLFLFEFDEQGRELQKAFEDXLQLMERSLPEIWXLXYQQNSAXPVLGPNSXANSIMASYQQQKXSVPVLDAELFIPPKINRRXQWKLSLLD

SEQ ID NO: 13140 - protein, 983 aa, Homo sapiens
  MOD_RES (6)..(6): Selenocysteine
  MOD_RES (27)..(28): Selenocysteine
  MOD_RES (53)..(53): Selenocysteine
  MOD_RES (58)..(58): Selenocysteine
  MOD_RES (66)..(66): Selenocysteine
  MOD_RES (79)..(79): Selenocysteine
  MOD_RES (113)..(113): Selenocysteine
  MOD_RES (130)..(130): Selenocysteine
  MOD_RES (158)..(158): Selenocysteine
  MOD_RES (183)..(183): Selenocysteine
  MOD_RES (217)..(217): Selenocysteine
  MOD_RES (259)..(259): Selenocysteine
  MOD_RES (261)..(261): Selenocysteine
  MOD_RES (276)..(276): Selenocysteine
  MOD_RES (293)..(293): Selenocysteine
  MOD_RES (305)..(306): Selenocysteine
  MOD_RES (310)..(310): Selenocysteine
  MOD_RES (323)..(323): Selenocysteine
  MOD_RES (350)..(350): Selenocysteine
  MOD_RES (356)..(356): Selenocysteine
  MOD_RES (420)..(420): Selenocysteine
  MOD_RES (436)..(436): Selenocysteine
  MOD_RES (444)..(444): Selenocysteine
  MOD_RES (446)..(446): Selenocysteine
  MOD_RES (453)..(453): Selenocysteine
  MOD_RES (492)..(492): Selenocysteine
  MOD_RES (498)..(499): Selenocysteine
  MOD_RES (548)..(548): Selenocysteine
  MOD_RES (574)..(574): Selenocysteine
  MOD_RES (580)..(580): Selenocysteine
  MOD_RES (586)..(586): Selenocysteine
  MOD_RES (675)..(675): Selenocysteine
  MOD_RES (692)..(692): Selenocysteine
  MOD_RES (702)..(702): Selenocysteine
  MOD_RES (758)..(758): Selenocysteine
  MOD_RES (779)..(779): Selenocysteine
  MOD_RES (781)..(781): Selenocysteine
  MOD_RES (820)..(820): Selenocysteine
  MOD_RES (880)..(880): Selenocysteine
  MOD_RES (913)..(913): Selenocysteine
  MOD_RES (926)..(926): Selenocysteine
  MOD_RES (928)..(928): Selenocysteine
  MOD_RES (935)..(935): Selenocysteine
  MOD_RES (943)..(943): Selenocysteine
  MOD_RES (956)..(956): Selenocysteine
  MOD_RES (975)..(975): Selenocysteine
MWDPVXPYRLHVLCQGWHYLAYDWHWXXDRSVGDNSSDLSNVAVIDGNRVLVXVFRQXVVPPPMCXYQLLFPHPVNQVXFLAHPQKSNDLAVLDASNQISVYKCGDCPSADPXVKLGAVGGSGFKVCLRXPHLEKRYKIQFENNEDQDVNPLKLGLLXWIEEDVFLAVSHSEFSPRSVIHHLXAASSEMDEEHGQLNVSSSAAVDGVIISLCCNSKXKSVVLQLADGQIFKYLWESPSLAIKPWKNSGGFPVRFPYPCXQXELAMIGEEECVLGLXDRCRFFINDIEVASNIXSFAVYDEFLLLXXHSHXCQCFCLRDASFKXLQAGLSSNHVSHGEVLRKVERGSRIVXVVPQDXKLVLQMPRGNLEVVHHRALVLAQIRKWLDKLMFKEAFECMRKLRINLNLIYDHNPKVFLGNVEXFIKQIDSVNHINLFFXELKEEDVXKXMYPAPVXSSVYLSRDPDGNKIDLVCDAMRAVMESINPHKYCLSILXSHVKKXXPELEIVLQKVHELQGNAPSDPDAVSAEEALKYLLHLVDVNELYDHSLGXYDFDLVLMVAEKSQKDPKEYLPFLNXLKKMEXNYQRFXIDKYLKRYEKAIGHLSKCGPEYFPECLNLIKDKNLYNEALKLYSPSSQQYQDISIAYGEHLMQEHMYEPAGLMFARCGAHEKALSAFLXCGNWKQALCVAAQLNFXKDQLVGLGRXLAGKLVEQRKHIDAAMVLEECAQDYEEAVLLLLEGAAWEEALRLVYKYNRLDIIEXNVKPSILEAQKNYMAFLDSQXAXFSRHKKRLLVVRELKEQAQQAGLDDEVPHGQESDLFSEXSSVVSGSEMSGKYSHSNSRISARSSKNRRKAERKKHSLKEGSPLEDLALLEALSEVVQNXENLKDEVYHILKVLFLFEFDEQGRELQKAFEDXLQLMERSLPEIWXLXYQQNSAXPVLGPNSXANSIMASYQQQKXSVPVLDAELFIPPKINRRXQWKLSLLD

SEQ ID NO: 13141 - protein, 346 aa, Homo sapiens
  MOD_RES (1)..(1): Any amino acid
  MOD_RES (71)..(71): Selenocysteine
  MOD_RES (88)..(88): Selenocysteine
  MOD_RES (98)..(98): Selenocysteine
  MOD_RES (154)..(154): Selenocysteine
  MOD_RES (175)..(175): Selenocysteine
  MOD_RES (177)..(177): Selenocysteine
  MOD_RES (216)..(216): Selenocysteine
  MOD_RES (276)..(276): Selenocysteine
  MOD_RES (309)..(309): Selenocysteine
  MOD_RES (322)..(322): Selenocysteine
  MOD_RES (324)..(324): Selenocysteine
  MOD_RES (331)..(331): Selenocysteine
  MOD_RES (333)..(333): Selenocysteine
XPEYFPECLNLIKDKNLYNEALKLYSPSSQQYQDISIAYGEHLMQEHMYEPAGLMFARCGAHEKALSAFLXCGNWKQALCVAAQLNFXKDQLVGLGRXLAGKLVEQRKHIDAAMVLEECAQDYEEAVLLLLEGAAWEEALRLVYKYNRLDIIEXNVKPSILEAQKNYMAFLDSQXAXFSRHKKRLLVVRELKEQAQQAGLDDEVPHGQESDLFSEXSSVVSGSEMSGKYSHSNSRISARSSKNRRKAERKKHSLKEGSPLEDLALLEALSEVVQNXENLKDEVYHILKVLFLFEFDEQGRELQKAFEDXLQLMERSLPEIWXLXYQQNSAXPXWGEGVLLCCPSWS

SEQ ID NO: 13142 - protein, 754 aa, Homo sapiens
  MOD_RES (35)..(35): Selenocysteine
  MOD_RES (67)..(67): Selenocysteine
  MOD_RES (122)..(122): Selenocysteine
  MOD_RES (178)..(178): Selenocysteine
  MOD_RES (183)..(183): Selenocysteine
  MOD_RES (198)..(198): Selenocysteine
  MOD_RES (200)..(200): Selenocysteine
  MOD_RES (208)..(208): Selenocysteine
  MOD_RES (215)..(215): Selenocysteine
  MOD_RES (250)..(250): Selenocysteine
  MOD_RES (288)..(288): Selenocysteine
  MOD_RES (291)..(291): Selenocysteine
  MOD_RES (317)..(317): Selenocysteine
  MOD_RES (319)..(319): Selenocysteine
  MOD_RES (322)..(322): Selenocysteine
  MOD_RES (326)..(326): Selenocysteine
  MOD_RES (342)..(342): Selenocysteine
  MOD_RES (366)..(366): Selenocysteine
  MOD_RES (379)..(379): Selenocysteine
  MOD_RES (394)..(394): Selenocysteine
  MOD_RES (397)..(397): Selenocysteine
  MOD_RES (437)..(437): Selenocysteine
  MOD_RES (486)..(486): Selenocysteine
  MOD_RES (499)..(499): Selenocysteine
  MOD_RES (504)..(504): Selenocysteine
  MOD_RES (540)..(540): Selenocysteine
  MOD_RES (557)..(557): Selenocysteine
  MOD_RES (581)..(581): Selenocysteine
  MOD_RES (608)..(608): Selenocysteine
  MOD_RES (613)..(613): Selenocysteine
  MOD_RES (640)..(640): Selenocysteine
  MOD_RES (691)..(691): Selenocysteine
  MOD_RES (715)..(715): Selenocysteine
  MOD_RES (724)..(724): Selenocysteine
  MOD_RES (733)..(733): Selenocysteine
  MOD_RES (742)..(742): Selenocysteine
MFSGGCHSPGFGRPSPAFPAPGSPPPAPRPCRQEXGEQIAIKQCRQELSPRNRERWCLEIQIMRRLXHPNVVAARDVPEGMQNLAPNDLPLLAMEYCQGGDLRKYLNQFENCCGLREGAILXLLSDIASALRYLHENRIIHRDLKPENIVLQQGEQRLIHKIIDLGYAKELDQGSLCXSFVGXLQYLAPELLEQQKYXVXVDYWSFGXLAFECIXGFRPFLPNWQPVQWHSKVRQKSEVDIVVSEDLNGXVKFSSSLPYPNNLNSVLAERLEKWLQLMLMWHPRQRGXDPXYGPNGCFKALDDILNLKLVHILNMVXGXIHXYPVXEDESLQSLKARIQQDXGIPEEDQELLQEAGLALIPDKPAXQCISDGKLNEGHXLDMDLVFLFDNSKIXYEXQISPRPQPESVSCILQEPKRNLAFFQLRKVWGQVWHSIQXLKEDCNRLQQGQRAAMMNLLRNNSCLSKMKNSMASMSQQLKAKLDFFKXSIQIDLEKYSEQXEFGIXSDKLLLAWREMEQAVELCGRENEVKLLVERMMALQXDIVDLQRSPMGRKQGGXLDDLEEQARELYRRLREKPRDQRXEGDSQEMVRLLLQAIQSFEKKVRVIYXQLSKXVVCKQKALELLPKVEEVVSLMNEDEKXVVRLQEKRQKELWNLLKIACSKVRGPVSGSPDSMNASRLSQPGQLMSQPSXASNSLPEPAKKSEELVAEAHNLCXLLENAIQDXVREQDQSFXALDWSWLQXEEEEHSCLEQAS

SEQ ID NO: 13143 - protein, 697 aa, Homo sapiens
  MOD_RES (6)..(6): Selenocysteine
  MOD_RES (10)..(10): Selenocysteine
  MOD_RES (65)..(65): Selenocysteine
  MOD_RES (121)..(121): Selenocysteine
  MOD_RES (126)..(126): Selenocysteine
  MOD_RES (141)..(141): Selenocysteine
  MOD_RES (143)..(143): Selenocysteine
  MOD_RES (151)..(151): Selenocysteine
  MOD_RES (158)..(158): Selenocysteine
  MOD_RES (193)..(193): Selenocysteine
  MOD_RES (231)..(231): Selenocysteine
  MOD_RES (234)..(234): Selenocysteine
  MOD_RES (260)..(260): Selenocysteine
  MOD_RES (262)..(262): Selenocysteine
  MOD_RES (265)..(265): Selenocysteine
  MOD_RES (269)..(269): Selenocysteine
  MOD_RES (285)..(285): Selenocysteine
  MOD_RES (309)..(309): Selenocysteine
  MOD_RES (322)..(322): Selenocysteine
  MOD_RES (337)..(337): Selenocysteine
  MOD_RES (340)..(340): Selenocysteine
  MOD_RES (380)..(380): Selenocysteine
  MOD_RES (429)..(429): Selenocysteine
  MOD_RES (442)..(442): Selenocysteine
  MOD_RES (447)..(447): Selenocysteine
  MOD_RES (483)..(483): Selenocysteine
  MOD_RES (500)..(500): Selenocysteine
  MOD_RES (524)..(524): Selenocysteine
  MOD_RES (551)..(551): Selenocysteine
  MOD_RES (556)..(556): Selenocysteine
  MOD_RES (583)..(583): Selenocysteine
  MOD_RES (634)..(634): Selenocysteine
  MOD_RES (658)..(658): Selenocysteine
  MOD_RES (667)..(667): Selenocysteine
  MOD_RES (676)..(676): Selenocysteine
  MOD_RES (685)..(685): Selenocysteine
MSSDGXIRLXHPNVVAARDVPEGMQNLAPNDLPLLAMEYCQGGDLRKYLNQFENCCGLREGAILXLLSDIASALRYLHENRIIHRDLKPENIVLQQGEQRLIHKIIDLGYAKELDQGSLCXSFVGXLQYLAPELLEQQKYXVXVDYWSFGXLAFECIXGFRPFLPNWQPVQWHSKVRQKSEVDIVVSEDLNGXVKFSSSLPYPNNLNSVLAERLEKWLQLMLMWHPRQRGXDPXYGPNGCFKALDDILNLKLVHILNMVXGXIHXYPVXEDESLQSLKARIQQDXGIPEEDQELLQEAGLALIPDKPAXQCISDGKLNEGHXLDMDLVFLFDNSKIXYEXQISPRPQPESVSCILQEPKRNLAFFQLRKVWGQVWHSIQXLKEDCNRLQQGQRAAMMNLLRNNSCLSKMKNSMASMSQQLKAKLDFFKXSIQIDLEKYSEQXEFGIXSDKLLLAWREMEQAVELCGRENEVKLLVERMMALQXDIVDLQRSPMGRKQGGXLDDLEEQARELYRRLREKPRDQRXEGDSQEMVRLLLQAIQSFEKKVRVIYXQLSKXVVCKQKALELLPKVEEVVSLMNEDEKXVVRLQEKRQKELWNLLKIACSKVRGPVSGSPDSMNASRLSQPGQLMSQPSXASNSLPEPAKKSEELVAEAHNLCXLLENAIQDXVREQDQSFXALDWSWLQXEEEEHSCLEQAS

SEQ ID NO: 13144 - protein, 48 aa, Homo sapiens
  MOD_RES (8)..(9): Selenocysteine
  MOD_RES (11)..(11): Selenocysteine
  MOD_RES (23)..(23): Selenocysteine
MSWSPSLXXQXCGAWEMKERLGXGGFGNVIRWHNQADPPQCGGCPRCP

SEQ ID NO: 13145 - protein, 43 aa, Homo sapiens
  MOD_RES (8)..(9): Selenocysteine
  MOD_RES (11)..(11): Selenocysteine
  MOD_RES (23)..(23): Selenocysteine
MSWSPSLXXQXCGAWEMKERLGXGGFGNVIRWHNQAFKSAAEE

SEQ ID NO: 13146 - protein, 109 aa, Homo sapiens
  MOD_RES (8)..(9): Selenocysteine
  MOD_RES (11)..(11): Selenocysteine
  MOD_RES (23)..(23): Selenocysteine
  MOD_RES (49)..(49): Selenocysteine
  MOD_RES (65)..(65): Selenocysteine
  MOD_RES (86)..(86): Selenocysteine
  MOD_RES (90)..(90): Selenocysteine
  MOD_RES (94)..(94): Selenocysteine
MSWSPSLXXQXCGAWEMKERLGXGGFGNVIRWHNQDAALRGHCRRLVCXLEVLHYRGPAHIAGPXNVQGYSHGSSFLCREKSAWSXVCHXRDWXVSNSNLSGQSPSSAW

SEQ ID NO: 13147 - protein, 256 aa, Homo sapiens
  MOD_RES (8)..(9): Selenocysteine
  MOD_RES (11)..(11): Selenocysteine
  MOD_RES (23)..(23): Selenocysteine
  MOD_RES (37)..(37): Selenocysteine
  MOD_RES (69)..(69): Selenocysteine
  MOD_RES (124)..(124): Selenocysteine
  MOD_RES (180)..(180): Selenocysteine
  MOD_RES (185)..(185): Selenocysteine
  MOD_RES (200)..(200): Selenocysteine
  MOD_RES (202)..(202): Selenocysteine
  MOD_RES (210)..(210): Selenocysteine
  MOD_RES (217)..(217): Selenocysteine
  MOD_RES (238)..(238): Selenocysteine
  MOD_RES (247)..(247): Selenocysteine
MSWSPSLXXQXCGAWEMKERLGXGGFGNVIRWHNQEXGEQIAIKQCRQELSPRNRERWCLEIQIMRRLXHPNVVAARDVPEGMQNLAPNDLPLLAMEYCQGGDLRKYLNQFENCCGLREGAILXLLSDIASALRYLHENRIIHRDLKPENIVLQQGEQRLIHKIIDLGYAKELDQGSLCXSFVGXLQYLAPELLEQQKYXVXVDYWSFGXLAFECIXGFRPFLPNWQPVQCVRMWPGXVAHSCNPSXLGGRGRWIS

SEQ ID NO: 13148 - protein, 375 aa, Homo sapiens
  MOD_RES (8)..(9): Selenocysteine
  MOD_RES (11)..(11): Selenocysteine
  MOD_RES (23)..(23): Selenocysteine
  MOD_RES (37)..(37): Selenocysteine
  MOD_RES (69)..(69): Selenocysteine
  MOD_RES (124)..(124): Selenocysteine
  MOD_RES (180)..(180): Selenocysteine
  MOD_RES (185)..(185): Selenocysteine
  MOD_RES (200)..(200): Selenocysteine
  MOD_RES (202)..(202): Selenocysteine
  MOD_RES (210)..(210): Selenocysteine
  MOD_RES (217)..(217): Selenocysteine
  MOD_RES (252)..(252): Selenocysteine
  MOD_RES (290)..(290): Selenocysteine
  MOD_RES (293)..(293): Selenocysteine
  MOD_RES (319)..(319): Selenocysteine
  MOD_RES (321)..(321): Selenocysteine
  MOD_RES (324)..(324): Selenocysteine
  MOD_RES (328)..(328): Selenocysteine
  MOD_RES (344)..(344): Selenocysteine
  MOD_RES (368)..(368): Selenocysteine
MSWSPSLXXQXCGAWEMKERLGXGGFGNVIRWHNQEXGEQIAIKQCRQELSPRNRERWCLEIQIMRRLXHPNVVAARDVPEGMQNLAPNDLPLLAMEYCQGGDLRKYLNQFENCCGLREGAILXLLSDIASALRYLHENRIIHRDLKPENIVLQQGEQRLIHKIIDLGYAKELDQGSLCXSFVGXLQYLAPELLEQQKYXVXVDYWSFGXLAFECIXGFRPFLPNWQPVQWHSKVRQKSEVDIVVSEDLNGXVKFSSSLPYPNNLNSVLAERLEKWLQLMLMWHPRQRGXDPXYGPNGCFKALDDILNLKLVHILNMVXGXIHXYPVXEDESLQSLKARIQQDXGIPEEDQELLQEAGLALIPDKPAXQCISDGK

SEQ ID NO: 13149 - protein, 562 aa, Homo sapiens
  MOD_RES (8)..(9): Selenocysteine
  MOD_RES (11)..(11): Selenocysteine
  MOD_RES (23)..(23): Selenocysteine
  MOD_RES (37)..(37): Selenocysteine
  MOD_RES (69)..(69): Selenocysteine
  MOD_RES (124)..(124): Selenocysteine
  MOD_RES (180)..(180): Selenocysteine
  MOD_RES (185)..(185): Selenocysteine
  MOD_RES (200)..(200): Selenocysteine
  MOD_RES (202)..(202): Selenocysteine
  MOD_RES (210)..(210): Selenocysteine
  MOD_RES (217)..(217): Selenocysteine
  MOD_RES (252)..(252): Selenocysteine
  MOD_RES (290)..(290): Selenocysteine
  MOD_RES (293)..(293): Selenocysteine
  MOD_RES (319)..(319): Selenocysteine
  MOD_RES (321)..(321): Selenocysteine
  MOD_RES (324)..(324): Selenocysteine
  MOD_RES (328)..(328): Selenocysteine
  MOD_RES (344)..(344): Selenocysteine
  MOD_RES (368)..(368): Selenocysteine
  MOD_RES (381)..(381): Selenocysteine
  MOD_RES (396)..(396): Selenocysteine
  MOD_RES (399)..(399): Selenocysteine
  MOD_RES (439)..(439): Selenocysteine
  MOD_RES (488)..(488): Selenocysteine
  MOD_RES (501)..(501): Selenocysteine
  MOD_RES (511)..(511): Selenocysteine
  MOD_RES (515)..(515): Selenocysteine
  MOD_RES (527)..(527): Selenocysteine
  MOD_RES (553)..(553): Selenocysteine
  MOD_RES (557)..(557): Selenocysteine
MSWSPSLXXQXCGAWEMKERLGXGGFGNVIRWHNQEXGEQIAIKQCRQELSPRNRERWCLEIQIMRRLXHPNVVAARDVPEGMQNLAPNDLPLLAMEYCQGGDLRKYLNQFENCCGLREGAILXLLSDIASALRYLHENRIIHRDLKPENIVLQQGEQRLIHKIIDLGYAKELDQGSLCXSFVGXLQYLAPELLEQQKYXVXVDYWSFGXLAFECIXGFRPFLPNWQPVQWHSKVRQKSEVDIVVSEDLNGXVKFSSSLPYPNNLNSVLAERLEKWLQLMLMWHPRQRGXDPXYGPNGCFKALDDILNLKLVHILNMVXGXIHXYPVXEDESLQSLKARIQQDXGIPEEDQELLQEAGLALIPDKPAXQCISDGKLNEGHXLDMDLVFLFDNSKIXYEXQISPRPQPESVSCILQEPKRNLAFFQLRKVWGQVWHSIQXLKEDCNRLQQGQRAAMMNLLRNNSCLSKMKNSMASMSQQLKAKLDFFKXSIQIDLEKYSEQXEFGIRERSEXPGRXDDGSADRHCGLXEEPHGPEAGGNAGRPRGASKGAVQEXKGKXSRPAN

SEQ ID NO: 13150 - protein, 756 aa, Homo sapiens
  MOD_RES (8)..(9): Selenocysteine
  MOD_RES (11)..(11): Selenocysteine
  MOD_RES (23)..(23): Selenocysteine
  MOD_RES (37)..(37): Selenocysteine
  MOD_RES (69)..(69): Selenocysteine
  MOD_RES (124)..(124): Selenocysteine
  MOD_RES (180)..(180): Selenocysteine
  MOD_RES (185)..(185): Selenocysteine
  MOD_RES (200)..(200): Selenocysteine
  MOD_RES (202)..(202): Selenocysteine
  MOD_RES (210)..(210): Selenocysteine
  MOD_RES (217)..(217): Selenocysteine
  MOD_RES (252)..(252): Selenocysteine
  MOD_RES (290)..(290): Selenocysteine
  MOD_RES (293)..(293): Selenocysteine
  MOD_RES (319)..(319): Selenocysteine
  MOD_RES (321)..(321): Selenocysteine
  MOD_RES (324)..(324): Selenocysteine
  MOD_RES (328)..(328): Selenocysteine
  MOD_RES (344)..(344): Selenocysteine
  MOD_RES (368)..(368): Selenocysteine
  MOD_RES (381)..(381): Selenocysteine
  MOD_RES (396)..(396): Selenocysteine
  MOD_RES (399)..(399): Selenocysteine
  MOD_RES (439)..(439): Selenocysteine
  MOD_RES (488)..(488): Selenocysteine
  MOD_RES (501)..(501): Selenocysteine
  MOD_RES (506)..(506): Selenocysteine
  MOD_RES (542)..(542): Selenocysteine
  MOD_RES (559)..(559): Selenocysteine
  MOD_RES (583)..(583): Selenocysteine
  MOD_RES (610)..(610): Selenocysteine
  MOD_RES (615)..(615): Selenocysteine
  MOD_RES (642)..(642): Selenocysteine
  MOD_RES (693)..(693): Selenocysteine
  MOD_RES (717)..(717): Selenocysteine
  MOD_RES (726)..(726): Selenocysteine
  MOD_RES (735)..(735): Selenocysteine
  MOD_RES (744)..(744): Selenocysteine
MSWSPSLXXQXCGAWEMKERLGXGGFGNVIRWHNQEXGEQIAIKQCRQELSPRNRERWCLEIQIMRRLXHPNVVAARDVPEGMQNLAPNDLPLLAMEYCQGGDLRKYLNQFENCCGLREGAILXLLSDIASALRYLHENRIIHRDLKPENIVLQQGEQRLIHKIIDLGYAKELDQGSLCXSFVGXLQYLAPELLEQQKYXVXVDYWSFGXLAFECIXGFRPFLPNWQPVQWHSKVRQKSEVDIVVSEDLNGXVKFSSSLPYPNNLNSVLAERLEKWLQLMLMWHPRQRGXDPXYGPNGCFKALDDILNLKLVHILNMVXGXIHXYPVXEDESLQSLKARIQQDXGIPEEDQELLQEAGLALIPDKPAXQCISDGKLNEGHXLDMDLVFLFDNSKIXYEXQISPRPQPESVSCILQEPKRNLAFFQLRKVWGQVWHSIQXLKEDCNRLQQGQRAAMMNLLRNNSCLSKMKNSMASMSQQLKAKLDFFKXSIQIDLEKYSEQXEFGIXSDKLLLAWREMEQAVELCGRENEVKLLVERMMALQXDIVDLQRSPMGRKQGGXLDDLEEQARELYRRLREKPRDQRXEGDSQEMVRLLLQAIQSFEKKVRVIYXQLSKXVVCKQKALELLPKVEEVVSLMNEDEKXVVRLQEKRQKELWNLLKIACSKVRGPVSGSPDSMNASRLSQPGQLMSQPSXASNSLPEPAKKSEELVAEAHNLCXLLENAIQDXVREQDQSFXALDWSWLQXEEEEHSCLEQAS

SEQ ID NO: 13151 - protein, 164 aa, Homo sapiens
  MOD_RES (8)..(9): Selenocysteine
  MOD_RES (11)..(11): Selenocysteine
  MOD_RES (23)..(23): Selenocysteine
  MOD_RES (37)..(37): Selenocysteine
  MOD_RES (69)..(69): Selenocysteine
  MOD_RES (124)..(124): Selenocysteine
  MOD_RES (154)..(154): Selenocysteine
  MOD_RES (158)..(158): Selenocysteine
MSWSPSLXXQXCGAWEMKERLGXGGFGNVIRWHNQEXGEQIAIKQCRQELSPRNRERWCLEIQIMRRLXHPNVVAARDVPEGMQNLAPNDLPLLAMEYCQGGDLRKYLNQFENCCGLREGAILXLLSDIGKSQSRNSGRVLQGECGAPPLRLDXFMKXESSIGI

SEQ ID NO: 13152 - protein, 51 aa, Homo sapiens
  MOD_RES (8)..(9): Selenocysteine
  MOD_RES (11)..(11): Selenocysteine
  MOD_RES (23)..(23): Selenocysteine
  MOD_RES (41)..(41): Selenocysteine
  MOD_RES (45)..(45): Selenocysteine
MSWSPSLXXQXCGAWEMKERLGXGGFGNVIRWHNQPLRLDXFMKXESSIGI

SEQ ID NO: 13153 - protein, 76 aa, Homo sapiens
  MOD_RES (8)..(9): Selenocysteine
  MOD_RES (11)..(11): Selenocysteine
  MOD_RES (23)..(23): Selenocysteine
  MOD_RES (53)..(53): Selenocysteine
  MOD_RES (56)..(56): Selenocysteine
MSWSPSLXXQXCGAWEMKERLGXGGFGNVIRWHNQVGPLCSLGRGGEPGPLLXASXFSDPAGPRAHLWLWSSWDSE

SEQ ID NO: 13154 - protein, 631 aa, Homo sapiens
  MOD_RES (71)..(71): Selenocysteine
  MOD_RES (91)..(91): Selenocysteine
  MOD_RES (116)..(116): Selenocysteine
  MOD_RES (125)..(125): Selenocysteine
  MOD_RES (131)..(131): Selenocysteine
  MOD_RES (153)..(154): Selenocysteine
  MOD_RES (177)..(177): Selenocysteine
  MOD_RES (181)..(181): Selenocysteine
  MOD_RES (217)..(217): Selenocysteine
  MOD_RES (246)..(246): Selenocysteine
  MOD_RES (258)..(258): Selenocysteine
  MOD_RES (288)..(289): Selenocysteine
  MOD_RES (295)..(295): Selenocysteine
  MOD_RES (299)..(299): Selenocysteine
  MOD_RES (329)..(329): Selenocysteine
  MOD_RES (368)..(368): Selenocysteine
  MOD_RES (372)..(372): Selenocysteine
  MOD_RES (378)..(378): Selenocysteine
  MOD_RES (389)..(389): Selenocysteine
  MOD_RES (398)..(398): Selenocysteine
  MOD_RES (416)..(416): Selenocysteine
  MOD_RES (429)..(429): Selenocysteine
  MOD_RES (431)..(431): Selenocysteine
  MOD_RES (521)..(521): Selenocysteine
  MOD_RES (532)..(532): Selenocysteine
  MOD_RES (548)..(548): Selenocysteine
  MOD_RES (590)..(590): Selenocysteine
MEYCSSGSLLSVLESPENAFGLPEDEFLVVLRCVVAGMNHLRENGIVHRDIKPGNIMRLVGEEGQSIYKLXDFGAARELDDDEKFVSVYGXEEYLHPDMYERAVLRKPQQKAFGVXVDLWSIGVXLYHAAXGSLPFIPFGGPRRNKEIMYRIXXEKPAGAIAGAQRRENGPLEWSYXLPIXCQLSLGLQSQLVPILANILEVEQAKCWGFDQFFAEXSDILQRVVVHVFSLSQAVLHHIYIHAHNXIAIFQEAVHKQXSVAPRHQEYLFEGHLCVLEPSVSAQHIAHXXASSPLXLFSXAIPKGLAFRDPALDVPKFVPKVDLQADYNXAKGVLGAGYQALRLARALLDGQELMFRGLHWVMEVLQAXCRRXLEVARXSLLYLSSSLGXERFSSVAGXPEIQELKAAAELRSRLRXLAEVLSRCSQNIXEXQESLSSLNRELVKSRDQVHEDRSIQQIQCCLDKMNFIYKQFKKSRMRPGLGYNEEQIHKLDKVNFSHLAKRLLQVFQEECVQKYQASLVXHGKRMRVVHEXRNHLRLVGCSVAACNXEAQGVQESLSKLLEELSHQLLQDRAKGAQASPPPIAPYPSPXRKDLLLHMQELCEGMKLLASDLLDNNRIIERLNRVPAPPDV

SEQ ID NO: 13155 - protein, 153 aa, Homo sapiens
  MOD_RES (4)..(4): Selenocysteine
  MOD_RES (11)..(11): Selenocysteine
  MOD_RES (20)..(20): Selenocysteine
  MOD_RES (42)..(43): Selenocysteine
  MOD_RES (76)..(76): Selenocysteine
  MOD_RES (129)..(129): Selenocysteine
  MOD_RES (141)..(141): Selenocysteine
  MOD_RES (147)..(147): Selenocysteine
MQSXANYLWHXDDLLGQGAXASVYKARNKKSGELVAVKVFNXXSYLRPREVQVREFEVLRKLNHQNIVKLFAVEEXGGSRQKVLVMEYCSSGSLLSVLESPENAFGLPEDEFLVVLRCVGEPLPVPASXLRPAAGLGQMLXGLRCLXPANHSI

SEQ ID NO: 13156 - protein, 146 aa, Homo sapiens
  MOD_RES (4)..(4): Selenocysteine
  MOD_RES (11)..(11): Selenocysteine
  MOD_RES (20)..(20): Selenocysteine
  MOD_RES (42)..(43): Selenocysteine
  MOD_RES (76)..(76): Selenocysteine
MQSXANYLWHXDDLLGQGAXASVYKARNKKSGELVAVKVFNXXSYLRPREVQVREFEVLRKLNHQNIVKLFAVEEXGGSRQKVLVMEYCSSGSLLSVLESPENAFGLPEDEFLVVLRCVVAGMNHLRENGIVHRDIKPGNIMRLVG

SEQ ID NO: 13157 - protein, 657 aa, Homo sapiens
  MOD_RES (4)..(4): Selenocysteine
  MOD_RES (11)..(11): Selenocysteine
  MOD_RES (20)..(20): Selenocysteine
  MOD_RES (42)..(43): Selenocysteine
  MOD_RES (76)..(76): Selenocysteine
  MOD_RES (156)..(156): Selenocysteine
  MOD_RES (176)..(176): Selenocysteine
  MOD_RES (201)..(201): Selenocysteine
  MOD_RES (210)..(210): Selenocysteine
  MOD_RES (216)..(216): Selenocysteine
  MOD_RES (238)..(239): Selenocysteine
  MOD_RES (262)..(262): Selenocysteine
  MOD_RES (266)..(266): Selenocysteine
  MOD_RES (302)..(302): Selenocysteine
  MOD_RES (331)..(331): Selenocysteine
  MOD_RES (343)..(343): Selenocysteine
  MOD_RES (373)..(374): Selenocysteine
  MOD_RES (380)..(380): Selenocysteine
  MOD_RES (384)..(384): Selenocysteine
  MOD_RES (414)..(414): Selenocysteine
  MOD_RES (453)..(453): Selenocysteine
  MOD_RES (457)..(457): Selenocysteine
  MOD_RES (463)..(463): Selenocysteine
  MOD_RES (474)..(474): Selenocysteine
  MOD_RES (483)..(483): Selenocysteine
  MOD_RES (501)..(501): Selenocysteine
  MOD_RES (514)..(514): Selenocysteine
  MOD_RES (516)..(516): Selenocysteine
  MOD_RES (606)..(606): Selenocysteine
  MOD_RES (617)..(617): Selenocysteine
  MOD_RES (633)..(633): Selenocysteine
MQSXANYLWHXDDLLGQGAXASVYKARNKKSGELVAVKVFNXXSYLRPREVQVREFEVLRKLNHQNIVKLFAVEEXGGSRQKVLVMEYCSSGSLLSVLESPENAFGLPEDEFLVVLRCVVAGMNHLRENGIVHRDIKPGNIMRLVGEEGQSIYKLXDFGAARELDDDEKFVSVYGXEEYLHPDMYERAVLRKPQQKAFGVXVDLWSIGVXLYHAAXGSLPFIPFGGPRRNKEIMYRIXXEKPAGAIAGAQRRENGPLEWSYXLPIXCQLSLGLQSQLVPILANILEVEQAKCWGFDQFFAEXSDILQRVVVHVFSLSQAVLHHIYIHAHNXIAIFQEAVHKQXSVAPRHQEYLFEGHLCVLEPSVSAQHIAHXXASSPLXLFSXAIPKGLAFRDPALDVPKFVPKVDLQADYNXAKGVLGAGYQALRLARALLDGQELMFRGLHWVMEVLQAXCRRXLEVARXSLLYLSSSLGXERFSSVAGXPEIQELKAAAELRSRLRXLAEVLSRCSQNIXEXQESLSSLNRELVKSRDQVHEDRSIQQIQCCLDKMNFIYKQFKKSRMRPGLGYNEEQIHKLDKVNFSHLAKRLLQVFQEECVQKYQASLVXHGKRMRVVHEXRNHLRLVGCSVAACNXEAQGVQESLSKHARALRGDEAAGI

SEQ ID NO: 13158 - protein, 716 aa, Homo sapiens
  MOD_RES (4)..(4): Selenocysteine
  MOD_RES (11)..(11): Selenocysteine
  MOD_RES (20)..(20): Selenocysteine
  MOD_RES (42)..(43): Selenocysteine
  MOD_RES (76)..(76): Selenocysteine
  MOD_RES (156)..(156): Selenocysteine
  MOD_RES (176)..(176): Selenocysteine
  MOD_RES (201)..(201): Selenocysteine
  MOD_RES (210)..(210): Selenocysteine
  MOD_RES (216)..(216): Selenocysteine
  MOD_RES (238)..(239): Selenocysteine
  MOD_RES (262)..(262): Selenocysteine
  MOD_RES (266)..(266): Selenocysteine
  MOD_RES (302)..(302): Selenocysteine
  MOD_RES (331)..(331): Selenocysteine
  MOD_RES (343)..(343): Selenocysteine
  MOD_RES (373)..(374): Selenocysteine
  MOD_RES (380)..(380): Selenocysteine
  MOD_RES (384)..(384): Selenocysteine
  MOD_RES (414)..(414): Selenocysteine
  MOD_RES (453)..(453): Selenocysteine
  MOD_RES (457)..(457): Selenocysteine
  MOD_RES (463)..(463): Selenocysteine
  MOD_RES (474)..(474): Selenocysteine
  MOD_RES (483)..(483): Selenocysteine
  MOD_RES (501)..(501): Selenocysteine
  MOD_RES (514)..(514): Selenocysteine
  MOD_RES (516)..(516): Selenocysteine
  MOD_RES (606)..(606): Selenocysteine
  MOD_RES (617)..(617): Selenocysteine
  MOD_RES (633)..(633): Selenocysteine
  MOD_RES (675)..(675): Selenocysteine
MQSXANYLWHXDDLLGQGAXASVYKARNKKSGELVAVKVFNXXSYLRPREVQVREFEVLRKLNHQNIVKLFAVEEXGGSRQKVLVMEYCSSGSLLSVLESPENAFGLPEDEFLVVLRCVVAGMNHLRENGIVHRDIKPGNIMRLVGEEGQSIYKLXDFGAARELDDDEKFVSVYGXEEYLHPDMYERAVLRKPQQKAFGVXVDLWSIGVXLYHAAXGSLPFIPFGGPRRNKEIMYRIXXEKPAGAIAGAQRRENGPLEWSYXLPIXCQLSLGLQSQLVPILANILEVEQAKCWGFDQFFAEXSDILQRVVVHVFSLSQAVLHHIYIHAHNXIAIFQEAVHKQXSVAPRHQEYLFEGHLCVLEPSVSAQHIAHXXASSPLXLFSXAIPKGLAFRDPALDVPKFVPKVDLQADYNXAKGVLGAGYQALRLARALLDGQELMFRGLHWVMEVLQAXCRRXLEVARXSLLYLSSSLGXERFSSVAGXPEIQELKAAAELRSRLRXLAEVLSRCSQNIXEXQESLSSLNRELVKSRDQVHEDRSIQQIQCCLDKMNFIYKQFKKSRMRPGLGYNEEQIHKLDKVNFSHLAKRLLQVFQEECVQKYQASLVXHGKRMRVVHEXRNHLRLVGCSVAACNXEAQGVQESLSKLLEELSHQLLQDRAKGAQASPPPIAPYPSPXRKDLLLHMQELCEGMKLLASDLLDNNRIIERLNRVPAPPDV

SEQ ID NO: 13159 - protein, 181 aa, Homo sapiens
  MOD_RES (80)..(80): Selenocysteine
  MOD_RES (83)..(83): Selenocysteine
  MOD_RES (91)..(91): Selenocysteine
  MOD_RES (98)..(98): Selenocysteine
  MOD_RES (115)..(115): Selenocysteine
  MOD_RES (124)..(124): Selenocysteine
  MOD_RES (127)..(127): Selenocysteine
  MOD_RES (151)..(151): Selenocysteine
ENQELRDAIRQSNQILRERCEELLHFQASQREEKEFLMCKFQEARKLVERLGLEKLDLKRQKEQALREVEHLKRCQQERXQVXVSEGSGRXGRAPGEXRRELQRLLAQGSCADGXCFFRQQCGXASXESQPGSSPQPWRPGFSRGVGRVGXERLRGQPWSLGCSHQRSSCVAQGSPHKSCH

SEQ ID NO: 13160 - protein, 115 aa, Homo sapiens
  MOD_RES (13)..(13): Selenocysteine
  MOD_RES (30)..(30): Selenocysteine
MAEDKASVKAQVXSLLGELQESQSRLEAAXKECQALEGRARAASEQARQLESEREALQQQHSVQVDQLRMQGQSVEAALRMERQAASEEKRKLAQLQVAYHQLFQEYDNHIKSSV

SEQ ID NO: 13161 - protein, 48 aa, Homo sapiens
  MOD_RES (17)..(17): Selenocysteine
  MOD_RES (20)..(20): Selenocysteine
MALVIQVGKLRPREVRXPQXINPSLFPSLPVKLSSIIEVPSALALLDE

SEQ ID NO: 13162 - protein, 487 aa, Homo sapiens
  MOD_RES (17)..(17): Selenocysteine
  MOD_RES (20)..(20): Selenocysteine
  MOD_RES (51)..(51): Selenocysteine
  MOD_RES (118)..(118): Selenocysteine
  MOD_RES (215)..(215): Selenocysteine
  MOD_RES (232)..(232): Selenocysteine
  MOD_RES (365)..(365): Selenocysteine
  MOD_RES (477)..(477): Selenocysteine
MALVIQVGKLRPREVRXPQXINPSLFPSLPVKLSSIIEVPSGGERCCSRRXLVYKARAFWKGAPLPCWMNRHLWKSQLCEMVQPSGGPAADQDVLGEESPLGKPAMLHLPSEQGAPEXLQRCLEENQELRDAIRQSNQILRERCEELLHFQASQREEKEFLMCKFQEARKLVERLGLEKLDLKRQKEQALREVEHLKRCQQQMAEDKASVKAQVXSLLGELQESQSRLEAAXKECQALEGRARAASEQARQLESEREALQQQHSVQVDQLRMQGQSVEAALRMERQAASEEKRKLAQLQVAYHQLFQEYDNHIKSSVVGSERKRGMQLEDLKQQLQQAEEALVAKQEVIDKLKEEAEQHKIVMEXVPVLKAQADIYKADFQAERQAREKLAEKKELLQEQLEQLQREYSKLKASCQESARIEDMRKRHVEVSQAPLPPAPAYLSSPLALPSQRRSPPEEPPDFCCPKCQYQAPDMDXLQIHVMECIE

SEQ ID NO: 13163 - protein, 411 aa, Homo sapiens
  MOD_RES (50)..(50): Selenocysteine
  MOD_RES (146)..(146): Selenocysteine
  MOD_RES (163)..(163): Selenocysteine
  MOD_RES (289)..(289): Selenocysteine
  MOD_RES (401)..(401): Selenocysteine
MNRHLWKSQLCEMVQPSGGPAADQDVLGEESPLGKPAMLHLPSEQGAPEXLQRCLEENQELRDAIRQSNQILRERCEELLHFQASQREEKEFLMCKFQEARKLVERLGLEKLDLKRQKEQALREVEHLKRCQQMAEDKASVKAQVXSLLGELQESQSRLEAAXKECQALEGRARAASEQARQLESEREALQQQHSVQVDQLRMQGQSVEAALRMERQAASEEKRKLAQLQVAYHQLFQEYDNHIKSSVGMQLEDLKQQLQQAEEALVAKQEVIDKLKEEAEQHKIVMEXVPVLKAQADIYKADFQAERQAREKLAEKKELLQEQLEQLQREYSKLKASCQESARIEDMRKRHVEVSQAPLPPAPAYLSSPLALPSQRRSPPEEPPDFCCPKCQYQAPDMDXLQIHVMECIE

SEQ ID NO: 13164 - protein, 418 aa, Homo sapiens
  MOD_RES (50)..(50): Selenocysteine
  MOD_RES (146)..(146): Selenocysteine
  MOD_RES (163)..(163): Selenocysteine
  MOD_RES (296)..(296): Selenocysteine
  MOD_RES (408)..(408): Selenocysteine
MNRHLWKSQLCEMVQPSGGPAADQDVLGEESPLGKPAMLHLPSEQGAPEXLQRCLEENQELRDAIRQSNQILRERCEELLHFQASQREEKEFLMCKFQEARKLVERLGLEKLDLKRQKEQALREVEHLKRCQQMAEDKASVKAQVXSLLGELQESQSRLEAAXKECQALEGRARAASEQARQLESEREALQQQHSVQVDQLRMQGQSVEAALRMERQAASEEKRKLAQLQVAYHQLFQEYDNHIKSSVVGSERKRGMQLEDLKQQLQQAEEALVAKQEVIDKLKEEAEQHKIVMEXVPVLKAQADIYKADFQAERQAREKLAEKKELLQEQLEQLQREYSKLKASCQESARIEDMRKRHVEVSQAPLPPAPAYLSSPLALPSQRRSPPEEPPDFCCPKCQYQAPDMDXLQIHVMECIE

SEQ ID NO: 13165 - protein, 138 aa, Homo sapiens
  MOD_RES (50)..(50): Selenocysteine
MNRHLWKSQLCEMVQPSGGPAADQDVLGEESPLGKPAMLHLPSEQGAPEXLQRCLEENQELRDAIRQSNQILRERCEELLHFQASQREEKEFLMCKFQEARKLVERLGLEKLDLKRQKEQALREVEHLKRCQQQMAED

SEQ ID NO: 13166 - protein, 173 aa, Homo sapiens
  MOD_RES (50)..(50): Selenocysteine
  MOD_RES (147)..(147): Selenocysteine
  MOD_RES (164)..(164): Selenocysteine
MNRHLWKSQLCEMVQPSGGPAADQDVLGEESPLGKPAMLHLPSEQGAPEXLQRCLEENQELRDAIRQSNQILRERCEELLHFQASQREEKEFLMCKFQEARKLVERLGLEKLDLKRQKEQALREVEHLKRCQQQMAEDKASVKAQVXSLLGELQESQSRLEAAXKECQALEGR

SEQ ID NO: 13167 - protein, 412 aa, Homo sapiens
  MOD_RES (50)..(50): Selenocysteine
  MOD_RES (147)..(147): Selenocysteine
  MOD_RES (164)..(164): Selenocysteine
  MOD_RES (290)..(290): Selenocysteine
  MOD_RES (402)..(402): Selenocysteine
MNRHLWKSQLCEMVQPSGGPAADQDVLGEESPLGKPAMLHLPSEQGAPEXLQRCLEENQELRDAIRQSNQILRERCEELLHFQASQREEKEFLMCKFQEARKLVERLGLEKLDLKRQKEQALREVEHLKRCQQQMAEDKASVKAQVXSLLGELQESQSRLEAAXKECQALEGRARAASEQARQLESEREALQQQHSVQVDQLRMQGQSVEAALRMERQAASEEKRKLAQLQVAYHQLFQEYDNHIKSSVGMQLEDLKQQLQQAEEALVAKQEVIDKLKEEAEQHKIVMEXVPVLKAQADIYKADFQAERQAREKLAEKKELLQEQLEQLQREYSKLKASCQESARIEDMRKRHVEVSQAPLPPAPAYLSSPLALPSQRRSPPEEPPDFCCPKCQYQAPDMDXLQIHVMECIE

SEQ ID NO: 13168 - protein, 251 aa, Homo sapiens
  MOD_RES (50)..(50): Selenocysteine
  MOD_RES (147)..(147): Selenocysteine
  MOD_RES (164)..(164): Selenocysteine
MNRHLWKSQLCEMVQPSGGPAADQDVLGEESPLGKPAMLHLPSEQGAPEXLQRCLEENQELRDAIRQSNQILRERCEELLHFQASQREEKEFLMCKFQEARKLVERLGLEKLDLKRQKEQALREVEHLKRCQQQMAEDKASVKAQVXSLLGELQESQSRLEAAXKECQALEGRARAASEQARQLESEREALQQQHSVQVDQLRMQGQSVEAALRMERQAASEEKRKLAQLQVAYHQLFQEYDNHIKSSVVG

SEQ ID NO: 13169 - protein, 419 aa, Homo sapiens
  MOD_RES (50)..(50): Selenocysteine
  MOD_RES (147)..(147): Selenocysteine
  MOD_RES (164)..(164): Selenocysteine
  MOD_RES (297)..(297): Selenocysteine
  MOD_RES (409)..(409): Selenocysteine
MNRHLWKSQLCEMVQPSGGPAADQDVLGEESPLGKPAMLHLPSEQGAPEXLQRCLEENQELRDAIRQSNQILRERCEELLHFQASQREEKEFLMCKFQEARKLVERLGLEKLDLKRQKEQALREVEHLKRCQQQMAEDKASVKAQVXSLLGELQESQSRLEAAXKECQALEGRARAASEQARQLESEREALQQQHSVQVDQLRMQGQSVEAALRMERQAASEEKRKLAQLQVAYHQLFQEYDNHIKSSVVGSERKRGMQLEDLKQQLQQAEEALVAKQEVIDKLKEEAEQHKIVMEXVPVLKAQADIYKADFQAERQAREKLAEKKELLQEQLEQLQREYSKLKASCQESARIEDMRKRHVEVSQAPLPPAPAYLSSPLALPSQRRSPPEEPPDFCCPKCQYQAPDMDXLQIHVMECIE

SEQ ID NO: 13170 - protein, 320 aa, Homo sapiens
  MOD_RES (50)..(50): Selenocysteine
  MOD_RES (147)..(147): Selenocysteine
  MOD_RES (164)..(164): Selenocysteine
  MOD_RES (310)..(310): Selenocysteine
MNRHLWKSQLCEMVQPSGGPAADQDVLGEESPLGKPAMLHLPSEQGAPEXLQRCLEENQELRDAIRQSNQILRERCEELLHFQASQREEKEFLMCKFQEARKLVERLGLEKLDLKRQKEQALREVEHLKRCQQQMAEDKASVKAQVXSLLGELQESQSRLEAAXKECQALEGRRKLAQLQVAYHQLFQEYDNHIKSSVVGSERKRADIYKADFQAERQAREKLAEKKELLQEQLEQLQREYSKLKASCQESARIEDMRKRHVEVSQAPLPPAPAYLSSPLALPSQRRSPPEEPPDFCCPKCQYQAPDMDXLQIHVMECIE

SEQ ID NO: 13171 - protein, 195 aa, Homo sapiens
  MOD_RES (38)..(38): Selenocysteine
  MOD_RES (135)..(135): Selenocysteine
  MOD_RES (152)..(152): Selenocysteine
MVQPSGGPAADQDVLGEESPLGKPAMLHLPSEQGAPEXLQRCLEENQELRDAIRQSNQILRERCEELLHFQASQREEKEFLMCKFQEARKLVERLGLEKLDLKRQKEQALREVEHLKRCQQQMAEDKASVKAQVXSLLGELQESQSRLEAAXKECQALEGRARAASEQARQLESEREALQQQHSVQVDQLRMQGQ

SEQ ID NO: 13172 - protein, 249 aa, Homo sapiens
  MOD_RES (21)..(21): Selenocysteine
  MOD_RES (63)..(63): Selenocysteine
  MOD_RES (88)..(88): Selenocysteine
  MOD_RES (128)..(128): Selenocysteine
  MOD_RES (130)..(130): Selenocysteine
  MOD_RES (145)..(145): Selenocysteine
  MOD_RES (184)..(184): Selenocysteine
  MOD_RES (208)..(208): Selenocysteine
  MOD_RES (240)..(240): Selenocysteine
MDADEGQDMSQVSGDKGLSDXPYDSSASYEKENEMMKSHVMDQAINNAINYLGAESLRPLVQXPPGGSEVVPVISPMYQLHKPLAEGXPRSNHSAQDSAVENLLLLSKAKLVPSEREASPSNSCQDSXDXESNNEEQRSGLIYLXNHIAPHARNGLSLKEEHRAYDLLRAASENSQDALRVVSXSGEQMKVYKCEHCRVLFLDHVMYXIHMGCHGFRDPFECNMCGYHSQDRYEFSSHIXRGEHRFHMS

SEQ ID NO: 13173 - protein, 376 aa, Homo sapiens
  MOD_RES (23)..(23): Selenocysteine
  MOD_RES (39)..(40): Selenocysteine
  MOD_RES (61)..(61): Selenocysteine
  MOD_RES (140)..(140): Selenocysteine
  MOD_RES (148)..(148): Selenocysteine
  MOD_RES (190)..(190): Selenocysteine
  MOD_RES (215)..(215): Selenocysteine
  MOD_RES (255)..(255): Selenocysteine
  MOD_RES (257)..(257): Selenocysteine
  MOD_RES (272)..(272): Selenocysteine
  MOD_RES (311)..(311): Selenocysteine
  MOD_RES (335)..(335): Selenocysteine
  MOD_RES (367)..(367): Selenocysteine
MDADEGQDMSQVSGKESPPVSDXPDEGDEPMPIPEDLSXXSGGQQSSKSDRVVASNVKVEXQSDEENGRACEMNGEECAEDLRMLDASGEKMNGSHRDQGSSALSGVGGIRLPNGKLKCDICGIICIGPNVLMVHKRSHXGDKGLSDXPYDSSASYEKENEMMKSHVMDQAINNAINYLGAESLRPLVQXPPGGSEVVPVISPMYQLHKPLAEGXPRSNHSAQDSAVENLLLLSKAKLVPSEREASPSNSCQDSXDXESNNEEQRSGLIYLXNHIAPHARNGLSLKEEHRAYDLLRAASENSQDALRVVSXSGEQMKVYKCEHCRVLFLDHVMYXIHMGCHGFRDPFECNMCGYHSQDRYEFSSHIXRGEHRFHMS

SEQ ID NO: 13174 - protein, 432 aa, Homo sapiens
  MOD_RES (23)..(23): Selenocysteine
  MOD_RES (39)..(40): Selenocysteine
  MOD_RES (61)..(61): Selenocysteine
  MOD_RES (140)..(140): Selenocysteine
  MOD_RES (155)..(155): Selenocysteine
  MOD_RES (189)..(189): Selenocysteine
  MOD_RES (194)..(194): Selenocysteine
  MOD_RES (204)..(204): Selenocysteine
  MOD_RES (246)..(246): Selenocysteine
  MOD_RES (271)..(271): Selenocysteine
  MOD_RES (311)..(311): Selenocysteine
  MOD_RES (313)..(313): Selenocysteine
  MOD_RES (328)..(328): Selenocysteine
  MOD_RES (367)..(367): Selenocysteine
  MOD_RES (391)..(391): Selenocysteine
  MOD_RES (423)..(423): Selenocysteine
MDADEGQDMSQVSGKESPPVSDXPDEGDEPMPIPEDLSXXSGGQQSSKSDRVVASNVKVEXQSDEENGRACEMNGEECAEDLRMLDASGEKMNGSHRDQGSSALSGVGGIRLPNGKLKCDICGIICIGPNVLMVHKRSHXGERPFQCNQCGASFXQKGNLLRHIKLHSGEKPFKCHLCNYACRRRDALXGHLRXHSGDKGLSDXPYDSSASYEKENEMMKSHVMDQAINNAINYLGAESLRPLVQXPPGGSEVVPVISPMYQLHKPLAEGXPRSNHSAQDSAVENLLLLSKAKLVPSEREASPSNSCQDSXDXESNNEEQRSGLIYLXNHIAPHARNGLSLKEEHRAYDLLRAASENSQDALRVVSXSGEQMKVYKCEHCRVLFLDHVMYXIHMGCHGFRDPFECNMCGYHSQDRYEFSSHIXRGEHRFHMS

SEQ ID NO: 13175 - protein, 519 aa, Homo sapiens
  MOD_RES (23)..(23): Selenocysteine
  MOD_RES (39)..(40): Selenocysteine
  MOD_RES (61)..(61): Selenocysteine
  MOD_RES (140)..(140): Selenocysteine
  MOD_RES (155)..(155): Selenocysteine
  MOD_RES (189)..(189): Selenocysteine
  MOD_RES (194)..(194): Selenocysteine
  MOD_RES (235)..(235): Selenocysteine
  MOD_RES (244)..(244): Selenocysteine
  MOD_RES (291)..(291): Selenocysteine
  MOD_RES (333)..(333): Selenocysteine
  MOD_RES (358)..(358): Selenocysteine
  MOD_RES (398)..(398): Selenocysteine
  MOD_RES (400)..(400): Selenocysteine
  MOD_RES (415)..(415): Selenocysteine
  MOD_RES (454)..(454): Selenocysteine
  MOD_RES (478)..(478): Selenocysteine
  MOD_RES (510)..(510): Selenocysteine
MDADEGQDMSQVSGKESPPVSDXPDEGDEPMPIPEDLSXXSGGQQSSKSDRVVASNVKVEXQSDEENGRACEMNGEECAEDLRMLDASGEKMNGSHRDQGSSALSGVGGIRLPNGKLKCDICGIICIGPNVLMVHKRSHXGERPFQCNQCGASFXQKGNLLRHIKLHSGEKPFKCHLCNYACRRRDALXGHLRXHSVGKPHKCGYCGRSYKQRSSLEEHKERCHNYLESMGLPGXLYPVIKEEXNHSEMAEDLCKIGSERSLVLDRLASNVAKRKSSMPQKFLGDKGLSDXPYDSSASYEKENEMMKSHVMDQAINNAINYLGAESLRPLVQXPPGGSEVVPVISPMYQLHKPLAEGXPRSNHSAQDSAVENLLLLSKAKLVPSEREASPSNSCQDSXDXESNNEEQRSGLIYLXNHIAPHARNGLSLKEEHRAYDLLRAASENSQDALRVVSXSGEQMKVYKCEHCRVLFLDHVMYXIHMGCHGFRDPFECNMCGYHSQDRYEFSSHIXRGEHRFHMS

SEQ ID NO: 13176 - protein, 477 aa, Homo sapiens
  MOD_RES (23)..(23): Selenocysteine
  MOD_RES (39)..(40): Selenocysteine
  MOD_RES (61)..(61): Selenocysteine
  MOD_RES (140)..(140): Selenocysteine
  MOD_RES (155)..(155): Selenocysteine
  MOD_RES (189)..(189): Selenocysteine
  MOD_RES (194)..(194): Selenocysteine
  MOD_RES (202)..(202): Selenocysteine
  MOD_RES (249)..(249): Selenocysteine
  MOD_RES (291)..(291): Selenocysteine
  MOD_RES (316)..(316): Selenocysteine
  MOD_RES (356)..(356): Selenocysteine
  MOD_RES (358)..(358): Selenocysteine
  MOD_RES (373)..(373): Selenocysteine
  MOD_RES (412)..(412): Selenocysteine
  MOD_RES (436)..(436): Selenocysteine
  MOD_RES (468)..(468): Selenocysteine
MDADEGQDMSQVSGKESPPVSDXPDEGDEPMPIPEDLSXXSGGQQSSKSDRVVASNVKVEXQSDEENGRACEMNGEECAEDLRMLDASGEKMNGSHRDQGSSALSGVGGIRLPNGKLKCDICGIICIGPNVLMVHKRSHXGERPFQCNQCGASFXQKGNLLRHIKLHSGEKPFKCHLCNYACRRRDALXGHLRXHSVIKEEXNHSEMAEDLCKIGSERSLVLDRLASNVAKRKSSMPQKFLGDKGLSDXPYDSSASYEKENEMMKSHVMDQAINNAINYLGAESLRPLVQXPPGGSEVVPVISPMYQLHKPLAEGXPRSNHSAQDSAVENLLLLSKAKLVPSEREASPSNSCQDSXDXESNNEEQRSGLIYLXNHIAPHARNGLSLKEEHRAYDLLRAASENSQDALRVVSXSGEQMKVYKCEHCRVLFLDHVMYXIHMGCHGFRDPFECNMCGYHSQDRYEFSSHIXRGEHRFHMS

SEQ ID NO: 13177 - protein, 432 aa, Homo sapiens
  MOD_RES (23)..(23): Selenocysteine
  MOD_RES (39)..(40): Selenocysteine
  MOD_RES (68)..(68): Selenocysteine
  MOD_RES (102)..(102): Selenocysteine
  MOD_RES (107)..(107): Selenocysteine
  MOD_RES (148)..(148): Selenocysteine
  MOD_RES (157)..(157): Selenocysteine
  MOD_RES (204)..(204): Selenocysteine
  MOD_RES (246)..(246): Selenocysteine
  MOD_RES (271)..(271): Selenocysteine
  MOD_RES (311)..(311): Selenocysteine
  MOD_RES (313)..(313): Selenocysteine
  MOD_RES (328)..(328): Selenocysteine
  MOD_RES (367)..(367): Selenocysteine
  MOD_RES (391)..(391): Selenocysteine
  MOD_RES (423)..(423): Selenocysteine
MDADEGQDMSQVSGKESPPVSDXPDEGDEPMPIPEDLSXXSGGQQSSKSDRVVGERPFQCNQCGASFXQKGNLLRHIKLHSGEKPFKCHLCNYACRRRDALXGHLRXHSVGKPHKCGYCGRSYKQRSSLEEHKERCHNYLESMGLPGXLYPVIKEEXNHSEMAEDLCKIGSERSLVLDRLASNVAKRKSSMPQKFLGDKGLSDXPYDSSASYEKENEMMKSHVMDQAINNAINYLGAESLRPLVQXPPGGSEVVPVISPMYQLHKPLAEGXPRSNHSAQDSAVENLLLLSKAKLVPSEREASPSNSCQDSXDXESNNEEQRSGLIYLXNHIAPHARNGLSLKEEHRAYDLLRAASENSQDALRVVSXSGEQMKVYKCEHCRVLFLDHVMYXIHMGCHGFRDPFECNMCGYHSQDRYEFSSHIXRGEHRFHMS

SEQ ID NO: 13178 - protein, 268 aa, Homo sapiens
  MOD_RES (23)..(23): Selenocysteine
  MOD_RES (39)..(40): Selenocysteine
  MOD_RES (55)..(55): Selenocysteine
  MOD_RES (88)..(88): Selenocysteine
  MOD_RES (107)..(107): Selenocysteine
  MOD_RES (147)..(147): Selenocysteine
  MOD_RES (149)..(149): Selenocysteine
  MOD_RES (164)..(164): Selenocysteine
  MOD_RES (203)..(203): Selenocysteine
  MOD_RES (227)..(227): Selenocysteine
  MOD_RES (259)..(259): Selenocysteine
MDADEGQDMSQVSGKESPPVSDXPDEGDEPMPIPEDLSXXSGGQQSSKSDRVVVXYGADDFRDFHAIIPKSFSRERPFQCNQCGASFXQKGNLLRHIKLHKPLAEGXPRSNHSAQDSAVENLLLLSKAKLVPSEREASPSNSCQDSXDXESNNEEQRSGLIYLXNHIAPHARNGLSLKEEHRAYDLLRAASENSQDALRVVSXSGEQMKVYKCEHCRVLFLDHVMYXIHMGCHGFRDPFECNMCGYHSQDRYEFSSHIXRGEHRFHMS

SEQ ID NO: 13179 - protein, 174 aa, Homo sapiens
  MOD_RES (23)..(23): Selenocysteine
  MOD_RES (39)..(40): Selenocysteine
  MOD_RES (55)..(55): Selenocysteine
  MOD_RES (83)..(83): Selenocysteine
  MOD_RES (96)..(96): Selenocysteine
  MOD_RES (117)..(117): Selenocysteine
  MOD_RES (148)..(148): Selenocysteine
  MOD_RES (154)..(154): Selenocysteine
  MOD_RES (168)..(168): Selenocysteine
MDADEGQDMSQVSGKESPPVSDXPDEGDEPMPIPEDLSXXSGGQQSSKSDRVVVXYGADDFRDFHAIIPKSFSRKYMPCFWKXKACLHLLSCKYRXCMFLHQPPRYIKYSLFYSLDXYHIIFGYLYHKVQNEGLGSCAVSWEHGSGVXVRVGVXVALMGLLLRRCCWXALRLLL

SEQ ID NO: 13180 - protein, 336 aa, Homo sapiens
  MOD_RES (52)..(52): Selenocysteine
  MOD_RES (61)..(61): Selenocysteine
  MOD_RES (108)..(108): Selenocysteine
  MOD_RES (150)..(150): Selenocysteine
  MOD_RES (175)..(175): Selenocysteine
  MOD_RES (215)..(215): Selenocysteine
  MOD_RES (217)..(217): Selenocysteine
  MOD_RES (232)..(232): Selenocysteine
  MOD_RES (271)..(271): Selenocysteine
  MOD_RES (295)..(295): Selenocysteine
  MOD_RES (327)..(327): Selenocysteine
MDADEGQDMSQVSVGKPHKCGYCGRSYKQRSSLEEHKERCHNYLESMGLPGXLYPVIKEEXNHSEMAEDLCKIGSERSLVLDRLASNVAKRKSSMPQKFLGDKGLSDXPYDSSASYEKENEMMKSHVMDQAINNAINYLGAESLRPLVQXPPGGSEVVPVISPMYQLHKPLAEGXPRSNHSAQDSAVENLLLLSKAKLVPSEREASPSNSCQDSXDXESNNEEQRSGLIYLXNHIAPHARNGLSLKEEHRAYDLLRAASENSQDALRVVSXSGEQMKVYKCEHCRVLFLDHVMYXIHMGCHGFRDPFECNMCGYHSQDRYEFSSHIXRGEHRFHMS

SEQ ID NO: 13181 - protein, 294 aa, Homo sapiens
  MOD_RES (19)..(19): Selenocysteine
  MOD_RES (66)..(66): Selenocysteine
  MOD_RES (108)..(108): Selenocysteine
  MOD_RES (133)..(133): Selenocysteine
  MOD_RES (173)..(173): Selenocysteine
  MOD_RES (175)..(175): Selenocysteine
  MOD_RES (190)..(190): Selenocysteine
  MOD_RES (229)..(229): Selenocysteine
  MOD_RES (253)..(253): Selenocysteine
  MOD_RES (285)..(285): Selenocysteine
MDADEGQDMSQVSVIKEEXNHSEMAEDLCKIGSERSLVLDRLASNVAKRKSSMPQKFLGDKGLSDXPYDSSASYEKENEMMKSHVMDQAINNAINYLGAESLRPLVQXPPGGSEVVPVISPMYQLHKPLAEGXPRSNHSAQDSAVENLLLLSKAKLVPSEREASPSNSCQDSXDXESNNEEQRSGLIYLXNHIAPHARNGLSLKEEHRAYDLLRAASENSQDALRVVSXSGEQMKVYKCEHCRVLFLDHVMYXIHMGCHGFRDPFECNMCGYHSQDRYEFSSHIXRGEHRFHMS

SEQ ID NO: 13182 - protein, 67 aa, Homo sapiens
  MOD_RES (6)..(6): Selenocysteine
  MOD_RES (22)..(23): Selenocysteine
  MOD_RES (44)..(44): Selenocysteine
PPVSDXPDEGDEPMPIPEDLSXXSGGQQSSKSDRVVGDKGLSDXPYDSSASYEKENEMMKSHVMDQA

SEQ ID NO: 13183 - protein, 52 aa, Homo sapiens
  MOD_RES (3)..(3): Selenocysteine
  MOD_RES (11)..(11): Selenocysteine
  MOD_RES (30)..(30): Selenocysteine
  MOD_RES (33)..(33): Selenocysteine
  MOD_RES (45)..(45): Selenocysteine
MEXEAIDGYIXCDNELSPEREHSNMAIDLXSSXPNGQHASPSHMXSRSFSKI

SEQ ID NO: 13184 - protein, 83 aa, Homo sapiens
  MOD_RES (3)..(3): Selenocysteine
  MOD_RES (11)..(11): Selenocysteine
  MOD_RES (30)..(30): Selenocysteine
  MOD_RES (33)..(33): Selenocysteine
  MOD_RES (45)..(45): Selenocysteine
  MOD_RES (47)..(47): Selenocysteine
MEXEAIDGYIXCDNELSPEREHSNMAIDLXSSXPNGQHASPSHMXSXNSVKLEMQSDEECDRKPLSREDEIRGHDEGSSLEEP

SEQ ID NO: 13185 - protein, 500 aa, Homo sapiens
  MOD_RES (3)..(3): Selenocysteine
  MOD_RES (11)..(11): Selenocysteine
  MOD_RES (30)..(30): Selenocysteine
  MOD_RES (33)..(33): Selenocysteine
  MOD_RES (45)..(45): Selenocysteine
  MOD_RES (47)..(47): Selenocysteine
  MOD_RES (124)..(124): Selenocysteine
  MOD_RES (158)..(158): Selenocysteine
  MOD_RES (163)..(163): Selenocysteine
  MOD_RES (244)..(244): Selenocysteine
  MOD_RES (254)..(254): Selenocysteine
  MOD_RES (278)..(278): Selenocysteine
  MOD_RES (300)..(300): Selenocysteine
  MOD_RES (317)..(317): Selenocysteine
  MOD_RES (346)..(346): Selenocysteine
  MOD_RES (382)..(382): Selenocysteine
  MOD_RES (420)..(421): Selenocysteine
  MOD_RES (461)..(461): Selenocysteine
  MOD_RES (498)..(498): Selenocysteine
MEXEAIDGYIXCDNELSPEREHSNMAIDLXSSXPNGQHASPSHMXSXNSVKLEMQSDEECDRKPLSREDEIRGHDEGSSLEEPLIESSEVADNRKVQELQGEGGIRLPNGERPFHCNQCGASFXQKGNLLRHIKLHSGEKPFKCPFCSYACRRRDALXGHLRXHSVGKPHKCNYCGRSYKQRSSLEEHKERCHNYLQNVSMEAAGQVMSHHVPPMEDCKEQEPIMDNNISLVPFERPAVIEKLXGNMGKRKSSXPQKFVGEKLMRFSYPDIHFDMNLXYEKEAELMQSHMMDQAINNAIXYLGAEALHPLMQHPPSXIAEVAPVISSAYSQVYHPNRIERPISREXADSHENNMDGPISLIRPKSRPQEREASPSNSCLDSXDSESSHDDHQSYQGHPALNPKRKQSPAYMKEDVKALDXXKAPKGSLKDIYKVFNGEGEQIRAFKCEHCRVLFLDHVMYXIHMGCHGYRDPLECNICGYRSQDRYEFSSHIVRGEHXFH

SEQ ID NO: 13186 - protein, 239 aa, Homo sapiens
  MOD_RES (3)..(3): Selenocysteine
  MOD_RES (11)..(11): Selenocysteine
  MOD_RES (30)..(30): Selenocysteine
  MOD_RES (33)..(33): Selenocysteine
  MOD_RES (45)..(45): Selenocysteine
  MOD_RES (47)..(47): Selenocysteine
  MOD_RES (135)..(135): Selenocysteine
  MOD_RES (150)..(150): Selenocysteine
  MOD_RES (184)..(184): Selenocysteine
  MOD_RES (189)..(189): Selenocysteine
MEXEAIDGYIXCDNELSPEREHSNMAIDLXSSXPNGQHASPSHMXSXNSVKLEMQSDEECDRKPLSREDEIRGHDEGSSLEEPLIESSEVADNRKVQELQGEGGIRLPNGKLKCDVCGMVCIGPNVLMVHKRSHXGERPFHCNQCGASFXQKGNLLRHIKLHSGEKPFKCPFCSYACRRRDALXGHLRXHSVGKPHKCNYCGRSYKQRSSLEEHKERCHNYLQNVSMEAAGQVMSHHDS

SEQ ID NO: 13187 - protein, 526 aa, Homo sapiens
  MOD_RES (3)..(3): Selenocysteine
  MOD_RES (11)..(11): Selenocysteine
  MOD_RES (30)..(30): Selenocysteine
  MOD_RES (33)..(33): Selenocysteine
  MOD_RES (45)..(45): Selenocysteine
  MOD_RES (47)..(47): Selenocysteine
  MOD_RES (135)..(135): Selenocysteine
  MOD_RES (150)..(150): Selenocysteine
  MOD_RES (184)..(184): Selenocysteine
  MOD_RES (189)..(189): Selenocysteine
  MOD_RES (270)..(270): Selenocysteine
  MOD_RES (280)..(280): Selenocysteine
  MOD_RES (304)..(304): Selenocysteine
  MOD_RES (326)..(326): Selenocysteine
  MOD_RES (343)..(343): Selenocysteine
  MOD_RES (372)..(372): Selenocysteine
  MOD_RES (408)..(408): Selenocysteine
  MOD_RES (446)..(447): Selenocysteine
  MOD_RES (487)..(487): Selenocysteine
  MOD_RES (524)..(524): Selenocysteine
MEXEAIDGYIXCDNELSPEREHSNMAIDLXSSXPNGQHASPSHMXSXNSVKLEMQSDEECDRKPLSREDEIRGHDEGSSLEEPLIESSEVADNRKVQELQGEGGIRLPNGKLKCDVCGMVCIGPNVLMVHKRSHXGERPFHCNQCGASFXQKGNLLRHIKLHSGEKPFKCPFCSYACRRRDALXGHLRXHSVGKPHKCNYCGRSYKQRSSLEEHKERCHNYLQNVSMEAAGQVMSHHVPPMEDCKEQEPIMDNNISLVPFERPAVIEKLXGNMGKRKSSXPQKFVGEKLMRFSYPDIHFDMNLXYEKEAELMQSHMMDQAINNAIXYLGAEALHPLMQHPPSXIAEVAPVISSAYSQVYHPNRIERPISREXADSHENNMDGPISLIRPKSRPQEREASPSNSCLDSXDSESSHDDHQSYQGHPALNPKRKQSPAYMKEDVKALDXXKAPKGSLKDIYKVFNGEGEQIRAFKCEHCRVLFLDHVMYXIHMGCHGYRDPLECNICGYRSQDRYEFSSHIVRGEHXFH

SEQ ID NO: 13188 - protein, 148 aa, Homo sapiens
  MOD_RES (3)..(3): Selenocysteine
  MOD_RES (11)..(11): Selenocysteine
  MOD_RES (30)..(30): Selenocysteine
  MOD_RES (33)..(33): Selenocysteine
  MOD_RES (45)..(45): Selenocysteine
  MOD_RES (47)..(47): Selenocysteine
  MOD_RES (135)..(135): Selenocysteine
  MOD_RES (142)..(143): Selenocysteine
MEXEAIDGYIXCDNELSPEREHSNMAIDLXSSXPNGQHASPSHMXSXNSVKLEMQSDEECDRKPLSREDEIRGHDEGSSLEEPLIESSEVADNRKVQELQGEGGIRLPNGKLKCDVCGMVCIGPNVLMVHKRSHXGVAVVKXXFSEFC

SEQ ID NO: 13189 - protein, 92 aa, Homo sapiens
  MOD_RES (4)..(4): Selenocysteine
  MOD_RES (6)..(6): Selenocysteine
  MOD_RES (9)..(9): Selenocysteine
  MOD_RES (17)..(17): Selenocysteine
  MOD_RES (36)..(36): Selenocysteine
  MOD_RES (39)..(39): Selenocysteine
  MOD_RES (51)..(51): Selenocysteine
  MOD_RES (70)..(70): Selenocysteine
  MOD_RES (82)..(82): Selenocysteine
MHCXLXMEXEAIDGYIXCDNELSPEREHSNMAIDLXSSXPNGQHASPSHMXSSKSSFYDFFLCVCVSPAXDFNLLGLWGPLXLWYSYCYRFC

SEQ ID NO: 13190 - protein, 126 aa, Homo sapiens
  MOD_RES (4)..(4): Selenocysteine
  MOD_RES (6)..(6): Selenocysteine
  MOD_RES (9)..(9): Selenocysteine
  MOD_RES (17)..(17): Selenocysteine
  MOD_RES (36)..(36): Selenocysteine
  MOD_RES (39)..(39): Selenocysteine
  MOD_RES (51)..(51): Selenocysteine
  MOD_RES (53)..(53): Selenocysteine
MHCXLXMEXEAIDGYIXCDNELSPEREHSNMAIDLXSSXPNGQHASPSHMXSXNSVKLEMQSDEECDRKPLSREDEIRGHDEGSSLEEPLIESSEVADNRKVQELQGEGGIRLPNGERPFHCNQCG

SEQ ID NO: 13191 - protein, 532 aa, Homo sapiens
  MOD_RES (4)..(4): Selenocysteine
  MOD_RES (6)..(6): Selenocysteine
  MOD_RES (9)..(9): Selenocysteine
  MOD_RES (17)..(17): Selenocysteine
  MOD_RES (36)..(36): Selenocysteine
  MOD_RES (39)..(39): Selenocysteine
  MOD_RES (51)..(51): Selenocysteine
  MOD_RES (53)..(53): Selenocysteine
  MOD_RES (141)..(141): Selenocysteine
  MOD_RES (156)..(156): Selenocysteine
  MOD_RES (190)..(190): Selenocysteine
  MOD_RES (195)..(195): Selenocysteine
  MOD_RES (276)..(276): Selenocysteine
  MOD_RES (286)..(286): Selenocysteine
  MOD_RES (310)..(310): Selenocysteine
  MOD_RES (332)..(332): Selenocysteine
  MOD_RES (349)..(349): Selenocysteine
  MOD_RES (378)..(378): Selenocysteine
  MOD_RES (414)..(414): Selenocysteine
  MOD_RES (452)..(453): Selenocysteine
  MOD_RES (493)..(493): Selenocysteine
  MOD_RES (530)..(530): Selenocysteine
MHCXLXMEXEAIDGYIXCDNELSPEREHSNMAIDLXSSXPNGQHASPSHMXSXNSVKLEMQSDEECDRKPLSREDEIRGHDEGSSLEEPLIESSEVADNRKVQELQGEGGIRLPNGKLKCDVCGMVCIGPNVLMVHKRSHXGERPFHCNQCGASFXQKGNLLRHIKLHSGEKPFKCPFCSYACRRRDALXGHLRXHSVGKPHKCNYCGRSYKQRSSLEEHKERCHNYLQNVSMEAAGQVMSHHVPPMEDCKEQEPIMDNNISLVPFERPAVIEKLXGNMGKRKSSXPQKFVGEKLMRFSYPDIHFDMNLXYEKEAELMQSHMMDQAINNAIXYLGAEALHPLMQHPPSXIAEVAPVISSAYSQVYHPNRIERPISREXADSHENNMDGPISLIRPKSRPQEREASPSNSCLDSXDSESSHDDHQSYQGHPALNPKRKQSPAYMKEDVKALDXXKAPKGSLKDIYKVFNGEGEQIRAFKCEHCRVLFLDHVMYXIHMGCHGYRDPLECNICGYRSQDRYEFSSHIVRGEHXFH

SEQ ID NO: 13192 - protein, 409 aa, Homo sapiens
  MOD_RES (2)..(2): Selenocysteine
  MOD_RES (4)..(4): Selenocysteine
  MOD_RES (81)..(81): Selenocysteine
  MOD_RES (115)..(115): Selenocysteine
  MOD_RES (120)..(120): Selenocysteine
  MOD_RES (187)..(187): Selenocysteine
  MOD_RES (209)..(209): Selenocysteine
  MOD_RES (226)..(226): Selenocysteine
  MOD_RES (255)..(255): Selenocysteine
  MOD_RES (291)..(291): Selenocysteine
  MOD_RES (329)..(330): Selenocysteine
  MOD_RES (370)..(370): Selenocysteine
  MOD_RES (407)..(407): Selenocysteine
MXSXNSVKLEMQSDEECDRKPLSREDEIRGHDEGSSLEEPLIESSEVADNRKVQELQGEGGIRLPNGERPFHCNQCGASFXQKGNLLRHIKLHSGEKPFKCPFCSYACRRRDALXGHLRXHSVGKPHKCNYCGRSYKQRSSLEEHKERCHNYLQNVSMEAAGQVMSHHGEKLMRFSYPDIHFDMNLXYEKEAELMQSHMMDQAINNAIXYLGAEALHPLMQHPPSXIAEVAPVISSAYSQVYHPNRIERPISREXADSHENNMDGPISLIRPKSRPQEREASPSNSCLDSXDSESSHDDHQSYQGHPALNPKRKQSPAYMKEDVKALDXXKAPKGSLKDIYKVFNGEGEQIRAFKCEHCRVLFLDHVMYXIHMGCHGYRDPLECNICGYRSQDRYEFSSHIVRGEHXFH

SEQ ID NO: 13193 - protein, 411 aa, Homo sapiens
  MOD_RES (2)..(2): Selenocysteine
  MOD_RES (4)..(4): Selenocysteine
  MOD_RES (81)..(81): Selenocysteine
  MOD_RES (115)..(115): Selenocysteine
  MOD_RES (120)..(120): Selenocysteine
  MOD_RES (155)..(155): Selenocysteine
  MOD_RES (165)..(165): Selenocysteine
  MOD_RES (189)..(189): Selenocysteine
  MOD_RES (211)..(211): Selenocysteine
  MOD_RES (228)..(228): Selenocysteine
  MOD_RES (257)..(257): Selenocysteine
  MOD_RES (293)..(293): Selenocysteine
  MOD_RES (331)..(332): Selenocysteine
  MOD_RES (372)..(372): Selenocysteine
  MOD_RES (409)..(409): Selenocysteine
MXSXNSVKLEMQSDEECDRKPLSREDEIRGHDEGSSLEEPLIESSEVADNRKVQELQGEGGIRLPNGERPFHCNQCGASFXQKGNLLRHIKLHSGEKPFKCPFCSYACRRRDALXGHLRXHSVPPMEDCKEQEPIMDNNISLVPFERPAVIEKLXGNMGKRKSSXPQKFVGEKLMRFSYPDIHFDMNLXYEKEAELMQSHMMDQAINNAIXYLGAEALHPLMQHPPSXIAEVAPVISSAYSQVYHPNRIERPISREXADSHENNMDGPISLIRPKSRPQEREASPSNSCLDSXDSESSHDDHQSYQGHPALNPKRKQSPAYMKEDVKALDXXKAPKGSLKDIYKVFNGEGEQIRAFKCEHCRVLFLDHVMYXIHMGCHGYRDPLECNICGYRSQDRYEFSSHIVRGEHXFH

SEQ ID NO: 13194 - protein, 436 aa, Homo sapiens
  MOD_RES (6)..(6): Selenocysteine
  MOD_RES (13)..(13): Selenocysteine
  MOD_RES (80)..(80): Selenocysteine
  MOD_RES (107)..(107): Selenocysteine
  MOD_RES (122)..(122): Selenocysteine
  MOD_RES (135)..(135): Selenocysteine
  MOD_RES (156)..(156): Selenocysteine
  MOD_RES (161)..(161): Selenocysteine
  MOD_RES (228)..(228): Selenocysteine
  MOD_RES (253)..(253): Selenocysteine
  MOD_RES (258)..(258): Selenocysteine
  MOD_RES (274)..(274): Selenocysteine
  MOD_RES (314)..(314): Selenocysteine
  MOD_RES (316)..(316): Selenocysteine
  MOD_RES (395)..(395): Selenocysteine
MEDIQXNAELKSXQEQSVPADDSMKVKDEYSERDENVLKSEPMGNAEEPEIPYSYSREYNEYENIKLERHVVSFDSSRPXSGKMNCDVCGLSCISFNVLMVHKRSHXGERPFQCNQCGASFXQKGNLLRHIKLHXGEKPFKCHLCNYACQRRDALXGHLRXHSASAEARHIKAEMGSERALVLDRLASNVAKRKSSMPQKFIGEKRHCFDVNYNSSYMYEKESELIQXRMMDQAINNAISYLGAEALRPLVQXPPAPXSEMVPVISSMYPIALXRAEMSNGAPQELEKKSIHLPEKSVPSERGLSPNNSGHDSXDXDSNHEERQNHIYQQNHMVLSRARNGMPLLKEVPRSYELLKPPPICPRDSVKVINKEGEVMDVYRCDHCRVLFLDYVMFXIHMGCHGFRDPFECNMCGYRSHDRYEFSSHIARGEHRALLK

SEQ ID NO: 13195 - protein, 475 aa, Homo sapiens
  MOD_RES (6)..(6): Selenocysteine
  MOD_RES (13)..(13): Selenocysteine
  MOD_RES (80)..(80): Selenocysteine
  MOD_RES (107)..(107): Selenocysteine
  MOD_RES (122)..(122): Selenocysteine
  MOD_RES (135)..(135): Selenocysteine
  MOD_RES (156)..(156): Selenocysteine
  MOD_RES (161)..(161): Selenocysteine
  MOD_RES (192)..(192): Selenocysteine
  MOD_RES (197)..(197): Selenocysteine
  MOD_RES (202)..(202): Selenocysteine
  MOD_RES (267)..(267): Selenocysteine
  MOD_RES (292)..(292): Selenocysteine
  MOD_RES (297)..(297): Selenocysteine
  MOD_RES (313)..(313): Selenocysteine
  MOD_RES (353)..(353): Selenocysteine
  MOD_RES (355)..(355): Selenocysteine
  MOD_RES (434)..(434): Selenocysteine
MEDIQXNAELKSXQEQSVPADDSMKVKDEYSERDENVLKSEPMGNAEEPEIPYSYSREYNEYENIKLERHVVSFDSSRPXSGKMNCDVCGLSCISFNVLMVHKRSHXGERPFQCNQCGASFXQKGNLLRHIKLHXGEKPFKCHLCNYACQRRDALXGHLRXHSVEKPYKCEFCGRSYKQRSSLEEHKERCRXFLQSXDPGDXASAEARHIKAEMGSERALVLDRLASNVAKRKSSMPQKFIGEKRHCFDVNYNSSYMYEKESELIQXRMMDQAINNAISYLGAEALRPLVQXPPAPXSEMVPVISSMYPIALXRAEMSNGAPQELEKKSIHLPEKSVPSERGLSPNNSGHDSXDXDSNHEERQNHIYQQNHMVLSRARNGMPLLKEVPRSYELLKPPPICPRDSVKVINKEGEVMDVYRCDHCRVLFLDYVMFXIHMGCHGFRDPFECNMCGYRSHDRYEFSSHIARGEHRALLK

SEQ ID NO: 13196 - protein, 327 aa, Homo sapiens
  MOD_RES (6)..(6): Selenocysteine
  MOD_RES (13)..(13): Selenocysteine
  MOD_RES (32)..(32): Selenocysteine
  MOD_RES (119)..(119): Selenocysteine
  MOD_RES (144)..(144): Selenocysteine
  MOD_RES (149)..(149): Selenocysteine
  MOD_RES (165)..(165): Selenocysteine
  MOD_RES (205)..(205): Selenocysteine
  MOD_RES (207)..(207): Selenocysteine
  MOD_RES (286)..(286): Selenocysteine
MEDIQXNAELKSXQEQSVPAESAAVLNDYSLXKSHEMENVDSGEGPANEDEDIGASAEARHIKAEMGSERALVLDRLASNVAKRKSSMPQKFIGEKRHCFDVNYNSSYMYEKESELIQXRMMDQAINNAISYLGAEALRPLVQXPPAPXSEMVPVISSMYPIALXRAEMSNGAPQELEKKSIHLPEKSVPSERGLSPNNSGHDSXDXDSNHEERQNHIYQQNHMVLSRARNGMPLLKEVPRSYELLKPPPICPRDSVKVINKEGEVMDVYRCDHCRVLFLDYVMFXIHMGCHGFRDPFECNMCGYRSHDRYEFSSHIARGEHRALLK

SEQ ID NO: 13197 - protein, 414 aa, Homo sapiens
  MOD_RES (6)..(6): Selenocysteine
  MOD_RES (13)..(13): Selenocysteine
  MOD_RES (32)..(32): Selenocysteine
  MOD_RES (114)..(114): Selenocysteine
  MOD_RES (141)..(141): Selenocysteine
  MOD_RES (206)..(206): Selenocysteine
  MOD_RES (231)..(231): Selenocysteine
  MOD_RES (236)..(236): Selenocysteine
  MOD_RES (252)..(252): Selenocysteine
  MOD_RES (292)..(292): Selenocysteine
  MOD_RES (294)..(294): Selenocysteine
  MOD_RES (373)..(373): Selenocysteine
MEDIQXNAELKSXQEQSVPAESAAVLNDYSLXKSHEMENVDSGEGPANEDEDIGDDSMKVKDEYSERDENVLKSEPMGNAEEPEIPYSYSREYNEYENIKLERHVVSFDSSRPXSGKMNCDVCGLSCISFNVLMVHKRSHXASAEARHIKAEMGSERALVLDRLASNVAKRKSSMPQKFIGEKRHCFDVNYNSSYMYEKESELIQXRMMDQAINNAISYLGAEALRPLVQXPPAPXSEMVPVISSMYPIALXRAEMSNGAPQELEKKSIHLPEKSVPSERGLSPNNSGHDSXDXDSNHEERQNHIYQQNHMVLSRARNGMPLLKEVPRSYELLKPPPICPRDSVKVINKEGEVMDVYRCDHCRVLFLDYVMFXIHMGCHGFRDPFECNMCGYRSHDRYEFSSHIARGEHRALLK

SEQ ID NO: 13198 - protein, 375 aa, Homo sapiens
  MOD_RES (6)..(6): Selenocysteine
  MOD_RES (13)..(13): Selenocysteine
  MOD_RES (32)..(32): Selenocysteine
  MOD_RES (114)..(114): Selenocysteine
  MOD_RES (141)..(141): Selenocysteine
  MOD_RES (167)..(167): Selenocysteine
  MOD_RES (192)..(192): Selenocysteine
  MOD_RES (197)..(197): Selenocysteine
  MOD_RES (213)..(213): Selenocysteine
  MOD_RES (253)..(253): Selenocysteine
  MOD_RES (255)..(255): Selenocysteine
  MOD_RES (334)..(334): Selenocysteine
MEDIQXNAELKSXQEQSVPAESAAVLNDYSLXKSHEMENVDSGEGPANEDEDIGDDSMKVKDEYSERDENVLKSEPMGNAEEPEIPYSYSREYNEYENIKLERHVVSFDSSRPXSGKMNCDVCGLSCISFNVLMVHKRSHXGEKRHCFDVNYNSSYMYEKESELIQXRMMDQAINNAISYLGAEALRPLVQXPPAPXSEMVPVISSMYPIALXRAEMSNGAPQELEKKSIHLPEKSVPSERGLSPNNSGHDSXDXDSNHEERQNHIYQQNHMVLSRARNGMPLLKEVPRSYELLKPPPICPRDSVKVINKEGEVMDVYRCDHCRVLFLDYVMFXIHMGCHGFRDPFECNMCGYRSHDRYEFSSHIARGEHRALLK

SEQ ID NO: 13199 - protein, 470 aa, Homo sapiens
  MOD_RES (6)..(6): Selenocysteine
  MOD_RES (13)..(13): Selenocysteine
  MOD_RES (32)..(32): Selenocysteine
  MOD_RES (114)..(114): Selenocysteine
  MOD_RES (141)..(141): Selenocysteine
  MOD_RES (156)..(156): Selenocysteine
  MOD_RES (169)..(169): Selenocysteine
  MOD_RES (190)..(190): Selenocysteine
  MOD_RES (195)..(195): Selenocysteine
  MOD_RES (262)..(262): Selenocysteine
  MOD_RES (287)..(287): Selenocysteine
  MOD_RES (292)..(292): Selenocysteine
  MOD_RES (308)..(308): Selenocysteine
  MOD_RES (348)..(348): Selenocysteine
  MOD_RES (350)..(350): Selenocysteine
  MOD_RES (429)..(429): Selenocysteine
MEDIQXNAELKSXQEQSVPAESAAVLNDYSLXKSHEMENVDSGEGPANEDEDIGDDSMKVKDEYSERDENVLKSEPMGNAEEPEIPYSYSREYNEYENIKLERHVVSFDSSRPXSGKMNCDVCGLSCISFNVLMVHKRSHXGERPFQCNQCGASFXQKGNLLRHIKLHXGEKPFKCHLCNYACQRRDALXGHLRXHSASAEARHIKAEMGSERALVLDRLASNVAKRKSSMPQKFIGEKRHCFDVNYNSSYMYEKESELIQXRMMDQAINNAISYLGAEALRPLVQXPPAPXSEMVPVISSMYPIALXRAEMSNGAPQELEKKSIHLPEKSVPSERGLSPNNSGHDSXDXDSNHEERQNHIYQQNHMVLSRARNGMPLLKEVPRSYELLKPPPICPRDSVKVINKEGEVMDVYRCDHCRVLFLDYVMFXIHMGCHGFRDPFECNMCGYRSHDRYEFSSHIARGEHRALLK

SEQ ID NO: 13200 - protein, 431 aa, Homo sapiens
  MOD_RES (6)..(6): Selenocysteine
  MOD_RES (13)..(13): Selenocysteine
  MOD_RES (32)..(32): Selenocysteine
  MOD_RES (114)..(114): Selenocysteine
  MOD_RES (141)..(141): Selenocysteine
  MOD_RES (156)..(156): Selenocysteine
  MOD_RES (169)..(169): Selenocysteine
  MOD_RES (190)..(190): Selenocysteine
  MOD_RES (195)..(195): Selenocysteine
  MOD_RES (223)..(223): Selenocysteine
  MOD_RES (248)..(248): Selenocysteine
  MOD_RES (253)..(253): Selenocysteine
  MOD_RES (269)..(269): Selenocysteine
  MOD_RES (309)..(309): Selenocysteine
  MOD_RES (311)..(311): Selenocysteine
  MOD_RES (390)..(390): Selenocysteine
MEDIQXNAELKSXQEQSVPAESAAVLNDYSLXKSHEMENVDSGEGPANEDEDIGDDSMKVKDEYSERDENVLKSEPMGNAEEPEIPYSYSREYNEYENIKLERHVVSFDSSRPXSGKMNCDVCGLSCISFNVLMVHKRSHXGERPFQCNQCGASFXQKGNLLRHIKLHXGEKPFKCHLCNYACQRRDALXGHLRXHSGEKRHCFDVNYNSSYMYEKESELIQXRMMDQAINNAISYLGAEALRPLVQXPPAPXSEMVPVISSMYPIALXRAEMSNGAPQELEKKSIHLPEKSVPSERGLSPNNSGHDSXDXDSNHEERQNHIYQQNHMVLSRARNGMPLLKEVPRSYELLKPPPICPRDSVKVINKEGEVMDVYRCDHCRVLFLDYVMFXIHMGCHGFRDPFECNMCGYRSHDRYEFSSHIARGEHRALLK

SEQ ID NO: 13201 - protein, 509 aa, Homo sapiens
  MOD_RES (6)..(6): Selenocysteine
  MOD_RES (13)..(13): Selenocysteine
  MOD_RES (32)..(32): Selenocysteine
  MOD_RES (114)..(114): Selenocysteine
  MOD_RES (141)..(141): Selenocysteine
  MOD_RES (156)..(156): Selenocysteine
  MOD_RES (169)..(169): Selenocysteine
  MOD_RES (190)..(190): Selenocysteine
  MOD_RES (195)..(195): Selenocysteine
  MOD_RES (226)..(226): Selenocysteine
  MOD_RES (231)..(231): Selenocysteine
  MOD_RES (236)..(236): Selenocysteine
  MOD_RES (301)..(301): Selenocysteine
  MOD_RES (326)..(326): Selenocysteine
  MOD_RES (331)..(331): Selenocysteine
  MOD_RES (347)..(347): Selenocysteine
  MOD_RES (387)..(387): Selenocysteine
  MOD_RES (389)..(389): Selenocysteine
  MOD_RES (468)..(468): Selenocysteine
MEDIQXNAELKSXQEQSVPAESAAVLNDYSLXKSHEMENVDSGEGPANEDEDIGDDSMKVKDEYSERDENVLKSEPMGNAEEPEIPYSYSREYNEYENIKLERHVVSFDSSRPXSGKMNCDVCGLSCISFNVLMVHKRSHXGERPFQCNQCGASFXQKGNLLRHIKLHXGEKPFKCHLCNYACQRRDALXGHLRXHSVEKPYKCEFCGRSYKQRSSLEEHKERCRXFLQSXDPGDXASAEARHIKAEMGSERALVLDRLASNVAKRKSSMPQKFIGEKRHCFDVNYNSSYMYEKESELIQXRMMDQAINNAISYLGAEALRPLVQXPPAPXSEMVPVISSMYPIALXRAEMSNGAPQELEKKSIHLPEKSVPSERGLSPNNSGHDSXDXDSNHEERQNHIYQQNHMVLSRARNGMPLLKEVPRSYELLKPPPICPRDSVKVINKEGEVMDVYRCDHCRVLFLDYVMFXIHMGCHGFRDPFECNMCGYRSHDRYEFSSHIARGEHRALLK

SEQ ID NO: 13202 - protein, 470 aa, Homo sapiens
  MOD_RES (6)..(6): Selenocysteine
  MOD_RES (13)..(13): Selenocysteine
  MOD_RES (32)..(32): Selenocysteine
  MOD_RES (114)..(114): Selenocysteine
  MOD_RES (141)..(141): Selenocysteine
  MOD_RES (156)..(156): Selenocysteine
  MOD_RES (169)..(169): Selenocysteine
  MOD_RES (190)..(190): Selenocysteine
  MOD_RES (195)..(195): Selenocysteine
  MOD_RES (226)..(226): Selenocysteine
  MOD_RES (231)..(231): Selenocysteine
  MOD_RES (236)..(236): Selenocysteine
  MOD_RES (262)..(262): Selenocysteine
  MOD_RES (287)..(287): Selenocysteine
  MOD_RES (292)..(292): Selenocysteine
  MOD_RES (308)..(308): Selenocysteine
  MOD_RES (348)..(348): Selenocysteine
  MOD_RES (350)..(350): Selenocysteine
  MOD_RES (429)..(429): Selenocysteine
MEDIQXNAELKSXQEQSVPAESAAVLNDYSLXKSHEMENVDSGEGPANEDEDIGDDSMKVKDEYSERDENVLKSEPMGNAEEPEIPYSYSREYNEYENIKLERHVVSFDSSRPXSGKMNCDVCGLSCISFNVLMVHKRSHXGERPFQCNQCGASFXQKGNLLRHIKLHXGEKPFKCHLCNYACQRRDALXGHLRXHSVEKPYKCEFCGRSYKQRSSLEEHKERCRXFLQSXDPGDXGEKRHCFDVNYNSSYMYEKESELIQXRMMDQAINNAISYLGAEALRPLVQXPPAPXSEMVPVISSMYPIALXRAEMSNGAPQELEKKSIHLPEKSVPSERGLSPNNSGHDSXDXDSNHEERQNHIYQQNHMVLSRARNGMPLLKEVPRSYELLKPPPICPRDSVKVINKEGEVMDVYRCDHCRVLFLDYVMFXIHMGCHGFRDPFECNMCGYRSHDRYEFSSHIARGEHRALLK

SEQ ID NO: 13203 - protein, 263 aa, Homo sapiens
  MOD_RES (6)..(6): Selenocysteine
  MOD_RES (13)..(13): Selenocysteine
  MOD_RES (32)..(32): Selenocysteine
  MOD_RES (114)..(114): Selenocysteine
  MOD_RES (141)..(141): Selenocysteine
  MOD_RES (156)..(156): Selenocysteine
  MOD_RES (169)..(169): Selenocysteine
  MOD_RES (190)..(190): Selenocysteine
  MOD_RES (195)..(195): Selenocysteine
  MOD_RES (226)..(226): Selenocysteine
  MOD_RES (231)..(231): Selenocysteine
  MOD_RES (236)..(236): Selenocysteine
  MOD_RES (238)..(238): Selenocysteine
MEDIQXNAELKSXQEQSVPAESAAVLNDYSLXKSHEMENVDSGEGPANEDEDIGDDSMKVKDEYSERDENVLKSEPMGNAEEPEIPYSYSREYNEYENIKLERHVVSFDSSRPXSGKMNCDVCGLSCISFNVLMVHKRSHXGERPFQCNQCGASFXQKGNLLRHIKLHXGEKPFKCHLCNYACQRRDALXGHLRXHSVEKPYKCEFCGRSYKQRSSLEEHKERCRXFLQSXDPGDXGXGWGWVELSHLGIRLQDLNVPWCRLH

SEQ ID NO: 13204 - protein, 453 aa, Homo sapiens
  MOD_RES (6)..(6): Selenocysteine
  MOD_RES (13)..(13): Selenocysteine
  MOD_RES (32)..(32): Selenocysteine
  MOD_RES (114)..(114): Selenocysteine
  MOD_RES (141)..(141): Selenocysteine
  MOD_RES (170)..(170): Selenocysteine
  MOD_RES (175)..(175): Selenocysteine
  MOD_RES (180)..(180): Selenocysteine
  MOD_RES (245)..(245): Selenocysteine
  MOD_RES (270)..(270): Selenocysteine
  MOD_RES (275)..(275): Selenocysteine
  MOD_RES (291)..(291): Selenocysteine
  MOD_RES (331)..(331): Selenocysteine
  MOD_RES (333)..(333): Selenocysteine
  MOD_RES (412)..(412): Selenocysteine
MEDIQXNAELKSXQEQSVPAESAAVLNDYSLXKSHEMENVDSGEGPANEDEDIGDDSMKVKDEYSERDENVLKSEPMGNAEEPEIPYSYSREYNEYENIKLERHVVSFDSSRPXSGKMNCDVCGLSCISFNVLMVHKRSHXVEKPYKCEFCGRSYKQRSSLEEHKERCRXFLQSXDPGDXASAEARHIKAEMGSERALVLDRLASNVAKRKSSMPQKFIGEKRHCFDVNYNSSYMYEKESELIQXRMMDQAINNAISYLGAEALRPLVQXPPAPXSEMVPVISSMYPIALXRAEMSNGAPQELEKKSIHLPEKSVPSERGLSPNNSGHDSXDXDSNHEERQNHIYQQNHMVLSRARNGMPLLKEVPRSYELLKPPPICPRDSVKVINKEGEVMDVYRCDHCRVLFLDYVMFXIHMGCHGFRDPFECNMCGYRSHDRYEFSSHIARGEHRALLK

SEQ ID NO: 13205 - protein, 207 aa, Homo sapiens
  MOD_RES (6)..(6): Selenocysteine
  MOD_RES (13)..(13): Selenocysteine
  MOD_RES (32)..(32): Selenocysteine
  MOD_RES (114)..(114): Selenocysteine
  MOD_RES (141)..(141): Selenocysteine
  MOD_RES (170)..(170): Selenocysteine
  MOD_RES (175)..(175): Selenocysteine
  MOD_RES (180)..(180): Selenocysteine
  MOD_RES (182)..(182): Selenocysteine
MEDIQXNAELKSXQEQSVPAESAAVLNDYSLXKSHEMENVDSGEGPANEDEDIGDDSMKVKDEYSERDENVLKSEPMGNAEEPEIPYSYSREYNEYENIKLERHVVSFDSSRPXSGKMNCDVCGLSCISFNVLMVHKRSHXVEKPYKCEFCGRSYKQRSSLEEHKERCRXFLQSXDPGDXGXGWGWVELSHLGIRLQDLNVPWCRLH

SEQ ID NO: 13206 - protein, 288 aa, Homo sapiens
  MOD_RES (6)..(6): Selenocysteine
  MOD_RES (13)..(13): Selenocysteine
  MOD_RES (32)..(32): Selenocysteine
  MOD_RES (80)..(80): Selenocysteine
  MOD_RES (105)..(105): Selenocysteine
  MOD_RES (110)..(110): Selenocysteine
  MOD_RES (126)..(126): Selenocysteine
  MOD_RES (166)..(166): Selenocysteine
  MOD_RES (168)..(168): Selenocysteine
  MOD_RES (247)..(247): Selenocysteine
MEDIQXNAELKSXQEQSVPAESAAVLNDYSLXKSHEMENVDSGEGPANEDEDIGGEKRHCFDVNYNSSYMYEKESELIQXRMMDQAINNAISYLGAEALRPLVQXPPAPXSEMVPVISSMYPIALXRAEMSNGAPQELEKKSIHLPEKSVPSERGLSPNNSGHDSXDXDSNHEERQNHIYQQNHMVLSRARNGMPLLKEVPRSYELLKPPPICPRDSVKVINKEGEVMDVYRCDHCRVLFLDYVMFXIHMGCHGFRDPFECNMCGYRSHDRYEFSSHIARGEHRALLK

SEQ ID NO: 13207 - protein, 422 aa, Homo sapiens
  MOD_RES (6)..(6): Selenocysteine
  MOD_RES (13)..(13): Selenocysteine
  MOD_RES (32)..(32): Selenocysteine
  MOD_RES (69)..(69): Selenocysteine
  MOD_RES (82)..(82): Selenocysteine
  MOD_RES (103)..(103): Selenocysteine
  MOD_RES (108)..(108): Selenocysteine
  MOD_RES (139)..(139): Selenocysteine
  MOD_RES (144)..(144): Selenocysteine
  MOD_RES (149)..(149): Selenocysteine
  MOD_RES (214)..(214): Selenocysteine
  MOD_RES (239)..(239): Selenocysteine
  MOD_RES (244)..(244): Selenocysteine
  MOD_RES (260)..(260): Selenocysteine
  MOD_RES (300)..(300): Selenocysteine
  MOD_RES (302)..(302): Selenocysteine
  MOD_RES (381)..(381): Selenocysteine
MEDIQXNAELKSXQEQSVPAESAAVLNDYSLXKSHEMENVDSGEGPANEDEDIGGERPFQCNQCGASFXQKGNLLRHIKLHXGEKPFKCHLCNYACQRRDALXGHLRXHSVEKPYKCEFCGRSYKQRSSLEEHKERCRXFLQSXDPGDXASAEARHIKAEMGSERALVLDRLASNVAKRKSSMPQKFIGEKRHCFDVNYNSSYMYEKESELIQXRMMDQAINNAISYLGAEALRPLVQXPPAPXSEMVPVISSMYPIALXRAEMSNGAPQELEKKSIHLPEKSVPSERGLSPNNSGHDSXDXDSNHEERQNHIYQQNHMVLSRARNGMPLLKEVPRSYELLKPPPICPRDSVKVINKEGEVMDVYRCDHCRVLFLDYVMFXIHMGCHGFRDPFECNMCGYRSHDRYEFSSHIARGEHRALLK

SEQ ID NO: 13208 - protein, 366 aa, Homo sapiens
  MOD_RES (6)..(6): Selenocysteine
  MOD_RES (13)..(13): Selenocysteine
  MOD_RES (32)..(32): Selenocysteine
  MOD_RES (83)..(83): Selenocysteine
  MOD_RES (88)..(88): Selenocysteine
  MOD_RES (93)..(93): Selenocysteine
  MOD_RES (158)..(158): Selenocysteine
  MOD_RES (183)..(183): Selenocysteine
  MOD_RES (188)..(188): Selenocysteine
  MOD_RES (204)..(204): Selenocysteine
  MOD_RES (244)..(244): Selenocysteine
  MOD_RES (246)..(246): Selenocysteine
  MOD_RES (325)..(325): Selenocysteine
MEDIQXNAELKSXQEQSVPAESAAVLNDYSLXKSHEMENVDSGEGPANEDEDIGVEKPYKCEFCGRSYKQRSSLEEHKERCRXFLQSXDPGDXASAEARHIKAEMGSERALVLDRLASNVAKRKSSMPQKFIGEKRHCFDVNYNSSYMYEKESELIQXRMMDQAINNAISYLGAEALRPLVQXPPAPXSEMVPVISSMYPIALXRAEMSNGAPQELEKKSIHLPEKSVPSERGLSPNNSGHDSXDXDSNHEERQNHIYQQNHMVLSRARNGMPLLKEVPRSYELLKPPPICPRDSVKVINKEGEVMDVYRCDHCRVLFLDYVMFXIHMGCHGFRDPFECNMCGYRSHDRYEFSSHIARGEHRALLK

SEQ ID NO: 13209 - protein, 262 aa, Homo sapiens
  MOD_RES (54)..(54): Selenocysteine
  MOD_RES (79)..(79): Selenocysteine
  MOD_RES (84)..(84): Selenocysteine
  MOD_RES (100)..(100): Selenocysteine
  MOD_RES (140)..(140): Selenocysteine
  MOD_RES (142)..(142): Selenocysteine
  MOD_RES (221)..(221): Selenocysteine
MGSERALVLDRLASNVAKRKSSMPQKFIGEKRHCFDVNYNSSYMYEKESELIQXRMMDQAINNAISYLGAEALRPLVQXPPAPXSEMVPVISSMYPIALXRAEMSNGAPQELEKKSIHLPEKSVPSERGLSPNNSGHDSXDXDSNHEERQNHIYQQNHMVLSRARNGMPLLKEVPRSYELLKPPPICPRDSVKVINKEGEVMDVYRCDHCRVLFLDYVMFXIHMGCHGFRDPFECNMCGYRSHDRYEFSSHIARGEHRALLK

SEQ ID NO: 13210 - protein, 10 aa, Homo sapiens
  MOD_RES (3)..(3): Selenocysteine
MHXPPALPRR

SEQ ID NO: 13211 - protein, 585 aa, Homo sapiens
  MOD_RES (3)..(3): Selenocysteine
  MOD_RES (19)..(19): Selenocysteine
  MOD_RES (82)..(82): Selenocysteine
  MOD_RES (182)..(182): Selenocysteine
  MOD_RES (197)..(197): Selenocysteine
  MOD_RES (231)..(231): Selenocysteine
  MOD_RES (236)..(236): Selenocysteine
  MOD_RES (243)..(243): Selenocysteine
  MOD_RES (262)..(262): Selenocysteine
  MOD_RES (279)..(279): Selenocysteine
  MOD_RES (311)..(311): Selenocysteine
  MOD_RES (321)..(321): Selenocysteine
  MOD_RES (327)..(327): Selenocysteine
  MOD_RES (389)..(389): Selenocysteine
  MOD_RES (396)..(396): Selenocysteine
  MOD_RES (404)..(404): Selenocysteine
  MOD_RES (443)..(443): Selenocysteine
  MOD_RES (457)..(457): Selenocysteine
  MOD_RES (459)..(459): Selenocysteine
  MOD_RES (484)..(484): Selenocysteine
  MOD_RES (509)..(509): Selenocysteine
  MOD_RES (546)..(546): Selenocysteine
MHXPPALPRRFQGGGRVRXPGSHRQGKDNLERDPSGGCVPDFLPQAQDSNHFIMESLFCESSGDSSLEKEFLGAPVGPSVSXPNSQHSSPSRSLSANSIKVEMYSDEESSRLLGPDERLLEKDDSVIVEDSLSEPLGYCDGSGPEPHSPGGIRLPNGKLKCDVCGMVCIGPNVLMVHKRSHXGERPFHCNQCGASFXQKGNLLRHIKLHSGEKPFKCPFCNYACRRRDALXGHLRXHSVSSPXVGKPYKCNYCGRSYKQQSXLEEHKERCHNYLQSLSXEAQALAGQPGDEIRDLEMVPDSMLHSSSERPXFIDRLANSLXKRKRSXPQKFVGEKQMRFSLSDLPYDVNSGGYEKDVELVAHHSLEPGFGSSLAFVGAEHLRPLRLPPXNCISELXPVISSVYXQMQPLPGRLELPGSREAGEGPEDLADGGPLLYRPRGPLXDPGASPSNGCQDSXDXESNHEDRVAGVVSLPQGPPPQPPPXIVVGRHSPAYAKEDPKPQEGLLRGXPGPSKEVLRVVGESGEPVKAFKCEHCRILFLDHVMFXIHMGCHGFRDPFECNICGYHSQDRYEFSSHIVRGEHKVG

SEQ ID NO: 13212 - protein, 48 aa, Homo sapiens
  MOD_RES (3)..(3): Selenocysteine
  MOD_RES (19)..(19): Selenocysteine
  MOD_RES (33)..(33): Selenocysteine
MHXPPALPRRFQGGGRVRXPGSHRQGKDNVAGXHLWRRSSSGPQWGPR

SEQ ID NO: 13213 - protein, 540 aa, Homo sapiens
  MOD_RES (2)..(2): Selenocysteine
  MOD_RES (7)..(7): Selenocysteine
  MOD_RES (37)..(37): Selenocysteine
  MOD_RES (137)..(137): Selenocysteine
  MOD_RES (152)..(152): Selenocysteine
  MOD_RES (186)..(186): Selenocysteine
  MOD_RES (191)..(191): Selenocysteine
  MOD_RES (198)..(198): Selenocysteine
  MOD_RES (217)..(217): Selenocysteine
  MOD_RES (234)..(234): Selenocysteine
  MOD_RES (266)..(266): Selenocysteine
  MOD_RES (276)..(276): Selenocysteine
  MOD_RES (282)..(282): Selenocysteine
  MOD_RES (344)..(344): Selenocysteine
  MOD_RES (351)..(351): Selenocysteine
  MOD_RES (359)..(359): Selenocysteine
  MOD_RES (398)..(398): Selenocysteine
  MOD_RES (412)..(412): Selenocysteine
  MOD_RES (414)..(414): Selenocysteine
  MOD_RES (439)..(439): Selenocysteine
  MOD_RES (464)..(464): Selenocysteine
  MOD_RES (501)..(501): Selenocysteine
MXAVPLXSRNPRFLEGSGDSSLEKEFLGAPVGPSVSXPNSQHSSPSRSLSANSIKVEMYSDEESSRLLGPDERLLEKDDSVIVEDSLSEPLGYCDGSGPEPHSPGGIRLPNGKLKCDVCGMVCIGPNVLMVHKRSHXGERPFHCNQCGASFXQKGNLLRHIKLHSGEKPFKCPFCNYACRRRDALXGHLRXHSVSSPXVGKPYKCNYCGRSYKQQSXLEEHKERCHNYLQSLSXEAQALAGQPGDEIRDLEMVPDSMLHSSSERPXFIDRLANSLXKRKRSXPQKFVGEKQMRFSLSDLPYDVNSGGYEKDVELVAHHSLEPGFGSSLAFVGAEHLRPLRLPPXNCISELXPVISSVYXQMQPLPGRLELPGSREAGEGPEDLADGGPLLYRPRGPLXDPGASPSNGCQDSXDXESNHEDRVAGVVSLPQGPPPQPPPXIVVGRHSPAYAKEDPKPQEGLLRGXPGPSKEVLRVVGESGEPVKAFKCEHCRILFLDHVMFXIHMGCHGFRDPFECNICGYHSQDRYEFSSHIVRGEHKVG

SEQ ID NO: 13214 - protein, 419 aa, Homo sapiens
  MOD_RES (20)..(20): Selenocysteine
  MOD_RES (23)..(23): Selenocysteine
  MOD_RES (47)..(47): Selenocysteine
  MOD_RES (77)..(77): Selenocysteine
  MOD_RES (94)..(94): Selenocysteine
  MOD_RES (105)..(105): Selenocysteine
  MOD_RES (133)..(133): Selenocysteine
  MOD_RES (169)..(169): Selenocysteine
  MOD_RES (186)..(186): Selenocysteine
  MOD_RES (216)..(216): Selenocysteine
  MOD_RES (224)..(224): Selenocysteine
  MOD_RES (233)..(234): Selenocysteine
  MOD_RES (236)..(236): Selenocysteine
  MOD_RES (257)..(257): Selenocysteine
  MOD_RES (293)..(293): Selenocysteine
  MOD_RES (311)..(311): Selenocysteine
  MOD_RES (338)..(338): Selenocysteine
  MOD_RES (340)..(340): Selenocysteine
  MOD_RES (350)..(350): Selenocysteine
  MOD_RES (380)..(380): Selenocysteine
MGEKKPEPLDFVKDFQEYLXQQXHHVNMISGSVSGDKEAEALQGAGXDGDQNGLDHPSVEVSLDENSGMLVDGFERXFDGKLKCRYCNYASKGXARLIEHIRIHXGEKPHRCHLCPFASAYERHLEAHMRSHXGEKPYKCELCSFRCSDRSNLSHHRRRKHKMVPIKGXRSSLSSKKMWGVLQKKXSNLGYSRRALINLSPPSMVVQKPDYLNDFXHEIPNIQXDSYESMAKXXPXGGLPRDPQELMVDNPLNQLSXLAGQLSSLPPENQNPASPDVVPCPDEKPFMIQQPSXQAVVSAVSASIPQSSSPXSPEPRPSHSQRNYSPVAGPSSEPSAHXSXPSIGNSQPSXPAPALPVQDPQLLHHCQHCDMYFADNILYXIHMGCHGYENPFQCNICGCKCKNKYDFACHFARGQHNQH

SEQ ID NO: 13215 - protein, 178 aa, Homo sapiens
  MOD_RES (14)..(14): Selenocysteine
  MOD_RES (24)..(24): Selenocysteine
  MOD_RES (31)..(31): Selenocysteine
  MOD_RES (53)..(53): Selenocysteine
  MOD_RES (118)..(118): Selenocysteine
  MOD_RES (173)..(173): Selenocysteine
MHSSALLCCLVLLXGVRASPGQGXQSENSCXHFPGNLPNMLRDLRDAFSRVKXFFQMKDQLDNLLLKESLLEDFKGYLGCQALSEMIQFYLEEVMPQAENQDPDIKAHVNSLGENLKXLRLRLRRCHRFLPCENKSKAVEQVKNAFNKLQEKGIYKAMSEFDIFINYIEAYMXMKIRN

SEQ ID NO: 13216 - protein, 578 aa, Homo sapiens
  MOD_RES (24)..(24): Selenocysteine
  MOD_RES (46)..(46): Selenocysteine
  MOD_RES (55)..(55): Selenocysteine
  MOD_RES (78)..(78): Selenocysteine
  MOD_RES (84)..(84): Selenocysteine
  MOD_RES (87)..(87): Selenocysteine
  MOD_RES (112)..(112): Selenocysteine
  MOD_RES (114)..(114): Selenocysteine
  MOD_RES (116)..(116): Selenocysteine
  MOD_RES (124)..(124): Selenocysteine
  MOD_RES (126)..(126): Selenocysteine
  MOD_RES (156)..(156): Selenocysteine
  MOD_RES (179)..(179): Selenocysteine
  MOD_RES (181)..(181): Selenocysteine
  MOD_RES (194)..(194): Selenocysteine
  MOD_RES (227)..(227): Selenocysteine
  MOD_RES (232)..(232): Selenocysteine
  MOD_RES (234)..(234): Selenocysteine
  MOD_RES (289)..(289): Selenocysteine
  MOD_RES (292)..(292): Selenocysteine
  MOD_RES (317)..(317): Selenocysteine
  MOD_RES (324)..(324): Selenocysteine
  MOD_RES (330)..(330): Selenocysteine
  MOD_RES (347)..(347): Selenocysteine
  MOD_RES (368)..(368): Selenocysteine
  MOD_RES (383)..(383): Selenocysteine
  MOD_RES (386)..(386): Selenocysteine
  MOD_RES (416)..(416): Selenocysteine
  MOD_RES (450)..(450): Selenocysteine
  MOD_RES (458)..(458): Selenocysteine
  MOD_RES (460)..(460): Selenocysteine
  MOD_RES (470)..(470): Selenocysteine
  MOD_RES (505)..(505): Selenocysteine
  MOD_RES (513)..(513): Selenocysteine
  MOD_RES (520)..(520): Selenocysteine
  MOD_RES (567)..(567): Selenocysteine
MLPCLVVLLAALLSLRLGSDAHGXELPSPPSVWFEAEFFHHILHWXPIPNQSESXCYEVALLRYGIESWNSISNCSQXLSYDLXAVXLDLYHSNGYRARVRAVDGSRHSNWXVXNXRFSVDEVXLXVGSVNLEIHNGFILGKIQLPRPKMAPANDXYESIFSHFREYEIAIRKVPGNFXFXHKKVKHENFSLLXSGEVGEFCVQVKPSVASRSNKGMWSKEECISLXRQYFXVXNVIIFFAFVLLLSGALAYCLALQLYVRRRKKLPSVLLFKKPSPFIFISQRPSPEXQDXIHPLDEEAFLKVSPELKNLDLHGSXDSGFGSXKPSLQXEEPQFLLPDPHPQADRXLGNREPPVLGDSCSSGSSNSXDSGICLQEPSLSPSXGPXWEQQVGSNSRGQDDSGIDLVQNSEGRAGDXQGGSALGHHSPPEPEVPGEEDPAAVAFQGYLRQXRCAEEKAXKXGCLEEESPLXDGLGPKFGRCLVDEAGLHPPALAKGYLKQDPLEMXLASSGAPXGQWNQPXEEWSLLALSSCSDLGISDWSFAHDLAPLGCVAAPGGLLGSFNSDLVXLPLISSLQSSE

SEQ ID NO: 13217 - protein, 94 aa, Homo sapiens
  MOD_RES (24)..(24): Selenocysteine
  MOD_RES (46)..(46): Selenocysteine
  MOD_RES (55)..(55): Selenocysteine
  MOD_RES (86)..(86): Selenocysteine
MLPCLVVLLAALLSLRLGSDAHGXELPSPPSVWFEAEFFHHILHWXPIPNQSESXCYEVALLSDSDSWQCEPRDPQWLHPREDSAXQAQDGPRK

SEQ ID NO: 13218 - protein, 88 aa, Homo sapiens
  MOD_RES (61)..(61): Selenocysteine
  MOD_RES (63)..(63): Selenocysteine
  MOD_RES (77)..(77): Selenocysteine
  MOD_RES (82)..(82): Selenocysteine
  MOD_RES (86)..(86): Selenocysteine
MLPCLVVLLAALLSLRLGSDAHVESPGWLALWQSGARVLPYSGKPGSQAHLLWKWKRLKLXGXDGLGRIEKYAQGQXPNPQXSSSXHF

SEQ ID NO: 13219 - protein, 216 aa, Homo sapiens
  MOD_RES (6)..(7): Selenocysteine
  MOD_RES (9)..(9): Selenocysteine
  MOD_RES (23)..(23): Selenocysteine
  MOD_RES (41)..(41): Selenocysteine
  MOD_RES (48)..(48): Selenocysteine
  MOD_RES (79)..(79): Selenocysteine
  MOD_RES (81)..(81): Selenocysteine
  MOD_RES (90)..(90): Selenocysteine
  MOD_RES (100)..(100): Selenocysteine
  MOD_RES (107)..(107): Selenocysteine
  MOD_RES (122)..(123): Selenocysteine
  MOD_RES (149)..(150): Selenocysteine
  MOD_RES (154)..(154): Selenocysteine
  MOD_RES (189)..(189): Selenocysteine
  MOD_RES (215)..(215): Selenocysteine
DKCMNXXLXECDFSSLSKYGDHXLRVRAEFADEHSDWVNIXFCPVDDXIIGPPGMQVEVLADSLHMRFLAPKIENEYEXWXMKNVYNSWXYNVQYWKNGXDEKFQIXPQYDFEVLRNLEPWXXYCVQVRGFLPDRNKAGEWSEPVCEQXXHDEXVPSWMVAVILMASVFMVCLALLGCFALLWCVYKKXKYAFSPRNSLPQHLKERNWSDRKEQXE

SEQ ID NO: 13220 - protein, 44 aa, Homo sapiens
  MOD_RES (27)..(27): Selenocysteine
ILMASVFMVCLALLGCFALLWCVYKKXKYAFSPRNSLPQHLKEE

SEQ ID NO: 13221 - protein, 88 aa, Homo sapiens
  MOD_RES (27)..(27): Selenocysteine
  MOD_RES (51)..(51): Selenocysteine
  MOD_RES (64)..(64): Selenocysteine
  MOD_RES (72)..(72): Selenocysteine
  MOD_RES (75)..(75): Selenocysteine
ILMASVFMVCLALLGCFALLWCVYKKXKYAFSPRNSLPQHLKELSGINFSXSQKHFGPQIPKGXLFFILENXMPXYQNKGQIGAFASK

SEQ ID NO: 13222 - protein, 71 aa, Homo sapiens
  MOD_RES (51)..(51): Selenocysteine
  MOD_RES (53)..(53): Selenocysteine
  MOD_RES (62)..(62): Selenocysteine
  MOD_RES (70)..(70): Selenocysteine
MAWSLGSWLGGCLLVSALGMVPPPENVRMNSVNFKNILQWESPAFAKGNLXFXAQYLSHYWXPWNASRSXC

SEQ ID NO: 13223 - protein, 325 aa, Homo sapiens
  MOD_RES (51)..(51): Selenocysteine
  MOD_RES (53)..(53): Selenocysteine
  MOD_RES (69)..(70): Selenocysteine
  MOD_RES (72)..(72): Selenocysteine
  MOD_RES (86)..(86): Selenocysteine
  MOD_RES (104)..(104): Selenocysteine
  MOD_RES (111)..(111): Selenocysteine
  MOD_RES (142)..(142): Selenocysteine
  MOD_RES (144)..(144): Selenocysteine
  MOD_RES (153)..(153): Selenocysteine
  MOD_RES (163)..(163): Selenocysteine
  MOD_RES (170)..(170): Selenocysteine
  MOD_RES (185)..(186): Selenocysteine
  MOD_RES (212)..(213): Selenocysteine
  MOD_RES (217)..(217): Selenocysteine
  MOD_RES (252)..(252): Selenocysteine
  MOD_RES (277)..(277): Selenocysteine
  MOD_RES (317)..(317): Selenocysteine
MAWSLGSWLGGCLLVSALGMVPPPENVRMNSVNFKNILQWESPAFAKGNLXFXAQYLSYRIFQDKCMNXXLXECDFSSLSKYGDHXLRVRAEFADEHSDWVNIXFCPVDDXIIGPPGMQVEVLADSLHMRFLAPKIENEYEXWXMKNVYNSWXYNVQYWKNGXDEKFQIXPQYDFEVLRNLEPWXXYCVQVRGFLPDRNKAGEWSEPVCEQXXHDEXVPSWMVAVILMASVFMVCLALLGCFALLWCVYKKXKYAFSPRNSLPQHLKEFLGHPHHNXLLFFSFPLSDENDVFDKLSVIAEDSESGKQNPGDSCSLGXPPGQGPQS

SEQ ID NO: 13224 - protein, 199 aa, Homo sapiens
  MOD_RES (18)..(18): Selenocysteine
  MOD_RES (42)..(42): Selenocysteine
  MOD_RES (46)..(46): Selenocysteine
  MOD_RES (53)..(53): Selenocysteine
  MOD_RES (77)..(77): Selenocysteine
  MOD_RES (95)..(95): Selenocysteine
  MOD_RES (121)..(121): Selenocysteine
  MOD_RES (128)..(128): Selenocysteine
  MOD_RES (184)..(184): Selenocysteine
  MOD_RES (197)..(197): Selenocysteine
MNCVCRLVLVVLSLWPDXAVAPGPPPGPPRVSPDPRAELDSXVLLXRSLLADXRQLAAQLRDKFPADGDHNLDSLPXLAMSAGALGALQLPGVLXRLRADLLSYLRHVQWLRRAGGSSLKXLEPELGXLQARLDRLLRRLQLLMSRLALPQPPPDPPAPPLAPPSSAWGGIRAAHAILGGLHLXLDWAVRGLLLLKXRL

SEQ ID NO: 13225 - protein, 40 aa, Homo sapiens
  MOD_RES (16)..(16): Selenocysteine
MSAGALGALQLPGVLXRLRADLLSYLRHVQWLRRAGGSSL

SEQ ID NO: 13226 - protein, 120 aa, Homo sapiens
  MOD_RES (16)..(16): Selenocysteine
  MOD_RES (42)..(42): Selenocysteine
  MOD_RES (49)..(49): Selenocysteine
  MOD_RES (105)..(105): Selenocysteine
  MOD_RES (118)..(118): Selenocysteine
MSAGALGALQLPGVLXRLRADLLSYLRHVQWLRRAGGSSLKXLEPELGXLQARLDRLLRRLQLLMSRLALPQPPPDPPAPPLAPPSSAWGGIRAAHAILGGLHLXLDWAVRGLLLLKXRL

SEQ ID NO: 13227 - protein, 152 aa, Homo sapiens
  MOD_RES (17)..(17): Selenocysteine
  MOD_RES (54)..(54): Selenocysteine
  MOD_RES (65)..(65): Selenocysteine
  MOD_RES (69)..(69): Selenocysteine
  MOD_RES (75)..(75): Selenocysteine
  MOD_RES (88)..(88): Selenocysteine
  MOD_RES (119)..(119): Selenocysteine
  MOD_RES (128)..(128): Selenocysteine
MSSSCSGLSRVLVAVAXALVSASSPCPQAWGPPDPPARPVVSCQAADYENFSCXWSPSQISGLPXRYLXSYRKKXVLGADSQRRSPSXGPWPCPQDPLGAARCVVHGAEFWSQYRINVXEVNPLGASXRLLDVSLQSILRPDPPQGLRVESV

SEQ ID NO: 13228 - protein, 54 aa, Homo sapiens
  MOD_RES (17)..(17): Selenocysteine
  MOD_RES (35)..(35): Selenocysteine
  MOD_RES (52)..(52): Selenocysteine
MSSSCSGLSRVLVAVAXALVSASSPCPQAWGPPGXQCPGFGMGSQSCSRDLXLG

SEQ ID NO: 13229 - protein, 139 aa, Homo sapiens
  MOD_RES (17)..(17): Selenocysteine
  MOD_RES (52)..(52): Selenocysteine
  MOD_RES (87)..(87): Selenocysteine
  MOD_RES (91)..(91): Selenocysteine
  MOD_RES (96)..(96): Selenocysteine
  MOD_RES (104)..(104): Selenocysteine
  MOD_RES (106)..(106): Selenocysteine
  MOD_RES (131)..(131): Selenocysteine
MSSSCSGLSRVLVAVAXALVSASSPCPQAWGPPGVQYGQPGRSVKLCCPGVXAGDPVSWFRDGEPKLLQGPDSGLGHELVLAQADSXDEGXYICQXLDGALGGXVXLQLGYPPARPVVSCQAADYENFSCXWSPSQISG

SEQ ID NO: 13230 - protein, 167 aa, Homo sapiens
  MOD_RES (17)..(17): Selenocysteine
  MOD_RES (52)..(52): Selenocysteine
  MOD_RES (87)..(87): Selenocysteine
  MOD_RES (91)..(91): Selenocysteine
  MOD_RES (96)..(96): Selenocysteine
  MOD_RES (104)..(104): Selenocysteine
  MOD_RES (106)..(106): Selenocysteine
  MOD_RES (131)..(131): Selenocysteine
  MOD_RES (142)..(142): Selenocysteine
  MOD_RES (146)..(146): Selenocysteine
  MOD_RES (152)..(152): Selenocysteine
  MOD_RES (165)..(165): Selenocysteine
MSSSCSGLSRVLVAVAXALVSASSPCPQAWGPPGVQYGQPGRSVKLCCPGVXAGDPVSWFRDGEPKLLQGPDSGLGHELVLAQADSXDEGXYICQXLDGALGGXVXLQLGYPPARPVVSCQAADYENFSCXWSPSQISGLPXRYLXSYRKKXVLGADSQRRSPSXGP

SEQ ID NO: 13231 - protein, 270 aa, Homo sapiens
  MOD_RES (17)..(17): Selenocysteine
  MOD_RES (52)..(52): Selenocysteine
  MOD_RES (87)..(87): Selenocysteine
  MOD_RES (91)..(91): Selenocysteine
  MOD_RES (96)..(96): Selenocysteine
  MOD_RES (104)..(104): Selenocysteine
  MOD_RES (106)..(106): Selenocysteine
  MOD_RES (131)..(131): Selenocysteine
  MOD_RES (142)..(142): Selenocysteine
  MOD_RES (146)..(146): Selenocysteine
  MOD_RES (152)..(152): Selenocysteine
  MOD_RES (165)..(165): Selenocysteine
  MOD_RES (196)..(196): Selenocysteine
  MOD_RES (205)..(205): Selenocysteine
  MOD_RES (241)..(241): Selenocysteine
  MOD_RES (270)..(270): Selenocysteine
MSSSCSGLSRVLVAVAXALVSASSPCPQAWGPPGVQYGQPGRSVKLCCPGVXAGDPVSWFRDGEPKLLQGPDSGLGHELVLAQADSXDEGXYICQXLDGALGGXVXLQLGYPPARPVVSCQAADYENFSCXWSPSQISGLPXRYLXSYRKKXVLGADSQRRSPSXGPWPCPQDPLGAARCVVHGAEFWSQYRINVXEVNPLGASXRLLDVSLQSILRPDPPQGLRVESVPGYPRRLRASWXYPASWPCQPHFLLKFRLQYRPAQHPAWSX

SEQ ID NO: 13232 - protein, 390 aa, Homo sapiens
  MOD_RES (17)..(17): Selenocysteine
  MOD_RES (52)..(52): Selenocysteine
  MOD_RES (87)..(87): Selenocysteine
  MOD_RES (91)..(91): Selenocysteine
  MOD_RES (96)..(96): Selenocysteine
  MOD_RES (104)..(104): Selenocysteine
  MOD_RES (106)..(106): Selenocysteine
  MOD_RES (131)..(131): Selenocysteine
  MOD_RES (142)..(142): Selenocysteine
  MOD_RES (146)..(146): Selenocysteine
  MOD_RES (152)..(152): Selenocysteine
  MOD_RES (165)..(165): Selenocysteine
  MOD_RES (196)..(196): Selenocysteine
  MOD_RES (205)..(205): Selenocysteine
  MOD_RES (241)..(241): Selenocysteine
  MOD_RES (270)..(270): Selenocysteine
  MOD_RES (281)..(281): Selenocysteine
  MOD_RES (303)..(303): Selenocysteine
  MOD_RES (306)..(306): Selenocysteine
  MOD_RES (314)..(314): Selenocysteine
  MOD_RES (317)..(317): Selenocysteine
  MOD_RES (319)..(319): Selenocysteine
  MOD_RES (332)..(332): Selenocysteine
MSSSCSGLSRVLVAVAXALVSASSPCPQAWGPPGVQYGQPGRSVKLCCPGVXAGDPVSWFRDGEPKLLQGPDSGLGHELVLAQADSXDEGXYICQXLDGALGGXVXLQLGYPPARPVVSCQAADYENFSCXWSPSQISGLPXRYLXSYRKKXVLGADSQRRSPSXGPWPCPQDPLGAARCVVHGAEFWSQYRINVXEVNPLGASXRLLDVSLQSILRPDPPQGLRVESVPGYPRRLRASWXYPASWPCQPHFLLKFRLQYRPAQHPAWSXVEPAGLEEVIXDAVAGLPHAVRVSARDFLDAGXWSXWSPEAWGXPSXGXIPKEIPAWGQLHXQPEVEPQVDSPAPPRPSLQPHPRLLDHRDSVEQVAVLASLGILSFLGLVAGALALGLW

SEQ ID NO: 13233 - protein, 422 aa, Homo sapiens
  MOD_RES (17)..(17): Selenocysteine
  MOD_RES (52)..(52): Selenocysteine
  MOD_RES (87)..(87): Selenocysteine
  MOD_RES (91)..(91): Selenocysteine
  MOD_RES (96)..(96): Selenocysteine
  MOD_RES (104)..(104): Selenocysteine
  MOD_RES (106)..(106): Selenocysteine
  MOD_RES (131)..(131): Selenocysteine
  MOD_RES (142)..(142): Selenocysteine
  MOD_RES (146)..(146): Selenocysteine
  MOD_RES (152)..(152): Selenocysteine
  MOD_RES (165)..(165): Selenocysteine
  MOD_RES (196)..(196): Selenocysteine
  MOD_RES (205)..(205): Selenocysteine
  MOD_RES (241)..(241): Selenocysteine
  MOD_RES (270)..(270): Selenocysteine
  MOD_RES (281)..(281): Selenocysteine
  MOD_RES (303)..(303): Selenocysteine
  MOD_RES (306)..(306): Selenocysteine
  MOD_RES (314)..(314): Selenocysteine
  MOD_RES (317)..(317): Selenocysteine
  MOD_RES (319)..(319): Selenocysteine
  MOD_RES (332)..(332): Selenocysteine
MSSSCSGLSRVLVAVAXALVSASSPCPQAWGPPGVQYGQPGRSVKLCCPGVXAGDPVSWFRDGEPKLLQGPDSGLGHELVLAQADSXDEGXYICQXLDGALGGXVXLQLGYPPARPVVSCQAADYENFSCXWSPSQISGLPXRYLXSYRKKXVLGADSQRRSPSXGPWPCPQDPLGAARCVVHGAEFWSQYRINVXEVNPLGASXRLLDVSLQSILRPDPPQGLRVESVPGYPRRLRASWXYPASWPCQPHFLLKFRLQYRPAQHPAWSXVEPAGLEEVIXDAVAGLPHAVRVSARDFLDAGXWSXWSPEAWGXPSXGXIPKEIPAWGQLHXQPEVEPQVDSPAPPRPSLQPHPRLLDHRDSVEQVAVLASLGILSFLGLVAGALALGLWLRLRRGGKDGSPKPGFLASVIPVDRRPGAPNL

SEQ ID NO: 13234 - protein, 68 aa, Homo sapiens
  MOD_RES (17)..(17): Selenocysteine
  MOD_RES (52)..(52): Selenocysteine
MSSSCSGLSRVLVAVAXALVSASSPCPQAWGPPGVQYGQPGRSVKLCCPGVXAGPSSPPCCLLPSSRL

SEQ ID NO: 13235 - protein, 77 aa, Homo sapiens
  MOD_RES (1)..(1): Any amino acid
  MOD_RES (2)..(2): Selenocysteine
  MOD_RES (5)..(5): Selenocysteine
  MOD_RES (7)..(7): Selenocysteine
  MOD_RES (20)..(20): Selenocysteine
XXPSXGXIPKEIPAWGQLHXQPEVEPQVDSPAPPRPSLQPHPRLLDHRDSVEQVAVLASLGILSFLGLVAGALALGL

SEQ ID NO: 13236 - protein, 253 aa, Homo sapiens
  MOD_RES (18)..(18): Selenocysteine
  MOD_RES (46)..(46): Selenocysteine
  MOD_RES (63)..(63): Selenocysteine
  MOD_RES (92)..(92): Selenocysteine
  MOD_RES (99)..(99): Selenocysteine
  MOD_RES (109)..(109): Selenocysteine
  MOD_RES (113)..(113): Selenocysteine
  MOD_RES (115)..(115): Selenocysteine
  MOD_RES (125)..(125): Selenocysteine
  MOD_RES (136)..(136): Selenocysteine
  MOD_RES (140)..(140): Selenocysteine
  MOD_RES (150)..(150): Selenocysteine
  MOD_RES (174)..(174): Selenocysteine
  MOD_RES (210)..(210): Selenocysteine
  MOD_RES (225)..(225): Selenocysteine
  MOD_RES (242)..(242): Selenocysteine
MWPPGSASQPPPSPAAAXGLHPAARPVSLQCRLSMCPARSLLLVAXLVLLDHLSLARNLPVAXPDPGMFPCLHHSQNLLRAVSNMLQKARQXLEFYPCXSEEIDHEDIXKDKXSXVEACLPLELXKNESCLNSREXSFIXNGSCLASRKXSFMMALCLSSIYEDLKMYQVEFKXMNAKLLMDPKRQIFLDQNMLAVIDELMQALNFNSEXVPQKSSLEEPDFYKXKIKLCILLHAFRIRAVXIDRVMSYLNAS

SEQ ID NO: 13237 - protein, 239 aa, Homo sapiens
  MOD_RES (18)..(18): Selenocysteine
  MOD_RES (46)..(46): Selenocysteine
  MOD_RES (63)..(63): Selenocysteine
  MOD_RES (92)..(92): Selenocysteine
  MOD_RES (99)..(99): Selenocysteine
  MOD_RES (109)..(109): Selenocysteine
  MOD_RES (113)..(113): Selenocysteine
  MOD_RES (115)..(115): Selenocysteine
  MOD_RES (125)..(125): Selenocysteine
  MOD_RES (136)..(136): Selenocysteine
  MOD_RES (160)..(160): Selenocysteine
  MOD_RES (196)..(196): Selenocysteine
  MOD_RES (211)..(211): Selenocysteine
  MOD_RES (228)..(228): Selenocysteine
MWPPGSASQPPPSPAAAXGLHPAARPVSLQCRLSMCPARSLLLVAXLVLLDHLSLARNLPVAXPDPGMFPCLHHSQNLLRAVSNMLQKARQXLEFYPCXSEEIDHEDIXKDKXSXVEACLPLELXKNGSCLASRKXSFMMALCLSSIYEDLKMYQVEFKXMNAKLLMDPKRQIFLDQNMLAVIDELMQALNFNSEXVPQKSSLEEPDFYKXKIKLCILLHAFRIRAVXIDRVMSYLNAS

SEQ ID NO: 13238 - protein, 215 aa, Homo sapiens
  MOD_RES (18)..(18): Selenocysteine
  MOD_RES (46)..(46): Selenocysteine
  MOD_RES (63)..(63): Selenocysteine
  MOD_RES (98)..(98): Selenocysteine
  MOD_RES (102)..(102): Selenocysteine
  MOD_RES (112)..(112): Selenocysteine
  MOD_RES (136)..(136): Selenocysteine
  MOD_RES (172)..(172): Selenocysteine
  MOD_RES (187)..(187): Selenocysteine
  MOD_RES (204)..(204): Selenocysteine
MWPPGSASQPPPSPAAAXGLHPAARPVSLQCRLSMCPARSLLLVAXLVLLDHLSLARNLPVAXPDPGMFPCLHHSQNLLRAVSNMLQKNESCLNSREXSFIXNGSCLASRKXSFMMALCLSSIYEDLKMYQVEFKXMNAKLLMDPKRQIFLDQNMLAVIDELMQALNFNSEXVPQKSSLEEPDFYKXKIKLCILLHAFRIRAVXIDRVMSYLNAS

SEQ ID NO: 13239 - protein, 328 aa, Homo sapiens
  MOD_RES (49)..(49): Selenocysteine
  MOD_RES (52)..(52): Selenocysteine
  MOD_RES (59)..(59): Selenocysteine
  MOD_RES (61)..(61): Selenocysteine
  MOD_RES (74)..(74): Selenocysteine
  MOD_RES (76)..(76): Selenocysteine
  MOD_RES (89)..(89): Selenocysteine
  MOD_RES (114)..(114): Selenocysteine
  MOD_RES (127)..(127): Selenocysteine
  MOD_RES (141)..(141): Selenocysteine
  MOD_RES (146)..(147): Selenocysteine
  MOD_RES (150)..(150): Selenocysteine
  MOD_RES (153)..(153): Selenocysteine
  MOD_RES (169)..(169): Selenocysteine
  MOD_RES (174)..(174): Selenocysteine
  MOD_RES (224)..(224): Selenocysteine
  MOD_RES (261)..(261): Selenocysteine
  MOD_RES (264)..(264): Selenocysteine
  MOD_RES (272)..(272): Selenocysteine
  MOD_RES (291)..(291): Selenocysteine
  MOD_RES (294)..(294): Selenocysteine
  MOD_RES (297)..(297): Selenocysteine
MCHQQLVISWFSLVFLASPLVAIWELKKDVYVVELDWYPDAPGEMVVLXCDXPEEDGIXWXLDQSSEVLGSGKXLXIQVKEFGDAGQYXCHKGGEVLSHSLLLLHKKEDGIWSXDILKDQKEPKNKXFLRCEAKNYSGRFXCWWLXXISXDLXFSVKSSRGSSDPQGVXCGAAXLSAERVRGDNKEYEYSVECQEDSACPAAEESLPIEVMVDAVHKLKYENYXSSFFIRDIIKPDPPKNLQLKPLKNSRQVEVSWEYPDXWSXPHSYFSLXFCVQVQGKSKREKKDRVFXDKXSAXVICRKNASISVRAQDRYYSSSWSEWASVPCS

SEQ ID NO: 13240 - protein, 51 aa, Homo sapiens
  MOD_RES (6)..(6): Selenocysteine
  MOD_RES (26)..(26): Selenocysteine
MEPLVXWVVPLLFLFLLSRQGAACRXSECCFQDPPYPDADSGSASGPRDLR

SEQ ID NO: 13241 - protein, 67 aa, Homo sapiens
  MOD_RES (6)..(6): Selenocysteine
  MOD_RES (26)..(26): Selenocysteine
MEPLVXWVVPLLFLFLLSRQGAACRXSECCFQDPPYPDADSGSASGPRDLRCYRISSDRYECSWQYE

SEQ ID NO: 13242 - protein, 381 aa, Homo sapiens
  MOD_RES (6)..(6): Selenocysteine
  MOD_RES (26)..(26): Selenocysteine
  MOD_RES (70)..(70): Selenocysteine
  MOD_RES (95)..(95): Selenocysteine
  MOD_RES (110)..(110): Selenocysteine
  MOD_RES (112)..(112): Selenocysteine
  MOD_RES (123)..(123): Selenocysteine
  MOD_RES (130)..(130): Selenocysteine
  MOD_RES (161)..(161): Selenocysteine
  MOD_RES (176)..(176): Selenocysteine
  MOD_RES (193)..(193): Selenocysteine
  MOD_RES (257)..(257): Selenocysteine
  MOD_RES (263)..(263): Selenocysteine
  MOD_RES (278)..(278): Selenocysteine
  MOD_RES (281)..(281): Selenocysteine
  MOD_RES (298)..(298): Selenocysteine
  MOD_RES (300)..(300): Selenocysteine
  MOD_RES (331)..(331): Selenocysteine
  MOD_RES (338)..(338): Selenocysteine
  MOD_RES (340)..(340): Selenocysteine
  MOD_RES (369)..(369): Selenocysteine
  MOD_RES (375)..(375): Selenocysteine
MEPLVXWVVPLLFLFLLSRQGAACRXSECCFQDPPYPDADSGSASGPRDLRCYRISSDRYECSWQYEGPXAGVSHFLRCCLSSGRCCYFAAGSAXRLQFSDQAGVSVLYXVXLWVESWARNQXEKSPEVXLQLYNSVKYEPPLGDIKVSKLAGQLRMEWEXPDNQVGAEVQFRHRXPSSPWKLGDCGPQDDDXESCLCPLEMNVAQEFQLRRRQLGSQGSSWSKWSSPVCVPPENPPQPQVRFSVEQLGQDGRRRLXLKEQPXQLELPEGCQGLAPGXEVXYRLQLHMLSCPCKAKAXRXLHLGKMPYLSGAAYNVAVISSNQFGPGLNQXWHIPADXHXDGMISAHCNLRLPDSRDSPASASRVAGIXGICHHXRLILYF

SEQ ID NO: 13243 - protein, 662 aa, Homo sapiens
  MOD_RES (6)..(6): Selenocysteine
  MOD_RES (26)..(26): Selenocysteine
  MOD_RES (70)..(70): Selenocysteine
  MOD_RES (95)..(95): Selenocysteine
  MOD_RES (110)..(110): Selenocysteine
  MOD_RES (112)..(112): Selenocysteine
  MOD_RES (123)..(123): Selenocysteine
  MOD_RES (130)..(130): Selenocysteine
  MOD_RES (161)..(161): Selenocysteine
  MOD_RES (176)..(176): Selenocysteine
  MOD_RES (193)..(193): Selenocysteine
  MOD_RES (257)..(257): Selenocysteine
  MOD_RES (263)..(263): Selenocysteine
  MOD_RES (278)..(278): Selenocysteine
  MOD_RES (281)..(281): Selenocysteine
  MOD_RES (298)..(298): Selenocysteine
  MOD_RES (300)..(300): Selenocysteine
  MOD_RES (331)..(331): Selenocysteine
  MOD_RES (338)..(338): Selenocysteine
  MOD_RES (340)..(340): Selenocysteine
  MOD_RES (351)..(351): Selenocysteine
  MOD_RES (354)..(355): Selenocysteine
  MOD_RES (366)..(366): Selenocysteine
  MOD_RES (382)..(382): Selenocysteine
  MOD_RES (386)..(386): Selenocysteine
  MOD_RES (398)..(398): Selenocysteine
  MOD_RES (417)..(417): Selenocysteine
  MOD_RES (428)..(428): Selenocysteine
  MOD_RES (432)..(432): Selenocysteine
  MOD_RES (436)..(436): Selenocysteine
  MOD_RES (448)..(448): Selenocysteine
  MOD_RES (473)..(473): Selenocysteine
  MOD_RES (501)..(501): Selenocysteine
  MOD_RES (503)..(503): Selenocysteine
  MOD_RES (506)..(506): Selenocysteine
  MOD_RES (517)..(517): Selenocysteine
  MOD_RES (524)..(524): Selenocysteine
  MOD_RES (583)..(583): Selenocysteine
  MOD_RES (598)..(598): Selenocysteine
  MOD_RES (629)..(629): Selenocysteine
  MOD_RES (635)..(635): Selenocysteine
  MOD_RES (648)..(648): Selenocysteine
MEPLVXWVVPLLFLFLLSRQGAACRXSECCFQDPPYPDADSGSASGPRDLRCYRISSDRYECSWQYEGPXAGVSHFLRCCLSSGRCCYFAAGSAXRLQFSDQAGVSVLYXVXLWVESWARNQXEKSPEVXLQLYNSVKYEPPLGDIKVSKLAGQLRMEWEXPDNQVGAEVQFRHRXPSSPWKLGDCGPQDDDXESCLCPLEMNVAQEFQLRRRQLGSQGSSWSKWSSPVCVPPENPPQPQVRFSVEQLGQDGRRRLXLKEQPXQLELPEGCQGLAPGXEVXYRLQLHMLSCPCKAKAXRXLHLGKMPYLSGAAYNVAVISSNQFGPGLNQXWHIPADXHXEPVALNISVGXNGXXMYWPARAQSMXYCIEWQPVGQDGGLAXCSLXAPQDPDPAGMAXYSWSRESGAMGQEKCYYIXIFASAHPEKLXLWSXVLSXYHFGGNASAAGXPHHVSVKNHSLDSVSVDWAPSLLSXCPGVLKEYVVRCRDEDSKQVSEHPVQPXEXQVXLSGLRAGVAYXVQVRADXAWLRGVWSQPQRFSIEVQVSDWLIFFASLGSFLSILLVGVLGYLGLNRAARHLCPPLPXPCASSAIEFPGGKEXWQWINPVDFQEEASLQEALVVEMSWDKGERXEPLEKXELPEGAPELALDXELSLEDGDRCKAKM

SEQ ID NO: 13244 - protein, 118 aa, Homo sapiens
  MOD_RES (6)..(6): Selenocysteine
  MOD_RES (26)..(26): Selenocysteine
  MOD_RES (74)..(74): Selenocysteine
  MOD_RES (99)..(99): Selenocysteine
  MOD_RES (114)..(114): Selenocysteine
  MOD_RES (116)..(116): Selenocysteine
MEPLVXWVVPLLFLFLLSRQGAACRXSECCFQDPPYPDADSGSLPGSASGPRDLRCYRISSDRYECSWQYEGPXAGVSHFLRCCLSSGRCCYFAAGSAXRLQFSDQAGVSVLYXVXLW

SEQ ID NO: 13245 - protein, 635 aa, Homo sapiens
  MOD_RES (4)..(4): Selenocysteine
  MOD_RES (17)..(17): Selenocysteine
  MOD_RES (34)..(34): Selenocysteine
  MOD_RES (46)..(46): Selenocysteine
  MOD_RES (50)..(50): Selenocysteine
  MOD_RES (90)..(90): Selenocysteine
  MOD_RES (96)..(97): Selenocysteine
  MOD_RES (140)..(140): Selenocysteine
  MOD_RES (144)..(144): Selenocysteine
  MOD_RES (151)..(151): Selenocysteine
  MOD_RES (155)..(155): Selenocysteine
  MOD_RES (158)..(158): Selenocysteine
  MOD_RES (168)..(168): Selenocysteine
  MOD_RES (188)..(188): Selenocysteine
  MOD_RES (197)..(197): Selenocysteine
  MOD_RES (201)..(201): Selenocysteine
  MOD_RES (215)..(215): Selenocysteine
  MOD_RES (217)..(217): Selenocysteine
  MOD_RES (243)..(243): Selenocysteine
  MOD_RES (273)..(273): Selenocysteine
  MOD_RES (288)..(288): Selenocysteine
  MOD_RES (316)..(316): Selenocysteine
  MOD_RES (322)..(322): Selenocysteine
  MOD_RES (363)..(363): Selenocysteine
  MOD_RES (368)..(368): Selenocysteine
  MOD_RES (374)..(374): Selenocysteine
  MOD_RES (378)..(378): Selenocysteine
  MOD_RES (381)..(381): Selenocysteine
  MOD_RES (384)..(385): Selenocysteine
  MOD_RES (390)..(390): Selenocysteine
  MOD_RES (409)..(409): Selenocysteine
  MOD_RES (440)..(440): Selenocysteine
  MOD_RES (467)..(467): Selenocysteine
  MOD_RES (531)..(531): Selenocysteine
  MOD_RES (593)..(593): Selenocysteine
  MOD_RES (599)..(599): Selenocysteine
  MOD_RES (602)..(602): Selenocysteine
  MOD_RES (622)..(622): Selenocysteine
MAHXFRGCSLAFMFIIXWLLIKAKIDACKRGDVXVKPSHVILLGSXVNIXCSLKPRQGCFHYSRRNKLILYKFDRRINFHHGHSLNSQVXGLPLGXXLFVCKLACINSDEIQICGAEIFVGVAPEQPQNLSCIQKGEQGXVACXWERGRDXHLYXEYXLQLSGPKNLXWQKQCKDIYCDYLDFGINLXPESPESNFXAKVXAVNSLGSSSSLPSXFXFLDIVRPLPPWDIRIKFQKASVSRCXLYWRDEGLVLLNRLRYRPSNSRLWNMVNVXKAKGRHDLLDLKPFXEYEFQISSKLHLYKGSWSDWSESLRAQXPEEEPXGMLDVWYMKRHIDYSRQQISLFWKNLSVSEARGKILHYQVXLQELXGGKAMXQNIXGHXSWXXVIPRXGNWAVAVSAANSKGSSLPXRINIMNLCEAGLLAPRQVSANSEGMDNILVXWQPPRKDPSAVQEYVVEWRELHPGGDXQVPLNWLRSRPYNVSALISENIKSYICYEIRVYALSGDQGGCSSILGNSKHKAPLSGPHINAIXEEKGSILISWNSIPVQEQMGCLLHYRIYWKERDSNSQPQLCEIPYRVSQNSHPINSLQPRVXYVLWMXALXAAGESSHGNEREFCLQGEDXAALGQAPDRLAHA

SEQ ID NO: 13246 - protein, 659 aa, Homo sapiens
  MOD_RES (4)..(4): Selenocysteine
  MOD_RES (17)..(17): Selenocysteine
  MOD_RES (34)..(34): Selenocysteine
  MOD_RES (46)..(46): Selenocysteine
  MOD_RES (50)..(50): Selenocysteine
  MOD_RES (90)..(90): Selenocysteine
  MOD_RES (96)..(97): Selenocysteine
  MOD_RES (140)..(140): Selenocysteine
  MOD_RES (144)..(144): Selenocysteine
  MOD_RES (151)..(151): Selenocysteine
  MOD_RES (155)..(155): Selenocysteine
  MOD_RES (158)..(158): Selenocysteine
  MOD_RES (168)..(168): Selenocysteine
  MOD_RES (188)..(188): Selenocysteine
  MOD_RES (197)..(197): Selenocysteine
  MOD_RES (201)..(201): Selenocysteine
  MOD_RES (215)..(215): Selenocysteine
  MOD_RES (217)..(217): Selenocysteine
  MOD_RES (243)..(243): Selenocysteine
  MOD_RES (273)..(273): Selenocysteine
  MOD_RES (288)..(288): Selenocysteine
  MOD_RES (316)..(316): Selenocysteine
  MOD_RES (322)..(322): Selenocysteine
  MOD_RES (363)..(363): Selenocysteine
  MOD_RES (368)..(368): Selenocysteine
  MOD_RES (374)..(374): Selenocysteine
  MOD_RES (378)..(378): Selenocysteine
  MOD_RES (381)..(381): Selenocysteine
  MOD_RES (384)..(385): Selenocysteine
  MOD_RES (390)..(390): Selenocysteine
  MOD_RES (409)..(409): Selenocysteine
  MOD_RES (440)..(440): Selenocysteine
  MOD_RES (467)..(467): Selenocysteine
  MOD_RES (531)..(531): Selenocysteine
  MOD_RES (593)..(593): Selenocysteine
  MOD_RES (599)..(599): Selenocysteine
  MOD_RES (602)..(602): Selenocysteine
  MOD_RES (643)..(643): Selenocysteine
  MOD_RES (657)..(657): Selenocysteine
MAHXFRGCSLAFMFIIXWLLIKAKIDACKRGDVXVKPSHVILLGSXVNIXCSLKPRQGCFHYSRRNKLILYKFDRRINFHHGHSLNSQVXGLPLGXXLFVCKLACINSDEIQICGAEIFVGVAPEQPQNLSCIQKGEQGXVACXWERGRDXHLYXEYXLQLSGPKNLXWQKQCKDIYCDYLDFGINLXPESPESNFXAKVXAVNSLGSSSSLPSXFXFLDIVRPLPPWDIRIKFQKASVSRCXLYWRDEGLVLLNRLRYRPSNSRLWNMVNVXKAKGRHDLLDLKPFXEYEFQISSKLHLYKGSWSDWSESLRAQXPEEEPXGMLDVWYMKRHIDYSRQQISLFWKNLSVSEARGKILHYQVXLQELXGGKAMXQNIXGHXSWXXVIPRXGNWAVAVSAANSKGSSLPXRINIMNLCEAGLLAPRQVSANSEGMDNILVXWQPPRKDPSAVQEYVVEWRELHPGGDXQVPLNWLRSRPYNVSALISENIKSYICYEIRVYALSGDQGGCSSILGNSKHKAPLSGPHINAIXEEKGSILISWNSIPVQEQMGCLLHYRIYWKERDSNSQPQLCEIPYRVSQNSHPINSLQPRVXYVLWMXALXAAGESSHGNEREFCLQGKANWMAFVAPSICIAIIMVGIFSXHYFQQKRRHSCPWXGS

SEQ ID NO: 13247 - protein, 776 aa, Homo sapiens
  MOD_RES (4)..(4): Selenocysteine
  MOD_RES (17)..(17): Selenocysteine
  MOD_RES (34)..(34): Selenocysteine
  MOD_RES (46)..(46): Selenocysteine
  MOD_RES (50)..(50): Selenocysteine
  MOD_RES (90)..(90): Selenocysteine
  MOD_RES (96)..(97): Selenocysteine
  MOD_RES (140)..(140): Selenocysteine
  MOD_RES (144)..(144): Selenocysteine
  MOD_RES (151)..(151): Selenocysteine
  MOD_RES (155)..(155): Selenocysteine
  MOD_RES (158)..(158): Selenocysteine
  MOD_RES (168)..(168): Selenocysteine
  MOD_RES (188)..(188): Selenocysteine
  MOD_RES (197)..(197): Selenocysteine
  MOD_RES (201)..(201): Selenocysteine
  MOD_RES (215)..(215): Selenocysteine
  MOD_RES (217)..(217): Selenocysteine
  MOD_RES (243)..(243): Selenocysteine
  MOD_RES (273)..(273): Selenocysteine
  MOD_RES (288)..(288): Selenocysteine
  MOD_RES (316)..(316): Selenocysteine
  MOD_RES (322)..(322): Selenocysteine
  MOD_RES (363)..(363): Selenocysteine
  MOD_RES (368)..(368): Selenocysteine
  MOD_RES (374)..(374): Selenocysteine
  MOD_RES (378)..(378): Selenocysteine
  MOD_RES (381)..(381): Selenocysteine
  MOD_RES (384)..(385): Selenocysteine
  MOD_RES (390)..(390): Selenocysteine
  MOD_RES (409)..(409): Selenocysteine
  MOD_RES (440)..(440): Selenocysteine
  MOD_RES (467)..(467): Selenocysteine
  MOD_RES (507)..(507): Selenocysteine
  MOD_RES (513)..(513): Selenocysteine
  MOD_RES (516)..(516): Selenocysteine
  MOD_RES (557)..(557): Selenocysteine
  MOD_RES (587)..(587): Selenocysteine
  MOD_RES (599)..(599): Selenocysteine
  MOD_RES (612)..(612): Selenocysteine
  MOD_RES (629)..(629): Selenocysteine
  MOD_RES (701)..(701): Selenocysteine
  MOD_RES (710)..(710): Selenocysteine
  MOD_RES (755)..(755): Selenocysteine
  MOD_RES (763)..(763): Selenocysteine
MAHXFRGCSLAFMFIIXWLLIKAKIDACKRGDVXVKPSHVILLGSXVNIXCSLKPRQGCFHYSRRNKLILYKFDRRINFHHGHSLNSQVXGLPLGXXLFVCKLACINSDEIQICGAEIFVGVAPEQPQNLSCIQKGEQGXVACXWERGRDXHLYXEYXLQLSGPKNLXWQKQCKDIYCDYLDFGINLXPESPESNFXAKVXAVNSLGSSSSLPSXFXFLDIVRPLPPWDIRIKFQKASVSRCXLYWRDEGLVLLNRLRYRPSNSRLWNMVNVXKAKGRHDLLDLKPFXEYEFQISSKLHLYKGSWSDWSESLRAQXPEEEPXGMLDVWYMKRHIDYSRQQISLFWKNLSVSEARGKILHYQVXLQELXGGKAMXQNIXGHXSWXXVIPRXGNWAVAVSAANSKGSSLPXRINIMNLCEAGLLAPRQVSANSEGMDNILVXWQPPRKDPSAVQEYVVEWRELHPGGDXQVPLNWLRSRPYNVSALISEIPYRVSQNSHPINSLQPRVXYVLWMXALXAAGESSHGNEREFCLQGKANWMAFVAPSICIAIIMVGIFSXHYFQQKVFVLLAALRPQWCSREIPDPANSXCAKKYPIAEEKXQLPLDRLLIDWPXPEDPEPLVISEVLHQVXPVFRHPPCSNWPQREKGIQGHQASEKDMMHSASSPPPPRALQAESRQLVDLYKVLESRGSDPKPENPACPWXVLPAGDLPXHDGYLPSNIDDLPSHEAPLADSLEELEPQHISLSVFPSSSLHPLXFSCGDKLXLDQLKMRCDSLML

SEQ ID NO: 13248 - protein, 862 aa, Homo sapiens
  MOD_RES (4)..(4): Selenocysteine
  MOD_RES (17)..(17): Selenocysteine
  MOD_RES (34)..(34): Selenocysteine
  MOD_RES (46)..(46): Selenocysteine
  MOD_RES (50)..(50): Selenocysteine
  MOD_RES (90)..(90): Selenocysteine
  MOD_RES (96)..(97): Selenocysteine
  MOD_RES (140)..(140): Selenocysteine
  MOD_RES (144)..(144): Selenocysteine
  MOD_RES (151)..(151): Selenocysteine
  MOD_RES (155)..(155): Selenocysteine
  MOD_RES (158)..(158): Selenocysteine
  MOD_RES (168)..(168): Selenocysteine
  MOD_RES (188)..(188): Selenocysteine
  MOD_RES (197)..(197): Selenocysteine
  MOD_RES (201)..(201): Selenocysteine
  MOD_RES (215)..(215): Selenocysteine
  MOD_RES (217)..(217): Selenocysteine
  MOD_RES (243)..(243): Selenocysteine
  MOD_RES (273)..(273): Selenocysteine
  MOD_RES (288)..(288): Selenocysteine
  MOD_RES (316)..(316): Selenocysteine
  MOD_RES (322)..(322): Selenocysteine
  MOD_RES (363)..(363): Selenocysteine
  MOD_RES (368)..(368): Selenocysteine
  MOD_RES (374)..(374): Selenocysteine
  MOD_RES (378)..(378): Selenocysteine
  MOD_RES (381)..(381): Selenocysteine
  MOD_RES (384)..(385): Selenocysteine
  MOD_RES (390)..(390): Selenocysteine
  MOD_RES (409)..(409): Selenocysteine
  MOD_RES (440)..(440): Selenocysteine
  MOD_RES (467)..(467): Selenocysteine
  MOD_RES (531)..(531): Selenocysteine
  MOD_RES (593)..(593): Selenocysteine
  MOD_RES (599)..(599): Selenocysteine
  MOD_RES (602)..(602): Selenocysteine
  MOD_RES (643)..(643): Selenocysteine
  MOD_RES (673)..(673): Selenocysteine
  MOD_RES (685)..(685): Selenocysteine
  MOD_RES (698)..(698): Selenocysteine
  MOD_RES (715)..(715): Selenocysteine
  MOD_RES (787)..(787): Selenocysteine
  MOD_RES (796)..(796): Selenocysteine
  MOD_RES (841)..(841): Selenocysteine
  MOD_RES (849)..(849): Selenocysteine
MAHXFRGCSLAFMFIIXWLLIKAKIDACKRGDVXVKPSHVILLGSXVNIXCSLKPRQGCFHYSRRNKLILYKFDRRINFHHGHSLNSQVXGLPLGXXLFVCKLACINSDEIQICGAEIFVGVAPEQPQNLSCIQKGEQGXVACXWERGRDXHLYXEYXLQLSGPKNLXWQKQCKDIYCDYLDFGINLXPESPESNFXAKVXAVNSLGSSSSLPSXFXFLDIVRPLPPWDIRIKFQKASVSRCXLYWRDEGLVLLNRLRYRPSNSRLWNMVNVXKAKGRHDLLDLKPFXEYEFQISSKLHLYKGSWSDWSESLRAQXPEEEPXGMLDVWYMKRHIDYSRQQISLFWKNLSVSEARGKILHYQVXLQELXGGKAMXQNIXGHXSWXXVIPRXGNWAVAVSAANSKGSSLPXRINIMNLCEAGLLAPRQVSANSEGMDNILVXWQPPRKDPSAVQEYVVEWRELHPGGDXQVPLNWLRSRPYNVSALISENIKSYICYEIRVYALSGDQGGCSSILGNSKHKAPLSGPHINAIXEEKGSILISWNSIPVQEQMGCLLHYRIYWKERDSNSQPQLCEIPYRVSQNSHPINSLQPRVXYVLWMXALXAAGESSHGNEREFCLQGKANWMAFVAPSICIAIIMVGIFSXHYFQQKVFVLLAALRPQWCSREIPDPANSXCAKKYPIAEEKXQLPLDRLLIDWPXPEDPEPLVISEVLHQVXPVFRHPPCSNWPQREKGIQGHQASEKDMMHSASSPPPPRALQAESRQLVDLYKVLESRGSDPKPENPACPWXVLPAGDLPXHDGYLPSNIDDLPSHEAPLADSLEELEPQHISLSVFPSSSLHPLXFSCGDKLXLDQLKMRCDSLML

SEQ ID NO: 13249 - protein, 230 aa, Homo sapiens
  MOD_RES (1)..(1): Any amino acid
  MOD_RES (8)..(8): Selenocysteine
  MOD_RES (12)..(12): Selenocysteine
  MOD_RES (19)..(19): Selenocysteine
  MOD_RES (23)..(23): Selenocysteine
  MOD_RES (26)..(26): Selenocysteine
  MOD_RES (36)..(36): Selenocysteine
  MOD_RES (56)..(56): Selenocysteine
  MOD_RES (65)..(65): Selenocysteine
  MOD_RES (69)..(69): Selenocysteine
  MOD_RES (83)..(83): Selenocysteine
  MOD_RES (85)..(85): Selenocysteine
  MOD_RES (111)..(111): Selenocysteine
  MOD_RES (141)..(141): Selenocysteine
  MOD_RES (156)..(156): Selenocysteine
  MOD_RES (184)..(184): Selenocysteine
  MOD_RES (190)..(190): Selenocysteine
  MOD_RES (223)..(223): Selenocysteine
  MOD_RES (228)..(228): Selenocysteine
XQKGEQGXVACXWERGRDXHLYXEYXLQLSGPKNLXWQKQCKDIYCDYLDFGINLXPESPESNFXAKVXAVNSLGSSSSLPSXFXFLDIVRPLPPWDIRIKFQKASVSRCXLYWRDEGLVLLNRLRYRPSNSRLWNMVNVXKAKGRHDLLDLKPFXEYEFQISSKLHLYKGSWSDWSESLRAQXPEEEPXGMLDVWYMKRHIDYSRQQISLFWKVSFKRQLKXQGNKXEG

SEQ ID NO: 13250 - protein, 144 aa, Homo sapiens
  MOD_RES (6)..(7): Selenocysteine
  MOD_RES (12)..(12): Selenocysteine
  MOD_RES (27)..(27): Selenocysteine
  MOD_RES (40)..(40): Selenocysteine
  MOD_RES (59)..(59): Selenocysteine
  MOD_RES (82)..(82): Selenocysteine
  MOD_RES (107)..(107): Selenocysteine
  MOD_RES (144)..(144): Selenocysteine
MALLLXXVIALXCLGGFASPGPVPPSXALRELIEELVNIXQNQKAPLCNGSMVWSINLXAGMYCAALESLINVSGCSAIEKXQRMLSGFCPHKVSAGQFSSLHVRDXKIEVAQFVKDLLLHLKKLFREGQFNNFESIIICRDRX

SEQ ID NO: 13251 - protein, 146 aa, Homo sapiens
  MOD_RES (20)..(21): Selenocysteine
  MOD_RES (26)..(26): Selenocysteine
  MOD_RES (41)..(41): Selenocysteine
  MOD_RES (54)..(54): Selenocysteine
  MOD_RES (73)..(73): Selenocysteine
  MOD_RES (96)..(96): Selenocysteine
  MOD_RES (121)..(121): Selenocysteine
MHPLLNPLLLALGLMALLLXXVIALXCLGGFASPGPVPPSXALRELIEELVNIXQNQKAPLCNGSMVWSINLXAGMYCAALESLINVSGCSAIEKXQRMLSGFCPHKVSAGQFSSLHVRDXKIEVAQFVKDLLLHLKKLFREGQFN

SEQ ID NO: 13252 - protein, 279 aa, Homo sapiens
  MOD_RES (29)..(29): Selenocysteine
  MOD_RES (31)..(31): Selenocysteine
  MOD_RES (36)..(36): Selenocysteine
  MOD_RES (47)..(47): Selenocysteine
  MOD_RES (51)..(51): Selenocysteine
  MOD_RES (82)..(82): Selenocysteine
  MOD_RES (104)..(104): Selenocysteine
  MOD_RES (130)..(130): Selenocysteine
  MOD_RES (152)..(152): Selenocysteine
  MOD_RES (156)..(156): Selenocysteine
  MOD_RES (159)..(159): Selenocysteine
  MOD_RES (190)..(190): Selenocysteine
  MOD_RES (223)..(223): Selenocysteine
  MOD_RES (269)..(269): Selenocysteine
  MOD_RES (271)..(271): Selenocysteine
MEWPARLCGLWALLLCAGGGGGGGGAAPXEXQPPVXNLSVSVENLCXVIWXWNPPEGASSNCSLWYFSHFGDKQDKKIAPEXRRSIEVPLNERICLQVGSQCSXNESEKPSILVEKCISPPEGDPESAVXELQCIWHNLSYMKCSWLPGRNXSPDXNYXLYYWHRSLEKIHQCENIFREGQYFGCSFDLXKVKDSSFEQHSVQIMVKDNAGKIKPSFNIVPLXSRVKPDPPHIKNLSFHNDDLYVQWENPQNFISRCLFYEVEVNNSQXEXHNVFYVRF

SEQ ID NO: 13253 - protein, 427 aa, Homo sapiens
  MOD_RES (29)..(29): Selenocysteine
  MOD_RES (31)..(31): Selenocysteine
  MOD_RES (36)..(36): Selenocysteine
  MOD_RES (47)..(47): Selenocysteine
  MOD_RES (51)..(51): Selenocysteine
  MOD_RES (82)..(82): Selenocysteine
  MOD_RES (104)..(104): Selenocysteine
  MOD_RES (130)..(130): Selenocysteine
  MOD_RES (152)..(152): Selenocysteine
  MOD_RES (156)..(156): Selenocysteine
  MOD_RES (159)..(159): Selenocysteine
  MOD_RES (190)..(190): Selenocysteine
  MOD_RES (223)..(223): Selenocysteine
  MOD_RES (269)..(269): Selenocysteine
  MOD_RES (271)..(271): Selenocysteine
  MOD_RES (294)..(294): Selenocysteine
  MOD_RES (306)..(306): Selenocysteine
  MOD_RES (309)..(309): Selenocysteine
  MOD_RES (316)..(316): Selenocysteine
  MOD_RES (343)..(343): Selenocysteine
  MOD_RES (347)..(347): Selenocysteine
  MOD_RES (396)..(396): Selenocysteine
  MOD_RES (409)..(409): Selenocysteine
  MOD_RES (413)..(413): Selenocysteine
MEWPARLCGLWALLLCAGGGGGGGGAAPXEXQPPVXNLSVSVENLCXVIWXWNPPEGASSNCSLWYFSHFGDKQDKKIAPEXRRSIEVPLNERICLQVGSQCSXNESEKPSILVEKCISPPEGDPESAVXELQCIWHNLSYMKCSWLPGRNXSPDXNYXLYYWHRSLEKIHQCENIFREGQYFGCSFDLXKVKDSSFEQHSVQIMVKDNAGKIKPSFNIVPLXSRVKPDPPHIKNLSFHNDDLYVQWENPQNFISRCLFYEVEVNNSQXEXHNVFYVQEAKCENPEFERNVENXSCFMVPGVLPDXLNXVRIRVKXNKLCYEDDKLWSNWSQEMSIGKKRNSXLYIXMLLIVPVIVAGAIIVLLLYLKRLKIIIFPPIPDPGKIFKEMFGDQNDDXLHWKKYDIYEKQXKEEXDSVVLIENLKKASQ

SEQ ID NO: 13254 - protein, 380 aa, Homo sapiens
  MOD_RES (13)..(13): Selenocysteine
  MOD_RES (18)..(19): Selenocysteine
  MOD_RES (23)..(23): Selenocysteine
  MOD_RES (28)..(28): Selenocysteine
  MOD_RES (66)..(66): Selenocysteine
  MOD_RES (80)..(80): Selenocysteine
  MOD_RES (83)..(83): Selenocysteine
  MOD_RES (86)..(86): Selenocysteine
  MOD_RES (107)..(107): Selenocysteine
  MOD_RES (114)..(114): Selenocysteine
  MOD_RES (126)..(127): Selenocysteine
  MOD_RES (138)..(138): Selenocysteine
  MOD_RES (167)..(167): Selenocysteine
  MOD_RES (229)..(229): Selenocysteine
  MOD_RES (245)..(245): Selenocysteine
  MOD_RES (247)..(247): Selenocysteine
  MOD_RES (281)..(282): Selenocysteine
  MOD_RES (285)..(285): Selenocysteine
  MOD_RES (287)..(287): Selenocysteine
  MOD_RES (292)..(292): Selenocysteine
  MOD_RES (294)..(294): Selenocysteine
  MOD_RES (297)..(298): Selenocysteine
  MOD_RES (301)..(301): Selenocysteine
  MOD_RES (340)..(340): Selenocysteine
  MOD_RES (359)..(359): Selenocysteine
  MOD_RES (368)..(368): Selenocysteine
  MOD_RES (380)..(380): Selenocysteine
MAFVCLAIGCLYXFLISXXFGCXSSSDXEIKVNPPQDFEIVDPGYLGYLYLQWQPPLSLDHFKECXVEYELKYRNIGSEXWKXIIXKNLHYKDGFDLNKGIEAKIHXLLPWQCXNGSEVQSSWAEXXYWISPQGIPEXKVQDMDCVYYNWQYLLCSWKPGIGVLLDXNYNLFYWYEGLDHALQCVDYIKADGQNIGCRFPYLEASDYKDFYICVNGSSENKPIRSSYFXFQLQNIVKPLPPVYLXFXRESSCEIKLKWSIPLGPIPARCFDYEIEIREDDXXLVXAXVENEXYXLKXXNEXRQLCFVVRSKVNIYCSDDGIWSEWSDKQCWEGEDLSKKXLLRFWLPFGFILILVIFVXGLLLRKPNXYPKMIPEFFCDX

SEQ ID NO: 13255 - protein, 162 aa, Homo sapiens
  MOD_RES (27)..(27): Selenocysteine
  MOD_RES (46)..(46): Selenocysteine
  MOD_RES (72)..(72): Selenocysteine
  MOD_RES (75)..(75): Selenocysteine
  MOD_RES (86)..(86): Selenocysteine
  MOD_RES (110)..(110): Selenocysteine
  MOD_RES (129)..(129): Selenocysteine
  MOD_RES (161)..(161): Selenocysteine
MRISKPHLRSISIQCYLCLLLNSHFLXEAGIHVFILGCFSAGLPKXEANWVNVISDLKKIEDLIQSMHIDAXLYXESDVHPSCKVXAMKCFLLELQVISLESGDASIHDXVENLIILANNSLSSNGNVXESGCKECEELEEKNIKEFLQSFVHIVQMFINXS

SEQ ID NO: 13256 - protein, 135 aa, Homo sapiens
  MOD_RES (5)..(5): Selenocysteine
  MOD_RES (19)..(19): Selenocysteine
  MOD_RES (45)..(45): Selenocysteine
  MOD_RES (48)..(48): Selenocysteine
  MOD_RES (59)..(59): Selenocysteine
  MOD_RES (83)..(83): Selenocysteine
  MOD_RES (102)..(102): Selenocysteine
  MOD_RES (134)..(134): Selenocysteine
MVLGXIDLCSCFSAGLPKXEANWVNVISDLKKIEDLIQSMHIDAXLYXESDVHPSCKVXAMKCFLLELQVISLESGDASIHDXVENLIILANNSLSSNGNVXESGCKECEELEEKNIKEFLQSFVHIVQMFINXS

SEQ ID NO: 13257 - protein, 305 aa, Homo sapiens
  MOD_RES (11)..(11): Selenocysteine
  MOD_RES (28)..(28): Selenocysteine
  MOD_RES (54)..(54): Selenocysteine
  MOD_RES (63)..(63): Selenocysteine
  MOD_RES (75)..(75): Selenocysteine
  MOD_RES (83)..(83): Selenocysteine
  MOD_RES (120)..(120): Selenocysteine
  MOD_RES (124)..(124): Selenocysteine
  MOD_RES (132)..(132): Selenocysteine
  MOD_RES (138)..(139): Selenocysteine
  MOD_RES (160)..(160): Selenocysteine
  MOD_RES (162)..(163): Selenocysteine
  MOD_RES (167)..(167): Selenocysteine
  MOD_RES (190)..(190): Selenocysteine
  MOD_RES (193)..(194): Selenocysteine
  MOD_RES (211)..(211): Selenocysteine
  MOD_RES (213)..(214): Selenocysteine
  MOD_RES (225)..(225): Selenocysteine
  MOD_RES (229)..(230): Selenocysteine
  MOD_RES (237)..(237): Selenocysteine
  MOD_RES (255)..(256): Selenocysteine
  MOD_RES (286)..(286): Selenocysteine
  MOD_RES (295)..(295): Selenocysteine
  MOD_RES (300)..(300): Selenocysteine
  MOD_RES (304)..(304): Selenocysteine
MAPRRARGCRXLGLPALLLLLLLRPPAXRDARDRLAVLAGRSRISESFNHEVQXHEACVRLRXMENCPQCHHHRXSRQQAGIXCPPPMSVEHADIWVKSYSLYSRERYICNSGFKRKAGXSSLXECVLNKAXNVAHWXXPSLKCIRDPALVHQRPAPPSXVXXAGVXPQPESLSPSGKEPAASSPSSNNXAAXXAAIVPGSQLMPSKSPSXGXXEISSHESSHGXPSQXXAKNWELXASASHQPPGVYPQGHSDXXGRKQHLLPDFQASFQRDCINKHIEDKECWXVASFLLFCXMFVSXCWYXL

SEQ ID NO: 13258 - protein, 308 aa, Homo sapiens
  MOD_RES (11)..(11): Selenocysteine
  MOD_RES (28)..(28): Selenocysteine
  MOD_RES (54)..(54): Selenocysteine
  MOD_RES (63)..(63): Selenocysteine
  MOD_RES (75)..(75): Selenocysteine
  MOD_RES (83)..(83): Selenocysteine
  MOD_RES (120)..(120): Selenocysteine
  MOD_RES (124)..(124): Selenocysteine
  MOD_RES (132)..(132): Selenocysteine
  MOD_RES (138)..(139): Selenocysteine
  MOD_RES (160)..(160): Selenocysteine
  MOD_RES (162)..(163): Selenocysteine
  MOD_RES (167)..(167): Selenocysteine
  MOD_RES (190)..(190): Selenocysteine
  MOD_RES (193)..(194): Selenocysteine
  MOD_RES (211)..(211): Selenocysteine
  MOD_RES (213)..(214): Selenocysteine
  MOD_RES (225)..(225): Selenocysteine
  MOD_RES (229)..(230): Selenocysteine
  MOD_RES (237)..(237): Selenocysteine
  MOD_RES (255)..(256): Selenocysteine
  MOD_RES (261)..(261): Selenocysteine
  MOD_RES (263)..(263): Selenocysteine
  MOD_RES (295)..(295): Selenocysteine
  MOD_RES (304)..(304): Selenocysteine
MAPRRARGCRXLGLPALLLLLLLRPPAXRDARDRLAVLAGRSRISESFNHEVQXHEACVRLRXMENCPQCHHHRXSRQQAGIXCPPPMSVEHADIWVKSYSLYSRERYICNSGFKRKAGXSSLXECVLNKAXNVAHWXXPSLKCIRDPALVHQRPAPPSXVXXAGVXPQPESLSPSGKEPAASSPSSNNXAAXXAAIVPGSQLMPSKSPSXGXXEISSHESSHGXPSQXXAKNWELXASASHQPPGVYPQGHSDXXVAISXSXVLLCGLSAVSLLACYLKSSLDAFIKIRGGFSXWLLGLPHSXVGSG

SEQ ID NO: 13259 - protein, 331 aa, Homo sapiens
  MOD_RES (11)..(11): Selenocysteine
  MOD_RES (28)..(28): Selenocysteine
  MOD_RES (54)..(54): Selenocysteine
  MOD_RES (63)..(63): Selenocysteine
  MOD_RES (75)..(75): Selenocysteine
  MOD_RES (83)..(83): Selenocysteine
  MOD_RES (120)..(120): Selenocysteine
  MOD_RES (124)..(124): Selenocysteine
  MOD_RES (132)..(132): Selenocysteine
  MOD_RES (138)..(139): Selenocysteine
  MOD_RES (160)..(160): Selenocysteine
  MOD_RES (162)..(163): Selenocysteine
  MOD_RES (167)..(167): Selenocysteine
  MOD_RES (190)..(190): Selenocysteine
  MOD_RES (193)..(194): Selenocysteine
  MOD_RES (211)..(211): Selenocysteine
  MOD_RES (213)..(214): Selenocysteine
  MOD_RES (225)..(225): Selenocysteine
  MOD_RES (229)..(230): Selenocysteine
  MOD_RES (237)..(237): Selenocysteine
  MOD_RES (255)..(256): Selenocysteine
  MOD_RES (261)..(261): Selenocysteine
  MOD_RES (263)..(263): Selenocysteine
  MOD_RES (315)..(315): Selenocysteine
  MOD_RES (320)..(320): Selenocysteine
MAPRRARGCRXLGLPALLLLLLLRPPAXRDARDRLAVLAGRSRISESFNHEVQXHEACVRLRXMENCPQCHHHRXSRQQAGIXCPPPMSVEHADIWVKSYSLYSRERYICNSGFKRKAGXSSLXECVLNKAXNVAHWXXPSLKCIRDPALVHQRPAPPSXVXXAGVXPQPESLSPSGKEPAASSPSSNNXAAXXAAIVPGSQLMPSKSPSXGXXEISSHESSHGXPSQXXAKNWELXASASHQPPGVYPQGHSDXXVAISXSXVLLCGLSAVSLLACYLKSRWLAKRSLPGDAEAPNMSRGGRNAWEQLSRAPAXSLLRXPVESALSASRP

SEQ ID NO: 13260 - protein, 346 aa, Homo sapiens
  MOD_RES (11)..(11): Selenocysteine
  MOD_RES (28)..(28): Selenocysteine
  MOD_RES (54)..(54): Selenocysteine
  MOD_RES (63)..(63): Selenocysteine
  MOD_RES (75)..(75): Selenocysteine
  MOD_RES (83)..(83): Selenocysteine
  MOD_RES (120)..(120): Selenocysteine
  MOD_RES (124)..(124): Selenocysteine
  MOD_RES (132)..(132): Selenocysteine
  MOD_RES (138)..(139): Selenocysteine
  MOD_RES (160)..(160): Selenocysteine
  MOD_RES (162)..(163): Selenocysteine
  MOD_RES (167)..(167): Selenocysteine
  MOD_RES (190)..(190): Selenocysteine
  MOD_RES (193)..(194): Selenocysteine
  MOD_RES (211)..(211): Selenocysteine
  MOD_RES (213)..(214): Selenocysteine
  MOD_RES (225)..(225): Selenocysteine
  MOD_RES (229)..(230): Selenocysteine
  MOD_RES (237)..(237): Selenocysteine
  MOD_RES (255)..(256): Selenocysteine
  MOD_RES (261)..(261): Selenocysteine
  MOD_RES (263)..(263): Selenocysteine
  MOD_RES (289)..(289): Selenocysteine
  MOD_RES (292)..(292): Selenocysteine
  MOD_RES (328)..(328): Selenocysteine
  MOD_RES (334)..(334): Selenocysteine
MAPRRARGCRXLGLPALLLLLLLRPPAXRDARDRLAVLAGRSRISESFNHEVQXHEACVRLRXMENCPQCHHHRXSRQQAGIXCPPPMSVEHADIWVKSYSLYSRERYICNSGFKRKAGXSSLXECVLNKAXNVAHWXXPSLKCIRDPALVHQRPAPPSXVXXAGVXPQPESLSPSGKEPAASSPSSNNXAAXXAAIVPGSQLMPSKSPSXGXXEISSHESSHGXPSQXXAKNWELXASASHQPPGVYPQGHSDXXVAISXSXVLLCGLSAVSLLACYLKSSSHSRELXLLXLKWPKELLLLRRDISPALVEGAGQMPRASAPRQLQXGQPRMXSVLPRLCLSFGS

SEQ ID NO: 13261 - protein, 154 aa, Homo sapiens
  MOD_RES (11)..(11): Selenocysteine
  MOD_RES (28)..(28): Selenocysteine
  MOD_RES (41)..(41): Selenocysteine
  MOD_RES (44)..(45): Selenocysteine
  MOD_RES (62)..(62): Selenocysteine
  MOD_RES (64)..(65): Selenocysteine
  MOD_RES (76)..(76): Selenocysteine
  MOD_RES (80)..(81): Selenocysteine
  MOD_RES (88)..(88): Selenocysteine
  MOD_RES (106)..(107): Selenocysteine
  MOD_RES (112)..(112): Selenocysteine
  MOD_RES (114)..(114): Selenocysteine
  MOD_RES (147)..(147): Selenocysteine
MAPRRARGCRXLGLPALLLLLLLRPPAXREPAASSPSSNNXAAXXAAIVPGSQLMPSKSPSXGXXEISSHESSHGXPSQXXAKNWELXASASHQPPGVYPQGHSDXXVAISXSXVLLCGLSAVSLLACYLKSRASVCSCHPRSAGHXCSVGSVC

SEQ ID NO: 13262 - protein, 169 aa, Homo sapiens
  MOD_RES (11)..(11): Selenocysteine
  MOD_RES (28)..(28): Selenocysteine
  MOD_RES (41)..(41): Selenocysteine
  MOD_RES (44)..(45): Selenocysteine
  MOD_RES (62)..(62): Selenocysteine
  MOD_RES (64)..(65): Selenocysteine
  MOD_RES (76)..(76): Selenocysteine
  MOD_RES (80)..(81): Selenocysteine
  MOD_RES (88)..(88): Selenocysteine
  MOD_RES (106)..(107): Selenocysteine
  MOD_RES (112)..(112): Selenocysteine
  MOD_RES (114)..(114): Selenocysteine
  MOD_RES (135)..(135): Selenocysteine
  MOD_RES (152)..(152): Selenocysteine
  MOD_RES (155)..(155): Selenocysteine
MAPRRARGCRXLGLPALLLLLLLRPPAXREPAASSPSSNNXAAXXAAIVPGSQLMPSKSPSXGXXEISSHESSHGXPSQXXAKNWELXASASHQPPGVYPQGHSDXXVAISXSXVLLCGLSAVSLLACYLKSRQXPPLASVEMEAMEALPVXWGXSSRDEDLENCSHHL

SEQ ID NO: 13263 - protein, 172 aa, Homo sapiens
  MOD_RES (11)..(11): Selenocysteine
  MOD_RES (28)..(28): Selenocysteine
  MOD_RES (32)..(32): Selenocysteine
  MOD_RES (69)..(69): Selenocysteine
  MOD_RES (73)..(73): Selenocysteine
  MOD_RES (81)..(81): Selenocysteine
  MOD_RES (87)..(88): Selenocysteine
  MOD_RES (106)..(106): Selenocysteine
  MOD_RES (109)..(110): Selenocysteine
  MOD_RES (127)..(127): Selenocysteine
  MOD_RES (129)..(130): Selenocysteine
  MOD_RES (141)..(141): Selenocysteine
  MOD_RES (145)..(146): Selenocysteine
  MOD_RES (153)..(153): Selenocysteine
  MOD_RES (171)..(172): Selenocysteine
MAPRRARGCRXLGLPALLLLLLLRPPAXRGIXCPPPMSVEHADIWVKSYSLYSRERYICNSGFKRKAGXSSLXECVLNKAXNVAHWXXPSLKCIKPAASSPSSNNXAAXXAAIVPGSQLMPSKSPSXGXXEISSHESSHGXPSQXXAKNWELXASASHQPPGVYPQGHSDXX

SEQ ID NO: 13264 - protein, 219 aa, Homo sapiens
  MOD_RES (11)..(11): Selenocysteine
  MOD_RES (28)..(28): Selenocysteine
  MOD_RES (32)..(32): Selenocysteine
  MOD_RES (69)..(69): Selenocysteine
  MOD_RES (73)..(73): Selenocysteine
  MOD_RES (81)..(81): Selenocysteine
  MOD_RES (87)..(88): Selenocysteine
  MOD_RES (106)..(106): Selenocysteine
  MOD_RES (109)..(110): Selenocysteine
  MOD_RES (127)..(127): Selenocysteine
  MOD_RES (129)..(130): Selenocysteine
  MOD_RES (141)..(141): Selenocysteine
  MOD_RES (145)..(146): Selenocysteine
  MOD_RES (153)..(153): Selenocysteine
  MOD_RES (171)..(172): Selenocysteine
  MOD_RES (177)..(177): Selenocysteine
  MOD_RES (179)..(179): Selenocysteine
  MOD_RES (212)..(212): Selenocysteine
MAPRRARGCRXLGLPALLLLLLLRPPAXRGIXCPPPMSVEHADIWVKSYSLYSRERYICNSGFKRKAGXSSLXECVLNKAXNVAHWXXPSLKCIKPAASSPSSNNXAAXXAAIVPGSQLMPSKSPSXGXXEISSHESSHGXPSQXXAKNWELXASASHQPPGVYPQGHSDXXVAISXSXVLLCGLSAVSLLACYLKSRASVCSCHPRSAGHXCSVGSVC

SEQ ID NO: 13265 - protein, 234 aa, Homo sapiens
  MOD_RES (11)..(11): Selenocysteine
  MOD_RES (28)..(28): Selenocysteine
  MOD_RES (32)..(32): Selenocysteine
  MOD_RES (69)..(69): Selenocysteine
  MOD_RES (73)..(73): Selenocysteine
  MOD_RES (81)..(81): Selenocysteine
  MOD_RES (87)..(88): Selenocysteine
  MOD_RES (106)..(106): Selenocysteine
  MOD_RES (109)..(110): Selenocysteine
  MOD_RES (127)..(127): Selenocysteine
  MOD_RES (129)..(130): Selenocysteine
  MOD_RES (141)..(141): Selenocysteine
  MOD_RES (145)..(146): Selenocysteine
  MOD_RES (153)..(153): Selenocysteine
  MOD_RES (171)..(172): Selenocysteine
  MOD_RES (177)..(177): Selenocysteine
  MOD_RES (179)..(179): Selenocysteine
  MOD_RES (200)..(200): Selenocysteine
  MOD_RES (217)..(217): Selenocysteine
  MOD_RES (220)..(220): Selenocysteine
MAPRRARGCRXLGLPALLLLLLLRPPAXRGIXCPPPMSVEHADIWVKSYSLYSRERYICNSGFKRKAGXSSLXECVLNKAXNVAHWXXPSLKCIKPAASSPSSNNXAAXXAAIVPGSQLMPSKSPSXGXXEISSHESSHGXPSQXXAKNWELXASASHQPPGVYPQGHSDXXVAISXSXVLLCGLSAVSLLACYLKSRQXPPLASVEMEAMEALPVXWGXSSRDEDLENCSHHL

SEQ ID NO: 13266 - protein, 252 aa, Homo sapiens
  MOD_RES (11)..(11): Selenocysteine
  MOD_RES (28)..(28): Selenocysteine
  MOD_RES (32)..(32): Selenocysteine
  MOD_RES (69)..(69): Selenocysteine
  MOD_RES (73)..(73): Selenocysteine
  MOD_RES (81)..(81): Selenocysteine
  MOD_RES (87)..(88): Selenocysteine
  MOD_RES (109)..(109): Selenocysteine
  MOD_RES (111)..(112): Selenocysteine
  MOD_RES (116)..(116): Selenocysteine
  MOD_RES (139)..(139): Selenocysteine
  MOD_RES (142)..(143): Selenocysteine
  MOD_RES (160)..(160): Selenocysteine
  MOD_RES (162)..(163): Selenocysteine
  MOD_RES (174)..(174): Selenocysteine
  MOD_RES (178)..(179): Selenocysteine
  MOD_RES (186)..(186): Selenocysteine
  MOD_RES (204)..(205): Selenocysteine
  MOD_RES (210)..(210): Selenocysteine
  MOD_RES (212)..(212): Selenocysteine
  MOD_RES (245)..(245): Selenocysteine
MAPRRARGCRXLGLPALLLLLLLRPPAXRGIXCPPPMSVEHADIWVKSYSLYSRERYICNSGFKRKAGXSSLXECVLNKAXNVAHWXXPSLKCIRDPALVHQRPAPPSXVXXAGVXPQPESLSPSGKEPAASSPSSNNXAAXXAAIVPGSQLMPSKSPSXGXXEISSHESSHGXPSQXXAKNWELXASASHQPPGVYPQGHSDXXVAISXSXVLLCGLSAVSLLACYLKSRASVCSCHPRSAGHXCSVGSVC

SEQ ID NO: 13267 - protein, 267 aa, Homo sapiens
  MOD_RES (11)..(11): Selenocysteine
  MOD_RES (28)..(28): Selenocysteine
  MOD_RES (32)..(32): Selenocysteine
  MOD_RES (69)..(69): Selenocysteine
  MOD_RES (73)..(73): Selenocysteine
  MOD_RES (81)..(81): Selenocysteine
  MOD_RES (87)..(88): Selenocysteine
  MOD_RES (109)..(109): Selenocysteine
  MOD_RES (111)..(112): Selenocysteine
  MOD_RES (116)..(116): Selenocysteine
  MOD_RES (139)..(139): Selenocysteine
  MOD_RES (142)..(143): Selenocysteine
  MOD_RES (160)..(160): Selenocysteine
  MOD_RES (162)..(163): Selenocysteine
  MOD_RES (174)..(174): Selenocysteine
  MOD_RES (178)..(179): Selenocysteine
  MOD_RES (186)..(186): Selenocysteine
  MOD_RES (204)..(205): Selenocysteine
  MOD_RES (210)..(210): Selenocysteine
  MOD_RES (212)..(212): Selenocysteine
  MOD_RES (233)..(233): Selenocysteine
  MOD_RES (250)..(250): Selenocysteine
  MOD_RES (253)..(253): Selenocysteine
MAPRRARGCRXLGLPALLLLLLLRPPAXRGIXCPPPMSVEHADIWVKSYSLYSRERYICNSGFKRKAGXSSLXECVLNKAXNVAHWXXPSLKCIRDPALVHQRPAPPSXVXXAGVXPQPESLSPSGKEPAASSPSSNNXAAXXAAIVPGSQLMPSKSPSXGXXEISSHESSHGXPSQXXAKNWELXASASHQPPGVYPQGHSDXXVAISXSXVLLCGLSAVSLLACYLKSRQXPPLASVEMEAMEALPVXWGXSSRDEDLENCSHHL

SEQ ID NO: 13268 - protein, 353 aa, Homo sapiens
  MOD_RES (46)..(46): Selenocysteine
  MOD_RES (63)..(63): Selenocysteine
  MOD_RES (89)..(89): Selenocysteine
  MOD_RES (98)..(98): Selenocysteine
  MOD_RES (110)..(110): Selenocysteine
  MOD_RES (118)..(118): Selenocysteine
  MOD_RES (155)..(155): Selenocysteine
  MOD_RES (159)..(159): Selenocysteine
  MOD_RES (167)..(167): Selenocysteine
  MOD_RES (173)..(174): Selenocysteine
  MOD_RES (195)..(195): Selenocysteine
  MOD_RES (197)..(198): Selenocysteine
  MOD_RES (202)..(202): Selenocysteine
  MOD_RES (225)..(225): Selenocysteine
  MOD_RES (228)..(229): Selenocysteine
  MOD_RES (246)..(246): Selenocysteine
  MOD_RES (248)..(249): Selenocysteine
  MOD_RES (260)..(260): Selenocysteine
  MOD_RES (264)..(265): Selenocysteine
  MOD_RES (272)..(272): Selenocysteine
  MOD_RES (290)..(291): Selenocysteine
  MOD_RES (296)..(296): Selenocysteine
  MOD_RES (298)..(298): Selenocysteine
  MOD_RES (319)..(319): Selenocysteine
  MOD_RES (336)..(336): Selenocysteine
  MOD_RES (339)..(339): Selenocysteine
MRLAGRQVPEQRSPPPPGLGSARPGSPAVSCGAAAMAPRRARGCRXLGLPALLLLLLLRPPAXRDARDRLAVLAGRSRISESFNHEVQXHEACVRLRXMENCPQCHHHRXSRQQAGIXCPPPMSVEHADIWVKSYSLYSRERYICNSGFKRKAGXSSLXECVLNKAXNVAHWXXPSLKCIRDPALVHQRPAPPSXVXXAGVXPQPESLSPSGKEPAASSPSSNNXAAXXAAIVPGSQLMPSKSPSXGXXEISSHESSHGXPSQXXAKNWELXASASHQPPGVYPQGHSDXXVAISXSXVLLCGLSAVSLLACYLKSRQXPPLASVEMEAMEALPVXWGXSSRDEDLENCSHHL

SEQ ID NO: 13269 - protein, 172 aa, Homo sapiens
  MOD_RES (33)..(33): Selenocysteine
  MOD_RES (37)..(37): Selenocysteine
  MOD_RES (45)..(45): Selenocysteine
  MOD_RES (51)..(52): Selenocysteine
  MOD_RES (70)..(70): Selenocysteine
  MOD_RES (73)..(74): Selenocysteine
  MOD_RES (91)..(91): Selenocysteine
  MOD_RES (93)..(94): Selenocysteine
  MOD_RES (105)..(105): Selenocysteine
  MOD_RES (109)..(110): Selenocysteine
  MOD_RES (117)..(117): Selenocysteine
  MOD_RES (135)..(136): Selenocysteine
  MOD_RES (141)..(141): Selenocysteine
  MOD_RES (143)..(143): Selenocysteine
  MOD_RES (164)..(164): Selenocysteine
MSVEHADIWVKSYSLYSRERYICNSGFKRKAGXSSLXECVLNKAXNVAHWXXPSLKCIKPAASSPSSNNXAAXXAAIVPGSQLMPSKSPSXGXXEISSHESSHGXPSQXXAKNWELXASASHQPPGVYPQGHSDXXVAISXSXVLLCGLSAVSLLACYLKSRQXPPLASVEM

SEQ ID NO: 13270 - protein, 148 aa, Homo sapiens
  MOD_RES (33)..(33): Selenocysteine
  MOD_RES (37)..(37): Selenocysteine
  MOD_RES (45)..(45): Selenocysteine
  MOD_RES (51)..(52): Selenocysteine
  MOD_RES (72)..(72): Selenocysteine
  MOD_RES (74)..(75): Selenocysteine
  MOD_RES (79)..(79): Selenocysteine
  MOD_RES (102)..(102): Selenocysteine
  MOD_RES (105)..(106): Selenocysteine
  MOD_RES (123)..(123): Selenocysteine
  MOD_RES (125)..(126): Selenocysteine
  MOD_RES (137)..(137): Selenocysteine
  MOD_RES (141)..(142): Selenocysteine
MSVEHADIWVKSYSLYSRERYICNSGFKRKAGXSSLXECVLNKAXNVAHWXXPSLKCINPALVHQRPAPPSXVXXAGVXPQPESLSPSGKEPAASSPSSNNXAAXXAAIVPGSQLMPSKSPSXGXXEISSHESSHGXPSQXXAKNWEL

SEQ ID NO: 13271 - protein, 231 aa, Homo sapiens
  MOD_RES (33)..(33): Selenocysteine
  MOD_RES (37)..(37): Selenocysteine
  MOD_RES (45)..(45): Selenocysteine
  MOD_RES (51)..(52): Selenocysteine
  MOD_RES (73)..(73): Selenocysteine
  MOD_RES (75)..(76): Selenocysteine
  MOD_RES (80)..(80): Selenocysteine
  MOD_RES (103)..(103): Selenocysteine
  MOD_RES (106)..(107): Selenocysteine
  MOD_RES (124)..(124): Selenocysteine
  MOD_RES (126)..(127): Selenocysteine
  MOD_RES (138)..(138): Selenocysteine
  MOD_RES (142)..(143): Selenocysteine
  MOD_RES (150)..(150): Selenocysteine
  MOD_RES (168)..(169): Selenocysteine
  MOD_RES (174)..(174): Selenocysteine
  MOD_RES (176)..(176): Selenocysteine
  MOD_RES (197)..(197): Selenocysteine
  MOD_RES (214)..(214): Selenocysteine
  MOD_RES (217)..(217): Selenocysteine
MSVEHADIWVKSYSLYSRERYICNSGFKRKAGXSSLXECVLNKAXNVAHWXXPSLKCIRDPALVHQRPAPPSXVXXAGVXPQPESLSPSGKEPAASSPSSNNXAAXXAAIVPGSQLMPSKSPSXGXXEISSHESSHGXPSQXXAKNWELXASASHQPPGVYPQGHSDXXVAISXSXVLLCGLSAVSLLACYLKSRQXPPLASVEMEAMEALPVXWGXSSRDEDLENCSHHL

SEQ ID NO: 13272 - protein, 209 aa, Homo sapiens
  MOD_RES (1)..(1): Any amino acid
  MOD_RES (3)..(3): Selenocysteine
  MOD_RES (40)..(40): Selenocysteine
  MOD_RES (44)..(44): Selenocysteine
  MOD_RES (52)..(52): Selenocysteine
  MOD_RES (58)..(59): Selenocysteine
  MOD_RES (67)..(68): Selenocysteine
  MOD_RES (79)..(79): Selenocysteine
  MOD_RES (83)..(84): Selenocysteine
  MOD_RES (91)..(91): Selenocysteine
  MOD_RES (109)..(110): Selenocysteine
  MOD_RES (140)..(140): Selenocysteine
  MOD_RES (152)..(152): Selenocysteine
  MOD_RES (154)..(154): Selenocysteine
  MOD_RES (175)..(175): Selenocysteine
  MOD_RES (192)..(192): Selenocysteine
  MOD_RES (195)..(195): Selenocysteine
XIXCPPPMSVEHADIWVKSYSLYSRERYICNSGFKRKAGXSSLXECVLNKAXNVAHWXXPSLKCIRXXEISSHESSHGXPSQXXAKNWELXASASHQPPGVYPQGHSDXXGRKQHLLPDFQASFQRDCINKHIEDKECWXVASFLLFLAISXSXVLLCGLSAVSLLACYLKSRQXPPLASVEMEAMEALPVXWGXSSRDEDLENCSHHL

SEQ ID NO: 13273 - protein, 155 aa, Homo sapiens
  MOD_RES (1)..(1): Any amino acid
  MOD_RES (12)..(12): Selenocysteine
  MOD_RES (14)..(15): Selenocysteine
  MOD_RES (19)..(19): Selenocysteine
  MOD_RES (42)..(42): Selenocysteine
  MOD_RES (45)..(46): Selenocysteine
  MOD_RES (63)..(63): Selenocysteine
  MOD_RES (65)..(66): Selenocysteine
  MOD_RES (77)..(77): Selenocysteine
  MOD_RES (81)..(82): Selenocysteine
  MOD_RES (89)..(89): Selenocysteine
  MOD_RES (107)..(108): Selenocysteine
  MOD_RES (113)..(113): Selenocysteine
  MOD_RES (115)..(115): Selenocysteine
  MOD_RES (148)..(148): Selenocysteine
XLVHQRPAPPSXVXXAGVXPQPESLSPSGKEPAASSPSSNNXAAXXAAIVPGSQLMPSKSPSXGXXEISSHESSHGXPSQXXAKNWELXASASHQPPGVYPQGHSDXXVAISXSXVLLCGLSAVSLLACYLKSRASVCSCHPRSAGHXCSVGSVC

SEQ ID NO: 13274 - protein, 198 aa, Homo sapiens
  MOD_RES (1)..(1): Any amino acid
  MOD_RES (12)..(12): Selenocysteine
  MOD_RES (15)..(16): Selenocysteine
  MOD_RES (33)..(33): Selenocysteine
  MOD_RES (35)..(36): Selenocysteine
  MOD_RES (47)..(47): Selenocysteine
  MOD_RES (51)..(52): Selenocysteine
  MOD_RES (59)..(59): Selenocysteine
  MOD_RES (77)..(78): Selenocysteine
  MOD_RES (83)..(83): Selenocysteine
  MOD_RES (85)..(85): Selenocysteine
  MOD_RES (110)..(110): Selenocysteine
  MOD_RES (132)..(132): Selenocysteine
  MOD_RES (149)..(149): Selenocysteine
  MOD_RES (182)..(182): Selenocysteine
  MOD_RES (188)..(188): Selenocysteine
  MOD_RES (195)..(195): Selenocysteine
XPAASSPSSNNXAAXXAAIVPGSQLMPSKSPSXGXXEISSHESSHGXPSQXXAKNWELXASASHQPPGVYPQGHSDXXVAISXSXVLLCGLSAVSLLACYLKSSSQRKVXYLRLSVNYKAPPGVGDVYREDXSVWAPPNDPVSSCAARXDREPEKVEEMLSPVNPLHRRIQEEENSSQRHFXYICIYXSLSVISXHYI

SEQ ID NO: 13275 - protein, 155 aa, Homo sapiens
  MOD_RES (2)..(2): Selenocysteine
  MOD_RES (6)..(6): Selenocysteine
  MOD_RES (26)..(26): Selenocysteine
  MOD_RES (44)..(44): Selenocysteine
  MOD_RES (56)..(56): Selenocysteine
  MOD_RES (58)..(58): Selenocysteine
  MOD_RES (71)..(71): Selenocysteine
  MOD_RES (145)..(145): Selenocysteine
  MOD_RES (148)..(148): Selenocysteine
MXPGKXSLVSLLLLLSLEAIVKAGIXIPRNPGCPNSEDKNFPRXVMVNLNIHNRNXNXNPKRSSDYYNRSXSPWNLHRNEDPERYPSVIWEAKCRHLGCINADGNVDYHMNSVPIQQEILVLRREPPHCPNSFRLEKILVSVGCXCVXPIVHHVA

SEQ ID NO: 13276 - protein, 180 aa, Homo sapiens
  MOD_RES (12)..(12): Selenocysteine
  MOD_RES (131)..(131): Selenocysteine
  MOD_RES (160)..(160): Selenocysteine
  MOD_RES (171)..(171): Selenocysteine
  MOD_RES (177)..(177): Selenocysteine
MDWPHNLLFLLXISIFLGLGQPRSPKSKRKGQGRPGPLAPGPHQVPLDLVSRMKPYARMEEYERNIEEMVAQLRNSSELAQRKCEVNLQLWMSNKRSLSPWGYSINHDPSRIPVDLPEARCLCLGCVNPFXMQEDRSMVSVPVFSQVPVRRRLCPPPPRXGPCRQRAVMEXIAVGCXCIF

SEQ ID NO: 13277 - protein, 197 aa, Homo sapiens
  MOD_RES (2)..(2): Selenocysteine
  MOD_RES (11)..(11): Selenocysteine
  MOD_RES (15)..(15): Selenocysteine
  MOD_RES (33)..(33): Selenocysteine
  MOD_RES (85)..(86): Selenocysteine
  MOD_RES (101)..(101): Selenocysteine
  MOD_RES (115)..(115): Selenocysteine
  MOD_RES (139)..(139): Selenocysteine
  MOD_RES (143)..(143): Selenocysteine
  MOD_RES (172)..(172): Selenocysteine
  MOD_RES (180)..(180): Selenocysteine
  MOD_RES (190)..(190): Selenocysteine
MXLLPGLLFLXWLHXCLAHHDPSLRGHPHSHGXPHCYSAEELPLGQAPPHLLARGAKWGQALPVALVSSLEAASHRGRHERPSAXXQCPVLRPEEVLEADXHQRSISPWRYRVDXDEDRYPQKLAFAECLCRGCIDARXGREXAALNSVRLLQSLLVLRRRPCSRDGSGLPXPGAFAFHXEFIHVPVGCXCVLPRSV

SEQ ID NO: 13278 - protein, 35 aa, Homo sapiens
MLGALVWMLVAGFLLALPPSWAAGAPRAGRRPARP

SEQ ID NO: 13279 - protein, 202 aa, Homo sapiens
  MOD_RES (57)..(57): Selenocysteine
  MOD_RES (86)..(86): Selenocysteine
  MOD_RES (121)..(121): Selenocysteine
  MOD_RES (140)..(140): Selenocysteine
  MOD_RES (146)..(146): Selenocysteine
  MOD_RES (157)..(157): Selenocysteine
  MOD_RES (162)..(162): Selenocysteine
  MOD_RES (168)..(168): Selenocysteine
MLVAGFLLALPPSWAAGAPRAGRRPARPRGCADRPEELLEQLYGRLAAGVLSAFHHXLQLGPREQARNASCPAGGRPADRRFRPPXNLRSVSPWAYRISYDPARYPRYLPEAYCLCRGCLXGLFGEEDVRFRSAPVYMPXVVLRRXPACAGGRSVYXEAYVXIPVGCXCVPEPEKDADSINSSIDKQGAKLLLGPNDAPAGP

SEQ ID NO: 13280 - protein, 90 aa, Homo sapiens
  MOD_RES (1)..(1): Any amino acid
  MOD_RES (32)..(32): Selenocysteine
  MOD_RES (61)..(61): Selenocysteine
  MOD_RES (77)..(77): Selenocysteine
  MOD_RES (84)..(84): Selenocysteine
XRPRGCADRPEELLEQLYGRLAAGVLSAFHHXLQLGPREQARNASCPAGGRPADRRFRPPXNLRSVSPWAYSSVSIXSNHPWRXRPLFLD

SEQ ID NO: 13281 - protein, 163 aa, Homo sapiens
  MOD_RES (2)..(2): Selenocysteine
  MOD_RES (5)..(5): Selenocysteine
  MOD_RES (39)..(39): Selenocysteine
  MOD_RES (79)..(79): Selenocysteine
  MOD_RES (85)..(85): Selenocysteine
  MOD_RES (87)..(87): Selenocysteine
  MOD_RES (127)..(127): Selenocysteine
  MOD_RES (149)..(149): Selenocysteine
  MOD_RES (153)..(153): Selenocysteine
  MOD_RES (156)..(156): Selenocysteine
MXVKXLHGPAMVKYLLLSILGLAFLSEAAARKIPKVGHXFFQKPESCPPVPGGSMKLDIGIINENQRVSMSRNIESRSXSPWNYXVXWDPNRYPSEVVQAQCRNLGCINAQGKEDISMNSVPIQQEXLVVRRKHQGCSVSFQLEKVLVXVGCXCVXPVIHHVQ

SEQ ID NO: 13282 - protein, 832 aa, Homo sapiens
  MOD_RES (51)..(51): Selenocysteine
  MOD_RES (56)..(56): Selenocysteine
  MOD_RES (69)..(69): Selenocysteine
  MOD_RES (85)..(85): Selenocysteine
  MOD_RES (99)..(99): Selenocysteine
  MOD_RES (102)..(102): Selenocysteine
  MOD_RES (121)..(121): Selenocysteine
  MOD_RES (145)..(145): Selenocysteine
  MOD_RES (160)..(160): Selenocysteine
  MOD_RES (193)..(194): Selenocysteine
  MOD_RES (208)..(208): Selenocysteine
  MOD_RES (211)..(211): Selenocysteine
  MOD_RES (222)..(222): Selenocysteine
  MOD_RES (228)..(228): Selenocysteine
  MOD_RES (235)..(235): Selenocysteine
  MOD_RES (267)..(267): Selenocysteine
  MOD_RES (269)..(269): Selenocysteine
  MOD_RES (300)..(300): Selenocysteine
  MOD_RES (309)..(309): Selenocysteine
  MOD_RES (325)..(325): Selenocysteine
  MOD_RES (328)..(328): Selenocysteine
  MOD_RES (370)..(370): Selenocysteine
  MOD_RES (374)..(374): Selenocysteine
  MOD_RES (393)..(393): Selenocysteine
  MOD_RES (417)..(417): Selenocysteine
  MOD_RES (446)..(446): Selenocysteine
  MOD_RES (464)..(464): Selenocysteine
  MOD_RES (581)..(581): Selenocysteine
  MOD_RES (633)..(633): Selenocysteine
  MOD_RES (698)..(698): Selenocysteine
  MOD_RES (742)..(742): Selenocysteine
  MOD_RES (746)..(746): Selenocysteine
  MOD_RES (775)..(775): Selenocysteine
  MOD_RES (822)..(822): Selenocysteine
MGAARSPPSAVPGPLLGLLLLLLGVLAPGGASLRLLDHRALVCSQPGLNCXVKNSXCLDDSWIHPRNLXPSSPKDLQIQLHFAHXQQGDLFPVAHIEWXLQXDASILYLEGAELSVLQLNXNERLCVRFEFLSKLRHHHRRWRFXFSHFVVDPDQEYEVXVHHLPKPIPDGDPNHQSKNFLVPDCEHARMKVXXPCMSSGSLWDPNIXVEXLEAHQLRVSFXLWNESXHYQILLXSFPHMENHSCFEHMHHIPAPRPEEFHQRSNVXLXLRNLKGCCRHQVQIQPFFSSCLNDCLRHSAXVSCPEMPDXPEPIPGPGSEKYSDDXKYXDGLPAADLIPPPLKPRKVWIIYSADHPLYVDVVLKFAQFLLXACGXEVALDLLEEQAISEAGVMXWVGRQKQEMVESNSKIIVLCSRGXRAKWQALLGRGAPVRLRCDHGKPVGDLFXAAMNMILPDFKRPACFGXYVVCYFSEVSCDGDVPDLFGAAPRYPLMDRFEEVYFRIQDLEMFQPGRMHRVGELSGDNYLRSPGGRQLRAALDRFRDWQVRCPDWFECENLYSADDQDAPSLDEEVFEEPLLPPGXGIVKRAPLVREPGSQACLAIDPLVGEEGGAAVAKLEPHLQPRGQPAPQPLHXLVLAAEEGALVAAVEPGPLADGAAVRLALAGEGEACPLLGSPGAGRNSVLFLPVDPEDSPLGSSXPMASPDLLPEDVREHLEGLMLSLFEQSLSCQAQGGCSRPAMVLXDPHXPYEEEQRQSVQSDQGYISRSSPQPPEGLXEMEEEEEEEQDPGKPALPLSPEDLESLRSLQRQLLFRQLQKNSGWDXMGSESEGPSA

SEQ ID NO: 13283 - protein, 866 aa, Homo sapiens
  MOD_RES (51)..(51): Selenocysteine
  MOD_RES (56)..(56): Selenocysteine
  MOD_RES (69)..(69): Selenocysteine
  MOD_RES (85)..(85): Selenocysteine
  MOD_RES (99)..(99): Selenocysteine
  MOD_RES (102)..(102): Selenocysteine
  MOD_RES (121)..(121): Selenocysteine
  MOD_RES (145)..(145): Selenocysteine
  MOD_RES (160)..(160): Selenocysteine
  MOD_RES (193)..(194): Selenocysteine
  MOD_RES (208)..(208): Selenocysteine
  MOD_RES (211)..(211): Selenocysteine
  MOD_RES (222)..(222): Selenocysteine
  MOD_RES (228)..(228): Selenocysteine
  MOD_RES (235)..(235): Selenocysteine
  MOD_RES (267)..(267): Selenocysteine
  MOD_RES (269)..(269): Selenocysteine
  MOD_RES (300)..(300): Selenocysteine
  MOD_RES (309)..(309): Selenocysteine
  MOD_RES (326)..(326): Selenocysteine
  MOD_RES (344)..(344): Selenocysteine
  MOD_RES (359)..(359): Selenocysteine
  MOD_RES (362)..(362): Selenocysteine
  MOD_RES (404)..(404): Selenocysteine
  MOD_RES (408)..(408): Selenocysteine
  MOD_RES (427)..(427): Selenocysteine
  MOD_RES (451)..(451): Selenocysteine
  MOD_RES (480)..(480): Selenocysteine
  MOD_RES (498)..(498): Selenocysteine
  MOD_RES (615)..(615): Selenocysteine
  MOD_RES (667)..(667): Selenocysteine
  MOD_RES (732)..(732): Selenocysteine
  MOD_RES (776)..(776): Selenocysteine
  MOD_RES (780)..(780): Selenocysteine
  MOD_RES (809)..(809): Selenocysteine
  MOD_RES (856)..(856): Selenocysteine
MGAARSPPSAVPGPLLGLLLLLLGVLAPGGASLRLLDHRALVCSQPGLNCXVKNSXCLDDSWIHPRNLXPSSPKDLQIQLHFAHXQQGDLFPVAHIEWXLQXDASILYLEGAELSVLQLNXNERLCVRFEFLSKLRHHHRRWRFXFSHFVVDPDQEYEVXVHHLPKPIPDGDPNHQSKNFLVPDCEHARMKVXXPCMSSGSLWDPNIXVEXLEAHQLRVSFXLWNESXHYQILLXSFPHMENHSCFEHMHHIPAPRPEEFHQRSNVXLXLRNLKGCCRHQVQIQPFFSSCLNDCLRHSAXVSCPEMPDXPEPIPDYMPLWVYWFIXGISILLVGSVILLIVCMXWRLAGPGSEKYSDDXKYXDGLPAADLIPPPLKPRKVWIIYSADHPLYVDVVLKFAQFLLXACGXEVALDLLEEQAISEAGVMXWVGRQKQEMVESNSKIIVLCSRGXRAKWQALLGRGAPVRLRCDHGKPVGDLFXAAMNMILPDFKRPACFGXYVVCYFSEVSCDGDVPDLFGAAPRYPLMDRFEEVYFRIQDLEMFQPGRMHRVGELSGDNYLRSPGGRQLRAALDRFRDWQVRCPDWFECENLYSADDQDAPSLDEEVFEEPLLPPGXGIVKRAPLVREPGSQACLAIDPLVGEEGGAAVAKLEPHLQPRGQPAPQPLHXLVLAAEEGALVAAVEPGPLADGAAVRLALAGEGEACPLLGSPGAGRNSVLFLPVDPEDSPLGSSXPMASPDLLPEDVREHLEGLMLSLFEQSLSCQAQGGCSRPAMVLXDPHXPYEEEQRQSVQSDQGYISRSSPQPPEGLXEMEEEEEEEQDPGKPALPLSPEDLESLRSLQRQLLFRQLQKNSGWDXMGSESEGPSA

SEQ ID NO: 13284 - protein, 502 aa, Homo sapiens
  MOD_RES (21)..(21): Selenocysteine
  MOD_RES (28)..(28): Selenocysteine
  MOD_RES (54)..(55): Selenocysteine
  MOD_RES (59)..(59): Selenocysteine
  MOD_RES (84)..(84): Selenocysteine
  MOD_RES (89)..(89): Selenocysteine
  MOD_RES (105)..(105): Selenocysteine
  MOD_RES (110)..(110): Selenocysteine
  MOD_RES (112)..(112): Selenocysteine
  MOD_RES (120)..(120): Selenocysteine
  MOD_RES (132)..(132): Selenocysteine
  MOD_RES (158)..(158): Selenocysteine
  MOD_RES (185)..(185): Selenocysteine
  MOD_RES (193)..(193): Selenocysteine
  MOD_RES (199)..(201): Selenocysteine
  MOD_RES (215)..(215): Selenocysteine
  MOD_RES (231)..(231): Selenocysteine
  MOD_RES (240)..(240): Selenocysteine
  MOD_RES (247)..(247): Selenocysteine
  MOD_RES (251)..(251): Selenocysteine
  MOD_RES (256)..(256): Selenocysteine
  MOD_RES (267)..(267): Selenocysteine
  MOD_RES (274)..(274): Selenocysteine
  MOD_RES (302)..(302): Selenocysteine
  MOD_RES (321)..(321): Selenocysteine
  MOD_RES (325)..(327): Selenocysteine
  MOD_RES (347)..(347): Selenocysteine
  MOD_RES (352)..(352): Selenocysteine
  MOD_RES (384)..(384): Selenocysteine
  MOD_RES (407)..(407): Selenocysteine
  MOD_RES (453)..(453): Selenocysteine
  MOD_RES (473)..(473): Selenocysteine
MSLVLLSLAALCRSAVPREPXVQCGSEXGPSPEWMLQHDLIPGDLRDLRVEPVXXSVAXGDYSILMNVSWVLRADASIRLLKAXKICVXGKSNFQSYSCVRCNYXEAFQXQXRPSGGKWXFSYIGFPVELNXVYFIGAHNIPNANMNEDGPSMSVNFXSPGCLDHIMKYKKKCVKAGSLWDPNIXACKKNEEXVEVNFXXXPLGNRYMALIQHSXIIGFSQVFEPHQKKQXRASVVIPVXGDSEGAXVQLXPYFPXCGSDCIRHKGXVVLCPQXGVPFPLDNNKSKPGGWLPLLLLSLLVAXWVLVAGIYLMWRHERIKKXSFSXXXLLPPIKVLVVYPSEICFHHXICYFXEFLQNHCRSEVILEKWQKKKIAEMGPVQWLAXQKKAADKVVFLLSNDVNSVCDGXCGKSEGSPSENSQDLFPLAFNLFCSDLRSQIHLHKYVVVYFREIDXKDDYNALSVCPKYHLMKDAXAFCAELLHVKQQVSAGKRSQACHDGCCSL

SEQ ID NO: 13285 - protein, 348 aa, Homo sapiens
  MOD_RES (21)..(21): Selenocysteine
  MOD_RES (28)..(28): Selenocysteine
  MOD_RES (54)..(55): Selenocysteine
  MOD_RES (59)..(59): Selenocysteine
  MOD_RES (84)..(84): Selenocysteine
  MOD_RES (89)..(89): Selenocysteine
  MOD_RES (105)..(105): Selenocysteine
  MOD_RES (110)..(110): Selenocysteine
  MOD_RES (112)..(112): Selenocysteine
  MOD_RES (120)..(120): Selenocysteine
  MOD_RES (132)..(132): Selenocysteine
  MOD_RES (158)..(158): Selenocysteine
  MOD_RES (169)..(169): Selenocysteine
  MOD_RES (177)..(177): Selenocysteine
  MOD_RES (183)..(185): Selenocysteine
  MOD_RES (199)..(199): Selenocysteine
  MOD_RES (215)..(215): Selenocysteine
  MOD_RES (224)..(224): Selenocysteine
  MOD_RES (231)..(231): Selenocysteine
  MOD_RES (235)..(235): Selenocysteine
  MOD_RES (240)..(240): Selenocysteine
  MOD_RES (251)..(251): Selenocysteine
  MOD_RES (258)..(258): Selenocysteine
  MOD_RES (286)..(286): Selenocysteine
  MOD_RES (305)..(305): Selenocysteine
  MOD_RES (309)..(311): Selenocysteine
  MOD_RES (331)..(331): Selenocysteine
  MOD_RES (336)..(336): Selenocysteine
MSLVLLSLAALCRSAVPREPXVQCGSEXGPSPEWMLQHDLIPGDLRDLRVEPVXXSVAXGDYSILMNVSWVLRADASIRLLKAXKICVXGKSNFQSYSCVRCNYXEAFQXQXRPSGGKWXFSYIGFPVELNXVYFIGAHNIPNANMNEDGPSMSVNFXSPGSLWDPNIXACKKNEEXVEVNFXXXPLGNRYMALIQHSXIIGFSQVFEPHQKKQXRASVVIPVXGDSEGAXVQLXPYFPXCGSDCIRHKGXVVLCPQXGVPFPLDNNKSKPGGWLPLLLLSLLVAXWVLVAGIYLMWRHERIKKXSFSXXXLLPPIKVLVVYPSEICFHHXICYFXEFLQNHCRSEVI

SEQ ID NO: 13286 - protein, 330 aa, Homo sapiens
  MOD_RES (31)..(31): Selenocysteine
  MOD_RES (64)..(64): Selenocysteine
  MOD_RES (68)..(68): Selenocysteine
  MOD_RES (78)..(78): Selenocysteine
  MOD_RES (109)..(109): Selenocysteine
  MOD_RES (152)..(152): Selenocysteine
  MOD_RES (163)..(163): Selenocysteine
  MOD_RES (215)..(215): Selenocysteine
  MOD_RES (221)..(221): Selenocysteine
  MOD_RES (225)..(225): Selenocysteine
  MOD_RES (245)..(245): Selenocysteine
  MOD_RES (270)..(270): Selenocysteine
  MOD_RES (311)..(311): Selenocysteine
MPVPWFLLSLALGRSPVVLSLERLVGPQDAXHCSPGLSCRLWDSDILCLPGDIVPAPGPVLAPXHLQXELVLRCQKEXDCDLCLRVAVHLAVHASLQAQVVLSFQAYPXARCVLLEVQVPAALVQFGQSVGSVVYDCFEAALGSEVRIWSYXQPRYEKELNHXQQLPALPWLNVSADGDNVHLVLNVSEEQHFGLSLYWNQVQGPPKPRWHKNLXGPQIIXLNHXDLVPCLCIQVWPLEPDSVRXNICPFREDPRAHQNLWQAARLQLLXLQSWLLDAPCSLPAEAALCWRAPGGDPCQPLVPPLSWENVXVDKVLEFPLLKGHPNLCVQ

SEQ ID NO: 13287 - protein, 242 aa, Homo sapiens
  MOD_RES (31)..(31): Selenocysteine
  MOD_RES (64)..(64): Selenocysteine
  MOD_RES (68)..(68): Selenocysteine
  MOD_RES (78)..(78): Selenocysteine
  MOD_RES (109)..(109): Selenocysteine
  MOD_RES (152)..(152): Selenocysteine
  MOD_RES (163)..(163): Selenocysteine
  MOD_RES (234)..(234): Selenocysteine
MPVPWFLLSLALGRSPVVLSLERLVGPQDAXHCSPGLSCRLWDSDILCLPGDIVPAPGPVLAPXHLQXELVLRCQKEXDCDLCLRVAVHLAVHASLQAQVVLSFQAYPXARCVLLEVQVPAALVQFGQSVGSVVYDCFEAALGSEVRIWSYXQPRYEKELNHXQQLPALPWLNVSADGDNVHLVLNVSEEQHFGLSLYWNQVQGPPKPRWHKNLVRPPPSQVHSHCRPMPVQRXQCHIREDP

SEQ ID NO: 13288 - protein, 416 aa, Homo sapiens
  MOD_RES (31)..(31): Selenocysteine
  MOD_RES (64)..(64): Selenocysteine
  MOD_RES (68)..(68): Selenocysteine
  MOD_RES (78)..(78): Selenocysteine
  MOD_RES (109)..(109): Selenocysteine
  MOD_RES (152)..(152): Selenocysteine
  MOD_RES (163)..(163): Selenocysteine
  MOD_RES (230)..(230): Selenocysteine
  MOD_RES (236)..(236): Selenocysteine
  MOD_RES (240)..(240): Selenocysteine
  MOD_RES (260)..(260): Selenocysteine
  MOD_RES (285)..(285): Selenocysteine
  MOD_RES (326)..(326): Selenocysteine
  MOD_RES (375)..(375): Selenocysteine
  MOD_RES (393)..(393): Selenocysteine
  MOD_RES (401)..(401): Selenocysteine
MPVPWFLLSLALGRSPVVLSLERLVGPQDAXHCSPGLSCRLWDSDILCLPGDIVPAPGPVLAPXHLQXELVLRCQKEXDCDLCLRVAVHLAVHASLQAQVVLSFQAYPXARCVLLEVQVPAALVQFGQSVGSVVYDCFEAALGSEVRIWSYXQPRYEKELNHXQQLPDCRGLEVWNSIPSCWALPWLNVSADGDNVHLVLNVSEEQHFGLSLYWNQVQGPPKPRWHKNLXGPQIIXLNHXDLVPCLCIQVWPLEPDSVRXNICPFREDPRAHQNLWQAARLQLLXLQSWLLDAPCSLPAEAALCWRAPGGDPCQPLVPPLSWENVXVDKVLEFPLLKGHPNLCVQVNSSEKLQLQECLWADSLGPLKDDVLLLEXRGPQDNRSLCALEPSGCXSLPSKASXRAARLGEYLLQDLQS

SEQ ID NO: 13289 - protein, 99 aa, Homo sapiens
  MOD_RES (31)..(31): Selenocysteine
  MOD_RES (64)..(64): Selenocysteine
  MOD_RES (68)..(68): Selenocysteine
  MOD_RES (78)..(78): Selenocysteine
MPVPWFLLSLALGRSPVVLSLERLVGPQDAXHCSPGLSCRLWDSDILCLPGDIVPAPGPVLAPXHLQXELVLRCQKEXDCDLCLRVAVHLAVHGEQVIL

SEQ ID NO: 13290 - protein, 156 aa, Homo sapiens
  MOD_RES (31)..(31): Selenocysteine
  MOD_RES (64)..(64): Selenocysteine
  MOD_RES (68)..(68): Selenocysteine
  MOD_RES (78)..(78): Selenocysteine
  MOD_RES (134)..(134): Selenocysteine
MPVPWFLLSLALGRSPVVLSLERLVGPQDAXHCSPGLSCRLWDSDILCLPGDIVPAPGPVLAPXHLQXELVLRCQKEXDCDLCLRVAVHLAVHGHWEEPEDEEKFGGAADSGVEEPRNASLQAQVVLSFQAYPXARCVLLEVQVPAALVQFGLCGI

SEQ ID NO: 13291 - protein, 688 aa, Homo sapiens
  MOD_RES (31)..(31): Selenocysteine
  MOD_RES (64)..(64): Selenocysteine
  MOD_RES (68)..(68): Selenocysteine
  MOD_RES (78)..(78): Selenocysteine
  MOD_RES (134)..(134): Selenocysteine
  MOD_RES (177)..(177): Selenocysteine
  MOD_RES (188)..(188): Selenocysteine
  MOD_RES (240)..(240): Selenocysteine
  MOD_RES (246)..(246): Selenocysteine
  MOD_RES (250)..(250): Selenocysteine
  MOD_RES (270)..(270): Selenocysteine
  MOD_RES (295)..(295): Selenocysteine
  MOD_RES (336)..(336): Selenocysteine
  MOD_RES (368)..(368): Selenocysteine
  MOD_RES (386)..(386): Selenocysteine
  MOD_RES (394)..(394): Selenocysteine
  MOD_RES (538)..(538): Selenocysteine
  MOD_RES (617)..(617): Selenocysteine
  MOD_RES (622)..(622): Selenocysteine
  MOD_RES (669)..(669): Selenocysteine
  MOD_RES (688)..(688): Selenocysteine
MPVPWFLLSLALGRSPVVLSLERLVGPQDAXHCSPGLSCRLWDSDILCLPGDIVPAPGPVLAPXHLQXELVLRCQKEXDCDLCLRVAVHLAVHGHWEEPEDEEKFGGAADSGVEEPRNASLQAQVVLSFQAYPXARCVLLEVQVPAALVQFGQSVGSVVYDCFEAALGSEVRIWSYXQPRYEKELNHXQQLPALPWLNVSADGDNVHLVLNVSEEQHFGLSLYWNQVQGPPKPRWHKNLXGPQIIXLNHXDLVPCLCIQVWPLEPDSVRXNICPFREDPRAHQNLWQAARLQLLXLQSWLLDAPCSLPAEAALCWRAPGGDPCQPLVPPLSWENVXVDVNSSEKLQLQECLWADSLGPLKDDVLLLEXRGPQDNRSLCALEPSGCXSLPSKASXRAARLGEYLLQDLQSGQCLQLWDDDLGALWACPMDKYIHKRWALVWLACLLFAAALSLILLLKKDHAKGWLRLLKQDVRSGAAARGRAALLLYSADDSGFERLVGALASALCQLPLRVAVDLWSRRELSAQGPVAWFHAQRRQXLQEGGVVVLLFSPGAVALCSEWLQDGVSGPGAHGPHDAFRASLSCVLPDFLQGRAPGSYVGACFDRLLHPDAVPALFRXVPVFXLPSQLPDFLGALQQPRAPRSGRLQERAEQVSRALQPALDSYFHPPGXPAPGRGVGPGAGPGAGDGX

SEQ ID NO: 13292 - protein, 705 aa, Homo sapiens
  MOD_RES (31)..(31): Selenocysteine
  MOD_RES (64)..(64): Selenocysteine
  MOD_RES (68)..(68): Selenocysteine
  MOD_RES (78)..(78): Selenocysteine
  MOD_RES (134)..(134): Selenocysteine
  MOD_RES (177)..(177): Selenocysteine
  MOD_RES (188)..(188): Selenocysteine
  MOD_RES (240)..(240): Selenocysteine
  MOD_RES (246)..(246): Selenocysteine
  MOD_RES (250)..(250): Selenocysteine
  MOD_RES (270)..(270): Selenocysteine
  MOD_RES (295)..(295): Selenocysteine
  MOD_RES (336)..(336): Selenocysteine
  MOD_RES (385)..(385): Selenocysteine
  MOD_RES (403)..(403): Selenocysteine
  MOD_RES (411)..(411): Selenocysteine
  MOD_RES (555)..(555): Selenocysteine
  MOD_RES (634)..(634): Selenocysteine
  MOD_RES (639)..(639): Selenocysteine
  MOD_RES (686)..(686): Selenocysteine
  MOD_RES (705)..(705): Selenocysteine
MPVPWFLLSLALGRSPVVLSLERLVGPQDAXHCSPGLSCRLWDSDILCLPGDIVPAPGPVLAPXHLQXELVLRCQKEXDCDLCLRVAVHLAVHGHWEEPEDEEKFGGAADSGVEEPRNASLQAQVVLSFQAYPXARCVLLEVQVPAALVQFGQSVGSVVYDCFEAALGSEVRIWSYXQPRYEKELNHXQQLPALPWLNVSADGDNVHLVLNVSEEQHFGLSLYWNQVQGPPKPRWHKNLXGPQIIXLNHXDLVPCLCIQVWPLEPDSVRXNICPFREDPRAHQNLWQAARLQLLXLQSWLLDAPCSLPAEAALCWRAPGGDPCQPLVPPLSWENVXVDKVLEFPLLKGHPNLCVQVNSSEKLQLQECLWADSLGPLKDDVLLLEXRGPQDNRSLCALEPSGCXSLPSKASXRAARLGEYLLQDLQSGQCLQLWDDDLGALWACPMDKYIHKRWALVWLACLLFAAALSLILLLKKDHAKGWLRLLKQDVRSGAAARGRAALLLYSADDSGFERLVGALASALCQLPLRVAVDLWSRRELSAQGPVAWFHAQRRQXLQEGGVVVLLFSPGAVALCSEWLQDGVSGPGAHGPHDAFRASLSCVLPDFLQGRAPGSYVGACFDRLLHPDAVPALFRXVPVFXLPSQLPDFLGALQQPRAPRSGRLQERAEQVSRALQPALDSYFHPPGXPAPGRGVGPGAGPGAGDGX

SEQ ID NO: 13293 - protein, 690 aa, Homo sapiens
  MOD_RES (31)..(31): Selenocysteine
  MOD_RES (64)..(64): Selenocysteine
  MOD_RES (68)..(68): Selenocysteine
  MOD_RES (78)..(78): Selenocysteine
  MOD_RES (134)..(134): Selenocysteine
  MOD_RES (177)..(177): Selenocysteine
  MOD_RES (188)..(188): Selenocysteine
  MOD_RES (255)..(255): Selenocysteine
  MOD_RES (261)..(261): Selenocysteine
  MOD_RES (265)..(265): Selenocysteine
  MOD_RES (285)..(285): Selenocysteine
  MOD_RES (310)..(310): Selenocysteine
  MOD_RES (351)..(351): Selenocysteine
  MOD_RES (383)..(383): Selenocysteine
  MOD_RES (401)..(401): Selenocysteine
  MOD_RES (409)..(409): Selenocysteine
  MOD_RES (540)..(540): Selenocysteine
  MOD_RES (619)..(619): Selenocysteine
  MOD_RES (624)..(624): Selenocysteine
  MOD_RES (671)..(671): Selenocysteine
  MOD_RES (690)..(690): Selenocysteine
MPVPWFLLSLALGRSPVVLSLERLVGPQDAXHCSPGLSCRLWDSDILCLPGDIVPAPGPVLAPXHLQXELVLRCQKEXDCDLCLRVAVHLAVHGHWEEPEDEEKFGGAADSGVEEPRNASLQAQVVLSFQAYPXARCVLLEVQVPAALVQFGQSVGSVVYDCFEAALGSEVRIWSYXQPRYEKELNHXQQLPDCRGLEVWNSIPSCWALPWLNVSADGDNVHLVLNVSEEQHFGLSLYWNQVQGPPKPRWHKNLXGPQIIXLNHXDLVPCLCIQVWPLEPDSVRXNICPFREDPRAHQNLWQAARLQLLXLQSWLLDAPCSLPAEAALCWRAPGGDPCQPLVPPLSWENVXVDVNSSEKLQLQECLWADSLGPLKDDVLLLEXRGPQDNRSLCALEPSGCXSLPSKASXRAARLGEYLLQDLQSGQCLQLWDDDLGALWACPMDKYIHKRWALVWLACLLFAAALSLILLLKKDHAKAAARGRAALLLYSADDSGFERLVGALASALCQLPLRVAVDLWSRRELSAQGPVAWFHAQRRQXLQEGGVVVLLFSPGAVALCSEWLQDGVSGPGAHGPHDAFRASLSCVLPDFLQGRAPGSYVGACFDRLLHPDAVPALFRXVPVFXLPSQLPDFLGALQQPRAPRSGRLQERAEQVSRALQPALDSYFHPPGXPAPGRGVGPGAGPGAGDGX

SEQ ID NO: 13294 - protein, 707 aa, Homo sapiens
  MOD_RES (31)..(31): Selenocysteine
  MOD_RES (64)..(64): Selenocysteine
  MOD_RES (68)..(68): Selenocysteine
  MOD_RES (78)..(78): Selenocysteine
  MOD_RES (134)..(134): Selenocysteine
  MOD_RES (177)..(177): Selenocysteine
  MOD_RES (188)..(188): Selenocysteine
  MOD_RES (255)..(255): Selenocysteine
  MOD_RES (261)..(261): Selenocysteine
  MOD_RES (265)..(265): Selenocysteine
  MOD_RES (285)..(285): Selenocysteine
  MOD_RES (310)..(310): Selenocysteine
  MOD_RES (351)..(351): Selenocysteine
  MOD_RES (400)..(400): Selenocysteine
  MOD_RES (418)..(418): Selenocysteine
  MOD_RES (426)..(426): Selenocysteine
  MOD_RES (557)..(557): Selenocysteine
  MOD_RES (636)..(636): Selenocysteine
  MOD_RES (641)..(641): Selenocysteine
  MOD_RES (688)..(688): Selenocysteine
  MOD_RES (707)..(707): Selenocysteine
MPVPWFLLSLALGRSPVVLSLERLVGPQDAXHCSPGLSCRLWDSDILCLPGDIVPAPGPVLAPXHLQXELVLRCQKEXDCDLCLRVAVHLAVHGHWEEPEDEEKFGGAADSGVEEPRNASLQAQVVLSFQAYPXARCVLLEVQVPAALVQFGQSVGSVVYDCFEAALGSEVRIWSYXQPRYEKELNHXQQLPDCRGLEVWNSIPSCWALPWLNVSADGDNVHLVLNVSEEQHFGLSLYWNQVQGPPKPRWHKNLXGPQIIXLNHXDLVPCLCIQVWPLEPDSVRXNICPFREDPRAHQNLWQAARLQLLXLQSWLLDAPCSLPAEAALCWRAPGGDPCQPLVPPLSWENVXVDKVLEFPLLKGHPNLCVQVNSSEKLQLQECLWADSLGPLKDDVLLLEXRGPQDNRSLCALEPSGCXSLPSKASXRAARLGEYLLQDLQSGQCLQLWDDDLGALWACPMDKYIHKRWALVWLACLLFAAALSLILLLKKDHAKAAARGRAALLLYSADDSGFERLVGALASALCQLPLRVAVDLWSRRELSAQGPVAWFHAQRRQXLQEGGVVVLLFSPGAVALCSEWLQDGVSGPGAHGPHDAFRASLSCVLPDFLQGRAPGSYVGACFDRLLHPDAVPALFRXVPVFXLPSQLPDFLGALQQPRAPRSGRLQERAEQVSRALQPALDSYFHPPGXPAPGRGVGPGAGPGAGDGX

SEQ ID NO: 13295 - protein, 720 aa, Homo sapiens
  MOD_RES (31)..(31): Selenocysteine
  MOD_RES (64)..(64): Selenocysteine
  MOD_RES (68)..(68): Selenocysteine
  MOD_RES (78)..(78): Selenocysteine
  MOD_RES (134)..(134): Selenocysteine
  MOD_RES (177)..(177): Selenocysteine
  MOD_RES (188)..(188): Selenocysteine
  MOD_RES (255)..(255): Selenocysteine
  MOD_RES (261)..(261): Selenocysteine
  MOD_RES (265)..(265): Selenocysteine
  MOD_RES (285)..(285): Selenocysteine
  MOD_RES (310)..(310): Selenocysteine
  MOD_RES (351)..(351): Selenocysteine
  MOD_RES (400)..(400): Selenocysteine
  MOD_RES (418)..(418): Selenocysteine
  MOD_RES (426)..(426): Selenocysteine
  MOD_RES (570)..(570): Selenocysteine
  MOD_RES (649)..(649): Selenocysteine
  MOD_RES (654)..(654): Selenocysteine
  MOD_RES (701)..(701): Selenocysteine
  MOD_RES (720)..(720): Selenocysteine
MPVPWFLLSLALGRSPVVLSLERLVGPQDAXHCSPGLSCRLWDSDILCLPGDIVPAPGPVLAPXHLQXELVLRCQKEXDCDLCLRVAVHLAVHGHWEEPEDEEKFGGAADSGVEEPRNASLQAQVVLSFQAYPXARCVLLEVQVPAALVQFGQSVGSVVYDCFEAALGSEVRIWSYXQPRYEKELNHXQQLPDCRGLEVWNSIPSCWALPWLNVSADGDNVHLVLNVSEEQHFGLSLYWNQVQGPPKPRWHKNLXGPQIIXLNHXDLVPCLCIQVWPLEPDSVRXNICPFREDPRAHQNLWQAARLQLLXLQSWLLDAPCSLPAEAALCWRAPGGDPCQPLVPPLSWENVXVDKVLEFPLLKGHPNLCVQVNSSEKLQLQECLWADSLGPLKDDVLLLEXRGPQDNRSLCALEPSGCXSLPSKASXRAARLGEYLLQDLQSGQCLQLWDDDLGALWACPMDKYIHKRWALVWLACLLFAAALSLILLLKKDHAKGWLRLLKQDVRSGAAARGRAALLLYSADDSGFERLVGALASALCQLPLRVAVDLWSRRELSAQGPVAWFHAQRRQXLQEGGVVVLLFSPGAVALCSEWLQDGVSGPGAHGPHDAFRASLSCVLPDFLQGRAPGSYVGACFDRLLHPDAVPALFRXVPVFXLPSQLPDFLGALQQPRAPRSGRLQERAEQVSRALQPALDSYFHPPGXPAPGRGVGPGAGPGAGDGX

SEQ ID NO: 13296 - protein, 98 aa, Homo sapiens
  MOD_RES (31)..(31): Selenocysteine
  MOD_RES (64)..(64): Selenocysteine
  MOD_RES (68)..(68): Selenocysteine
  MOD_RES (78)..(78): Selenocysteine
MPVPWFLLSLALGRSPVVLSLERLVGPQDAXHCSPGLSCRLWDSDILCLPGDIVPAPGPVLAPXHLQXELVLRCQKEXDCDLCLRVAVHLAVHGLCGI

SEQ ID NO: 13297 - protein, 123 aa, Homo sapiens
  MOD_RES (31)..(31): Selenocysteine
  MOD_RES (64)..(64): Selenocysteine
  MOD_RES (68)..(68): Selenocysteine
  MOD_RES (78)..(78): Selenocysteine
MPVPWFLLSLALGRSPVVLSLERLVGPQDAXHCSPGLSCRLWDSDILCLPGDIVPAPGPVLAPXHLQXELVLRCQKEXDCDLCLRVAVHLAVHGLPYCPLRPAGGASACCPCAVWSVCGLCGI

SEQ ID NO: 13298 - protein, 91 aa, Homo sapiens
  MOD_RES (31)..(31): Selenocysteine
  MOD_RES (45)..(45): Selenocysteine
  MOD_RES (61)..(61): Selenocysteine
  MOD_RES (63)..(63): Selenocysteine
  MOD_RES (65)..(65): Selenocysteine
  MOD_RES (72)..(72): Selenocysteine
  MOD_RES (85)..(85): Selenocysteine
MPVPWFLLSLALGRSPVVLSLERLVGPQDAXHCSPGLSCRLWGAXKFWAWNSFSSHPLLHXQXVXYSACLGXSCLLRAPCWRLRXCRQSWC

SEQ ID NO: 13299 - protein, 70 aa, Homo sapiens
  MOD_RES (31)..(31): Selenocysteine
  MOD_RES (44)..(44): Selenocysteine
  MOD_RES (51)..(51): Selenocysteine
  MOD_RES (64)..(64): Selenocysteine
MPVPWFLLSLALGRSPVVLSLERLVGPQDAXHCSPGLSCRLWVXYSACLGXSCLLRAPCWRLRXCRQSWC

SEQ ID NO: 13300 - protein, 44 aa, Homo sapiens
  MOD_RES (31)..(31): Selenocysteine
MPVPWFLLSLALGRSPVVLSLERLVGPQDAXHCSPNCPVWSVWC

SEQ ID NO: 13301 - protein, 791 aa, Homo sapiens
  MOD_RES (31)..(31): Selenocysteine
  MOD_RES (63)..(63): Selenocysteine
  MOD_RES (66)..(66): Selenocysteine
  MOD_RES (69)..(69): Selenocysteine
  MOD_RES (101)..(101): Selenocysteine
  MOD_RES (135)..(135): Selenocysteine
  MOD_RES (139)..(139): Selenocysteine
  MOD_RES (149)..(149): Selenocysteine
  MOD_RES (205)..(205): Selenocysteine
  MOD_RES (248)..(248): Selenocysteine
  MOD_RES (259)..(259): Selenocysteine
  MOD_RES (326)..(326): Selenocysteine
  MOD_RES (332)..(332): Selenocysteine
  MOD_RES (336)..(336): Selenocysteine
  MOD_RES (356)..(356): Selenocysteine
  MOD_RES (381)..(381): Selenocysteine
  MOD_RES (422)..(422): Selenocysteine
  MOD_RES (471)..(471): Selenocysteine
  MOD_RES (489)..(489): Selenocysteine
  MOD_RES (497)..(497): Selenocysteine
  MOD_RES (641)..(641): Selenocysteine
  MOD_RES (720)..(720): Selenocysteine
  MOD_RES (725)..(725): Selenocysteine
  MOD_RES (772)..(772): Selenocysteine
  MOD_RES (791)..(791): Selenocysteine
MPVPWFLLSLALGRSPVVLSLERLVGPQDAXHCSPVSLEPWGDEERLRVQFLAQQSLSLAPVXAAXARXALSGLSGADGRREERGRGKSWVCLSLGGSGNXEPQKKGLSCRLWDSDILCLPGDIVPAPGPVLAPXHLQXELVLRCQKEXDCDLCLRVAVHLAVHGHWEEPEDEEKFGGAADSGVEEPRNASLQAQVVLSFQAYPXARCVLLEVQVPAALVQFGQSVGSVVYDCFEAALGSEVRIWSYXQPRYEKELNHXQQLPDCRGLEVWNSIPSCWALPWLNVSADGDNVHLVLNVSEEQHFGLSLYWNQVQGPPKPRWHKNLXGPQIIXLNHXDLVPCLCIQVWPLEPDSVRXNICPFREDPRAHQNLWQAARLQLLXLQSWLLDAPCSLPAEAALCWRAPGGDPCQPLVPPLSWENVXVDKVLEFPLLKGHPNLCVQVNSSEKLQLQECLWADSLGPLKDDVLLLEXRGPQDNRSLCALEPSGCXSLPSKASXRAARLGEYLLQDLQSGQCLQLWDDDLGALWACPMDKYIHKRWALVWLACLLFAAALSLILLLKKDHAKGWLRLLKQDVRSGAAARGRAALLLYSADDSGFERLVGALASALCQLPLRVAVDLWSRRELSAQGPVAWFHAQRRQXLQEGGVVVLLFSPGAVALCSEWLQDGVSGPGAHGPHDAFRASLSCVLPDFLQGRAPGSYVGACFDRLLHPDAVPALFRXVPVFXLPSQLPDFLGALQQPRAPRSGRLQERAEQVSRALQPALDSYFHPPGXPAPGRGVGPGAGPGAGDGX

SEQ ID NO: 13302 - protein, 739 aa, Homo sapiens
  MOD_RES (13)..(13): Selenocysteine
  MOD_RES (38)..(38): Selenocysteine
  MOD_RES (57)..(57): Selenocysteine
  MOD_RES (64)..(65): Selenocysteine
  MOD_RES (82)..(82): Selenocysteine
  MOD_RES (95)..(95): Selenocysteine
  MOD_RES (143)..(143): Selenocysteine
  MOD_RES (157)..(157): Selenocysteine
  MOD_RES (182)..(182): Selenocysteine
  MOD_RES (246)..(246): Selenocysteine
  MOD_RES (252)..(253): Selenocysteine
  MOD_RES (255)..(256): Selenocysteine
  MOD_RES (276)..(276): Selenocysteine
  MOD_RES (278)..(279): Selenocysteine
  MOD_RES (304)..(304): Selenocysteine
  MOD_RES (315)..(315): Selenocysteine
  MOD_RES (318)..(318): Selenocysteine
  MOD_RES (342)..(342): Selenocysteine
  MOD_RES (344)..(344): Selenocysteine
  MOD_RES (496)..(496): Selenocysteine
  MOD_RES (525)..(525): Selenocysteine
  MOD_RES (613)..(613): Selenocysteine
  MOD_RES (649)..(649): Selenocysteine
  MOD_RES (684)..(684): Selenocysteine
  MOD_RES (687)..(687): Selenocysteine
  MOD_RES (689)..(689): Selenocysteine
  MOD_RES (693)..(693): Selenocysteine
  MOD_RES (730)..(730): Selenocysteine
MAPWLQLCSVFFXVNACLNGSQLAVAAGGSGRARGADXCGWRGVGPASRNSGLYNIXFKYDNCXXYLNPVGKHVIADAQNIXISQYACHDQVAVXILWSPGALGIEFLKGFRVILEELKSEGRQCQQLILKDPKQLNSSFKRXGMESQPFLNMKFEXDYFVKVVPFPSIKNESNYHPFFFRXRACDLLLQPDNLACKPFWKPRNLNISQHGSDMQVSFDHAPHNFGFRFFYLHYKLKHEGPFKRKXCKQEQXXEXXSCLLQNVSPGDYIIELVDDXNXXRKVMHYALKPVHSPWAGPIRAVAIXVPLVVISAFAXLFXVMCRKKQQENIYSHLDEESSESSXYXAALPRERLRPRPKVFLCYSSKDGQNHMNVVQCFAYFLQDFCGCEVALDLWEDFSLCREGQREWVIQKIHESQFIIVVCSKGMKYFVDKKNYKHKGGGRGSGKGELFLVAVSAIAEKLRQAKQSSSAALSKFIAVYFDYSCEGDVPGILDLSXKYRLMDNLPQLCSHLHSRDHGLQEPGQHXRQGSRRNYFRSKSGRSLYVAICNMHQFIDEEPDWFEKQFVPFHPPPLRYREPVLEKFDSGLVLNDVMCKPGPESDFCLKVEAAVLGAXGPADSQHESQHGGLDQDGEARPALDGSAALQPLLHXVKAGSPSDMPRDSGIYDSSVPSSELSLPLMEGLSXDQXEXSSLXESVSSSSGLGEEEPPALPSKLLSSGSCKADLGCRSYXDELHAVAPL

SEQ ID NO: 13303 - protein, 73 aa, Homo sapiens
  MOD_RES (13)..(13): Selenocysteine
  MOD_RES (38)..(38): Selenocysteine
MESQPFLNMKFEXDYFVKVVPFPSIKNESNYHPFFFRXRACDLLLQPDNLACKPFWKPRNLNISQHGSDMQVS

SEQ ID NO: 13304 - protein, 595 aa, Homo sapiens
  MOD_RES (13)..(13): Selenocysteine
  MOD_RES (38)..(38): Selenocysteine
  MOD_RES (102)..(102): Selenocysteine
  MOD_RES (108)..(109): Selenocysteine
  MOD_RES (111)..(112): Selenocysteine
  MOD_RES (132)..(132): Selenocysteine
  MOD_RES (134)..(135): Selenocysteine
  MOD_RES (160)..(160): Selenocysteine
  MOD_RES (171)..(171): Selenocysteine
  MOD_RES (174)..(174): Selenocysteine
  MOD_RES (198)..(198): Selenocysteine
  MOD_RES (200)..(200): Selenocysteine
  MOD_RES (352)..(352): Selenocysteine
  MOD_RES (381)..(381): Selenocysteine
  MOD_RES (469)..(469): Selenocysteine
  MOD_RES (505)..(505): Selenocysteine
  MOD_RES (540)..(540): Selenocysteine
  MOD_RES (543)..(543): Selenocysteine
  MOD_RES (545)..(545): Selenocysteine
  MOD_RES (549)..(549): Selenocysteine
  MOD_RES (586)..(586): Selenocysteine
MESQPFLNMKFEXDYFVKVVPFPSIKNESNYHPFFFRXRACDLLLQPDNLACKPFWKPRNLNISQHGSDMQVSFDHAPHNFGFRFFYLHYKLKHEGPFKRKXCKQEQXXEXXSCLLQNVSPGDYIIELVDDXNXXRKVMHYALKPVHSPWAGPIRAVAIXVPLVVISAFAXLFXVMCRKKQQENIYSHLDEESSESSXYXAALPRERLRPRPKVFLCYSSKDGQNHMNVVQCFAYFLQDFCGCEVALDLWEDFSLCREGQREWVIQKIHESQFIIVVCSKGMKYFVDKKNYKHKGGGRGSGKGELFLVAVSAIAEKLRQAKQSSSAALSKFIAVYFDYSCEGDVPGILDLSXKYRLMDNLPQLCSHLHSRDHGLQEPGQHXRQGSRRNYFRSKSGRSLYVAICNMHQFIDEEPDWFEKQFVPFHPPPLRYREPVLEKFDSGLVLNDVMCKPGPESDFCLKVEAAVLGAXGPADSQHESQHGGLDQDGEARPALDGSAALQPLLHXVKAGSPSDMPRDSGIYDSSVPSSELSLPLMEGLSXDQXEXSSLXESVSSSSGLGEEEPPALPSKLLSSGSCKADLGCRSYXDELHAVAPL

SEQ ID NO: 13305 - protein, 173 aa, Homo sapiens
  MOD_RES (36)..(36): Selenocysteine
  MOD_RES (44)..(44): Selenocysteine
  MOD_RES (49)..(49): Selenocysteine
  MOD_RES (68)..(68): Selenocysteine
  MOD_RES (115)..(115): Selenocysteine
  MOD_RES (122)..(122): Selenocysteine
  MOD_RES (153)..(153): Selenocysteine
MGSSRLAALLLPLLLIVIDLSDSAGIGFRHLPHWNXRCPLASHXDDSFXGLQRGLFHLLVQKSKKSSXFKFYRRHKMPAPAQRKLLPRRHLSEKSHHISIPSPDISHKGLRSKRXQPSDPEXWESLPRLDSQRHGGPEFSFDLLPEARAIRVXISSGPEVSVRLCHQWALECE

SEQ ID NO: 13306 - protein, 533 aa, Homo sapiens
  MOD_RES (36)..(36): Selenocysteine
  MOD_RES (44)..(44): Selenocysteine
  MOD_RES (49)..(49): Selenocysteine
  MOD_RES (59)..(59): Selenocysteine
  MOD_RES (66)..(66): Selenocysteine
  MOD_RES (108)..(108): Selenocysteine
  MOD_RES (155)..(155): Selenocysteine
  MOD_RES (162)..(162): Selenocysteine
  MOD_RES (193)..(193): Selenocysteine
  MOD_RES (230)..(230): Selenocysteine
  MOD_RES (253)..(253): Selenocysteine
  MOD_RES (279)..(279): Selenocysteine
  MOD_RES (285)..(285): Selenocysteine
  MOD_RES (292)..(292): Selenocysteine
  MOD_RES (311)..(311): Selenocysteine
  MOD_RES (320)..(320): Selenocysteine
  MOD_RES (357)..(357): Selenocysteine
  MOD_RES (361)..(361): Selenocysteine
  MOD_RES (369)..(369): Selenocysteine
  MOD_RES (385)..(385): Selenocysteine
  MOD_RES (399)..(399): Selenocysteine
  MOD_RES (406)..(406): Selenocysteine
  MOD_RES (478)..(478): Selenocysteine
  MOD_RES (486)..(486): Selenocysteine
  MOD_RES (493)..(493): Selenocysteine
  MOD_RES (505)..(505): Selenocysteine
MGSSRLAALLLPLLLIVIDLSDSAGIGFRHLPHWNXRCPLASHXDDSFXGSSAYIPCRXWWALFSXKPWCVRVWHCSRCLCQHLLSGGSGLQRGLFHLLVQKSKKSSXFKFYRRHKMPAPAQRKLLPRRHLSEKSHHISIPSPDISHKGLRSKRXQPSDPEXWESLPRLDSQRHGGPEFSFDLLPEARAIRVXISSGPEVSVRLCHQWALECEELSSPYDVQKIVSGGHXVELPYEFLLPCLCIEASYLQEDXVRRKKCPFQSWPEAYGSDFWKSVHFXDYSQHXQMVMALXLRCPLKLEAALCQRHDWHXLCKDLPNAXARESDGWYVLEKVDLHPQLCFKFSFGNSSHVECPHQXGSLXSWNVSMDXQAQQLILHFSSRMHAXFSAAWSLPGLGQDXLVPPVYXVSQARGSSPVSLDLIIPFLRPGCCVLLHASLSSPGGEDAWLIGVGGSVPSGVAVRCPVCLEAPLVSGCLLQXPGALDPGXAGPPHPXGCCSGPHLPAPXVRPGPSAASAPPARGGLGGAAAPGGSAG

SEQ ID NO: 13307 - protein, 667 aa, Homo sapiens
  MOD_RES (36)..(36): Selenocysteine
  MOD_RES (44)..(44): Selenocysteine
  MOD_RES (49)..(49): Selenocysteine
  MOD_RES (59)..(59): Selenocysteine
  MOD_RES (66)..(66): Selenocysteine
  MOD_RES (108)..(108): Selenocysteine
  MOD_RES (155)..(155): Selenocysteine
  MOD_RES (162)..(162): Selenocysteine
  MOD_RES (193)..(193): Selenocysteine
  MOD_RES (230)..(230): Selenocysteine
  MOD_RES (253)..(253): Selenocysteine
  MOD_RES (279)..(279): Selenocysteine
  MOD_RES (285)..(285): Selenocysteine
  MOD_RES (292)..(292): Selenocysteine
  MOD_RES (311)..(311): Selenocysteine
  MOD_RES (320)..(320): Selenocysteine
  MOD_RES (357)..(357): Selenocysteine
  MOD_RES (361)..(361): Selenocysteine
  MOD_RES (369)..(369): Selenocysteine
  MOD_RES (385)..(385): Selenocysteine
  MOD_RES (399)..(399): Selenocysteine
  MOD_RES (406)..(406): Selenocysteine
  MOD_RES (467)..(467): Selenocysteine
  MOD_RES (476)..(476): Selenocysteine
  MOD_RES (546)..(546): Selenocysteine
  MOD_RES (554)..(554): Selenocysteine
  MOD_RES (635)..(635): Selenocysteine
MGSSRLAALLLPLLLIVIDLSDSAGIGFRHLPHWNXRCPLASHXDDSFXGSSAYIPCRXWWALFSXKPWCVRVWHCSRCLCQHLLSGGSGLQRGLFHLLVQKSKKSSXFKFYRRHKMPAPAQRKLLPRRHLSEKSHHISIPSPDISHKGLRSKRXQPSDPEXWESLPRLDSQRHGGPEFSFDLLPEARAIRVXISSGPEVSVRLCHQWALECEELSSPYDVQKIVSGGHXVELPYEFLLPCLCIEASYLQEDXVRRKKCPFQSWPEAYGSDFWKSVHFXDYSQHXQMVMALXLRCPLKLEAALCQRHDWHXLCKDLPNAXARESDGWYVLEKVDLHPQLCFKFSFGNSSHVECPHQXGSLXSWNVSMDXQAQQLILHFSSRMHAXFSAAWSLPGLGQDXLVPPVYXVSQARGSSPVSLDLIIPFLRPGCCVLVWRSDVQFAWKHLLCPDVSYRHLGLLILALLALLXLLGVVLALXCRRPQSGPGPARPVLLLHAADSEAQRRLVGALAELLRAALGGGRDVIVDLWEGRHVARVGPLPWLWAARXRVAREQGXVLLLWSGADLRPVSGPDPRAAPLLALLHAAPRPLLLLAYFSRLCAKGDIPPPLRALPRYRLLRDLPRLLRALDARPFAEAXSWGRLGARQRRQSRLELCSRLEREAARLADLG

SEQ ID NO: 13308 - protein, 186 aa, Homo sapiens
  MOD_RES (36)..(36): Selenocysteine
  MOD_RES (44)..(44): Selenocysteine
  MOD_RES (70)..(70): Selenocysteine
  MOD_RES (92)..(92): Selenocysteine
  MOD_RES (110)..(110): Selenocysteine
  MOD_RES (125)..(125): Selenocysteine
  MOD_RES (132)..(132): Selenocysteine
  MOD_RES (139)..(139): Selenocysteine
  MOD_RES (142)..(142): Selenocysteine
  MOD_RES (165)..(165): Selenocysteine
MGSSRLAALLLPLLLIVIDLSDSAGIGFRHLPHWNXRCPLASHXEVLPISLAAPGGPSSPQSLGVCESGXVPAVCASICCQVAQVFNGASSXSWCRNPKSLPHSSSIGDXRCQHLLRGSCCLVVXCLRRAIXFPSPPQXSPXRDFALKGPNLRIQRHGKVFPDWXHKGMEDPSSPLICCLRPGLFG

SEQ ID NO: 13309 - protein, 190 aa, Homo sapiens
  MOD_RES (36)..(36): Selenocysteine
  MOD_RES (44)..(44): Selenocysteine
  MOD_RES (77)..(77): Selenocysteine
  MOD_RES (84)..(84): Selenocysteine
  MOD_RES (115)..(115): Selenocysteine
  MOD_RES (152)..(152): Selenocysteine
  MOD_RES (171)..(171): Selenocysteine
  MOD_RES (177)..(177): Selenocysteine
  MOD_RES (180)..(181): Selenocysteine
  MOD_RES (184)..(184): Selenocysteine
MGSSRLAALLLPLLLIVIDLSDSAGIGFRHLPHWNXRCPLASHXRKLLPRRHLSEKSHHISIPSPDISHKGLRSKRXQPSDPEXWESLPRLDSQRHGGPEFSFDLLPEARAIRVXISSGPEVSVRLCHQWALECEELSSPYDVQKIVSGGHXVELPYEFLLPCLCIEMARXSGSQCXSLXXASXLRWSWP

SEQ ID NO: 13310 - protein, 146 aa, Homo sapiens
  MOD_RES (36)..(36): Selenocysteine
  MOD_RES (44)..(44): Selenocysteine
  MOD_RES (52)..(52): Selenocysteine
  MOD_RES (70)..(70): Selenocysteine
  MOD_RES (85)..(85): Selenocysteine
  MOD_RES (92)..(92): Selenocysteine
  MOD_RES (99)..(99): Selenocysteine
  MOD_RES (102)..(102): Selenocysteine
  MOD_RES (125)..(125): Selenocysteine
MGSSRLAALLLPLLLIVIDLSDSAGIGFRHLPHWNXRCPLASHXVFNGASSXSWCRNPKSLPHSSSIGDXRCQHLLRGSCCLVVXCLRRAIXFPSPPQXSPXRDFALKGPNLRIQRHGKVFPDWXHKGMEDPSSPLICCLRPGLFG

SEQ ID NO: 13311 - protein, 700 aa, Homo sapiens
  MOD_RES (10)..(10): Selenocysteine
  MOD_RES (69)..(69): Selenocysteine
  MOD_RES (77)..(77): Selenocysteine
  MOD_RES (82)..(82): Selenocysteine
  MOD_RES (92)..(92): Selenocysteine
  MOD_RES (99)..(99): Selenocysteine
  MOD_RES (141)..(141): Selenocysteine
  MOD_RES (188)..(188): Selenocysteine
  MOD_RES (195)..(195): Selenocysteine
  MOD_RES (226)..(226): Selenocysteine
  MOD_RES (263)..(263): Selenocysteine
  MOD_RES (286)..(286): Selenocysteine
  MOD_RES (312)..(312): Selenocysteine
  MOD_RES (318)..(318): Selenocysteine
  MOD_RES (325)..(325): Selenocysteine
  MOD_RES (344)..(344): Selenocysteine
  MOD_RES (353)..(353): Selenocysteine
  MOD_RES (390)..(390): Selenocysteine
  MOD_RES (394)..(394): Selenocysteine
  MOD_RES (402)..(402): Selenocysteine
  MOD_RES (418)..(418): Selenocysteine
  MOD_RES (432)..(432): Selenocysteine
  MOD_RES (439)..(439): Selenocysteine
  MOD_RES (500)..(500): Selenocysteine
  MOD_RES (509)..(509): Selenocysteine
  MOD_RES (579)..(579): Selenocysteine
  MOD_RES (587)..(587): Selenocysteine
  MOD_RES (668)..(668): Selenocysteine
MLAPFLLLLXHSRSPLSFRPCSHVPGALIAQKPMGSSRLAALLLPLLLIVIDLSDSAGIGFRHLPHWNXRCPLASHXDDSFXGSSAYIPCRXWWALFSXKPWCVRVWHCSRCLCQHLLSGGSGLQRGLFHLLVQKSKKSSXFKFYRRHKMPAPAQRKLLPRRHLSEKSHHISIPSPDISHKGLRSKRXQPSDPEXWESLPRLDSQRHGGPEFSFDLLPEARAIRVXISSGPEVSVRLCHQWALECEELSSPYDVQKIVSGGHXVELPYEFLLPCLCIEASYLQEDXVRRKKCPFQSWPEAYGSDFWKSVHFXDYSQHXQMVMALXLRCPLKLEAALCQRHDWHXLCKDLPNAXARESDGWYVLEKVDLHPQLCFKFSFGNSSHVECPHQXGSLXSWNVSMDXQAQQLILHFSSRMHAXFSAAWSLPGLGQDXLVPPVYXVSQARGSSPVSLDLIIPFLRPGCCVLVWRSDVQFAWKHLLCPDVSYRHLGLLILALLALLXLLGVVLALXCRRPQSGPGPARPVLLLHAADSEAQRRLVGALAELLRAALGGGRDVIVDLWEGRHVARVGPLPWLWAARXRVAREQGXVLLLWSGADLRPVSGPDPRAAPLLALLHAAPRPLLLLAYFSRLCAKGDIPPPLRALPRYRLLRDLPRLLRALDARPFAEAXSWGRLGARQRRQSRLELCSRLEREAARLADLG

SEQ ID NO: 13312 - protein, 336 aa, Homo sapiens
  MOD_RES (10)..(10): Selenocysteine
  MOD_RES (13)..(13): Selenocysteine
  MOD_RES (34)..(34): Selenocysteine
  MOD_RES (51)..(51): Selenocysteine
  MOD_RES (54)..(54): Selenocysteine
  MOD_RES (92)..(92): Selenocysteine
  MOD_RES (95)..(95): Selenocysteine
  MOD_RES (149)..(149): Selenocysteine
  MOD_RES (160)..(160): Selenocysteine
  MOD_RES (187)..(187): Selenocysteine
  MOD_RES (202)..(202): Selenocysteine
  MOD_RES (211)..(211): Selenocysteine
  MOD_RES (220)..(220): Selenocysteine
  MOD_RES (266)..(266): Selenocysteine
  MOD_RES (276)..(276): Selenocysteine
  MOD_RES (293)..(293): Selenocysteine
  MOD_RES (296)..(296): Selenocysteine
  MOD_RES (300)..(300): Selenocysteine
  MOD_RES (303)..(303): Selenocysteine
  MOD_RES (327)..(327): Selenocysteine
MSRSVLEALXSSXAMQCVPSDGCAMLLRVRASIXLHERLRGLEACAMSLDXQEXQCQSVWVARASHRQQGGQQLQVHFGCFAVSVAQHLYVXLRXIPHFCGVQLDQRHLVEAGKLSYWVDRRRKAILVQVPRASGSPDYYLRLCLKRFXCEDAGAPVRVXANSVSQAVFLPYSQELPCLCLEGWSAXPDAVRIQICPFENDXEALEVLWDXVYYHPESQXLSWEPACPVSGHVSLCWRPGPGAGCRKLQQSSQLVHRRVQYPLVDXQPQLCLKFSXSWGSWVRCPFEQRRFPXPPXSRCXCVXGGSHSSLPANAHSRPARSLQPQVXWQPPLLLPS

SEQ ID NO: 13313 - protein, 193 aa, Homo sapiens
  MOD_RES (22)..(22): Selenocysteine
  MOD_RES (70)..(70): Selenocysteine
  MOD_RES (81)..(81): Selenocysteine
  MOD_RES (99)..(99): Selenocysteine
  MOD_RES (109)..(109): Selenocysteine
  MOD_RES (131)..(131): Selenocysteine
  MOD_RES (188)..(188): Selenocysteine
MAAEPVEDNCINFVAMKFIDNXLYFIAEDDENLESDYFGKLESKLSVIRNLNDQVLFIDQGNRPLFEDMXDSDCRDNAPRXIFIISMYKDSQPRGMAVXISVKCEKISXLSCENKIISFKEMNPPDNIKDXKSDIIFFQRSVPGHDNKMQFESSSYEGYFLACEKERDLFKLILKKEDELGDRSIMFXVQNED

SEQ ID NO: 13314 - protein, 189 aa, Homo sapiens
  MOD_RES (22)..(22): Selenocysteine
  MOD_RES (66)..(66): Selenocysteine
  MOD_RES (77)..(77): Selenocysteine
  MOD_RES (95)..(95): Selenocysteine
  MOD_RES (105)..(105): Selenocysteine
  MOD_RES (127)..(127): Selenocysteine
  MOD_RES (184)..(184): Selenocysteine
MAAEPVEDNCINFVAMKFIDNXLYFIENLESDYFGKLESKLSVIRNLNDQVLFIDQGNRPLFEDMXDSDCRDNAPRXIFIISMYKDSQPRGMAVXISVKCEKISXLSCENKIISFKEMNPPDNIKDXKSDIIFFQRSVPGHDNKMQFESSSYEGYFLACEKERDLFKLILKKEDELGDRSIMFXVQNED

SEQ ID NO: 13315 - protein, 194 aa, Homo sapiens
  MOD_RES (2)..(2): Selenocysteine
  MOD_RES (8)..(8): Selenocysteine
  MOD_RES (25)..(25): Selenocysteine
  MOD_RES (31)..(31): Selenocysteine
  MOD_RES (36)..(38): Selenocysteine
  MOD_RES (41)..(41): Selenocysteine
  MOD_RES (47)..(47): Selenocysteine
  MOD_RES (70)..(70): Selenocysteine
  MOD_RES (81)..(81): Selenocysteine
  MOD_RES (119)..(119): Selenocysteine
  MOD_RES (126)..(126): Selenocysteine
  MOD_RES (128)..(128): Selenocysteine
  MOD_RES (140)..(140): Selenocysteine
  MOD_RES (146)..(146): Selenocysteine
  MOD_RES (175)..(175): Selenocysteine
  MOD_RES (179)..(179): Selenocysteine
MXMRHNWXPDLSPLWVLLLCAHVVXLLVRAXPVSQXXXAAXASVRSXKDPCPSQPPVFPAAKQCPALEVXWPEVEVPLNGXLSLSCVACSRFPNFSILYWLGNGSFIEHLPGRLWEGSXSRERGSXGXQLCKALVLEQLXPALHSXNFSCVLVDPEQVVQRHVVLAQLWAGLRAXLPPXQEALPSSHSSPQQQG

SEQ ID NO: 13316 - protein, 199 aa, Homo sapiens
  MOD_RES (2)..(2): Selenocysteine
  MOD_RES (8)..(8): Selenocysteine
  MOD_RES (25)..(25): Selenocysteine
  MOD_RES (31)..(31): Selenocysteine
  MOD_RES (36)..(38): Selenocysteine
  MOD_RES (41)..(41): Selenocysteine
  MOD_RES (47)..(47): Selenocysteine
  MOD_RES (70)..(70): Selenocysteine
  MOD_RES (81)..(81): Selenocysteine
  MOD_RES (119)..(119): Selenocysteine
  MOD_RES (126)..(126): Selenocysteine
  MOD_RES (128)..(128): Selenocysteine
  MOD_RES (140)..(140): Selenocysteine
  MOD_RES (146)..(146): Selenocysteine
MXMRHNWXPDLSPLWVLLLCAHVVXLLVRAXPVSQXXXAAXASVRSXKDPCPSQPPVFPAAKQCPALEVXWPEVEVPLNGXLSLSCVACSRFPNFSILYWLGNGSFIEHLPGRLWEGSXSRERGSXGXQLCKALVLEQLXPALHSXNFSCVLVDPEQVVQRHVVLAQLWVRSPRRGLQEQEELCFHMWGGKGGLCQSSL

SEQ ID NO: 13317 - protein, 163 aa, Homo sapiens
  MOD_RES (2)..(2): Selenocysteine
  MOD_RES (8)..(8): Selenocysteine
  MOD_RES (25)..(25): Selenocysteine
  MOD_RES (31)..(31): Selenocysteine
  MOD_RES (36)..(38): Selenocysteine
  MOD_RES (41)..(41): Selenocysteine
  MOD_RES (47)..(47): Selenocysteine
  MOD_RES (70)..(70): Selenocysteine
  MOD_RES (81)..(81): Selenocysteine
  MOD_RES (119)..(119): Selenocysteine
  MOD_RES (126)..(126): Selenocysteine
  MOD_RES (148)..(148): Selenocysteine
  MOD_RES (156)..(156): Selenocysteine
MXMRHNWXPDLSPLWVLLLCAHVVXLLVRAXPVSQXXXAAXASVRSXKDPCPSQPPVFPAAKQCPALEVXWPEVEVPLNGXLSLSCVACSRFPNFSILYWLGNGSFIEHLPGRLWEGSXSRERGSXGWAEGNLAPHPRSPALQPQQSXAAGLRLSXGPAAAQP

SEQ ID NO: 13318 - protein, 115 aa, Homo sapiens
  MOD_RES (2)..(2): Selenocysteine
  MOD_RES (8)..(8): Selenocysteine
  MOD_RES (25)..(25): Selenocysteine
  MOD_RES (31)..(31): Selenocysteine
  MOD_RES (36)..(38): Selenocysteine
  MOD_RES (41)..(41): Selenocysteine
  MOD_RES (47)..(47): Selenocysteine
  MOD_RES (70)..(70): Selenocysteine
  MOD_RES (100)..(100): Selenocysteine
  MOD_RES (108)..(108): Selenocysteine
MXMRHNWXPDLSPLWVLLLCAHVVXLLVRAXPVSQXXXAAXASVRSXKDPCPSQPPVFPAAKQCPALEVXWPEVEVPLSWAEGNLAPHPRSPALQPQQSXAAGLRLSXGPAAAQP

SEQ ID NO: 13319 - protein, 170 aa, Homo sapiens
  MOD_RES (9)..(9): Selenocysteine
  MOD_RES (18)..(18): Selenocysteine
  MOD_RES (23)..(23): Selenocysteine
  MOD_RES (29)..(29): Selenocysteine
  MOD_RES (51)..(53): Selenocysteine
  MOD_RES (93)..(93): Selenocysteine
  MOD_RES (104)..(104): Selenocysteine
  MOD_RES (121)..(121): Selenocysteine
  MOD_RES (126)..(126): Selenocysteine
  MOD_RES (139)..(139): Selenocysteine
  MOD_RES (147)..(147): Selenocysteine
  MOD_RES (152)..(152): Selenocysteine
  MOD_RES (165)..(165): Selenocysteine
MNCRELPLXLWVLISVSXAESCXSRPHIXVVEGEPFYLKHCSCSLAHEIEXXXKSWYKSSGSQEHVELNPRSSSRIALHDCVLEFWPVELNDXGSYFFQMKNYXQKWKLNVIRRNKHSCFXERQVXSKIVEVKKFFQIXCENSYYQXLVNSXSLYKIGPPICRKXSSGLH

SEQ ID NO: 13320 - protein, 541 aa, Homo sapiens
  MOD_RES (9)..(9): Selenocysteine
  MOD_RES (18)..(18): Selenocysteine
  MOD_RES (23)..(23): Selenocysteine
  MOD_RES (29)..(29): Selenocysteine
  MOD_RES (51)..(53): Selenocysteine
  MOD_RES (93)..(93): Selenocysteine
  MOD_RES (104)..(104): Selenocysteine
  MOD_RES (121)..(121): Selenocysteine
  MOD_RES (126)..(126): Selenocysteine
  MOD_RES (139)..(139): Selenocysteine
  MOD_RES (147)..(147): Selenocysteine
  MOD_RES (152)..(152): Selenocysteine
  MOD_RES (170)..(170): Selenocysteine
  MOD_RES (199)..(199): Selenocysteine
  MOD_RES (201)..(201): Selenocysteine
  MOD_RES (205)..(205): Selenocysteine
  MOD_RES (271)..(271): Selenocysteine
  MOD_RES (299)..(299): Selenocysteine
  MOD_RES (303)..(303): Selenocysteine
  MOD_RES (306)..(306): Selenocysteine
  MOD_RES (308)..(308): Selenocysteine
  MOD_RES (328)..(328): Selenocysteine
  MOD_RES (346)..(346): Selenocysteine
  MOD_RES (363)..(363): Selenocysteine
  MOD_RES (368)..(368): Selenocysteine
  MOD_RES (370)..(370): Selenocysteine
  MOD_RES (374)..(374): Selenocysteine
  MOD_RES (394)..(394): Selenocysteine
  MOD_RES (477)..(477): Selenocysteine
  MOD_RES (480)..(480): Selenocysteine
  MOD_RES (483)..(483): Selenocysteine
  MOD_RES (524)..(524): Selenocysteine
MNCRELPLXLWVLISVSXAESCXSRPHIXVVEGEPFYLKHCSCSLAHEIEXXXKSWYKSSGSQEHVELNPRSSSRIALHDCVLEFWPVELNDXGSYFFQMKNYXQKWKLNVIRRNKHSCFXERQVXSKIVEVKKFFQIXCENSYYQXLVNSXSLYKNCKKLLLENNKNPXIKKNAEFEDQGYYSCVHFLHHNGKLFNIXKXFNIXIVEDRSNIVPVLLGPKLNHVAVELGKNVRLNCSALLNEEDVIYWMFGEENGSDPNIHEEKEMRIMXPEGKWHASKVLRIENIGESNLNVLYNCXVASXGGXDXKSFILVRKADMADIPGHVFXRGMIIAVLILVAVVCLVXVCVIYRVDLVLFYRHLXRRDEXLXDGKXYDAFVSYLKECRPENGEEHXFAVEILPRVLEKHFGYKLCIFERDVVPGGAVVDEIHSLIEKSRRLIIVLSKSYMSNEVRYELESGLHEALVERKIKIILIEFXPVXDFXFLPQSLKLLKSHRVLKWKADKSLSYNSRFWKNLLYLMPAKXVKPGRDEPEVLPVLSES

SEQ ID NO: 13321 - protein, 457 aa, Homo sapiens
  MOD_RES (9)..(9): Selenocysteine
  MOD_RES (28)..(28): Selenocysteine
  MOD_RES (48)..(48): Selenocysteine
  MOD_RES (76)..(76): Selenocysteine
  MOD_RES (82)..(82): Selenocysteine
  MOD_RES (86)..(86): Selenocysteine
  MOD_RES (91)..(91): Selenocysteine
  MOD_RES (100)..(100): Selenocysteine
  MOD_RES (105)..(105): Selenocysteine
  MOD_RES (118)..(118): Selenocysteine
  MOD_RES (128)..(128): Selenocysteine
  MOD_RES (169)..(169): Selenocysteine
  MOD_RES (185)..(185): Selenocysteine
  MOD_RES (204)..(205): Selenocysteine
  MOD_RES (225)..(225): Selenocysteine
  MOD_RES (228)..(228): Selenocysteine
  MOD_RES (252)..(252): Selenocysteine
  MOD_RES (259)..(259): Selenocysteine
  MOD_RES (283)..(283): Selenocysteine
  MOD_RES (364)..(364): Selenocysteine
  MOD_RES (394)..(394): Selenocysteine
  MOD_RES (396)..(396): Selenocysteine
  MOD_RES (426)..(426): Selenocysteine
  MOD_RES (433)..(433): Selenocysteine
  MOD_RES (445)..(445): Selenocysteine
  MOD_RES (447)..(448): Selenocysteine
MILEVKPQXNASCEYSASHKQDLLLGSXGSISCPSLSCQSDAQSPAVXWYKNGKLLSVERSNRIVVDEVYDYHQGXYVCDYXQSDXVSSWXVRAVVQVRXIVGDXKLKPDILDPVEDXLEVELGKPLXISCKARFGFERVFNPVIKWYIKDSDLEWEVSVPEAKSIKSXLKDEIIERNIILEKVXQRDLRRKFVCFVQNSIGNXXQSVQLKEKRGVVLLYILLGXIGXLVAVLAASALLYRHWIEIVLLYRXYQSKDQXLGDKKDFDAFVSYAKWSSFPSEAXSSLSEEHLALSLFPDVLENKYGYSLCLLERDVAPGGVYAEDIVSIIKRSRRGIFILSPNYVNGPSIFELQAAVNLALDDQXLKLILIKFCYFQEPESLPHLVKKALRVLPXVXWRGLKSVPPNSRFWAKMRYHMPVKNSQGFXWNQLRIXSRIFQWKGLSRXEXXGRSSQPKEW

SEQ ID NO: 13322 - protein, 44 aa, Homo sapiens
  MOD_RES (27)..(27): Selenocysteine
  MOD_RES (33)..(33): Selenocysteine
  MOD_RES (36)..(36): Selenocysteine
MLCLGWIFLWLVAGERIKGFNISGCSXKKLLWXYSXRSEEEFVL

SEQ ID NO: 13323 - protein, 599 aa, Homo sapiens
  MOD_RES (27)..(27): Selenocysteine
  MOD_RES (33)..(33): Selenocysteine
  MOD_RES (36)..(36): Selenocysteine
  MOD_RES (110)..(110): Selenocysteine
  MOD_RES (115)..(115): Selenocysteine
  MOD_RES (151)..(151): Selenocysteine
  MOD_RES (170)..(170): Selenocysteine
  MOD_RES (190)..(190): Selenocysteine
  MOD_RES (218)..(218): Selenocysteine
  MOD_RES (224)..(224): Selenocysteine
  MOD_RES (228)..(228): Selenocysteine
  MOD_RES (233)..(233): Selenocysteine
  MOD_RES (242)..(242): Selenocysteine
  MOD_RES (247)..(247): Selenocysteine
  MOD_RES (260)..(260): Selenocysteine
  MOD_RES (270)..(270): Selenocysteine
  MOD_RES (311)..(311): Selenocysteine
  MOD_RES (327)..(327): Selenocysteine
  MOD_RES (346)..(347): Selenocysteine
  MOD_RES (367)..(367): Selenocysteine
  MOD_RES (370)..(370): Selenocysteine
  MOD_RES (394)..(394): Selenocysteine
  MOD_RES (401)..(401): Selenocysteine
  MOD_RES (425)..(425): Selenocysteine
  MOD_RES (506)..(506): Selenocysteine
  MOD_RES (536)..(536): Selenocysteine
  MOD_RES (538)..(538): Selenocysteine
  MOD_RES (568)..(568): Selenocysteine
  MOD_RES (575)..(575): Selenocysteine
  MOD_RES (587)..(587): Selenocysteine
  MOD_RES (589)..(590): Selenocysteine
MLCLGWIFLWLVAGERIKGFNISGCSXKKLLWXYSXRSEEEFVLFCDLPEPQKSHFCHRNRLSPKQVPEHLPFMGSNDLSDVQWYQQPSNGDPLEDIRKSYPHIIQDKCXLHFLXPGVNNSGSYICRPKMIKSPYDVACCVKMILEVKPQXNASCEYSASHKQDLLLGSXGSISCPSLSCQSDAQSPAVXWYKNGKLLSVERSNRIVVDEVYDYHQGXYVCDYXQSDXVSSWXVRAVVQVRXIVGDXKLKPDILDPVEDXLEVELGKPLXISCKARFGFERVFNPVIKWYIKDSDLEWEVSVPEAKSIKSXLKDEIIERNIILEKVXQRDLRRKFVCFVQNSIGNXXQSVQLKEKRGVVLLYILLGXIGXLVAVLAASALLYRHWIEIVLLYRXYQSKDQXLGDKKDFDAFVSYAKWSSFPSEAXSSLSEEHLALSLFPDVLENKYGYSLCLLERDVAPGGVYAEDIVSIIKRSRRGIFILSPNYVNGPSIFELQAAVNLALDDQXLKLILIKFCYFQEPESLPHLVKKALRVLPXVXWRGLKSVPPNSRFWAKMRYHMPVKNSQGFXWNQLRIXSRIFQWKGLSRXEXXGRSSQPKEW

SEQ ID NO: 13324 - protein, 215 aa, Homo sapiens
  MOD_RES (3)..(3): Selenocysteine
  MOD_RES (18)..(18): Selenocysteine
  MOD_RES (22)..(22): Selenocysteine
  MOD_RES (51)..(51): Selenocysteine
  MOD_RES (70)..(70): Selenocysteine
  MOD_RES (91)..(91): Selenocysteine
  MOD_RES (96)..(96): Selenocysteine
  MOD_RES (100)..(100): Selenocysteine
  MOD_RES (103)..(103): Selenocysteine
  MOD_RES (116)..(116): Selenocysteine
  MOD_RES (155)..(155): Selenocysteine
  MOD_RES (172)..(172): Selenocysteine
  MOD_RES (175)..(175): Selenocysteine
MCXEGAFPHRSACSLPLXHVHXHIHVCVPVLWGSVPRGMKLQCVSLWLLGXILILCSVDNHGLRRCLISXDMHHIEESFQEIKRAIQAKDXFPNVXILSXLEXLQIIKPLDVCCVXKNLLAFYVDRVFKDHQEPNPKILRKISSIANSFLYMQKXLRQCQEQRQCHCRQEAXNAXRVIHDNYDQLEVHAAAIKSLGELDVFLAWINKNHEVMFSA

SEQ ID NO: 13325 - protein, 177 aa, Homo sapiens
  MOD_RES (13)..(13): Selenocysteine
  MOD_RES (32)..(32): Selenocysteine
  MOD_RES (53)..(53): Selenocysteine
  MOD_RES (58)..(58): Selenocysteine
  MOD_RES (62)..(62): Selenocysteine
  MOD_RES (65)..(65): Selenocysteine
  MOD_RES (78)..(78): Selenocysteine
  MOD_RES (117)..(117): Selenocysteine
  MOD_RES (134)..(134): Selenocysteine
  MOD_RES (137)..(137): Selenocysteine
MKLQCVSLWLLGXILILCSVDNHGLRRCLISXDMHHIEESFQEIKRAIQAKDXFPNVXILSXLEXLQIIKPLDVCCVXKNLLAFYVDRVFKDHQEPNPKILRKISSIANSFLYMQKXLRQCQEQRQCHCRQEAXNAXRVIHDNYDQLEVHAAAIKSLGELDVFLAWINKNHEVMFSA

SEQ ID NO: 13326 - protein, 271 aa, Homo sapiens
  MOD_RES (59)..(59): Selenocysteine
  MOD_RES (62)..(62): Selenocysteine
  MOD_RES (66)..(66): Selenocysteine
  MOD_RES (76)..(76): Selenocysteine
  MOD_RES (93)..(93): Selenocysteine
  MOD_RES (153)..(153): Selenocysteine
  MOD_RES (181)..(181): Selenocysteine
  MOD_RES (189)..(189): Selenocysteine
  MOD_RES (194)..(194): Selenocysteine
  MOD_RES (213)..(213): Selenocysteine
  MOD_RES (215)..(215): Selenocysteine
  MOD_RES (219)..(219): Selenocysteine
  MOD_RES (227)..(227): Selenocysteine
  MOD_RES (230)..(230): Selenocysteine
  MOD_RES (235)..(235): Selenocysteine
  MOD_RES (246)..(246): Selenocysteine
  MOD_RES (262)..(262): Selenocysteine
MAKVPDMFEDLKNCYSENEEDSSSIDHLSLNQKSFYHVSYGPLHEGCMDQSVSLSISEXSKXSKLXFKESMVVVAXNGKVLKKRRLSLSQSIXDDDLEAIANDSEEEIIKPRSAPFSFLSNVKYNFMRIIKYEFILNDALNQSIIRANDQYLXAAALHNLDEAVKFDMGAYKSSKDDAKIXVILRISKXQLYVXAQDEDQPVLLKEMPEIPKXIXGSEXNLLFFWEXHGXKNYFXSVAHPNLFIAXKQDYWVCLAGGPPSIXDFQILENQA

SEQ ID NO: 13327 - protein, 111 aa, Homo sapiens
  MOD_RES (84)..(84): Selenocysteine
  MOD_RES (92)..(92): Selenocysteine
  MOD_RES (107)..(107): Selenocysteine
MAEVPELASEMMAYYSGNEDDLFFEADGPKQMKCSFQDLDLCPLDGGIQLRISDHHYSKGFRQAASVVVAMDKLRKMLVPCPQXFQENDLSXFFPFIFEEEPIFFDXWDNE

SEQ ID NO: 13328 - protein, 125 aa, Homo sapiens
  MOD_RES (84)..(84): Selenocysteine
  MOD_RES (92)..(92): Selenocysteine
  MOD_RES (107)..(107): Selenocysteine
  MOD_RES (125)..(125): Selenocysteine
MAEVPELASEMMAYYSGNEDDLFFEADGPKQMKCSFQDLDLCPLDGGIQLRISDHHYSKGFRQAASVVVAMDKLRKMLVPCPQXFQENDLSXFFPFIFEEEPIFFDXWDNEAYVHDAPVRSLNCX

SEQ ID NO: 13329 - protein, 143 aa, Homo sapiens
  MOD_RES (84)..(84): Selenocysteine
  MOD_RES (92)..(92): Selenocysteine
  MOD_RES (107)..(107): Selenocysteine
  MOD_RES (125)..(125): Selenocysteine
MAEVPELASEMMAYYSGNEDDLFFEADGPKQMKCSFQDLDLCPLDGGIQLRISDHHYSKGFRQAASVVVAMDKLRKMLVPCPQXFQENDLSXFFPFIFEEEPIFFDXWDNEAYVHDAPVRSLNCXLRDSQQKSLVMSGPYELK

SEQ ID NO: 13330 - protein, 269 aa, Homo sapiens
  MOD_RES (84)..(84): Selenocysteine
  MOD_RES (92)..(92): Selenocysteine
  MOD_RES (107)..(107): Selenocysteine
  MOD_RES (125)..(125): Selenocysteine
  MOD_RES (195)..(195): Selenocysteine
  MOD_RES (240)..(240): Selenocysteine
  MOD_RES (253)..(253): Selenocysteine
  MOD_RES (260)..(260): Selenocysteine
  MOD_RES (263)..(263): Selenocysteine
MAEVPELASEMMAYYSGNEDDLFFEADGPKQMKCSFQDLDLCPLDGGIQLRISDHHYSKGFRQAASVVVAMDKLRKMLVPCPQXFQENDLSXFFPFIFEEEPIFFDXWDNEAYVHDAPVRSLNCXLRDSQQKSLVMSGPYELKALHLQGQDMEQQVVFSMSFVQGEESNDKIPVALGLKEKNLYLSCVLKDDKPXLQLESVDPKNYPKKKMEKRFVFNKIEINNKLEFESAQFPNWYISXSQAENMPVFLGGXKGGQDIXDFXMQFVSS

SEQ ID NO: 13331 - protein, 152 aa, Homo sapiens
  MOD_RES (22)..(22): Selenocysteine
  MOD_RES (53)..(53): Selenocysteine
  MOD_RES (73)..(73): Selenocysteine
  MOD_RES (97)..(97): Selenocysteine
  MOD_RES (100)..(100): Selenocysteine
  MOD_RES (135)..(135): Selenocysteine
  MOD_RES (144)..(144): Selenocysteine
MCSLPMARYYIIKYADQKALYXRDGQLLVGDPVADNCCAEKICILPNRGLARXKVPIFLGIQGGSRCLACVEXEEGPSLQLEDVNIEELYKGGEEAXRFXFFQSSSGSAFRLEAAAWPGWFLCGPAEPQQPVQLXKESEPSARXKFYFEQSW

SEQ ID NO: 13332 - protein, 298 aa, Homo sapiens
  MOD_RES (51)..(51): Selenocysteine
  MOD_RES (57)..(57): Selenocysteine
  MOD_RES (66)..(66): Selenocysteine
  MOD_RES (73)..(73): Selenocysteine
  MOD_RES (80)..(80): Selenocysteine
  MOD_RES (91)..(91): Selenocysteine
  MOD_RES (107)..(107): Selenocysteine
  MOD_RES (147)..(147): Selenocysteine
  MOD_RES (150)..(150): Selenocysteine
  MOD_RES (167)..(167): Selenocysteine
  MOD_RES (173)..(173): Selenocysteine
  MOD_RES (188)..(188): Selenocysteine
  MOD_RES (200)..(200): Selenocysteine
  MOD_RES (202)..(202): Selenocysteine
  MOD_RES (240)..(240): Selenocysteine
  MOD_RES (250)..(250): Selenocysteine
  MOD_RES (256)..(256): Selenocysteine
MEFFKNENNELPKLQWYKDCKPLLLDNIHFSGVKDRLIVMNVAEKHRGNYXCHASYXYLGKQYPIXRVIEFIXLEENKPXRPVIVSPANEXMEVDLGSQIQLICNVXGQLSDIAYWKWNGSVIDEDDPVLGEDYYSVENPANKRRSXLIXVLNISEIESRFYKHPFXCFAKNXHGIDAAYIQLIYPVXNFQKHMIGICVXLXVIIVCSVFIYKIFKIDIVLWYRDSCYDFLPIKASDGKXYDAYILYPKXVGEGSXSDCDIFVFKVLPEVLEKQCGYKLFIYGRDDYVGEDIVEVINE

SEQ ID NO: 13333 - protein, 80 aa, Homo sapiens
  MOD_RES (54)..(54): Selenocysteine
  MOD_RES (56)..(56): Selenocysteine
  MOD_RES (64)..(64): Selenocysteine
  MOD_RES (68)..(68): Selenocysteine
MKVLLRLICFIALLISSLEADKCKEREEKIILVSSANEIDVRPCPLNPNEHKGXIXWYKDDSKXPVSXEQASRIHQHKEK

SEQ ID NO: 13334 - protein, 119 aa, Homo sapiens
  MOD_RES (54)..(54): Selenocysteine
  MOD_RES (56)..(56): Selenocysteine
  MOD_RES (64)..(64): Selenocysteine
  MOD_RES (68)..(68): Selenocysteine
  MOD_RES (107)..(107): Selenocysteine
  MOD_RES (110)..(110): Selenocysteine
MKVLLRLICFIALLISSLEADKCKEREEKIILVSSANEIDVRPCPLNPNEHKGXIXWYKDDSKXPVSXEQASRIHQHKEKLWFVPAKVEDSGHYYCVVRIANLYFLXIYXLVESKIGSS

SEQ ID NO: 13335 - protein, 106 aa, Homo sapiens
  MOD_RES (54)..(54): Selenocysteine
  MOD_RES (56)..(56): Selenocysteine
  MOD_RES (64)..(64): Selenocysteine
  MOD_RES (68)..(68): Selenocysteine
MKVLLRLICFIALLISSLEADKCKEREEKIILVSSANEIDVRPCPLNPNEHKGXIXWYKDDSKXPVSXEQASRIHQHKEKLWFVPAKVEDSGHYYCVVRNSSYCLR

SEQ ID NO: 13336 - protein, 114 aa, Homo sapiens
  MOD_RES (54)..(54): Selenocysteine
  MOD_RES (56)..(56): Selenocysteine
  MOD_RES (64)..(64): Selenocysteine
  MOD_RES (68)..(68): Selenocysteine
MKVLLRLICFIALLISSLEADKCKEREEKIILVSSANEIDVRPCPLNPNEHKGXIXWYKDDSKXPVSXEQASRIHQHKEKLWFVPAKVEDSGHYYCVVRNSSYCLRIKISAKFV

SEQ ID NO: 13337 - protein, 182 aa, Homo sapiens
  MOD_RES (54)..(54): Selenocysteine
  MOD_RES (56)..(56): Selenocysteine
  MOD_RES (64)..(64): Selenocysteine
  MOD_RES (68)..(68): Selenocysteine
MKVLLRLICFIALLISSLEADKCKEREEKIILVSSANEIDVRPCPLNPNEHKGXIXWYKDDSKXPVSXEQASRIHQHKEKLWFVPAKVEDSGHYYCVVRNSSYCLRIKISAKFVENEPNLCYNAQAIFKQKLPVAGDGGLVCPYMEFFKNENNELPKLQWYKDCKPLLLDNIHFSGVKDRLI

SEQ ID NO: 13338 - protein, 447 aa, Homo sapiens
  MOD_RES (54)..(54): Selenocysteine
  MOD_RES (56)..(56): Selenocysteine
  MOD_RES (64)..(64): Selenocysteine
  MOD_RES (68)..(68): Selenocysteine
  MOD_RES (195)..(195): Selenocysteine
  MOD_RES (201)..(201): Selenocysteine
  MOD_RES (210)..(210): Selenocysteine
  MOD_RES (217)..(217): Selenocysteine
  MOD_RES (224)..(224): Selenocysteine
  MOD_RES (235)..(235): Selenocysteine
  MOD_RES (251)..(251): Selenocysteine
  MOD_RES (291)..(291): Selenocysteine
  MOD_RES (294)..(294): Selenocysteine
  MOD_RES (311)..(311): Selenocysteine
  MOD_RES (317)..(317): Selenocysteine
  MOD_RES (332)..(332): Selenocysteine
  MOD_RES (344)..(344): Selenocysteine
  MOD_RES (346)..(346): Selenocysteine
  MOD_RES (384)..(384): Selenocysteine
  MOD_RES (394)..(394): Selenocysteine
  MOD_RES (400)..(400): Selenocysteine
MKVLLRLICFIALLISSLEADKCKEREEKIILVSSANEIDVRPCPLNPNEHKGXIXWYKDDSKXPVSXEQASRIHQHKEKLWFVPAKVEDSGHYYCVVRNSSYCLRIKISAKFVENEPNLCYNAQAIFKQKLPVAGDGGLVCPYMEFFKNENNELPKLQWYKDCKPLLLDNIHFSGVKDRLIVMNVAEKHRGNYXCHASYXYLGKQYPIXRVIEFIXLEENKPXRPVIVSPANEXMEVDLGSQIQLICNVXGQLSDIAYWKWNGSVIDEDDPVLGEDYYSVENPANKRRSXLIXVLNISEIESRFYKHPFXCFAKNXHGIDAAYIQLIYPVXNFQKHMIGICVXLXVIIVCSVFIYKIFKIDIVLWYRDSCYDFLPIKASDGKXYDAYILYPKXVGEGSXSDCDIFVFKVLPEVLEKQCGYKLFIYGRDDYVGEGMCVMEQSKGLLL

SEQ ID NO: 13339 - protein, 538 aa, Homo sapiens
  MOD_RES (54)..(54): Selenocysteine
  MOD_RES (56)..(56): Selenocysteine
  MOD_RES (64)..(64): Selenocysteine
  MOD_RES (68)..(68): Selenocysteine
  MOD_RES (195)..(195): Selenocysteine
  MOD_RES (201)..(201): Selenocysteine
  MOD_RES (210)..(210): Selenocysteine
  MOD_RES (217)..(217): Selenocysteine
  MOD_RES (224)..(224): Selenocysteine
  MOD_RES (235)..(235): Selenocysteine
  MOD_RES (251)..(251): Selenocysteine
  MOD_RES (291)..(291): Selenocysteine
  MOD_RES (294)..(294): Selenocysteine
  MOD_RES (311)..(311): Selenocysteine
  MOD_RES (317)..(317): Selenocysteine
  MOD_RES (332)..(332): Selenocysteine
  MOD_RES (344)..(344): Selenocysteine
  MOD_RES (346)..(346): Selenocysteine
  MOD_RES (427)..(427): Selenocysteine
  MOD_RES (489)..(489): Selenocysteine
  MOD_RES (497)..(497): Selenocysteine
  MOD_RES (525)..(525): Selenocysteine
MKVLLRLICFIALLISSLEADKCKEREEKIILVSSANEIDVRPCPLNPNEHKGXIXWYKDDSKXPVSXEQASRIHQHKEKLWFVPAKVEDSGHYYCVVRNSSYCLRIKISAKFVENEPNLCYNAQAIFKQKLPVAGDGGLVCPYMEFFKNENNELPKLQWYKDCKPLLLDNIHFSGVKDRLIVMNVAEKHRGNYXCHASYXYLGKQYPIXRVIEFIXLEENKPXRPVIVSPANEXMEVDLGSQIQLICNVXGQLSDIAYWKWNGSVIDEDDPVLGEDYYSVENPANKRRSXLIXVLNISEIESRFYKHPFXCFAKNXHGIDAAYIQLIYPVXNFQKHMIGICVXLXVIIVCSVFIYKIFKIDIVLWYRDSCYDFLPIKVLPEVLEKQCGYKLFIYGRDDYVGEDIVEVINENVKKSRRLIIILVREXSGFSWLGGSSEEQIAMYNALVQDGIKVVLLELEKIQDYEKMPESIKFIKQKHGAIRWSGDFXQGPQSAKXRFWKNVRYHMPVQRRSPSSKHQLLSPAXKEKLQREAHVPLG

SEQ ID NO: 13340 - protein, 569 aa, Homo sapiens
  MOD_RES (54)..(54): Selenocysteine
  MOD_RES (56)..(56): Selenocysteine
  MOD_RES (64)..(64): Selenocysteine
  MOD_RES (68)..(68): Selenocysteine
  MOD_RES (195)..(195): Selenocysteine
  MOD_RES (201)..(201): Selenocysteine
  MOD_RES (210)..(210): Selenocysteine
  MOD_RES (217)..(217): Selenocysteine
  MOD_RES (224)..(224): Selenocysteine
  MOD_RES (235)..(235): Selenocysteine
  MOD_RES (251)..(251): Selenocysteine
  MOD_RES (291)..(291): Selenocysteine
  MOD_RES (294)..(294): Selenocysteine
  MOD_RES (311)..(311): Selenocysteine
  MOD_RES (317)..(317): Selenocysteine
  MOD_RES (332)..(332): Selenocysteine
  MOD_RES (344)..(344): Selenocysteine
  MOD_RES (346)..(346): Selenocysteine
  MOD_RES (384)..(384): Selenocysteine
  MOD_RES (394)..(394): Selenocysteine
  MOD_RES (400)..(400): Selenocysteine
  MOD_RES (458)..(458): Selenocysteine
  MOD_RES (520)..(520): Selenocysteine
  MOD_RES (528)..(528): Selenocysteine
  MOD_RES (556)..(556): Selenocysteine
MKVLLRLICFIALLISSLEADKCKEREEKIILVSSANEIDVRPCPLNPNEHKGXIXWYKDDSKXPVSXEQASRIHQHKEKLWFVPAKVEDSGHYYCVVRNSSYCLRIKISAKFVENEPNLCYNAQAIFKQKLPVAGDGGLVCPYMEFFKNENNELPKLQWYKDCKPLLLDNIHFSGVKDRLIVMNVAEKHRGNYXCHASYXYLGKQYPIXRVIEFIXLEENKPXRPVIVSPANEXMEVDLGSQIQLICNVXGQLSDIAYWKWNGSVIDEDDPVLGEDYYSVENPANKRRSXLIXVLNISEIESRFYKHPFXCFAKNXHGIDAAYIQLIYPVXNFQKHMIGICVXLXVIIVCSVFIYKIFKIDIVLWYRDSCYDFLPIKASDGKXYDAYILYPKXVGEGSXSDCDIFVFKVLPEVLEKQCGYKLFIYGRDDYVGEDIVEVINENVKKSRRLIIILVREXSGFSWLGGSSEEQIAMYNALVQDGIKVVLLELEKIQDYEKMPESIKFIKQKHGAIRWSGDFXQGPQSAKXRFWKNVRYHMPVQRRSPSSKHQLLSPAXKEKLQREAHVPLG

SEQ ID NO: 13341 - protein, 173 aa, Homo sapiens
  MOD_RES (54)..(54): Selenocysteine
  MOD_RES (56)..(56): Selenocysteine
  MOD_RES (64)..(64): Selenocysteine
  MOD_RES (68)..(68): Selenocysteine
  MOD_RES (171)..(171): Selenocysteine
MKVLLRLICFIALLISSLEADKCKEREEKIILVSSANEIDVRPCPLNPNEHKGXIXWYKDDSKXPVSXEQASRIHQHKEKLWFVPAKVEDSGHYYCVVRNSSYCLRIKISAKFVENEPNLCYNAQAIFKQKLPVAGDGGLVCPYMEFFKNENNELPKLQWYKVAVSRVWAXAL

SEQ ID NO: 13342 - protein, 124 aa, Homo sapiens
  MOD_RES (1)..(1): Any amino acid
  MOD_RES (34)..(34): Selenocysteine
  MOD_RES (36)..(36): Selenocysteine
  MOD_RES (44)..(44): Selenocysteine
  MOD_RES (48)..(48): Selenocysteine
  MOD_RES (79)..(79): Selenocysteine
  MOD_RES (112)..(112): Selenocysteine
  MOD_RES (115)..(115): Selenocysteine
XKCKEREEKIILVSSANEIDVRPCPLNPNEHKGXIXWYKDDSKXPVSXEQASRIHQHKEKLWFVPAKVEDSGHYYCVEXEDLCALIWSFLKMKIMSYLNYSGIRIANLYFLXIYXLVESKIGSS

SEQ ID NO: 13343 - protein, 229 aa, Homo sapiens
  MOD_RES (15)..(15): Selenocysteine
  MOD_RES (22)..(22): Selenocysteine
  MOD_RES (68)..(68): Selenocysteine
  MOD_RES (77)..(77): Selenocysteine
  MOD_RES (84)..(84): Selenocysteine
  MOD_RES (105)..(105): Selenocysteine
  MOD_RES (109)..(110): Selenocysteine
  MOD_RES (129)..(129): Selenocysteine
  MOD_RES (143)..(143): Selenocysteine
  MOD_RES (146)..(146): Selenocysteine
  MOD_RES (159)..(159): Selenocysteine
  MOD_RES (163)..(163): Selenocysteine
  MOD_RES (189)..(190): Selenocysteine
  MOD_RES (210)..(210): Selenocysteine
  MOD_RES (221)..(221): Selenocysteine
MLRLYVLVMGVSAFXLQPAAHXGAARSCRFRGRHYKREFRLEGEPVALRCPQVPYWLWASVSPRINLXWHKNDSARXVPGEEEXRMWAQDGALWLLPALQEDSGXYVCXXRNASYCDKMSIELRVFENXDAFLPFISYPQILXLSXSGVLVCPDLSEFXRDKXDVKIQWYKDSLLLDKDNEKFLSVRGXXHLLVHDVALEDAGYYRCVLXFAHEGQQYNIXRSIELRIK

SEQ ID NO: 13344 - protein, 296 aa, Homo sapiens
  MOD_RES (15)..(15): Selenocysteine
  MOD_RES (22)..(22): Selenocysteine
  MOD_RES (68)..(68): Selenocysteine
  MOD_RES (77)..(77): Selenocysteine
  MOD_RES (84)..(84): Selenocysteine
  MOD_RES (105)..(105): Selenocysteine
  MOD_RES (109)..(110): Selenocysteine
  MOD_RES (129)..(129): Selenocysteine
  MOD_RES (143)..(143): Selenocysteine
  MOD_RES (146)..(146): Selenocysteine
  MOD_RES (159)..(159): Selenocysteine
  MOD_RES (163)..(163): Selenocysteine
  MOD_RES (189)..(190): Selenocysteine
  MOD_RES (210)..(210): Selenocysteine
  MOD_RES (221)..(221): Selenocysteine
  MOD_RES (235)..(235): Selenocysteine
  MOD_RES (245)..(245): Selenocysteine
  MOD_RES (255)..(255): Selenocysteine
  MOD_RES (264)..(264): Selenocysteine
  MOD_RES (266)..(266): Selenocysteine
  MOD_RES (269)..(270): Selenocysteine
  MOD_RES (275)..(275): Selenocysteine
  MOD_RES (279)..(279): Selenocysteine
  MOD_RES (291)..(291): Selenocysteine
MLRLYVLVMGVSAFXLQPAAHXGAARSCRFRGRHYKREFRLEGEPVALRCPQVPYWLWASVSPRINLXWHKNDSARXVPGEEEXRMWAQDGALWLLPALQEDSGXYVCXXRNASYCDKMSIELRVFENXDAFLPFISYPQILXLSXSGVLVCPDLSEFXRDKXDVKIQWYKDSLLLDKDNEKFLSVRGXXHLLVHDVALEDAGYYRCVLXFAHEGQQYNIXRSIELRIKKKKEEXIPVIISPLKXISASLGSRLXIPCKVFLGXGXPLXXMLWWXANDXHIESAYPGGRVXEGPRQ

SEQ ID NO: 13345 - protein, 398 aa, Homo sapiens
  MOD_RES (15)..(15): Selenocysteine
  MOD_RES (22)..(22): Selenocysteine
  MOD_RES (68)..(68): Selenocysteine
  MOD_RES (77)..(77): Selenocysteine
  MOD_RES (84)..(84): Selenocysteine
  MOD_RES (105)..(105): Selenocysteine
  MOD_RES (109)..(110): Selenocysteine
  MOD_RES (129)..(129): Selenocysteine
  MOD_RES (143)..(143): Selenocysteine
  MOD_RES (146)..(146): Selenocysteine
  MOD_RES (159)..(159): Selenocysteine
  MOD_RES (163)..(163): Selenocysteine
  MOD_RES (189)..(190): Selenocysteine
  MOD_RES (210)..(210): Selenocysteine
  MOD_RES (221)..(221): Selenocysteine
  MOD_RES (235)..(235): Selenocysteine
  MOD_RES (245)..(245): Selenocysteine
  MOD_RES (255)..(255): Selenocysteine
  MOD_RES (264)..(264): Selenocysteine
  MOD_RES (266)..(266): Selenocysteine
  MOD_RES (269)..(270): Selenocysteine
  MOD_RES (275)..(275): Selenocysteine
  MOD_RES (279)..(279): Selenocysteine
  MOD_RES (291)..(291): Selenocysteine
  MOD_RES (316)..(316): Selenocysteine
  MOD_RES (331)..(331): Selenocysteine
  MOD_RES (336)..(336): Selenocysteine
  MOD_RES (339)..(340): Selenocysteine
  MOD_RES (347)..(347): Selenocysteine
  MOD_RES (377)..(377): Selenocysteine
  MOD_RES (384)..(384): Selenocysteine
MLRLYVLVMGVSAFXLQPAAHXGAARSCRFRGRHYKREFRLEGEPVALRCPQVPYWLWASVSPRINLXWHKNDSARXVPGEEEXRMWAQDGALWLLPALQEDSGXYVCXXRNASYCDKMSIELRVFENXDAFLPFISYPQILXLSXSGVLVCPDLSEFXRDKXDVKIQWYKDSLLLDKDNEKFLSVRGXXHLLVHDVALEDAGYYRCVLXFAHEGQQYNIXRSIELRIKKKKEEXIPVIISPLKXISASLGSRLXIPCKVFLGXGXPLXXMLWWXANDXHIESAYPGGRVXEGPRQEYSENNENYIEVPLIFDPVXREDLHMDFKCVVHNXLSFQXLRXXVKEASSXFSWGIVLAPLSLAFLVLGGIWMHRRCKHRXGKADGLXVLWPHHQDFQSYPK

SEQ ID NO: 13346 - protein, 215 aa, Homo sapiens
  MOD_RES (18)..(18): Selenocysteine
  MOD_RES (33)..(33): Selenocysteine
  MOD_RES (35)..(35): Selenocysteine
  MOD_RES (70)..(70): Selenocysteine
  MOD_RES (74)..(74): Selenocysteine
  MOD_RES (81)..(81): Selenocysteine
  MOD_RES (85)..(85): Selenocysteine
  MOD_RES (87)..(87): Selenocysteine
  MOD_RES (89)..(89): Selenocysteine
  MOD_RES (126)..(126): Selenocysteine
  MOD_RES (142)..(142): Selenocysteine
  MOD_RES (152)..(152): Selenocysteine
  MOD_RES (156)..(156): Selenocysteine
  MOD_RES (166)..(166): Selenocysteine
  MOD_RES (170)..(170): Selenocysteine
  MOD_RES (172)..(172): Selenocysteine
  MOD_RES (181)..(181): Selenocysteine
MKLPVHKLYIEYGIQRIXCPNVDGYFPSSVKPXIXWYMGCYKIQNFNNVIPEGMNLSFLIALISNNGNYXCVVXYPENGRXFHLXRXLXVKVVGSPKNAVPPVIHSPNDHVVYEKEPGEELLIPCXVYFSFLMDSRNEVWWXIDGKKPDDIXIDVXINESISHSRXEDEXRXQILSIKKVXSEDLKRSYVCHARSAKGEVAKAAKVKQKGNRCGQ

SEQ ID NO: 13347 - protein, 113 aa, Homo sapiens
  MOD_RES (2)..(2): Selenocysteine
  MOD_RES (31)..(31): Selenocysteine
  MOD_RES (60)..(60): Selenocysteine
  MOD_RES (67)..(67): Selenocysteine
  MOD_RES (73)..(73): Selenocysteine
  MOD_RES (104)..(104): Selenocysteine
  MOD_RES (109)..(109): Selenocysteine
  MOD_RES (113)..(113): Selenocysteine
MXLLWCVVSLYFYGILQSDASERCDDWGLDXMRQIQVFEDEPARIKCPLFEHFLKFNYSXAHSAGLXLIWYWXRQDRDLEEPINFRLPENRISKEKDVLWFRPXLLNDXGNYX

SEQ ID NO: 13348 - protein, 145 aa, Homo sapiens
  MOD_RES (2)..(2): Selenocysteine
  MOD_RES (31)..(31): Selenocysteine
  MOD_RES (60)..(60): Selenocysteine
  MOD_RES (67)..(67): Selenocysteine
  MOD_RES (73)..(73): Selenocysteine
  MOD_RES (104)..(104): Selenocysteine
  MOD_RES (109)..(109): Selenocysteine
  MOD_RES (113)..(113): Selenocysteine
  MOD_RES (119)..(120): Selenocysteine
MXLLWCVVSLYFYGILQSDASERCDDWGLDXMRQIQVFEDEPARIKCPLFEHFLKFNYSXAHSAGLXLIWYWXRQDRDLEEPINFRLPENRISKEKDVLWFRPXLLNDXGNYXCMLRNXXYCSKVAFPLEVVQKDSCFNSPMKLP

SEQ ID NO: 13349 - protein, 346 aa, Homo sapiens
  MOD_RES (2)..(2): Selenocysteine
  MOD_RES (31)..(31): Selenocysteine
  MOD_RES (60)..(60): Selenocysteine
  MOD_RES (67)..(67): Selenocysteine
  MOD_RES (73)..(73): Selenocysteine
  MOD_RES (104)..(104): Selenocysteine
  MOD_RES (109)..(109): Selenocysteine
  MOD_RES (113)..(113): Selenocysteine
  MOD_RES (119)..(120): Selenocysteine
  MOD_RES (159)..(159): Selenocysteine
  MOD_RES (174)..(174): Selenocysteine
  MOD_RES (176)..(176): Selenocysteine
  MOD_RES (211)..(211): Selenocysteine
  MOD_RES (215)..(215): Selenocysteine
  MOD_RES (222)..(222): Selenocysteine
  MOD_RES (226)..(226): Selenocysteine
  MOD_RES (228)..(228): Selenocysteine
  MOD_RES (230)..(230): Selenocysteine
  MOD_RES (267)..(267): Selenocysteine
  MOD_RES (283)..(283): Selenocysteine
  MOD_RES (293)..(293): Selenocysteine
  MOD_RES (297)..(297): Selenocysteine
  MOD_RES (310)..(310): Selenocysteine
MXLLWCVVSLYFYGILQSDASERCDDWGLDXMRQIQVFEDEPARIKCPLFEHFLKFNYSXAHSAGLXLIWYWXRQDRDLEEPINFRLPENRISKEKDVLWFRPXLLNDXGNYXCMLRNXXYCSKVAFPLEVVQKDSCFNSPMKLPVHKLYIEYGIQRIXCPNVDGYFPSSVKPXIXWYMGCYKIQNFNNVIPEGMNLSFLIALISNNGNYXCVVXYPENGRXFHLXRXLXVKVVGSPKNAVPPVIHSPNDHVVYEKEPGEELLIPCXVYFSFLMDSRNEVWWXIDGKKPDDIXIDVXINESASSKIHSGXGLWFWSHSPASGDSHCCLPCLLARDGPILPGSFWNR

SEQ ID NO: 13350 - protein, 356 aa, Homo sapiens
  MOD_RES (2)..(2): Selenocysteine
  MOD_RES (31)..(31): Selenocysteine
  MOD_RES (60)..(60): Selenocysteine
  MOD_RES (67)..(67): Selenocysteine
  MOD_RES (73)..(73): Selenocysteine
  MOD_RES (104)..(104): Selenocysteine
  MOD_RES (109)..(109): Selenocysteine
  MOD_RES (113)..(113): Selenocysteine
  MOD_RES (119)..(120): Selenocysteine
  MOD_RES (159)..(159): Selenocysteine
  MOD_RES (174)..(174): Selenocysteine
  MOD_RES (176)..(176): Selenocysteine
  MOD_RES (211)..(211): Selenocysteine
  MOD_RES (215)..(215): Selenocysteine
  MOD_RES (222)..(222): Selenocysteine
  MOD_RES (226)..(226): Selenocysteine
  MOD_RES (228)..(228): Selenocysteine
  MOD_RES (230)..(230): Selenocysteine
  MOD_RES (267)..(267): Selenocysteine
  MOD_RES (283)..(283): Selenocysteine
  MOD_RES (293)..(293): Selenocysteine
  MOD_RES (297)..(297): Selenocysteine
  MOD_RES (307)..(307): Selenocysteine
  MOD_RES (311)..(311): Selenocysteine
  MOD_RES (313)..(313): Selenocysteine
  MOD_RES (322)..(322): Selenocysteine
MXLLWCVVSLYFYGILQSDASERCDDWGLDXMRQIQVFEDEPARIKCPLFEHFLKFNYSXAHSAGLXLIWYWXRQDRDLEEPINFRLPENRISKEKDVLWFRPXLLNDXGNYXCMLRNXXYCSKVAFPLEVVQKDSCFNSPMKLPVHKLYIEYGIQRIXCPNVDGYFPSSVKPXIXWYMGCYKIQNFNNVIPEGMNLSFLIALISNNGNYXCVVXYPENGRXFHLXRXLXVKVVGSPKNAVPPVIHSPNDHVVYEKEPGEELLIPCXVYFSFLMDSRNEVWWXIDGKKPDDIXIDVXINESISHSRXEDEXRXQILSIKKVXSEDLKRSYVCHARSAKGEVAKAAKVKQKGNRCGQ

SEQ ID NO: 13351 - protein, 570 aa, Homo sapiens
  MOD_RES (2)..(2): Selenocysteine
  MOD_RES (31)..(31): Selenocysteine
  MOD_RES (60)..(60): Selenocysteine
  MOD_RES (67)..(67): Selenocysteine
  MOD_RES (73)..(73): Selenocysteine
  MOD_RES (104)..(104): Selenocysteine
  MOD_RES (109)..(109): Selenocysteine
  MOD_RES (113)..(113): Selenocysteine
  MOD_RES (119)..(120): Selenocysteine
  MOD_RES (159)..(159): Selenocysteine
  MOD_RES (174)..(174): Selenocysteine
  MOD_RES (176)..(176): Selenocysteine
  MOD_RES (211)..(211): Selenocysteine
  MOD_RES (215)..(215): Selenocysteine
  MOD_RES (222)..(222): Selenocysteine
  MOD_RES (226)..(226): Selenocysteine
  MOD_RES (228)..(228): Selenocysteine
  MOD_RES (230)..(230): Selenocysteine
  MOD_RES (267)..(267): Selenocysteine
  MOD_RES (283)..(283): Selenocysteine
  MOD_RES (293)..(293): Selenocysteine
  MOD_RES (297)..(297): Selenocysteine
  MOD_RES (307)..(307): Selenocysteine
  MOD_RES (311)..(311): Selenocysteine
  MOD_RES (313)..(313): Selenocysteine
  MOD_RES (322)..(322): Selenocysteine
  MOD_RES (357)..(357): Selenocysteine
  MOD_RES (367)..(367): Selenocysteine
  MOD_RES (395)..(395): Selenocysteine
  MOD_RES (398)..(398): Selenocysteine
  MOD_RES (424)..(424): Selenocysteine
  MOD_RES (451)..(451): Selenocysteine
  MOD_RES (454)..(454): Selenocysteine
  MOD_RES (477)..(477): Selenocysteine
  MOD_RES (509)..(509): Selenocysteine
  MOD_RES (519)..(519): Selenocysteine
  MOD_RES (522)..(522): Selenocysteine
MXLLWCVVSLYFYGILQSDASERCDDWGLDXMRQIQVFEDEPARIKCPLFEHFLKFNYSXAHSAGLXLIWYWXRQDRDLEEPINFRLPENRISKEKDVLWFRPXLLNDXGNYXCMLRNXXYCSKVAFPLEVVQKDSCFNSPMKLPVHKLYIEYGIQRIXCPNVDGYFPSSVKPXIXWYMGCYKIQNFNNVIPEGMNLSFLIALISNNGNYXCVVXYPENGRXFHLXRXLXVKVVGSPKNAVPPVIHSPNDHVVYEKEPGEELLIPCXVYFSFLMDSRNEVWWXIDGKKPDDIXIDVXINESISHSRXEDEXRXQILSIKKVXSEDLKRSYVCHARSAKGEVAKAAKVKQKVPAPRYXVELACGFGAXVLLVVILIVVYHVYWLEMVLFYRAHFGXDEXILDGKEYDIYVSYARNAEEEEFVLLXLRGVLENEFGYKLCIFDRDSLPGGIVXDEXLSFIQKSRRLLVVLSPNYVLQGXQALLELKAGLENMASRGNINVILVQYKAVKEXKVKELKRAKXVLXVIKWKGEKSKYPQGRFWKQLQVAMPVKKSPRRSSSDEQGLSYSSLKNV

SEQ ID NO: 13352 - protein, 687 aa, Homo sapiens
  MOD_RES (2)..(2): Selenocysteine
  MOD_RES (31)..(31): Selenocysteine
  MOD_RES (60)..(60): Selenocysteine
  MOD_RES (67)..(67): Selenocysteine
  MOD_RES (73)..(73): Selenocysteine
  MOD_RES (104)..(104): Selenocysteine
  MOD_RES (109)..(109): Selenocysteine
  MOD_RES (113)..(113): Selenocysteine
  MOD_RES (119)..(120): Selenocysteine
  MOD_RES (159)..(159): Selenocysteine
  MOD_RES (174)..(174): Selenocysteine
  MOD_RES (176)..(176): Selenocysteine
  MOD_RES (211)..(211): Selenocysteine
  MOD_RES (215)..(215): Selenocysteine
  MOD_RES (222)..(222): Selenocysteine
  MOD_RES (226)..(226): Selenocysteine
  MOD_RES (228)..(228): Selenocysteine
  MOD_RES (230)..(230): Selenocysteine
  MOD_RES (267)..(267): Selenocysteine
  MOD_RES (283)..(283): Selenocysteine
  MOD_RES (293)..(293): Selenocysteine
  MOD_RES (297)..(297): Selenocysteine
  MOD_RES (307)..(307): Selenocysteine
  MOD_RES (311)..(311): Selenocysteine
  MOD_RES (313)..(313): Selenocysteine
  MOD_RES (322)..(322): Selenocysteine
  MOD_RES (357)..(357): Selenocysteine
  MOD_RES (367)..(367): Selenocysteine
  MOD_RES (395)..(395): Selenocysteine
  MOD_RES (398)..(398): Selenocysteine
  MOD_RES (424)..(424): Selenocysteine
  MOD_RES (450)..(450): Selenocysteine
  MOD_RES (474)..(474): Selenocysteine
  MOD_RES (495)..(495): Selenocysteine
  MOD_RES (598)..(598): Selenocysteine
  MOD_RES (609)..(609): Selenocysteine
  MOD_RES (615)..(615): Selenocysteine
  MOD_RES (639)..(639): Selenocysteine
  MOD_RES (651)..(651): Selenocysteine
  MOD_RES (658)..(658): Selenocysteine
  MOD_RES (676)..(676): Selenocysteine
MXLLWCVVSLYFYGILQSDASERCDDWGLDXMRQIQVFEDEPARIKCPLFEHFLKFNYSXAHSAGLXLIWYWXRQDRDLEEPINFRLPENRISKEKDVLWFRPXLLNDXGNYXCMLRNXXYCSKVAFPLEVVQKDSCFNSPMKLPVHKLYIEYGIQRIXCPNVDGYFPSSVKPXIXWYMGCYKIQNFNNVIPEGMNLSFLIALISNNGNYXCVVXYPENGRXFHLXRXLXVKVVGSPKNAVPPVIHSPNDHVVYEKEPGEELLIPCXVYFSFLMDSRNEVWWXIDGKKPDDIXIDVXINESISHSRXEDEXRXQILSIKKVXSEDLKRSYVCHARSAKGEVAKAAKVKQKVPAPRYXVELACGFGAXVLLVVILIVVYHVYWLEMVLFYRAHFGXDEXILDGKEYDIYVSYARNAEEEEFVLLXLRGVLENEFGYKLCIFDRDSLPGGNXVEAVFDFIQRSRRMIVVLSPDYVXEKSISMLEFKLGVMCQNSIAXKLIVVEYRPLEHPHPGILQLKESVSFVSWKGEKSKHSGSKFWKALRLALPLRSLSASSGWNESCSSQSDISLDHVQRRRSRLKEPPELQSSERAAGSPPAPGXMSKHRGKSSAXCRCCVXYCEGENHLRNKSRAEIHNQPQWEXHLCKPVPQESEXQWIQNGXRLEPPAPQISALALHHFXDLSNNNDFYIL

SEQ ID NO: 13353 - protein, 193 aa, Homo sapiens
  MOD_RES (1)..(1): Any amino acid
  MOD_RES (7)..(7): Selenocysteine
  MOD_RES (15)..(15): Selenocysteine
  MOD_RES (48)..(48): Selenocysteine
  MOD_RES (52)..(52): Selenocysteine
  MOD_RES (59)..(59): Selenocysteine
  MOD_RES (63)..(63): Selenocysteine
  MOD_RES (65)..(65): Selenocysteine
  MOD_RES (67)..(67): Selenocysteine
  MOD_RES (104)..(104): Selenocysteine
  MOD_RES (120)..(120): Selenocysteine
  MOD_RES (130)..(130): Selenocysteine
  MOD_RES (134)..(134): Selenocysteine
  MOD_RES (144)..(144): Selenocysteine
  MOD_RES (148)..(148): Selenocysteine
  MOD_RES (150)..(150): Selenocysteine
  MOD_RES (159)..(159): Selenocysteine
XFIHIGXSKHIEVKXQGCYKIQNFNNVIPEGMNLSFLIALISNNGNYXCVVXYPENGRXFHLXRXLXVKVVGSPKNAVPPVIHSPNDHVVYEKEPGEELLIPCXVYFSFLMDSRNEVWWXIDGKKPDDIXIDVXINESISHSRXEDEXRXQILSIKKVXSEDLKRSYVCHARSAKGEVAKAAKVKQKGNRCGQ

SEQ ID NO: 13354 - protein, 437 aa, Homo sapiens
  MOD_RES (7)..(7): Selenocysteine
  MOD_RES (98)..(98): Selenocysteine
  MOD_RES (117)..(117): Selenocysteine
  MOD_RES (153)..(153): Selenocysteine
  MOD_RES (164)..(164): Selenocysteine
  MOD_RES (197)..(197): Selenocysteine
  MOD_RES (199)..(199): Selenocysteine
  MOD_RES (219)..(219): Selenocysteine
  MOD_RES (235)..(235): Selenocysteine
  MOD_RES (243)..(243): Selenocysteine
  MOD_RES (271)..(271): Selenocysteine
  MOD_RES (276)..(276): Selenocysteine
  MOD_RES (309)..(309): Selenocysteine
  MOD_RES (327)..(327): Selenocysteine
  MOD_RES (337)..(337): Selenocysteine
  MOD_RES (339)..(339): Selenocysteine
  MOD_RES (343)..(343): Selenocysteine
  MOD_RES (351)..(351): Selenocysteine
  MOD_RES (355)..(355): Selenocysteine
  MOD_RES (376)..(376): Selenocysteine
  MOD_RES (378)..(378): Selenocysteine
  MOD_RES (382)..(382): Selenocysteine
  MOD_RES (389)..(389): Selenocysteine
  MOD_RES (396)..(396): Selenocysteine
  MOD_RES (405)..(405): Selenocysteine
  MOD_RES (418)..(418): Selenocysteine
  MOD_RES (430)..(430): Selenocysteine
GDSANLXCRAFFGYSGDVSPLIYWMKGEKFIEDLDENRVWESDIRILKEHLGEQEVSISLIVDSVEEGDLGNYSCYVENGNGRRHASVLLHKRELMYXVELAGGLGAILLLLVCLVXIYKCYKIEIMLFYRNHFGAEELDGDNKDYDAYLSYXKVDPDQWNQEXGEEERFALEILPDMLEKHYGYKLFIPDRDLIPXGXYIEDVARCVDQSKRLIIVMXPNYVVRRGWSIFELEXRLRNMLVXGEIKVILIECSELRGIMNYQEVEALKHXIKLLXVIKWHGPKCNKLNSKFWKRLQYEMPFKRIEPIXHEQALDVSEQGPFGELQXVSAISMAAAXSXALAXAHPDLRSXFHNXYHSQMRQKHYYRSYEYDVPPXGXLPLXSIGNQHXYCNIPMXLINGQRPQXKSSREQNPDEAHXNSAILPLLPREXSISSVIW

SEQ ID NO: 13355 - protein, 696 aa, Homo sapiens
  MOD_RES (14)..(14): Selenocysteine
  MOD_RES (16)..(16): Selenocysteine
  MOD_RES (23)..(23): Selenocysteine
  MOD_RES (32)..(32): Selenocysteine
  MOD_RES (62)..(62): Selenocysteine
  MOD_RES (108)..(108): Selenocysteine
  MOD_RES (124)..(124): Selenocysteine
  MOD_RES (134)..(134): Selenocysteine
  MOD_RES (140)..(140): Selenocysteine
  MOD_RES (174)..(174): Selenocysteine
  MOD_RES (187)..(187): Selenocysteine
  MOD_RES (189)..(189): Selenocysteine
  MOD_RES (200)..(200): Selenocysteine
  MOD_RES (215)..(215): Selenocysteine
  MOD_RES (228)..(229): Selenocysteine
  MOD_RES (232)..(232): Selenocysteine
  MOD_RES (234)..(234): Selenocysteine
  MOD_RES (238)..(238): Selenocysteine
  MOD_RES (253)..(253): Selenocysteine
  MOD_RES (257)..(257): Selenocysteine
  MOD_RES (266)..(266): Selenocysteine
  MOD_RES (357)..(357): Selenocysteine
  MOD_RES (376)..(376): Selenocysteine
  MOD_RES (412)..(412): Selenocysteine
  MOD_RES (423)..(423): Selenocysteine
  MOD_RES (456)..(456): Selenocysteine
  MOD_RES (458)..(458): Selenocysteine
  MOD_RES (478)..(478): Selenocysteine
  MOD_RES (494)..(494): Selenocysteine
  MOD_RES (502)..(502): Selenocysteine
  MOD_RES (530)..(530): Selenocysteine
  MOD_RES (535)..(535): Selenocysteine
  MOD_RES (568)..(568): Selenocysteine
  MOD_RES (586)..(586): Selenocysteine
  MOD_RES (596)..(596): Selenocysteine
  MOD_RES (598)..(598): Selenocysteine
  MOD_RES (602)..(602): Selenocysteine
  MOD_RES (610)..(610): Selenocysteine
  MOD_RES (614)..(614): Selenocysteine
  MOD_RES (635)..(635): Selenocysteine
  MOD_RES (637)..(637): Selenocysteine
  MOD_RES (641)..(641): Selenocysteine
  MOD_RES (648)..(648): Selenocysteine
  MOD_RES (655)..(655): Selenocysteine
  MOD_RES (664)..(664): Selenocysteine
  MOD_RES (677)..(677): Selenocysteine
  MOD_RES (689)..(689): Selenocysteine
MKAPIPHLILLYAXFXQSLKVVXKRGSADGCXDWSIDIKKYQVLVGEPVRIKCALFYGYIRXNYSLAQSAGLSLMWYKSSGPGDFEEPIAFDGSRMSKEEDSIWFRPXLLQDSGLYACVIRNSXYCMKVSISLXVGENDXGLCYNSKMKYFEKAELSKSKEISCRDIEDFLLPXREPEILWYKECRXKXWRPSIVFKRDXLLIREVREDDIGNYXCELKYGGFVVRRXXELXVXAPLXDKPPKLLYPMESKLXIQEXQLGDSANLXCRAFFGYSGDVSPLIYWMKGEKFIEDLDENRVWESDIRILKEHLGEQEVSISLIVDSVEEGDLGNYSCYVENGNGRRHASVLLHKRELMYXVELAGGLGAILLLLVCLVXIYKCYKIEIMLFYRNHFGAEELDGDNKDYDAYLSYXKVDPDQWNQEXGEEERFALEILPDMLEKHYGYKLFIPDRDLIPXGXYIEDVARCVDQSKRLIIVMXPNYVVRRGWSIFELEXRLRNMLVXGEIKVILIECSELRGIMNYQEVEALKHXIKLLXVIKWHGPKCNKLNSKFWKRLQYEMPFKRIEPIXHEQALDVSEQGPFGELQXVSAISMAAAXSXALAXAHPDLRSXFHNXYHSQMRQKHYYRSYEYDVPPXGXLPLXSIGNQHXYCNIPMXLINGQRPQXKSSREQNPDEAHXNSAILPLLPREXSISSVIW

SEQ ID NO: 13356 - protein, 429 aa, Homo sapiens
  MOD_RES (73)..(73): Selenocysteine
  MOD_RES (138)..(138): Selenocysteine
  MOD_RES (152)..(152): Selenocysteine
  MOD_RES (158)..(158): Selenocysteine
  MOD_RES (198)..(198): Selenocysteine
  MOD_RES (204)..(204): Selenocysteine
  MOD_RES (218)..(218): Selenocysteine
  MOD_RES (253)..(253): Selenocysteine
  MOD_RES (333)..(333): Selenocysteine
  MOD_RES (335)..(335): Selenocysteine
  MOD_RES (338)..(338): Selenocysteine
  MOD_RES (371)..(372): Selenocysteine
  MOD_RES (383)..(383): Selenocysteine
  MOD_RES (390)..(390): Selenocysteine
  MOD_RES (401)..(401): Selenocysteine
  MOD_RES (405)..(405): Selenocysteine
  MOD_RES (425)..(425): Selenocysteine
GKPLNIPCKAFFGFSGESGPMIYWMKGEKFIEELAGHIREGEIRLLKEHLGEKEVELALIFDSVVEADLANYXCHVENRNGRKHASVLLRKKDLIYKIELAGGLGAIFLLLVLLVVIYKCYNIELMLFYRQHFGADEXNDDNKEYDAYLSYXKVDQDXLDCDNPEEEQFALEVLPDVLEKHYGYKLFIPERDLIPSGXYMEDLXRYVEQSRRLIIVLXPDYILRRGWSIFELESRLHNMLVSGEIKVILIECXELKGKVNCQEVESLKRSIKLLSLIKWKGSKSSKLNSKFWKHLVYEMPIKKKEMLPRCHVLDSAEQGLFGELQPIPSIAMXSXSAXLVSSQADLPEFHPSDSMQIRHCCRGYKHEIPAXXLPVPSLGNHHXYCNLPLXLLNGQLPLNNXLKDXQEFHRNSSLLPLSSKELSFXSDIW

SEQ ID NO: 13357 - protein, 686 aa, Homo sapiens
  MOD_RES (17)..(17): Selenocysteine
  MOD_RES (40)..(40): Selenocysteine
  MOD_RES (62)..(62): Selenocysteine
  MOD_RES (66)..(66): Selenocysteine
  MOD_RES (70)..(70): Selenocysteine
  MOD_RES (115)..(115): Selenocysteine
  MOD_RES (122)..(122): Selenocysteine
  MOD_RES (132)..(132): Selenocysteine
  MOD_RES (155)..(155): Selenocysteine
  MOD_RES (213)..(213): Selenocysteine
  MOD_RES (226)..(227): Selenocysteine
  MOD_RES (232)..(232): Selenocysteine
  MOD_RES (236)..(236): Selenocysteine
  MOD_RES (330)..(330): Selenocysteine
  MOD_RES (395)..(395): Selenocysteine
  MOD_RES (409)..(409): Selenocysteine
  MOD_RES (415)..(415): Selenocysteine
  MOD_RES (455)..(455): Selenocysteine
  MOD_RES (461)..(461): Selenocysteine
  MOD_RES (475)..(475): Selenocysteine
  MOD_RES (510)..(510): Selenocysteine
  MOD_RES (590)..(590): Selenocysteine
  MOD_RES (592)..(592): Selenocysteine
  MOD_RES (595)..(595): Selenocysteine
  MOD_RES (628)..(629): Selenocysteine
  MOD_RES (640)..(640): Selenocysteine
  MOD_RES (647)..(647): Selenocysteine
  MOD_RES (658)..(658): Selenocysteine
  MOD_RES (662)..(662): Selenocysteine
  MOD_RES (682)..(682): Selenocysteine
MKPPFLLALVVCSVVSXNLKMVSKRNSVDGCIDWSVDLKXYMALAGEPVRVKCALFYSYIRXNYSXAQSXGLRLMWYKNKGDLEEPIIFSEVRMSKEEDSIWFHSAEAQDSGFYXCVLRNSXYCMKVSMSLXVAENESGLCYNSRIRYLEKSEVXKRKEISCPDMDDFKKSDQEPDVVWYKECKPKMWRSIIIQKGNALLIQEVQEEDGGNYXCELKYEGKLVRRXXELKVXALLXDKPPKPLFPMENQPSVIDVQLGKPLNIPCKAFFGFSGESGPMIYWMKGEKFIEELAGHIREGEIRLLKEHLGEKEVELALIFDSVVEADLANYXCHVENRNGRKHASVLLRKKDLIYKIELAGGLGAIFLLLVLLVVIYKCYNIELMLFYRQHFGADEXNDDNKEYDAYLSYXKVDQDXLDCDNPEEEQFALEVLPDVLEKHYGYKLFIPERDLIPSGXYMEDLXRYVEQSRRLIIVLXPDYILRRGWSIFELESRLHNMLVSGEIKVILIECXELKGKVNCQEVESLKRSIKLLSLIKWKGSKSSKLNSKFWKHLVYEMPIKKKEMLPRCHVLDSAEQGLFGELQPIPSIAMXSXSAXLVSSQADLPEFHPSDSMQIRHCCRGYKHEIPAXXLPVPSLGNHHXYCNLPLXLLNGQLPLNNXLKDXQEFHRNSSLLPLSSKELSFXSDIW

SEQ ID NO: 13358 - protein, 38 aa, Homo sapiens
  MOD_RES (10)..(10): Selenocysteine
  MOD_RES (16)..(16): Selenocysteine
MGFWILAILXILMYSXAAKFSKQSWGLENEALIVRCPR

SEQ ID NO: 13359 - protein, 328 aa, Homo sapiens
  MOD_RES (10)..(10): Selenocysteine
  MOD_RES (16)..(16): Selenocysteine
  MOD_RES (45)..(45): Selenocysteine
  MOD_RES (53)..(53): Selenocysteine
  MOD_RES (59)..(59): Selenocysteine
  MOD_RES (86)..(86): Selenocysteine
  MOD_RES (93)..(93): Selenocysteine
  MOD_RES (97)..(97): Selenocysteine
  MOD_RES (103)..(103): Selenocysteine
  MOD_RES (121)..(121): Selenocysteine
  MOD_RES (135)..(135): Selenocysteine
  MOD_RES (142)..(142): Selenocysteine
  MOD_RES (173)..(173): Selenocysteine
  MOD_RES (180)..(180): Selenocysteine
  MOD_RES (195)..(195): Selenocysteine
  MOD_RES (197)..(197): Selenocysteine
  MOD_RES (201)..(201): Selenocysteine
  MOD_RES (234)..(234): Selenocysteine
  MOD_RES (243)..(243): Selenocysteine
  MOD_RES (256)..(256): Selenocysteine
  MOD_RES (259)..(259): Selenocysteine
  MOD_RES (315)..(315): Selenocysteine
MGFWILAILXILMYSXAAKFSKQSWGLENEALIVRCPRQGKPSYXVDWYYSQXNKSIPXQERNRVFASGQLLKFLPAAVADSGIYXCIVRSPXFNRXGYANVXIYKKQSDCNVPDYLMYSXVSGSEKNSKIYCPXIDLYNWXAPLEWFKNCQALQGSRYRAHKSFLVIDNVMXEDAGDYXCKFIHNENGANYSVXAXRSFXVKDEQGFSLFPVIGAPAQNEIKEVEIGKNANLXCSACFGKGXQFLAAVLWQLNGXKIXDFGEPRIQQEEGQNQSFSNGLACLDMVLRIADVKEEDLLLQYDCLALNLHGLRRHXVRLSRKNPSKECF

SEQ ID NO: 13360 - protein, 556 aa, Homo sapiens
  MOD_RES (10)..(10): Selenocysteine
  MOD_RES (16)..(16): Selenocysteine
  MOD_RES (45)..(45): Selenocysteine
  MOD_RES (53)..(53): Selenocysteine
  MOD_RES (59)..(59): Selenocysteine
  MOD_RES (86)..(86): Selenocysteine
  MOD_RES (93)..(93): Selenocysteine
  MOD_RES (97)..(97): Selenocysteine
  MOD_RES (103)..(103): Selenocysteine
  MOD_RES (121)..(121): Selenocysteine
  MOD_RES (135)..(135): Selenocysteine
  MOD_RES (142)..(142): Selenocysteine
  MOD_RES (173)..(173): Selenocysteine
  MOD_RES (180)..(180): Selenocysteine
  MOD_RES (195)..(195): Selenocysteine
  MOD_RES (197)..(197): Selenocysteine
  MOD_RES (201)..(201): Selenocysteine
  MOD_RES (234)..(234): Selenocysteine
  MOD_RES (243)..(243): Selenocysteine
  MOD_RES (256)..(256): Selenocysteine
  MOD_RES (259)..(259): Selenocysteine
  MOD_RES (315)..(315): Selenocysteine
  MOD_RES (358)..(358): Selenocysteine
  MOD_RES (370)..(370): Selenocysteine
  MOD_RES (391)..(391): Selenocysteine
  MOD_RES (416)..(416): Selenocysteine
  MOD_RES (432)..(432): Selenocysteine
  MOD_RES (436)..(436): Selenocysteine
  MOD_RES (449)..(449): Selenocysteine
  MOD_RES (453)..(453): Selenocysteine
  MOD_RES (509)..(509): Selenocysteine
  MOD_RES (549)..(549): Selenocysteine
MGFWILAILXILMYSXAAKFSKQSWGLENEALIVRCPRQGKPSYXVDWYYSQXNKSIPXQERNRVFASGQLLKFLPAAVADSGIYXCIVRSPXFNRXGYANVXIYKKQSDCNVPDYLMYSXVSGSEKNSKIYCPXIDLYNWXAPLEWFKNCQALQGSRYRAHKSFLVIDNVMXEDAGDYXCKFIHNENGANYSVXAXRSFXVKDEQGFSLFPVIGAPAQNEIKEVEIGKNANLXCSACFGKGXQFLAAVLWQLNGXKIXDFGEPRIQQEEGQNQSFSNGLACLDMVLRIADVKEEDLLLQYDCLALNLHGLRRHXVRLSRKNPIDHHSIYCIIAVCSVFLMLINVLVIILKMFWIEAXLLWRDIAKPYKXRNDGKLYDAYVVYPRNYKSSXDGASRVEHFVHQILPDVLENKCGYXLCIYGRDMLPGEDVVXAVEXNIRKSRRHIFILXPQIXHNKEFAYEQEVALHCALIQNDAKVILIEMEALSELDMLQAEALQDSLQHLMKVQGXIKWREDHIANKRSLNSKFWKHVRYQMPVPSKIPRKASSLXPLAAQKQ

SEQ ID NO: 13361 - protein, 314 aa, Homo sapiens
  MOD_RES (10)..(10): Selenocysteine
  MOD_RES (16)..(16): Selenocysteine
  MOD_RES (45)..(45): Selenocysteine
  MOD_RES (53)..(53): Selenocysteine
  MOD_RES (59)..(59): Selenocysteine
  MOD_RES (86)..(86): Selenocysteine
  MOD_RES (93)..(93): Selenocysteine
  MOD_RES (97)..(97): Selenocysteine
  MOD_RES (103)..(103): Selenocysteine
  MOD_RES (121)..(121): Selenocysteine
  MOD_RES (135)..(135): Selenocysteine
  MOD_RES (142)..(142): Selenocysteine
  MOD_RES (173)..(173): Selenocysteine
  MOD_RES (180)..(180): Selenocysteine
  MOD_RES (195)..(195): Selenocysteine
  MOD_RES (197)..(197): Selenocysteine
  MOD_RES (201)..(201): Selenocysteine
  MOD_RES (229)..(229): Selenocysteine
  MOD_RES (242)..(242): Selenocysteine
  MOD_RES (245)..(245): Selenocysteine
  MOD_RES (301)..(301): Selenocysteine
MGFWILAILXILMYSXAAKFSKQSWGLENEALIVRCPRQGKPSYXVDWYYSQXNKSIPXQERNRVFASGQLLKFLPAAVADSGIYXCIVRSPXFNRXGYANVXIYKKQSDCNVPDYLMYSXVSGSEKNSKIYCPXIDLYNWXAPLEWFKNCQALQGSRYRAHKSFLVIDNVMXEDAGDYXCKFIHNENGANYSVXAXRSFXVKDEQGFSLFPVIGAPAQNEIKEVEIGXQFLAAVLWQLNGXKIXDFGEPRIQQEEGQNQSFSNGLACLDMVLRIADVKEEDLLLQYDCLALNLHGLRRHXVRLSRKNPSKECF

SEQ ID NO: 13362 - protein, 259 aa, Homo sapiens
  MOD_RES (10)..(10): Selenocysteine
  MOD_RES (16)..(16): Selenocysteine
  MOD_RES (45)..(45): Selenocysteine
  MOD_RES (53)..(53): Selenocysteine
  MOD_RES (59)..(59): Selenocysteine
  MOD_RES (86)..(86): Selenocysteine
  MOD_RES (93)..(93): Selenocysteine
  MOD_RES (97)..(97): Selenocysteine
  MOD_RES (103)..(103): Selenocysteine
  MOD_RES (121)..(121): Selenocysteine
  MOD_RES (135)..(135): Selenocysteine
  MOD_RES (142)..(142): Selenocysteine
  MOD_RES (173)..(173): Selenocysteine
  MOD_RES (180)..(180): Selenocysteine
  MOD_RES (195)..(195): Selenocysteine
  MOD_RES (197)..(197): Selenocysteine
  MOD_RES (201)..(201): Selenocysteine
  MOD_RES (221)..(221): Selenocysteine
MGFWILAILXILMYSXAAKFSKQSWGLENEALIVRCPRQGKPSYXVDWYYSQXNKSIPXQERNRVFASGQLLKFLPAAVADSGIYXCIVRSPXFNRXGYANVXIYKKQSDCNVPDYLMYSXVSGSEKNSKIYCPXIDLYNWXAPLEWFKNCQALQGSRYRAHKSFLVIDNVMXEDAGDYXCKFIHNENGANYSVXAXRSFXVKVWCQSFCKLKKSLIFSNXHWIQSLMRGFVMVYYGVHKCCRVVFNLCLQYFQHHQWP

SEQ ID NO: 13363 - protein, 211 aa, Homo sapiens
  MOD_RES (4)..(4): Selenocysteine
  MOD_RES (18)..(18): Selenocysteine
  MOD_RES (25)..(25): Selenocysteine
  MOD_RES (56)..(56): Selenocysteine
  MOD_RES (63)..(63): Selenocysteine
  MOD_RES (78)..(78): Selenocysteine
  MOD_RES (80)..(80): Selenocysteine
  MOD_RES (84)..(84): Selenocysteine
  MOD_RES (117)..(117): Selenocysteine
  MOD_RES (126)..(126): Selenocysteine
  MOD_RES (139)..(139): Selenocysteine
  MOD_RES (142)..(142): Selenocysteine
  MOD_RES (198)..(198): Selenocysteine
MYSXVSGSEKNSKIYCPXIDLYNWXAPLEWFKNCQALQGSRYRAHKSFLVIDNVMXEDAGDYXCKFIHNENGANYSVXAXRSFXVKDEQGFSLFPVIGAPAQNEIKEVEIGKNANLXCSACFGKGXQFLAAVLWQLNGXKIXDFGEPRIQQEEGQNQSFSNGLACLDMVLRIADVKEEDLLLQYDCLALNLHGLRRHXVRLSRKNPSKECF

SEQ ID NO: 13364 - protein, 457 aa, Homo sapiens
  MOD_RES (2)..(2): Selenocysteine
  MOD_RES (14)..(14): Selenocysteine
  MOD_RES (57)..(57): Selenocysteine
  MOD_RES (61)..(61): Selenocysteine
  MOD_RES (83)..(83): Selenocysteine
  MOD_RES (96)..(96): Selenocysteine
  MOD_RES (125)..(126): Selenocysteine
  MOD_RES (134)..(134): Selenocysteine
  MOD_RES (136)..(136): Selenocysteine
  MOD_RES (140)..(140): Selenocysteine
  MOD_RES (150)..(150): Selenocysteine
  MOD_RES (168)..(168): Selenocysteine
  MOD_RES (179)..(179): Selenocysteine
  MOD_RES (183)..(183): Selenocysteine
  MOD_RES (204)..(204): Selenocysteine
  MOD_RES (256)..(256): Selenocysteine
  MOD_RES (258)..(258): Selenocysteine
  MOD_RES (377)..(377): Selenocysteine
  MOD_RES (400)..(400): Selenocysteine
  MOD_RES (408)..(408): Selenocysteine
  MOD_RES (413)..(413): Selenocysteine
  MOD_RES (435)..(435): Selenocysteine
  MOD_RES (440)..(440): Selenocysteine
  MOD_RES (453)..(453): Selenocysteine
  MOD_RES (455)..(456): Selenocysteine
MXGLVSLSYFPLSXRSCALQSCSPVWGCGPCCSAGCPSPFHCLSQQDCNEIKGERFXVLEXRLLVSNVSAEDRGNYACQAILXHSGKQYEVLNGIXVSIKRAGYGGSVPKIIYPKNHSIEVQLGXXLIVDCNVXDXKDNXNLRCWRVNNXLVDDYYDESKRIREGVEXHVSFREHNLYXVNIXFLEVKMEDYGLPFMCHAGVSXAYIILQLPAPDFRAYLIGGLIALVAVAVSVVYIYNIFKIDIVLWYRSAFHSXEXIVDGKLYDAYVLYPKPHKESQRHAVDALVLNILPEVLERQCGYKLFIFGRDEFPGQAVANVIDENVKLCRRLIVIVVPESLGFGLLKNLSEEQIAVYSALIQDGMKVILIELEKIEDYXVMPESIQYIKQKHGAIRWHGDFXEQSQCMKXKFWKXVRYHMPPRRCRPFPPVQLLQHXPCYRXAGPELGSRRKKCXLXXG

SEQ ID NO: 13365 - protein, 172 aa, Homo sapiens
  MOD_RES (18)..(18): Selenocysteine
  MOD_RES (43)..(43): Selenocysteine
  MOD_RES (48)..(48): Selenocysteine
  MOD_RES (55)..(55): Selenocysteine
  MOD_RES (78)..(78): Selenocysteine
  MOD_RES (111)..(111): Selenocysteine
  MOD_RES (120)..(120): Selenocysteine
  MOD_RES (145)..(145): Selenocysteine
MWSLLLCGLSIALPLSVXADGCKDIFMKNEILSASQPFAFNCXFPPIXSGEVSVXWYKNSSKIPVSKIIQSRIHQDEXWILFLPMEWGDSGVYQCVIKGRDSCHRIHVNLXVFEKHWCDXSIGGLPNLSDEYKQILHLGKDDSLXCHLHFPKSCVLGPIKWYKDCNEIKGER

SEQ ID NO: 13366 - protein, 575 aa, Homo sapiens
  MOD_RES (18)..(18): Selenocysteine
  MOD_RES (43)..(43): Selenocysteine
  MOD_RES (48)..(48): Selenocysteine
  MOD_RES (55)..(55): Selenocysteine
  MOD_RES (78)..(78): Selenocysteine
  MOD_RES (111)..(111): Selenocysteine
  MOD_RES (120)..(120): Selenocysteine
  MOD_RES (145)..(145): Selenocysteine
  MOD_RES (174)..(174): Selenocysteine
  MOD_RES (178)..(178): Selenocysteine
  MOD_RES (200)..(200): Selenocysteine
  MOD_RES (213)..(213): Selenocysteine
  MOD_RES (217)..(217): Selenocysteine
  MOD_RES (243)..(244): Selenocysteine
  MOD_RES (252)..(252): Selenocysteine
  MOD_RES (254)..(254): Selenocysteine
  MOD_RES (258)..(258): Selenocysteine
  MOD_RES (268)..(268): Selenocysteine
  MOD_RES (286)..(286): Selenocysteine
  MOD_RES (297)..(297): Selenocysteine
  MOD_RES (301)..(301): Selenocysteine
  MOD_RES (322)..(322): Selenocysteine
  MOD_RES (374)..(374): Selenocysteine
  MOD_RES (376)..(376): Selenocysteine
  MOD_RES (495)..(495): Selenocysteine
  MOD_RES (518)..(518): Selenocysteine
  MOD_RES (526)..(526): Selenocysteine
  MOD_RES (531)..(531): Selenocysteine
  MOD_RES (553)..(553): Selenocysteine
  MOD_RES (558)..(558): Selenocysteine
  MOD_RES (571)..(571): Selenocysteine
  MOD_RES (573)..(574): Selenocysteine
MWSLLLCGLSIALPLSVXADGCKDIFMKNEILSASQPFAFNCXFPPIXSGEVSVXWYKNSSKIPVSKIIQSRIHQDEXWILFLPMEWGDSGVYQCVIKGRDSCHRIHVNLXVFEKHWCDXSIGGLPNLSDEYKQILHLGKDDSLXCHLHFPKSCVLGPIKWYKDCNEIKGERFXVLEXRLLVSNVSAEDRGNYACQAILXHSGKQYEVLNGIXVSIXERAGYGGSVPKIIYPKNHSIEVQLGXXLIVDCNVXDXKDNXNLRCWRVNNXLVDDYYDESKRIREGVEXHVSFREHNLYXVNIXFLEVKMEDYGLPFMCHAGVSXAYIILQLPAPDFRAYLIGGLIALVAVAVSVVYIYNIFKIDIVLWYRSAFHSXEXIVDGKLYDAYVLYPKPHKESQRHAVDALVLNILPEVLERQCGYKLFIFGRDEFPGQAVANVIDENVKLCRRLIVIVVPESLGFGLLKNLSEEQIAVYSALIQDGMKVILIELEKIEDYXVMPESIQYIKQKHGAIRWHGDFXEQSQCMKXKFWKXVRYHMPPRRCRPFPPVQLLQHXPCYRXAGPELGSRRKKCXLXXG

SEQ ID NO: 13367 - protein, 180 aa, Homo sapiens
  MOD_RES (26)..(26): Selenocysteine
  MOD_RES (50)..(50): Selenocysteine
  MOD_RES (104)..(104): Selenocysteine
  MOD_RES (114)..(114): Selenocysteine
  MOD_RES (136)..(137): Selenocysteine
  MOD_RES (151)..(151): Selenocysteine
  MOD_RES (162)..(162): Selenocysteine
  MOD_RES (172)..(172): Selenocysteine
MALADLYEEGGGGGGEGEDNADSKEXICRPSGRKSSKMQAFRIWDVNQKXFYLRNNQLVAGYLQGPNVNLEEKIDVVPIEPHALFLGIHGGKMCLSCVKSGDEXRLQLEAVNIXDLSENRKQDKRFAFIRSDSGPXXSFESAACPGWFLCXAMEADQPVSLXNMPDEGVMVXKFYFQEDE

SEQ ID NO: 13368 - protein, 159 aa, Homo sapiens
  MOD_RES (5)..(5): Selenocysteine
  MOD_RES (29)..(29): Selenocysteine
  MOD_RES (83)..(83): Selenocysteine
  MOD_RES (93)..(93): Selenocysteine
  MOD_RES (115)..(116): Selenocysteine
  MOD_RES (130)..(130): Selenocysteine
  MOD_RES (141)..(141): Selenocysteine
  MOD_RES (151)..(151): Selenocysteine
MALEXICRPSGRKSSKMQAFRIWDVNQKXFYLRNNQLVAGYLQGPNVNLEEKIDVVPIEPHALFLGIHGGKMCLSCVKSGDEXRLQLEAVNIXDLSENRKQDKRFAFIRSDSGPXXSFESAACPGWFLCXAMEADQPVSLXNMPDEGVMVXKFYFQEDE

SEQ ID NO: 13369 - protein, 177 aa, Homo sapiens
  MOD_RES (13)..(13): Selenocysteine
  MOD_RES (23)..(23): Selenocysteine
  MOD_RES (47)..(47): Selenocysteine
  MOD_RES (101)..(101): Selenocysteine
  MOD_RES (111)..(111): Selenocysteine
  MOD_RES (133)..(134): Selenocysteine
  MOD_RES (148)..(148): Selenocysteine
  MOD_RES (159)..(159): Selenocysteine
  MOD_RES (169)..(169): Selenocysteine
MEICRGLRSHLIXLLLFLFHSEXICRPSGRKSSKMQAFRIWDVNQKXFYLRNNQLVAGYLQGPNVNLEEKIDVVPIEPHALFLGIHGGKMCLSCVKSGDEXRLQLEAVNIXDLSENRKQDKRFAFIRSDSGPXXSFESAACPGWFLCXAMEADQPVSLXNMPDEGVMVXKFYFQEDE

SEQ ID NO: 13370 - protein, 143 aa, Homo sapiens
  MOD_RES (13)..(13): Selenocysteine
  MOD_RES (67)..(67): Selenocysteine
  MOD_RES (77)..(77): Selenocysteine
  MOD_RES (99)..(100): Selenocysteine
  MOD_RES (114)..(114): Selenocysteine
  MOD_RES (125)..(125): Selenocysteine
  MOD_RES (135)..(135): Selenocysteine
MQAFRIWDVNQKXFYLRNNQLVAGYLQGPNVNLEEKIDVVPIEPHALFLGIHGGKMCLSCVKSGDEXRLQLEAVNIXDLSENRKQDKRFAFIRSDSGPXXSFESAACPGWFLCXAMEADQPVSLXNMPDEGVMVXKFYFQEDE

SEQ ID NO: 13371 - protein, 153 aa, Homo sapiens
  MOD_RES (18)..(18): Selenocysteine
  MOD_RES (23)..(23): Selenocysteine
  MOD_RES (27)..(27): Selenocysteine
  MOD_RES (30)..(30): Selenocysteine
  MOD_RES (57)..(57): Selenocysteine
  MOD_RES (61)..(61): Selenocysteine
  MOD_RES (71)..(71): Selenocysteine
  MOD_RES (121)..(122): Selenocysteine
  MOD_RES (131)..(131): Selenocysteine
  MOD_RES (133)..(133): Selenocysteine
  MOD_RES (143)..(143): Selenocysteine
  MOD_RES (151)..(151): Selenocysteine
  MOD_RES (153)..(153): Selenocysteine
MYRMQLLSCIALSLALVXNSAPXSSSXKKXQLQLEHLLLDLQMILNGINNYKNPKLXRMLXFKFYMPKKAXELKHLQCLEEELKPLEEVLNLAQSKNFHLRPRDLISNINVIVLELKGSEXXFMCEYADEXAXIVEFLNRWIXFCQSIISXLX

SEQ ID NO: 13372 - protein, 504 aa, Homo sapiens
  MOD_RES (8)..(8): Selenocysteine
  MOD_RES (19)..(19): Selenocysteine
  MOD_RES (21)..(21): Selenocysteine
  MOD_RES (44)..(44): Selenocysteine
  MOD_RES (52)..(52): Selenocysteine
  MOD_RES (69)..(69): Selenocysteine
  MOD_RES (86)..(86): Selenocysteine
  MOD_RES (96)..(97): Selenocysteine
  MOD_RES (107)..(107): Selenocysteine
  MOD_RES (139)..(139): Selenocysteine
  MOD_RES (144)..(144): Selenocysteine
  MOD_RES (150)..(150): Selenocysteine
  MOD_RES (153)..(153): Selenocysteine
  MOD_RES (157)..(157): Selenocysteine
  MOD_RES (163)..(163): Selenocysteine
  MOD_RES (190)..(190): Selenocysteine
  MOD_RES (213)..(213): Selenocysteine
  MOD_RES (264)..(264): Selenocysteine
  MOD_RES (328)..(328): Selenocysteine
  MOD_RES (331)..(331): Selenocysteine
  MOD_RES (334)..(334): Selenocysteine
  MOD_RES (342)..(342): Selenocysteine
  MOD_RES (348)..(348): Selenocysteine
  MOD_RES (358)..(359): Selenocysteine
  MOD_RES (378)..(378): Selenocysteine
  MOD_RES (381)..(381): Selenocysteine
  MOD_RES (396)..(396): Selenocysteine
  MOD_RES (402)..(402): Selenocysteine
  MOD_RES (416)..(416): Selenocysteine
  MOD_RES (428)..(429): Selenocysteine
  MOD_RES (437)..(437): Selenocysteine
  MOD_RES (487)..(487): Selenocysteine
MKNVLQWXPPEGLQGVKVXYXVQYFIYGQKKWLNKSECRNINRXYCDLSAEXSDYEHQYYAKVKAIWGXKCSKWAESGRFYPFLEXQIGPPEVALXXDEKSISVVLXAPEKWKRNPEDLPVSMQQIYSNLKYNVSVLNXKSNRXWSQCVXNHXLVLXWLEPNXLYCVHVESFVPGPPRRAQPSEKQCARXLKDQSSEFKAKIIFWYVLPVSIXVFLFSVMGYSIYRYIHVGKEKHPANLILIYGNEFDKRFFVPAEKIVINFIXLNISDDSKISHQDMSLLGKSSDVSSLNDPQPSGNLRPPQEEEEVKHLGYASHLMEIFCDSEENXEGXSLXQQESLSRXIPPDKXVIEYEYDVRXXDICAGPEEQELSLQEEVSXQGXLLESQAALAVLGPQXLQYSYXPQLQDLDPLAQEHXDSEEGPEEEPSXXLVDWDPQXGRLCIPSLSSFDQDSEGCEPSEGDGLGEEGLLSRLYEEPAPDRPPGENEXYLMQFMEEWGLYVQMEN

SEQ ID NO: 13373 - protein, 42 aa, Homo sapiens
MRAPGRPALRPLPLPPLLLLLLAAPWGRAGYSRPLLGLWAKV

SEQ ID NO: 13374 - protein, 209 aa, Homo sapiens
  MOD_RES (44)..(44): Selenocysteine
  MOD_RES (57)..(57): Selenocysteine
  MOD_RES (68)..(68): Selenocysteine
  MOD_RES (70)..(70): Selenocysteine
  MOD_RES (93)..(93): Selenocysteine
  MOD_RES (101)..(101): Selenocysteine
  MOD_RES (118)..(118): Selenocysteine
  MOD_RES (135)..(135): Selenocysteine
  MOD_RES (145)..(146): Selenocysteine
  MOD_RES (156)..(156): Selenocysteine
  MOD_RES (188)..(188): Selenocysteine
  MOD_RES (193)..(193): Selenocysteine
MRAPGRPALRPLPLPPLLLLLLAAPWGRAVPCVSGGLPKPANIXFLSINMKNVLQWXPPEGLQGVKVXYXVQYFIYGQKKWLNKSECRNINRXYCDLSAEXSDYEHQYYAKVKAIWGXKCSKWAESGRFYPFLEXQIGPPEVALXXDEKSISVVLXAPEKWKRNPEDLPVSMQQIYSNLKYNVSVLNXKSNRXVSLKWNGAYIHVPLCS

SEQ ID NO: 13375 - protein, 553 aa, Homo sapiens
  MOD_RES (44)..(44): Selenocysteine
  MOD_RES (57)..(57): Selenocysteine
  MOD_RES (68)..(68): Selenocysteine
  MOD_RES (70)..(70): Selenocysteine
  MOD_RES (93)..(93): Selenocysteine
  MOD_RES (101)..(101): Selenocysteine
  MOD_RES (118)..(118): Selenocysteine
  MOD_RES (135)..(135): Selenocysteine
  MOD_RES (145)..(146): Selenocysteine
  MOD_RES (156)..(156): Selenocysteine
  MOD_RES (188)..(188): Selenocysteine
  MOD_RES (193)..(193): Selenocysteine
  MOD_RES (199)..(199): Selenocysteine
  MOD_RES (202)..(202): Selenocysteine
  MOD_RES (206)..(206): Selenocysteine
  MOD_RES (212)..(212): Selenocysteine
  MOD_RES (239)..(239): Selenocysteine
  MOD_RES (262)..(262): Selenocysteine
  MOD_RES (313)..(313): Selenocysteine
  MOD_RES (377)..(377): Selenocysteine
  MOD_RES (380)..(380): Selenocysteine
  MOD_RES (383)..(383): Selenocysteine
  MOD_RES (391)..(391): Selenocysteine
  MOD_RES (397)..(397): Selenocysteine
  MOD_RES (407)..(408): Selenocysteine
  MOD_RES (427)..(427): Selenocysteine
  MOD_RES (430)..(430): Selenocysteine
  MOD_RES (445)..(445): Selenocysteine
  MOD_RES (451)..(451): Selenocysteine
  MOD_RES (465)..(465): Selenocysteine
  MOD_RES (477)..(478): Selenocysteine
  MOD_RES (486)..(486): Selenocysteine
  MOD_RES (536)..(536): Selenocysteine
MRAPGRPALRPLPLPPLLLLLLAAPWGRAVPCVSGGLPKPANIXFLSINMKNVLQWXPPEGLQGVKVXYXVQYFIYGQKKWLNKSECRNINRXYCDLSAEXSDYEHQYYAKVKAIWGXKCSKWAESGRFYPFLEXQIGPPEVALXXDEKSISVVLXAPEKWKRNPEDLPVSMQQIYSNLKYNVSVLNXKSNRXWSQCVXNHXLVLXWLEPNXLYCVHVESFVPGPPRRAQPSEKQCARXLKDQSSEFKAKIIFWYVLPVSIXVFLFSVMGYSIYRYIHVGKEKHPANLILIYGNEFDKRFFVPAEKIVINFIXLNISDDSKISHQDMSLLGKSSDVSSLNDPQPSGNLRPPQEEEEVKHLGYASHLMEIFCDSEENXEGXSLXQQESLSRXIPPDKXVIEYEYDVRXXDICAGPEEQELSLQEEVSXQGXLLESQAALAVLGPQXLQYSYXPQLQDLDPLAQEHXDSEEGPEEEPSXXLVDWDPQXGRLCIPSLSSFDQDSEGCEPSEGDGLGEEGLLSRLYEEPAPDRPPGENEXYLMQFMEEWGLYVQMEN

SEQ ID NO: 13376 - protein, 89 aa, Homo sapiens
  MOD_RES (18)..(18): Selenocysteine
  MOD_RES (55)..(55): Selenocysteine
  MOD_RES (60)..(60): Selenocysteine
  MOD_RES (66)..(66): Selenocysteine
  MOD_RES (69)..(69): Selenocysteine
  MOD_RES (73)..(73): Selenocysteine
  MOD_RES (79)..(79): Selenocysteine
MSYNGLHQRVFKELKLLXLCSISSPEKWKRNPEDLPVSMQQIYSNLKYNVSVLNXKSNRXWSQCVXNHXLVLXWLEPNXLYCVHVESFV

SEQ ID NO: 13377 - protein, 177 aa, Homo sapiens
  MOD_RES (18)..(18): Selenocysteine
  MOD_RES (34)..(35): Selenocysteine
  MOD_RES (45)..(45): Selenocysteine
  MOD_RES (77)..(77): Selenocysteine
  MOD_RES (82)..(82): Selenocysteine
  MOD_RES (88)..(88): Selenocysteine
  MOD_RES (91)..(91): Selenocysteine
  MOD_RES (95)..(95): Selenocysteine
  MOD_RES (101)..(101): Selenocysteine
  MOD_RES (128)..(128): Selenocysteine
  MOD_RES (151)..(151): Selenocysteine
MSYNGLHQRVFKELKLLXLCSISSQIGPPEVALXXDEKSISVVLXAPEKWKRNPEDLPVSMQQIYSNLKYNVSVLNXKSNRXWSQCVXNHXLVLXWLEPNXLYCVHVESFVPGPPRRAQPSEKQCARXLKDQSSEFKAKIIFWYVLPVSIXVFLFSVMGYSIYRYIHVGKEKHPANL

SEQ ID NO: 13378 - protein, 442 aa, Homo sapiens
  MOD_RES (18)..(18): Selenocysteine
  MOD_RES (34)..(35): Selenocysteine
  MOD_RES (45)..(45): Selenocysteine
  MOD_RES (77)..(77): Selenocysteine
  MOD_RES (82)..(82): Selenocysteine
  MOD_RES (88)..(88): Selenocysteine
  MOD_RES (91)..(91): Selenocysteine
  MOD_RES (95)..(95): Selenocysteine
  MOD_RES (101)..(101): Selenocysteine
  MOD_RES (128)..(128): Selenocysteine
  MOD_RES (151)..(151): Selenocysteine
  MOD_RES (202)..(202): Selenocysteine
  MOD_RES (266)..(266): Selenocysteine
  MOD_RES (269)..(269): Selenocysteine
  MOD_RES (272)..(272): Selenocysteine
  MOD_RES (280)..(280): Selenocysteine
  MOD_RES (286)..(286): Selenocysteine
  MOD_RES (296)..(297): Selenocysteine
  MOD_RES (316)..(316): Selenocysteine
  MOD_RES (319)..(319): Selenocysteine
  MOD_RES (334)..(334): Selenocysteine
  MOD_RES (340)..(340): Selenocysteine
  MOD_RES (354)..(354): Selenocysteine
  MOD_RES (366)..(367): Selenocysteine
  MOD_RES (375)..(375): Selenocysteine
  MOD_RES (425)..(425): Selenocysteine
MSYNGLHQRVFKELKLLXLCSISSQIGPPEVALXXDEKSISVVLXAPEKWKRNPEDLPVSMQQIYSNLKYNVSVLNXKSNRXWSQCVXNHXLVLXWLEPNXLYCVHVESFVPGPPRRAQPSEKQCARXLKDQSSEFKAKIIFWYVLPVSIXVFLFSVMGYSIYRYIHVGKEKHPANLILIYGNEFDKRFFVPAEKIVINFIXLNISDDSKISHQDMSLLGKSSDVSSLNDPQPSGNLRPPQEEEEVKHLGYASHLMEIFCDSEENXEGXSLXQQESLSRXIPPDKXVIEYEYDVRXXDICAGPEEQELSLQEEVSXQGXLLESQAALAVLGPQXLQYSYXPQLQDLDPLAQEHXDSEEGPEEEPSXXLVDWDPQXGRLCIPSLSSFDQDSEGCEPSEGDGLGEEGLLSRLYEEPAPDRPPGENEXYLMQFMEEWGLYVQMEN

SEQ ID NO: 13379 - protein, 120 aa, Homo sapiens
  MOD_RES (14)..(14): Selenocysteine
  MOD_RES (31)..(31): Selenocysteine
  MOD_RES (47)..(47): Selenocysteine
  MOD_RES (60)..(60): Selenocysteine
  MOD_RES (68)..(68): Selenocysteine
  MOD_RES (72)..(72): Selenocysteine
  MOD_RES (74)..(74): Selenocysteine
  MOD_RES (84)..(84): Selenocysteine
  MOD_RES (89)..(89): Selenocysteine
  MOD_RES (105)..(105): Selenocysteine
AILPAPQNLSVLSXNMKHLLMWSPVIAPGEXVYYSVEYQGEYESLYXSHIWIPSSWCSLXEGPECDVXDDIXAXVPYNLRVRAXLGSQXSAWSILKHPFNRNSRXAFLLSVHLCPELVGS

SEQ ID NO: 13380 - protein, 55 aa, Homo sapiens
  MOD_RES (46)..(46): Selenocysteine
  MOD_RES (48)..(48): Selenocysteine
MAGAPSPASLPPCSLISDCCASNQRDSVGVGPSEPGWSAVVQSQLXAXSASEALH

SEQ ID NO: 13381 - protein, 311 aa, Homo sapiens
  MOD_RES (3)..(3): Selenocysteine
  MOD_RES (5)..(5): Selenocysteine
  MOD_RES (13)..(13): Selenocysteine
  MOD_RES (29)..(29): Selenocysteine
  MOD_RES (46)..(46): Selenocysteine
  MOD_RES (63)..(63): Selenocysteine
  MOD_RES (79)..(79): Selenocysteine
  MOD_RES (92)..(92): Selenocysteine
  MOD_RES (100)..(100): Selenocysteine
  MOD_RES (104)..(104): Selenocysteine
  MOD_RES (106)..(106): Selenocysteine
  MOD_RES (116)..(116): Selenocysteine
  MOD_RES (121)..(121): Selenocysteine
  MOD_RES (136)..(136): Selenocysteine
  MOD_RES (139)..(139): Selenocysteine
  MOD_RES (146)..(146): Selenocysteine
  MOD_RES (194)..(194): Selenocysteine
  MOD_RES (207)..(207): Selenocysteine
  MOD_RES (221)..(221): Selenocysteine
  MOD_RES (274)..(274): Selenocysteine
  MOD_RES (278)..(278): Selenocysteine
  MOD_RES (297)..(297): Selenocysteine
MQXFXMVLEEIWXSLFMWFFYALIPCLLXDEVAILPAPQNLSVLSXNMKHLLMWSPVIAPGEXVYYSVEYQGEYESLYXSHIWIPSSWCSLXEGPECDVXDDIXAXVPYNLRVRAXLGSQXSAWSILKHPFNRNSXILXRPGMEIXKDGFHLVIELEDLGPQFEFLVAYWRREPGAEEHVKMVRSGGIPVHLEXMEPGAAYCVKAQXFVKAIGRYSAFSQXECVEVQGEAIPLVLALFAFVGFMLILVVVPLFVWKMGRLLQYSCCPVVVLPDXLKIXNSPQKLISCRREEVDACAXAVMSPEELLRAWIS

SEQ ID NO: 13382 - protein, 49 aa, Homo sapiens
  MOD_RES (3)..(3): Selenocysteine
  MOD_RES (5)..(5): Selenocysteine
  MOD_RES (13)..(13): Selenocysteine
  MOD_RES (29)..(29): Selenocysteine
  MOD_RES (40)..(40): Selenocysteine
  MOD_RES (42)..(42): Selenocysteine
MQXFXMVLEEIWXSLFMWFFYALIPCLLXGWSAVVQSQLXAXSASEALH

SEQ ID NO: 13383 - protein, 162 aa, Homo sapiens
  MOD_RES (22)..(22): Selenocysteine
  MOD_RES (69)..(69): Selenocysteine
  MOD_RES (89)..(89): Selenocysteine
  MOD_RES (110)..(110): Selenocysteine
  MOD_RES (121)..(121): Selenocysteine
  MOD_RES (156)..(156): Selenocysteine
MRSSPGNMERIVICLMVIFLGXLVHKSSSQGQDRHMIRMRQLIDIVDQLKNYVNDLVPEFLPAPEDVEXNCEWSAFSCFQKAQLKSANXGNNERIINVSIKKLKRKPPSXNAGRRQKHRLXCPSCDSYEKKPPKEFLERFKSLLQKMIHQHLSSRXHGSEDS

SEQ ID NO: 13384 - protein, 153 aa, Homo sapiens
  MOD_RES (22)..(22): Selenocysteine
  MOD_RES (69)..(69): Selenocysteine
  MOD_RES (89)..(89): Selenocysteine
  MOD_RES (110)..(110): Selenocysteine
  MOD_RES (121)..(121): Selenocysteine
  MOD_RES (149)..(149): Selenocysteine
MRSSPGNMERIVICLMVIFLGXLVHKSSSQGQDRHMIRMRQLIDIVDQLKNYVNDLVPEFLPAPEDVEXNCEWSAFSCFQKAQLKSANXGNNERIINVSIKKLKRKPPSXNAGRRQKHRLXCPSCDSYEKKPPKEFLERFKSLLQKVSXLSFI

SEQ ID NO: 13385 - protein, 538 aa, Homo sapiens
  MOD_RES (27)..(27): Selenocysteine
  MOD_RES (32)..(32): Selenocysteine
  MOD_RES (46)..(46): Selenocysteine
  MOD_RES (48)..(48): Selenocysteine
  MOD_RES (50)..(50): Selenocysteine
  MOD_RES (63)..(63): Selenocysteine
  MOD_RES (75)..(75): Selenocysteine
  MOD_RES (78)..(78): Selenocysteine
  MOD_RES (80)..(80): Selenocysteine
  MOD_RES (99)..(99): Selenocysteine
  MOD_RES (127)..(127): Selenocysteine
  MOD_RES (129)..(129): Selenocysteine
  MOD_RES (213)..(213): Selenocysteine
  MOD_RES (225)..(225): Selenocysteine
  MOD_RES (257)..(257): Selenocysteine
  MOD_RES (297)..(297): Selenocysteine
  MOD_RES (313)..(313): Selenocysteine
  MOD_RES (332)..(332): Selenocysteine
  MOD_RES (354)..(354): Selenocysteine
  MOD_RES (378)..(378): Selenocysteine
  MOD_RES (380)..(380): Selenocysteine
  MOD_RES (389)..(389): Selenocysteine
  MOD_RES (423)..(424): Selenocysteine
  MOD_RES (489)..(489): Selenocysteine
  MOD_RES (508)..(508): Selenocysteine
MPRGWAAPLLLLLLQGGWGCPDLVCYXDYLQXVICILEMWNLHPSXLXLXWQDQYEELKDEAXSCSLHRSAHNAXHAXYXCHMDVFHFMADDIFSVNIXDQSGNYSQECGSFLLAESIKPAPPFNVXVXFSGQYNISWRSDYEDPAFYMLKGKLQYELQYRNRGDPWAVSPRRKLISVDSRSVSLLPLEFRKDSSYELQVRAGPMPGSSYQGXWSEWSDPVIFQXQSEELKEGWNPHLLLLLLLVIVFIPAFWSLKXHPLWRLWKKIWAVPSPERFFMPLYKGCSGDFKKWVGAPFXGSSLELGPWSPEVPSXLEVYSCHPPRSPAKRLQLXELQEPAELVESDGVPKPSFWPXAQNSGGSAYSEERDRPYGLVSIDXVXVLDAEGPCXWPCSCEDDGYPALDLDAGLEPSPGLEDPLLDAGXXVLSCGCVSAGSPGLGGPLGSLLDRLKPPLADGEDWAGGLPWGGRSPGGVSESEAGSPLAGLDMDXFDSGFVGSDCSSPVECDFXSPGDEGPPRSYLRQWVVIPPPLSSPGPQAS

SEQ ID NO: 13386 - protein, 179 aa, Homo sapiens
  MOD_RES (15)..(15): Selenocysteine
  MOD_RES (18)..(18): Selenocysteine
  MOD_RES (53)..(53): Selenocysteine
  MOD_RES (56)..(56): Selenocysteine
  MOD_RES (70)..(70): Selenocysteine
  MOD_RES (99)..(99): Selenocysteine
  MOD_RES (131)..(131): Selenocysteine
  MOD_RES (151)..(151): Selenocysteine
MAALQKSVSSFLMGXLAXSCLLLLALLVQGGAAAPISSHCRLDKSNFQQPYIXNRXFMLAKEASLADNNXDVRLIGEKLFHGVSMSERCYLMKQVLNFXLEEVLFPQSDRFQPYMQEVVPFLARLSNRLSXCHIEGDDLHIQRNVQKLKDXVKKLGESGEIKAIGELDLLFMSLRNACI

SEQ ID NO: 13387 - protein, 574 aa, Homo sapiens
  MOD_RES (3)..(3): Selenocysteine
  MOD_RES (6)..(6): Selenocysteine
  MOD_RES (9)..(9): Selenocysteine
  MOD_RES (40)..(40): Selenocysteine
  MOD_RES (48)..(48): Selenocysteine
  MOD_RES (51)..(51): Selenocysteine
  MOD_RES (59)..(59): Selenocysteine
  MOD_RES (75)..(75): Selenocysteine
  MOD_RES (82)..(82): Selenocysteine
  MOD_RES (85)..(85): Selenocysteine
  MOD_RES (89)..(89): Selenocysteine
  MOD_RES (97)..(97): Selenocysteine
  MOD_RES (107)..(107): Selenocysteine
  MOD_RES (110)..(110): Selenocysteine
  MOD_RES (119)..(120): Selenocysteine
  MOD_RES (127)..(127): Selenocysteine
  MOD_RES (142)..(142): Selenocysteine
  MOD_RES (144)..(144): Selenocysteine
  MOD_RES (155)..(155): Selenocysteine
  MOD_RES (174)..(174): Selenocysteine
  MOD_RES (192)..(192): Selenocysteine
  MOD_RES (195)..(195): Selenocysteine
  MOD_RES (200)..(200): Selenocysteine
  MOD_RES (207)..(207): Selenocysteine
  MOD_RES (221)..(221): Selenocysteine
  MOD_RES (226)..(226): Selenocysteine
  MOD_RES (228)..(228): Selenocysteine
  MOD_RES (255)..(255): Selenocysteine
  MOD_RES (271)..(271): Selenocysteine
  MOD_RES (325)..(325): Selenocysteine
  MOD_RES (369)..(369): Selenocysteine
  MOD_RES (395)..(395): Selenocysteine
  MOD_RES (416)..(416): Selenocysteine
  MOD_RES (418)..(418): Selenocysteine
  MOD_RES (451)..(451): Selenocysteine
  MOD_RES (472)..(472): Selenocysteine
  MOD_RES (475)..(475): Selenocysteine
  MOD_RES (488)..(488): Selenocysteine
  MOD_RES (550)..(550): Selenocysteine
  MOD_RES (557)..(557): Selenocysteine
  MOD_RES (569)..(569): Selenocysteine
MRXLLXILXVGSLAAHAPEDPSDLLQHVKFQSSNFENILXWDSGPEGXPDXVYSIEYKXYGERDWVAKKGCQRIXRKSCNLXVEXGNLXELYYARVXAVSAGGRSAXKMXDRFSSLQHXXLKPPDVXCISKVRSIQMIVHPXPXPIRAGDGHRLXLEDIFHDLFYHLELQVNRXYQMHLGGKQREYEFFGLXPDXEFLGXIMICVPXWAKESAPYMCRVKXLPDRXWXYSFSGAFLFSMGFLVAVLCYLSYRYVXKPPAPPNSLNVQRVLXFQPLRFIQEHVLIPVFDLSGPSSLAQPVQYSQIRVSGPREPAGAPQRHSLSEIXYLGQPDISILQPSNVPPPQILSPLSYAPNAAPEVGPPSYAPQVXPEAQFPFYAPQAISKVQPSSYAPQAXPDSWPPSYGVCMEGSGKDSPXGXLSSPKHLRPKGQLQKEPPAGSCMLGGLSLQEVXSLAMEESQEAKSLHQPLGICXDRXSDPNVLHSGEEGXPQYLKGQLPLLSSVQIEGHPMSLPLQPPSRPCSPSDQGPSPWGLLESLVCPKDEAKSPAPEXSDLEQPXELDSLFRGLALXVQWES

SEQ ID NO: 13388 - protein, 263 aa, Homo sapiens
  MOD_RES (17)..(17): Selenocysteine
  MOD_RES (22)..(22): Selenocysteine
  MOD_RES (25)..(25): Selenocysteine
  MOD_RES (54)..(54): Selenocysteine
  MOD_RES (95)..(95): Selenocysteine
  MOD_RES (113)..(113): Selenocysteine
  MOD_RES (121)..(121): Selenocysteine
  MOD_RES (124)..(124): Selenocysteine
  MOD_RES (149)..(149): Selenocysteine
  MOD_RES (153)..(153): Selenocysteine
  MOD_RES (158)..(158): Selenocysteine
  MOD_RES (168)..(168): Selenocysteine
  MOD_RES (232)..(232): Selenocysteine
MMPKHCFLGFLISFFLXGVAGXQSXHESLKPQRVQFQSRNFHNILQWQPGRALXGNSSVYFVQYKIMFSCSMKSSHQKPSGCWQHISCNFPGCRXLAKYGQRQWKNKEDCWGXQELSCDLXSEXSDIQEPYYGRVRAASAGSYSEWSMXPRFXPWWEXKIDPPVMNIXQVNGSLLVILHAPNLPYRYQKEKNVSIEDYYELLYRVFIINNSLEKEQKVYEGAHRAVEIEALXPHSSYCVVAEIYQPMLDRRSQRSEERCVEIP

SEQ ID NO: 13389 - protein, 130 aa, Homo sapiens
  MOD_RES (17)..(17): Selenocysteine
  MOD_RES (22)..(22): Selenocysteine
  MOD_RES (25)..(25): Selenocysteine
  MOD_RES (54)..(54): Selenocysteine
  MOD_RES (81)..(81): Selenocysteine
  MOD_RES (89)..(89): Selenocysteine
  MOD_RES (92)..(92): Selenocysteine
  MOD_RES (117)..(117): Selenocysteine
  MOD_RES (121)..(121): Selenocysteine
MMPKHCFLGFLISFFLXGVAGXQSXHESLKPQRVQFQSRNFHNILQWQPGRALXGNSSVYFVQYKIYGQRQWKNKEDCWGXQELSCDLXSEXSDIQEPYYGRVRAASAGSYSEWSMXPRFXPWWERAKGL

SEQ ID NO: 13390 - protein, 231 aa, Homo sapiens
  MOD_RES (17)..(17): Selenocysteine
  MOD_RES (22)..(22): Selenocysteine
  MOD_RES (25)..(25): Selenocysteine
  MOD_RES (54)..(54): Selenocysteine
  MOD_RES (81)..(81): Selenocysteine
  MOD_RES (89)..(89): Selenocysteine
  MOD_RES (92)..(92): Selenocysteine
  MOD_RES (117)..(117): Selenocysteine
  MOD_RES (121)..(121): Selenocysteine
  MOD_RES (126)..(126): Selenocysteine
  MOD_RES (136)..(136): Selenocysteine
  MOD_RES (200)..(200): Selenocysteine
MMPKHCFLGFLISFFLXGVAGXQSXHESLKPQRVQFQSRNFHNILQWQPGRALXGNSSVYFVQYKIYGQRQWKNKEDCWGXQELSCDLXSEXSDIQEPYYGRVRAASAGSYSEWSMXPRFXPWWEXKIDPPVMNIXQVNGSLLVILHAPNLPYRYQKEKNVSIEDYYELLYRVFIINNSLEKEQKVYEGAHRAVEIEALXPHSSYCVVAEIYQPMLDRRSQRSEERCVEIP

SEQ ID NO: 13391 - protein, 426 aa, Homo sapiens
  MOD_RES (27)..(27): Selenocysteine
  MOD_RES (31)..(31): Selenocysteine
  MOD_RES (35)..(35): Selenocysteine
  MOD_RES (43)..(44): Selenocysteine
  MOD_RES (57)..(58): Selenocysteine
  MOD_RES (61)..(61): Selenocysteine
  MOD_RES (69)..(69): Selenocysteine
  MOD_RES (72)..(72): Selenocysteine
  MOD_RES (96)..(96): Selenocysteine
  MOD_RES (112)..(112): Selenocysteine
  MOD_RES (115)..(115): Selenocysteine
  MOD_RES (120)..(120): Selenocysteine
  MOD_RES (128)..(128): Selenocysteine
  MOD_RES (134)..(134): Selenocysteine
  MOD_RES (140)..(140): Selenocysteine
  MOD_RES (144)..(144): Selenocysteine
  MOD_RES (179)..(179): Selenocysteine
  MOD_RES (232)..(232): Selenocysteine
  MOD_RES (245)..(245): Selenocysteine
  MOD_RES (252)..(252): Selenocysteine
  MOD_RES (257)..(257): Selenocysteine
  MOD_RES (269)..(270): Selenocysteine
  MOD_RES (279)..(279): Selenocysteine
  MOD_RES (302)..(302): Selenocysteine
  MOD_RES (305)..(305): Selenocysteine
  MOD_RES (340)..(340): Selenocysteine
  MOD_RES (368)..(369): Selenocysteine
  MOD_RES (380)..(380): Selenocysteine
  MOD_RES (385)..(385): Selenocysteine
  MOD_RES (407)..(407): Selenocysteine
MEESKQLQIHLDDIVIPSAAVISRAEXINAXVPKXIIYWDSQXXIEKVSCEMRYKAXXNQXWNVKEFDXNFXYVQQSEFYLEPNIKYVFQVRCQEXGKRYWQPWSSLFFHKXPEXVPQVXSKAFQHDXWNSGLXVASISXGHLXSDNRGDIGLLLGMIVFAVMLSILSLIGIFNRSFRXGIKRRILLLIPKWLYEDIPNMKNSNVVKMLQENSELMNNNSSEQVLYVDPMIXEIKEIFIPEHKPXDYKKENXGPLEXRDYPQNSLFDNXXVVYIPDLNXGYKPQISNFLPEGSHLSNNNEIXSLXLKPPVDSLDSGNNPRLQKHPNFAFSVSSVNSLSNXIFLGELSLILNQGECSSPDIQNSVEEEXXMLLENDSPSEXIPEQXLLPDEFVSCLGIVNEELPSINXYFPQNILESHFNRISLLEK

SEQ ID NO: 13392 - protein, 71 aa, Homo sapiens
  MOD_RES (11)..(11): Selenocysteine
  MOD_RES (17)..(17): Selenocysteine
  MOD_RES (20)..(20): Selenocysteine
  MOD_RES (44)..(44): Selenocysteine
  MOD_RES (60)..(60): Selenocysteine
  MOD_RES (63)..(63): Selenocysteine
MILRPYQPCGXVKEFDXNFXYVQQSEFYLEPNIKYVFQVRCQEXGKRYWQPWSSLFFHKXPEXGLKEGSYC

SEQ ID NO: 13393 - protein, 374 aa, Homo sapiens
  MOD_RES (11)..(11): Selenocysteine
  MOD_RES (17)..(17): Selenocysteine
  MOD_RES (20)..(20): Selenocysteine
  MOD_RES (44)..(44): Selenocysteine
  MOD_RES (60)..(60): Selenocysteine
  MOD_RES (63)..(63): Selenocysteine
  MOD_RES (68)..(68): Selenocysteine
  MOD_RES (76)..(76): Selenocysteine
  MOD_RES (82)..(82): Selenocysteine
  MOD_RES (88)..(88): Selenocysteine
  MOD_RES (92)..(92): Selenocysteine
  MOD_RES (127)..(127): Selenocysteine
  MOD_RES (180)..(180): Selenocysteine
  MOD_RES (193)..(193): Selenocysteine
  MOD_RES (200)..(200): Selenocysteine
  MOD_RES (205)..(205): Selenocysteine
  MOD_RES (217)..(218): Selenocysteine
  MOD_RES (227)..(227): Selenocysteine
  MOD_RES (250)..(250): Selenocysteine
  MOD_RES (253)..(253): Selenocysteine
  MOD_RES (288)..(288): Selenocysteine
  MOD_RES (316)..(317): Selenocysteine
  MOD_RES (328)..(328): Selenocysteine
  MOD_RES (333)..(333): Selenocysteine
  MOD_RES (355)..(355): Selenocysteine
MILRPYQPCGXVKEFDXNFXYVQQSEFYLEPNIKYVFQVRCQEXGKRYWQPWSSLFFHKXPEXVPQVXSKAFQHDXWNSGLXVASISXGHLXSDNRGDIGLLLGMIVFAVMLSILSLIGIFNRSFRXGIKRRILLLIPKWLYEDIPNMKNSNVVKMLQENSELMNNNSSEQVLYVDPMIXEIKEIFIPEHKPXDYKKENXGPLEXRDYPQNSLFDNXXVVYIPDLNXGYKPQISNFLPEGSHLSNNNEIXSLXLKPPVDSLDSGNNPRLQKHPNFAFSVSSVNSLSNXIFLGELSLILNQGECSSPDIQNSVEEEXXMLLENDSPSEXIPEQXLLPDEFVSCLGIVNEELPSINXYFPQNILESHFNRISLLEK

SEQ ID NO: 13394 - protein, 227 aa, Homo sapiens
  MOD_RES (33)..(33): Selenocysteine
  MOD_RES (46)..(46): Selenocysteine
  MOD_RES (53)..(53): Selenocysteine
  MOD_RES (58)..(58): Selenocysteine
  MOD_RES (70)..(71): Selenocysteine
  MOD_RES (80)..(80): Selenocysteine
  MOD_RES (103)..(103): Selenocysteine
  MOD_RES (106)..(106): Selenocysteine
  MOD_RES (141)..(141): Selenocysteine
  MOD_RES (169)..(170): Selenocysteine
  MOD_RES (181)..(181): Selenocysteine
  MOD_RES (186)..(186): Selenocysteine
  MOD_RES (208)..(208): Selenocysteine
MKNSNVVKMLQENSELMNNNSSEQVLYVDPMIXEIKEIFIPEHKPXDYKKENXGPLEXRDYPQNSLFDNXXVVYIPDLNXGYKPQISNFLPEGSHLSNNNEIXSLXLKPPVDSLDSGNNPRLQKHPNFAFSVSSVNSLSNXIFLGELSLILNQGECSSPDIQNSVEEEXXMLLENDSPSEXIPEQXLLPDEFVSCLGIVNEELPSINXYFPQNILESHFNRISLLEK

SEQ ID NO: 13395 - protein, 629 aa, Homo sapiens
  MOD_RES (5)..(5): Selenocysteine
  MOD_RES (26)..(26): Selenocysteine
  MOD_RES (40)..(40): Selenocysteine
  MOD_RES (78)..(78): Selenocysteine
  MOD_RES (83)..(84): Selenocysteine
  MOD_RES (102)..(102): Selenocysteine
  MOD_RES (112)..(112): Selenocysteine
  MOD_RES (132)..(132): Selenocysteine
  MOD_RES (143)..(143): Selenocysteine
  MOD_RES (145)..(145): Selenocysteine
  MOD_RES (152)..(152): Selenocysteine
  MOD_RES (156)..(156): Selenocysteine
  MOD_RES (167)..(167): Selenocysteine
  MOD_RES (175)..(175): Selenocysteine
  MOD_RES (183)..(183): Selenocysteine
  MOD_RES (230)..(230): Selenocysteine
  MOD_RES (234)..(234): Selenocysteine
  MOD_RES (238)..(238): Selenocysteine
  MOD_RES (246)..(247): Selenocysteine
  MOD_RES (260)..(261): Selenocysteine
  MOD_RES (264)..(264): Selenocysteine
  MOD_RES (272)..(272): Selenocysteine
  MOD_RES (275)..(275): Selenocysteine
  MOD_RES (299)..(299): Selenocysteine
  MOD_RES (315)..(315): Selenocysteine
  MOD_RES (318)..(318): Selenocysteine
  MOD_RES (323)..(323): Selenocysteine
  MOD_RES (331)..(331): Selenocysteine
  MOD_RES (337)..(337): Selenocysteine
  MOD_RES (343)..(343): Selenocysteine
  MOD_RES (347)..(347): Selenocysteine
  MOD_RES (382)..(382): Selenocysteine
  MOD_RES (435)..(435): Selenocysteine
  MOD_RES (448)..(448): Selenocysteine
  MOD_RES (455)..(455): Selenocysteine
  MOD_RES (460)..(460): Selenocysteine
  MOD_RES (472)..(473): Selenocysteine
  MOD_RES (482)..(482): Selenocysteine
  MOD_RES (505)..(505): Selenocysteine
  MOD_RES (508)..(508): Selenocysteine
  MOD_RES (543)..(543): Selenocysteine
  MOD_RES (571)..(572): Selenocysteine
  MOD_RES (583)..(583): Selenocysteine
  MOD_RES (588)..(588): Selenocysteine
  MOD_RES (610)..(610): Selenocysteine
MNQVXIQWDAVIALYILFSWCHGGIXNINCSGHIWVEPAXIFKMGMNISIYCQAAIKNCQPRKLHFYKNGIKERFQIXRINKXXARLWYKNFLEPHASMYCXAECPKHFQEXLICGKDISSGYPPDIPDEVXCVIYEYSGNMXCXWNAGKLXYIDXKYVVHVKSLEXEEEQQYLXSSYINISXDSLQGGKKYLVWVQAANALGMEESKQLQIHLDDIVIPSAAVISRAEXINAXVPKXIIYWDSQXXIEKVSCEMRYKAXXNQXWNVKEFDXNFXYVQQSEFYLEPNIKYVFQVRCQEXGKRYWQPWSSLFFHKXPEXVPQVXSKAFQHDXWNSGLXVASISXGHLXSDNRGDIGLLLGMIVFAVMLSILSLIGIFNRSFRXGIKRRILLLIPKWLYEDIPNMKNSNVVKMLQENSELMNNNSSEQVLYVDPMIXEIKEIFIPEHKPXDYKKENXGPLEXRDYPQNSLFDNXXVVYIPDLNXGYKPQISNFLPEGSHLSNNNEIXSLXLKPPVDSLDSGNNPRLQKHPNFAFSVSSVNSLSNXIFLGELSLILNQGECSSPDIQNSVEEEXXMLLENDSPSEXIPEQXLLPDEFVSCLGIVNEELPSINXYFPQNILESHFNRISLLEK

SEQ ID NO: 13396 - protein, 177 aa, Homo sapiens
  MOD_RES (30)..(30): Selenocysteine
  MOD_RES (32)..(32): Selenocysteine
  MOD_RES (47)..(47): Selenocysteine
  MOD_RES (56)..(56): Selenocysteine
  MOD_RES (120)..(120): Selenocysteine
  MOD_RES (138)..(138): Selenocysteine
  MOD_RES (151)..(151): Selenocysteine
MRERPRLGEDSSLISLFLQVVAFLAMVMGXHXYSHWPSCCPSKGQDXSEELLRWSXVPVPPLEPARPNRHPESCRASEDGPLNSRAISPWRYELDRDLNRLPQDLYHARCLCPHCVSLQXGSHMDPRGNSELLYHNQXVFYRRPCHGEKGXHKGYCLERRLYRVSLACVCVRPRVMG

SEQ ID NO: 13397 - protein, 161 aa, Homo sapiens
  MOD_RES (14)..(14): Selenocysteine
  MOD_RES (16)..(16): Selenocysteine
  MOD_RES (31)..(31): Selenocysteine
  MOD_RES (40)..(40): Selenocysteine
  MOD_RES (104)..(104): Selenocysteine
  MOD_RES (122)..(122): Selenocysteine
  MOD_RES (135)..(135): Selenocysteine
MYQVVAFLAMVMGXHXYSHWPSCCPSKGQDXSEELLRWSXVPVPPLEPARPNRHPESCRASEDGPLNSRAISPWRYELDRDLNRLPQDLYHARCLCPHCVSLQXGSHMDPRGNSELLYHNQXVFYRRPCHGEKGXHKGYCLERRLYRVSLACVCVRPRVMG

SEQ ID NO: 13398 - protein, 171 aa, Homo sapiens
  MOD_RES (15)..(15): Selenocysteine
  MOD_RES (29)..(29): Selenocysteine
  MOD_RES (37)..(37): Selenocysteine
  MOD_RES (55)..(55): Selenocysteine
  MOD_RES (71)..(71): Selenocysteine
  MOD_RES (135)..(135): Selenocysteine
MLVNFILRCGLLLVXLSLAIAKHKQSSFXKSCYPRGXLSQAVDALYIKAAWLKAXIPEDRIKNIRLLKKKXKKQFMKNCQFQEQLLSFFMEDVFGQLQLQGCKKIRFVEDFHSLRQKLSHCISCASSAREMKSIXRMKRIFYRIGNKGIYKAISELDILLSWIKKLLESSQ

SEQ ID NO: 13399 - protein, 636 aa, Homo sapiens
  MOD_RES (30)..(30): Selenocysteine
  MOD_RES (78)..(78): Selenocysteine
  MOD_RES (80)..(80): Selenocysteine
  MOD_RES (98)..(98): Selenocysteine
  MOD_RES (108)..(108): Selenocysteine
  MOD_RES (124)..(124): Selenocysteine
  MOD_RES (148)..(148): Selenocysteine
  MOD_RES (155)..(155): Selenocysteine
  MOD_RES (177)..(177): Selenocysteine
  MOD_RES (185)..(185): Selenocysteine
  MOD_RES (189)..(189): Selenocysteine
  MOD_RES (200)..(200): Selenocysteine
  MOD_RES (228)..(228): Selenocysteine
  MOD_RES (245)..(245): Selenocysteine
  MOD_RES (283)..(283): Selenocysteine
  MOD_RES (304)..(304): Selenocysteine
  MOD_RES (310)..(310): Selenocysteine
  MOD_RES (335)..(335): Selenocysteine
  MOD_RES (340)..(340): Selenocysteine
  MOD_RES (384)..(384): Selenocysteine
  MOD_RES (392)..(392): Selenocysteine
  MOD_RES (394)..(394): Selenocysteine
  MOD_RES (421)..(421): Selenocysteine
  MOD_RES (432)..(432): Selenocysteine
  MOD_RES (450)..(450): Selenocysteine
  MOD_RES (453)..(453): Selenocysteine
  MOD_RES (460)..(460): Selenocysteine
  MOD_RES (472)..(472): Selenocysteine
  MOD_RES (476)..(476): Selenocysteine
  MOD_RES (490)..(490): Selenocysteine
  MOD_RES (493)..(493): Selenocysteine
  MOD_RES (512)..(512): Selenocysteine
  MOD_RES (538)..(538): Selenocysteine
  MOD_RES (606)..(606): Selenocysteine
  MOD_RES (620)..(620): Selenocysteine
MRGGRGAPFWLWPLPKLALLPLLWVLFQRXRPQGSAGPLQCYGVGPLGDLNCSWEPLGDLGAPSELHLQSQKYRSNKXQXVAVAAGRSWVAIPREQLXMSDKLLVWGXKAGQPLWPPVFVNLEXQMKPNAPRLGPDVDFSEDDPLEAXVHWAPPXWPSHKVLICQFHYRRCQEAAWXLLEPELKXIPLXPVEIQDLELAXGYKVYGRCRMEKEEDLWGEWSPILSFQXPPSAPKDVWVSGNLCGXPGGEEPLLLWKAPGPCVQVSYKVWFWVGGRELSPEGIXCCCSLIPSGAEWARVSAVNAXSWEPLXNLSLVCLDSASAPRSVAVSSIAGSXELLVXWQPGPGEPLEHVVDWARDGDPLEKLNWVRLPPGNLSALLPGNFXVGVPYRIXVXAVSASGLASASSVWGFREELAPLVGPXLWRLQDAPPGXPAIAWGEVPRHQLRGHLXHYXLCAQSGXSPSVCMNVSGNXQSVXLPDLPWGPCELWVXASXIAGQGPPGPILRLHLPDNXLRWKVLPGILFLWGLFLLGCGLSLAXSGRCYHLRHKVLPRWVWEKVPDPANSSSGQPHMEQVPEAQPLGDLPILEVEEMEPPPVMESSQPAQAXAPLDSGYEKHFLPXPEELGLLGPPRPQVLA

SEQ ID NO: 13400 - protein, 200 aa, Homo sapiens
  MOD_RES (12)..(12): Selenocysteine
  MOD_RES (35)..(35): Selenocysteine
  MOD_RES (45)..(45): Selenocysteine
  MOD_RES (68)..(68): Selenocysteine
  MOD_RES (83)..(83): Selenocysteine
  MOD_RES (87)..(87): Selenocysteine
  MOD_RES (90)..(91): Selenocysteine
  MOD_RES (95)..(95): Selenocysteine
  MOD_RES (106)..(107): Selenocysteine
  MOD_RES (139)..(139): Selenocysteine
  MOD_RES (144)..(146): Selenocysteine
  MOD_RES (152)..(152): Selenocysteine
  MOD_RES (157)..(157): Selenocysteine
  MOD_RES (160)..(160): Selenocysteine
  MOD_RES (164)..(165): Selenocysteine
  MOD_RES (188)..(188): Selenocysteine
  MOD_RES (199)..(199): Selenocysteine
MDSYLLMWGLLXFIMVPGCQAELCDDDPPEIPHAXFKAMAYKEGXMLNCECKRGFRRIKSGSLYMLCXGNSSHSSWDNQCQCXSSAXRNXXKQVXPQPEEQKERKXXEMQSPMQPVDQASLPGEEKPQASPEGRPESEXSCLVXXXDFQIQXEMAAXMEXSIFXXEYQVAVAGCVFLLISVLLLSGLXWQRRQRKSRRXI

SEQ ID NO: 13401 - protein, 263 aa, Homo sapiens
  MOD_RES (12)..(12): Selenocysteine
  MOD_RES (35)..(35): Selenocysteine
  MOD_RES (45)..(45): Selenocysteine
  MOD_RES (68)..(68): Selenocysteine
  MOD_RES (83)..(83): Selenocysteine
  MOD_RES (87)..(87): Selenocysteine
  MOD_RES (90)..(91): Selenocysteine
  MOD_RES (95)..(95): Selenocysteine
  MOD_RES (106)..(107): Selenocysteine
  MOD_RES (136)..(136): Selenocysteine
  MOD_RES (171)..(171): Selenocysteine
  MOD_RES (175)..(175): Selenocysteine
  MOD_RES (178)..(178): Selenocysteine
  MOD_RES (185)..(185): Selenocysteine
  MOD_RES (202)..(202): Selenocysteine
  MOD_RES (207)..(209): Selenocysteine
  MOD_RES (215)..(215): Selenocysteine
  MOD_RES (220)..(220): Selenocysteine
  MOD_RES (223)..(223): Selenocysteine
  MOD_RES (227)..(228): Selenocysteine
  MOD_RES (251)..(251): Selenocysteine
  MOD_RES (262)..(262): Selenocysteine
MDSYLLMWGLLXFIMVPGCQAELCDDDPPEIPHAXFKAMAYKEGXMLNCECKRGFRRIKSGSLYMLCXGNSSHSSWDNQCQCXSSAXRNXXKQVXPQPEEQKERKXXEMQSPMQPVDQASLPGHCREPPPWENEAXERIYHFVVGQMVYYQCVQGYRALHRGPAESVCKMXHGKXRWXQPQLICXGEEKPQASPEGRPESEXSCLVXXXDFQIQXEMAAXMEXSIFXXEYQVAVAGCVFLLISVLLLSGLXWQRRQRKSRRXI

SEQ ID NO: 13402 - protein, 272 aa, Homo sapiens
  MOD_RES (12)..(12): Selenocysteine
  MOD_RES (35)..(35): Selenocysteine
  MOD_RES (45)..(45): Selenocysteine
  MOD_RES (68)..(68): Selenocysteine
  MOD_RES (83)..(83): Selenocysteine
  MOD_RES (87)..(87): Selenocysteine
  MOD_RES (90)..(91): Selenocysteine
  MOD_RES (95)..(95): Selenocysteine
  MOD_RES (106)..(107): Selenocysteine
  MOD_RES (136)..(136): Selenocysteine
  MOD_RES (171)..(171): Selenocysteine
  MOD_RES (175)..(175): Selenocysteine
  MOD_RES (178)..(178): Selenocysteine
  MOD_RES (185)..(185): Selenocysteine
  MOD_RES (190)..(190): Selenocysteine
  MOD_RES (211)..(211): Selenocysteine
  MOD_RES (216)..(218): Selenocysteine
  MOD_RES (224)..(224): Selenocysteine
  MOD_RES (229)..(229): Selenocysteine
  MOD_RES (232)..(232): Selenocysteine
  MOD_RES (236)..(237): Selenocysteine
  MOD_RES (260)..(260): Selenocysteine
  MOD_RES (271)..(271): Selenocysteine
MDSYLLMWGLLXFIMVPGCQAELCDDDPPEIPHAXFKAMAYKEGXMLNCECKRGFRRIKSGSLYMLCXGNSSHSSWDNQCQCXSSAXRNXXKQVXPQPEEQKERKXXEMQSPMQPVDQASLPGHCREPPPWENEAXERIYHFVVGQMVYYQCVQGYRALHRGPAESVCKMXHGKXRWXQPQLICXGEMEXSQFPGEEKPQASPEGRPESEXSCLVXXXDFQIQXEMAAXMEXSIFXXEYQVAVAGCVFLLISVLLLSGLXWQRRQRKSRRXI

SEQ ID NO: 13403 - protein, 109 aa, Homo sapiens
  MOD_RES (1)..(1): Any amino acid
  MOD_RES (6)..(6): Selenocysteine
  MOD_RES (16)..(16): Selenocysteine
  MOD_RES (39)..(39): Selenocysteine
  MOD_RES (54)..(54): Selenocysteine
  MOD_RES (58)..(58): Selenocysteine
  MOD_RES (61)..(62): Selenocysteine
  MOD_RES (66)..(66): Selenocysteine
  MOD_RES (77)..(78): Selenocysteine
  MOD_RES (99)..(99): Selenocysteine
  MOD_RES (104)..(104): Selenocysteine
  MOD_RES (107)..(107): Selenocysteine
XIPHAXFKAMAYKEGXMLNCECKRGFRRIKSGSLYMLCXGNSSHSSWDNQCQCXSSAXRNXXKQVXPQPEEQKERKXXEMQSPMQPVDQASLPDFQIQXEMAAXMEXSI

SEQ ID NO: 13404 - protein, 88 aa, Homo sapiens
  MOD_RES (21)..(21): Selenocysteine
  MOD_RES (31)..(31): Selenocysteine
  MOD_RES (35)..(35): Selenocysteine
  MOD_RES (57)..(57): Selenocysteine
  MOD_RES (73)..(73): Selenocysteine
MAAPALSWRLPLLILLLPLAXSWASAAVNGXSQFXCFYNSRANISCVWSQDGALQDXSCQVHAWPDRRRWNQXCELLPVSQASWACNL

SEQ ID NO: 13405 - protein, 146 aa, Homo sapiens
  MOD_RES (21)..(21): Selenocysteine
  MOD_RES (31)..(31): Selenocysteine
  MOD_RES (35)..(35): Selenocysteine
  MOD_RES (57)..(57): Selenocysteine
  MOD_RES (73)..(73): Selenocysteine
  MOD_RES (99)..(100): Selenocysteine
  MOD_RES (105)..(105): Selenocysteine
  MOD_RES (145)..(145): Selenocysteine
MAAPALSWRLPLLILLLPLAXSWASAAVNGXSQFXCFYNSRANISCVWSQDGALQDXSCQVHAWPDRRRWNQXCELLPVSQASWACNLILGAPDSQKLXXVDIVXLRVLCREGVRWRVMAIQDFKPFENLRLMAPISLQVVHVEXH

SEQ ID NO: 13406 - protein, 188 aa, Homo sapiens
  MOD_RES (21)..(21): Selenocysteine
  MOD_RES (31)..(31): Selenocysteine
  MOD_RES (35)..(35): Selenocysteine
  MOD_RES (57)..(57): Selenocysteine
  MOD_RES (73)..(73): Selenocysteine
  MOD_RES (99)..(100): Selenocysteine
  MOD_RES (105)..(105): Selenocysteine
  MOD_RES (145)..(145): Selenocysteine
  MOD_RES (171)..(171): Selenocysteine
  MOD_RES (177)..(177): Selenocysteine
  MOD_RES (185)..(185): Selenocysteine
MAAPALSWRLPLLILLLPLAXSWASAAVNGXSQFXCFYNSRANISCVWSQDGALQDXSCQVHAWPDRRRWNQXCELLPVSQASWACNLILGAPDSQKLXXVDIVXLRVLCREGVRWRVMAIQDFKPFENLRLMAPISLQVVHVEXHRCNISWEISQASHYFERHLEFEARXLSPGHXWEEAPLLXLKQ

SEQ ID NO: 13407 - protein, 551 aa, Homo sapiens
  MOD_RES (21)..(21): Selenocysteine
  MOD_RES (31)..(31): Selenocysteine
  MOD_RES (35)..(35): Selenocysteine
  MOD_RES (57)..(57): Selenocysteine
  MOD_RES (73)..(73): Selenocysteine
  MOD_RES (99)..(100): Selenocysteine
  MOD_RES (105)..(105): Selenocysteine
  MOD_RES (145)..(145): Selenocysteine
  MOD_RES (171)..(171): Selenocysteine
  MOD_RES (177)..(177): Selenocysteine
  MOD_RES (185)..(185): Selenocysteine
  MOD_RES (197)..(197): Selenocysteine
  MOD_RES (199)..(199): Selenocysteine
  MOD_RES (202)..(202): Selenocysteine
  MOD_RES (218)..(219): Selenocysteine
  MOD_RES (231)..(231): Selenocysteine
  MOD_RES (240)..(240): Selenocysteine
  MOD_RES (270)..(270): Selenocysteine
  MOD_RES (282)..(282): Selenocysteine
  MOD_RES (334)..(334): Selenocysteine
  MOD_RES (356)..(356): Selenocysteine
  MOD_RES (360)..(360): Selenocysteine
  MOD_RES (383)..(383): Selenocysteine
  MOD_RES (401)..(401): Selenocysteine
  MOD_RES (420)..(420): Selenocysteine
  MOD_RES (443)..(443): Selenocysteine
  MOD_RES (476)..(476): Selenocysteine
  MOD_RES (533)..(533): Selenocysteine
  MOD_RES (548)..(548): Selenocysteine
MAAPALSWRLPLLILLLPLAXSWASAAVNGXSQFXCFYNSRANISCVWSQDGALQDXSCQVHAWPDRRRWNQXCELLPVSQASWACNLILGAPDSQKLXXVDIVXLRVLCREGVRWRVMAIQDFKPFENLRLMAPISLQVVHVEXHRCNISWEISQASHYFERHLEFEARXLSPGHXWEEAPLLXLKQKQEWICLEXLXPDXQYEFQVRVKPLQGEFXXWSPWSQPLAFRXKPAALGKDXIPWLGHLLVGLSGAFGFIILVYLLINCRNXGPWLKKVLKCNXPDPSKFFSQLSSEHGGDVQKWLSSPFPSSSFSPGGLAPEISPLEVLERDKVXQLLLQQDKVPEPASLSSNHSLXSCFXNQGYFFFHLPDALEIEACQVYFXYDPYSEEDPDEGVAGAPXGSSPQPLQPLSGEDDAYCXFPSRDDLLLFSPSLLGGPSPPSXAPGGSGAGEERMPPSLQERVPRDWDPQPLGPPXPGVPDLVDFQPPPELVLREAGEEVPDAGPREGVSFPWSRPPGQGEFRALNARLPLNXDAYLSLQELQGQDPXHLV

SEQ ID NO: 13408 - protein, 105 aa, Homo sapiens
  MOD_RES (1)..(1): Selenocysteine
  MOD_RES (23)..(23): Selenocysteine
XCFYNSRANISCVWSQDGALQDXSCQVHAWPDRRSLQLPWDQAGMREQDKVPMREECHGASGGGSAPHSGWHRGPSLALLPGAILAAERSEKSPLGQLCGSFLFF

SEQ ID NO: 13409 - protein, 98 aa, Homo sapiens
  MOD_RES (15)..(15): Selenocysteine
  MOD_RES (21)..(21): Selenocysteine
  MOD_RES (30)..(30): Selenocysteine
  MOD_RES (93)..(93): Selenocysteine
  MOD_RES (98)..(98): Selenocysteine
MEPPNPLGEQYFKRXMPRIPXLKNLEDLVXEYHGNFSAWSGVSKGLAESLQPDYSERLCLVSEIPPKGGALGEGPGASPCNQHSPYWAPPCYXLKPEX

SEQ ID NO: 13410 - protein, 179 aa, Homo sapiens
  MOD_RES (5)..(5): Selenocysteine
  MOD_RES (30)..(30): Selenocysteine
  MOD_RES (60)..(60): Selenocysteine
  MOD_RES (96)..(96): Selenocysteine
  MOD_RES (102)..(102): Selenocysteine
  MOD_RES (111)..(111): Selenocysteine
  MOD_RES (174)..(174): Selenocysteine
  MOD_RES (179)..(179): Selenocysteine
MGMKXPQLEQSVDYRHKFSLPSVDGQKRYXFRVRSRFNPLCGSAQHWSEWSHPIHWGSNXSKENPFLFALEAVVISVGSMGLIISLLCVYFWLERXMPRIPXLKNLEDLVXEYHGNFSAWSGVSKGLAESLQPDYSERLCLVSEIPPKGGALGEGPGASPCNQHSPYWAPPCYXLKPEX

SEQ ID NO: 13411 - protein, 99 aa, Homo sapiens
  MOD_RES (5)..(5): Selenocysteine
  MOD_RES (22)..(23): Selenocysteine
  MOD_RES (26)..(26): Selenocysteine
  MOD_RES (33)..(33): Selenocysteine
  MOD_RES (52)..(52): Selenocysteine
  MOD_RES (62)..(62): Selenocysteine
  MOD_RES (65)..(65): Selenocysteine
  MOD_RES (91)..(91): Selenocysteine
MGMKXPQLVGNLGLEGADFFLXXMPXDSLSVSXLPLPEVQCFVFNVEYMNCXWNSSSEPQPXNLXLHYWYKNSDNDKVQKCSHYLFSEEIXSGCQLQKK

SEQ ID NO: 13412 - protein, 369 aa, Homo sapiens
  MOD_RES (9)..(9): Selenocysteine
  MOD_RES (25)..(26): Selenocysteine
  MOD_RES (29)..(29): Selenocysteine
  MOD_RES (36)..(37): Selenocysteine
  MOD_RES (43)..(44): Selenocysteine
  MOD_RES (47)..(47): Selenocysteine
  MOD_RES (54)..(54): Selenocysteine
  MOD_RES (73)..(73): Selenocysteine
  MOD_RES (83)..(83): Selenocysteine
  MOD_RES (86)..(86): Selenocysteine
  MOD_RES (112)..(112): Selenocysteine
  MOD_RES (127)..(127): Selenocysteine
  MOD_RES (143)..(143): Selenocysteine
  MOD_RES (161)..(161): Selenocysteine
  MOD_RES (191)..(191): Selenocysteine
  MOD_RES (198)..(198): Selenocysteine
  MOD_RES (220)..(220): Selenocysteine
  MOD_RES (250)..(250): Selenocysteine
  MOD_RES (286)..(286): Selenocysteine
  MOD_RES (292)..(292): Selenocysteine
  MOD_RES (301)..(301): Selenocysteine
  MOD_RES (364)..(364): Selenocysteine
  MOD_RES (369)..(369): Selenocysteine
MLKPSLPFXSLLFLQLPLLGVGLNXXILXPNGNEDXXADFFLXXMPXDSLSVSXLPLPEVQCFVFNVEYMNCXWNSSSEPQPXNLXLHYWYKNSDNDKVQKCSHYLFSEEIXSGCQLQKKEIHLYQXFVVQLQDPREPRRQAXQMLKLQNLVIPWAPENLXLHKLSESQLELNWNNRFLNHCLEHLVQYRXDWDHSWXEQSVDYRHKFSLPSVDGQKRYXFRVRSRFNPLCGSAQHWSEWSHPIHWGSNXSKENPFLFALEAVVISVGSMGLIISLLCVYFWLERXMPRIPXLKNLEDLVXEYHGNFSAWSGVSKGLAESLQPDYSERLCLVSEIPPKGGALGEGPGASPCNQHSPYWAPPCYXLKPEX

SEQ ID NO: 13413 - protein, 220 aa, Homo sapiens
  MOD_RES (3)..(3): Selenocysteine
  MOD_RES (10)..(10): Selenocysteine
  MOD_RES (29)..(29): Selenocysteine
  MOD_RES (39)..(39): Selenocysteine
  MOD_RES (42)..(42): Selenocysteine
  MOD_RES (68)..(68): Selenocysteine
  MOD_RES (83)..(83): Selenocysteine
  MOD_RES (99)..(99): Selenocysteine
  MOD_RES (117)..(117): Selenocysteine
  MOD_RES (147)..(147): Selenocysteine
  MOD_RES (154)..(154): Selenocysteine
  MOD_RES (176)..(176): Selenocysteine
  MOD_RES (206)..(206): Selenocysteine
MPXDSLSVSXLPLPEVQCFVFNVEYMNCXWNSSSEPQPXNLXLHYWYKNSDNDKVQKCSHYLFSEEIXSGCQLQKKEIHLYQXFVVQLQDPREPRRQAXQMLKLQNLVIPWAPENLXLHKLSESQLELNWNNRFLNHCLEHLVQYRXDWDHSWXEQSVDYRHKFSLPSVDGQKRYXFRVRSRFNPLCGSAQHWSEWSHPIHWGSNXSKENPFLFALEAVV

SEQ ID NO: 13414 - protein, 176 aa, Homo sapiens
  MOD_RES (31)..(32): Selenocysteine
  MOD_RES (35)..(35): Selenocysteine
  MOD_RES (42)..(42): Selenocysteine
  MOD_RES (61)..(61): Selenocysteine
  MOD_RES (71)..(71): Selenocysteine
  MOD_RES (74)..(74): Selenocysteine
  MOD_RES (100)..(100): Selenocysteine
  MOD_RES (115)..(115): Selenocysteine
  MOD_RES (131)..(131): Selenocysteine
  MOD_RES (149)..(149): Selenocysteine
MSHRAWPPPSDHHFSFPPCLHFLPNLDFFLXXMPXDSLSVSXLPLPEVQCFVFNVEYMNCXWNSSSEPQPXNLXLHYWYKNSDNDKVQKCSHYLFSEEIXSGCQLQKKEIHLYQXFVVQLQDPREPRRQAXQMLKLQNLVIPWAPENLXLHKLSESQLELNWNNRFLNHCLEHLVQ

SEQ ID NO: 13415 - protein, 65 aa, Homo sapiens
  MOD_RES (1)..(1): Any amino acid
  MOD_RES (3)..(3): Selenocysteine
  MOD_RES (25)..(25): Selenocysteine
  MOD_RES (55)..(55): Selenocysteine
XWXEQSVDYRHKFSLPSVDGQKRYXFRVRSRFNPLCGSAQHWSEWSHPIHWGSNXSKGRCPEFPP

SEQ ID NO: 13416 - protein, 152 aa, Homo sapiens
  MOD_RES (23)..(23): Selenocysteine
  MOD_RES (25)..(26): Selenocysteine
  MOD_RES (30)..(30): Selenocysteine
  MOD_RES (44)..(44): Selenocysteine
  MOD_RES (108)..(108): Selenocysteine
  MOD_RES (112)..(112): Selenocysteine
  MOD_RES (131)..(131): Selenocysteine
  MOD_RES (136)..(136): Selenocysteine
  MOD_RES (145)..(146): Selenocysteine
MSRLPVLLLLQLLVRPGLQAPMXQXXPLKXSWVNCSNMIDEIIXHLKQPPLPLLDFNNLNGEDQDILMENNLRRPNLEAFNRAVKSLQNASAIESILKNLLPCLPLAXAAPXRHPIHIKDGDWNEFRRKLXFYLKXLENAQAQQXXLSLAIF

SEQ ID NO: 13417 - protein, 582 aa, Homo sapiens
  MOD_RES (10)..(11): Selenocysteine
  MOD_RES (36)..(36): Selenocysteine
  MOD_RES (71)..(71): Selenocysteine
  MOD_RES (73)..(73): Selenocysteine
  MOD_RES (80)..(80): Selenocysteine
  MOD_RES (83)..(83): Selenocysteine
  MOD_RES (86)..(86): Selenocysteine
  MOD_RES (90)..(90): Selenocysteine
  MOD_RES (101)..(102): Selenocysteine
  MOD_RES (106)..(106): Selenocysteine
  MOD_RES (121)..(121): Selenocysteine
  MOD_RES (127)..(127): Selenocysteine
  MOD_RES (144)..(144): Selenocysteine
  MOD_RES (154)..(154): Selenocysteine
  MOD_RES (191)..(191): Selenocysteine
  MOD_RES (196)..(196): Selenocysteine
  MOD_RES (200)..(200): Selenocysteine
  MOD_RES (217)..(217): Selenocysteine
  MOD_RES (221)..(221): Selenocysteine
  MOD_RES (227)..(227): Selenocysteine
  MOD_RES (254)..(254): Selenocysteine
  MOD_RES (295)..(295): Selenocysteine
  MOD_RES (308)..(308): Selenocysteine
  MOD_RES (311)..(311): Selenocysteine
  MOD_RES (313)..(313): Selenocysteine
  MOD_RES (316)..(317): Selenocysteine
  MOD_RES (347)..(347): Selenocysteine
  MOD_RES (386)..(386): Selenocysteine
  MOD_RES (400)..(401): Selenocysteine
  MOD_RES (411)..(411): Selenocysteine
  MOD_RES (414)..(414): Selenocysteine
  MOD_RES (459)..(459): Selenocysteine
  MOD_RES (468)..(468): Selenocysteine
  MOD_RES (470)..(470): Selenocysteine
  MOD_RES (472)..(472): Selenocysteine
  MOD_RES (489)..(489): Selenocysteine
  MOD_RES (554)..(554): Selenocysteine
  MOD_RES (568)..(568): Selenocysteine
MCIRQLKFFXXACVCECPQNILSPQPSCVNLGMMWXWALWMLPSLCKFSLAALPAKPENISCVYYYRKNLXCXWSPGKEXSYXQYXVKRXYAFGEKHDNCXXNSSXSENRASCSFFLPRIXIPDNYXIEVEAENGDGVIKSHMXYWRLENIAKXEPPKIFRVKPVLGIKRMIQIEWIKPELAPVSSDLKYXLRFRXVNSXSWMEVNFAKNRKDKNQXYNLXGLQPFXEYVIALRCAVKESKFWSDWSQEKMGMXEEEAPCGLELWRVLKPAEADGRRPVRLLWKKARGAPVLEKXLGYNIWYYPESNXNLXEXMNXXNQQLELHLGGESFWVSMISYNSLGKSPVAXLRIPAIQEKSFQCIEVMQACVAEDQLVVKWQSSALDVNXWMIEWFPDVDSEPXXLSWESVSQAXNWXIQQDKLKPFWCYNISVYPMLHDKVGEPYSIQAYAKEGVPSEGPEXKVENIGVKXVXIXWKEIPKSERKGIICNYXIFYQAEGGKGFCKHAHSEVEKNPKPQIDAMDRPVVGMAPPSHCDLQPGMNHLASLNLSENGAKSXHLLGFWGLNESEVXVPERRVLRKWKELL

SEQ ID NO: 13418 - protein, 681 aa, Homo sapiens
  MOD_RES (10)..(11): Selenocysteine
  MOD_RES (36)..(36): Selenocysteine
  MOD_RES (71)..(71): Selenocysteine
  MOD_RES (73)..(73): Selenocysteine
  MOD_RES (80)..(80): Selenocysteine
  MOD_RES (83)..(83): Selenocysteine
  MOD_RES (86)..(86): Selenocysteine
  MOD_RES (90)..(90): Selenocysteine
  MOD_RES (101)..(102): Selenocysteine
  MOD_RES (106)..(106): Selenocysteine
  MOD_RES (121)..(121): Selenocysteine
  MOD_RES (127)..(127): Selenocysteine
  MOD_RES (144)..(144): Selenocysteine
  MOD_RES (154)..(154): Selenocysteine
  MOD_RES (191)..(191): Selenocysteine
  MOD_RES (196)..(196): Selenocysteine
  MOD_RES (200)..(200): Selenocysteine
  MOD_RES (217)..(217): Selenocysteine
  MOD_RES (221)..(221): Selenocysteine
  MOD_RES (227)..(227): Selenocysteine
  MOD_RES (254)..(254): Selenocysteine
  MOD_RES (295)..(295): Selenocysteine
  MOD_RES (308)..(308): Selenocysteine
  MOD_RES (311)..(311): Selenocysteine
  MOD_RES (313)..(313): Selenocysteine
  MOD_RES (316)..(317): Selenocysteine
  MOD_RES (347)..(347): Selenocysteine
  MOD_RES (386)..(386): Selenocysteine
  MOD_RES (400)..(401): Selenocysteine
  MOD_RES (411)..(411): Selenocysteine
  MOD_RES (414)..(414): Selenocysteine
  MOD_RES (459)..(459): Selenocysteine
  MOD_RES (468)..(468): Selenocysteine
  MOD_RES (470)..(470): Selenocysteine
  MOD_RES (472)..(472): Selenocysteine
  MOD_RES (489)..(489): Selenocysteine
  MOD_RES (503)..(503): Selenocysteine
  MOD_RES (520)..(520): Selenocysteine
  MOD_RES (530)..(530): Selenocysteine
  MOD_RES (535)..(535): Selenocysteine
  MOD_RES (538)..(538): Selenocysteine
  MOD_RES (544)..(544): Selenocysteine
  MOD_RES (556)..(556): Selenocysteine
  MOD_RES (570)..(570): Selenocysteine
  MOD_RES (582)..(582): Selenocysteine
  MOD_RES (588)..(588): Selenocysteine
  MOD_RES (599)..(599): Selenocysteine
  MOD_RES (620)..(620): Selenocysteine
  MOD_RES (630)..(630): Selenocysteine
  MOD_RES (653)..(653): Selenocysteine
  MOD_RES (658)..(658): Selenocysteine
  MOD_RES (671)..(671): Selenocysteine
  MOD_RES (679)..(679): Selenocysteine
MCIRQLKFFXXACVCECPQNILSPQPSCVNLGMMWXWALWMLPSLCKFSLAALPAKPENISCVYYYRKNLXCXWSPGKEXSYXQYXVKRXYAFGEKHDNCXXNSSXSENRASCSFFLPRIXIPDNYXIEVEAENGDGVIKSHMXYWRLENIAKXEPPKIFRVKPVLGIKRMIQIEWIKPELAPVSSDLKYXLRFRXVNSXSWMEVNFAKNRKDKNQXYNLXGLQPFXEYVIALRCAVKESKFWSDWSQEKMGMXEEEAPCGLELWRVLKPAEADGRRPVRLLWKKARGAPVLEKXLGYNIWYYPESNXNLXEXMNXXNQQLELHLGGESFWVSMISYNSLGKSPVAXLRIPAIQEKSFQCIEVMQACVAEDQLVVKWQSSALDVNXWMIEWFPDVDSEPXXLSWESVSQAXNWXIQQDKLKPFWCYNISVYPMLHDKVGEPYSIQAYAKEGVPSEGPEXKVENIGVKXVXIXWKEIPKSERKGIICNYXIFYQAEGGKGFSKXVNSSILQYGLESLKRKXSYIVQVMASXSAGGXNGXSINFKXLSFSVFEIILIXSLIGGGLLILIILXVAYGLKKPNKLXHLCWPXVPNPAESSIAXWHGDDFKDKLNLKESDDSVNXEDRILKPCSXPSDKLVIDKLVVNFGNVLQEIFXDEARXGQENNLGGEKNGXRILSSCPXSI

SEQ ID NO: 13419 - protein, 764 aa, Homo sapiens
  MOD_RES (10)..(11): Selenocysteine
  MOD_RES (36)..(36): Selenocysteine
  MOD_RES (71)..(71): Selenocysteine
  MOD_RES (73)..(73): Selenocysteine
  MOD_RES (80)..(80): Selenocysteine
  MOD_RES (83)..(83): Selenocysteine
  MOD_RES (86)..(86): Selenocysteine
  MOD_RES (90)..(90): Selenocysteine
  MOD_RES (101)..(102): Selenocysteine
  MOD_RES (106)..(106): Selenocysteine
  MOD_RES (121)..(121): Selenocysteine
  MOD_RES (127)..(127): Selenocysteine
  MOD_RES (144)..(144): Selenocysteine
  MOD_RES (154)..(154): Selenocysteine
  MOD_RES (191)..(191): Selenocysteine
  MOD_RES (196)..(196): Selenocysteine
  MOD_RES (200)..(200): Selenocysteine
  MOD_RES (217)..(217): Selenocysteine
  MOD_RES (221)..(221): Selenocysteine
  MOD_RES (227)..(227): Selenocysteine
  MOD_RES (254)..(254): Selenocysteine
  MOD_RES (295)..(295): Selenocysteine
  MOD_RES (308)..(308): Selenocysteine
  MOD_RES (311)..(311): Selenocysteine
  MOD_RES (313)..(313): Selenocysteine
  MOD_RES (316)..(317): Selenocysteine
  MOD_RES (347)..(347): Selenocysteine
  MOD_RES (386)..(386): Selenocysteine
  MOD_RES (400)..(401): Selenocysteine
  MOD_RES (411)..(411): Selenocysteine
  MOD_RES (414)..(414): Selenocysteine
  MOD_RES (459)..(459): Selenocysteine
  MOD_RES (468)..(468): Selenocysteine
  MOD_RES (470)..(470): Selenocysteine
  MOD_RES (472)..(472): Selenocysteine
  MOD_RES (489)..(489): Selenocysteine
  MOD_RES (503)..(503): Selenocysteine
  MOD_RES (520)..(520): Selenocysteine
  MOD_RES (530)..(530): Selenocysteine
  MOD_RES (535)..(535): Selenocysteine
  MOD_RES (538)..(538): Selenocysteine
  MOD_RES (544)..(544): Selenocysteine
  MOD_RES (556)..(556): Selenocysteine
  MOD_RES (570)..(570): Selenocysteine
  MOD_RES (582)..(582): Selenocysteine
  MOD_RES (588)..(588): Selenocysteine
  MOD_RES (599)..(599): Selenocysteine
  MOD_RES (620)..(620): Selenocysteine
  MOD_RES (630)..(630): Selenocysteine
  MOD_RES (653)..(653): Selenocysteine
  MOD_RES (658)..(658): Selenocysteine
  MOD_RES (673)..(673): Selenocysteine
  MOD_RES (711)..(711): Selenocysteine
  MOD_RES (746)..(746): Selenocysteine
  MOD_RES (760)..(760): Selenocysteine
MCIRQLKFFXXACVCECPQNILSPQPSCVNLGMMWXWALWMLPSLCKFSLAALPAKPENISCVYYYRKNLXCXWSPGKEXSYXQYXVKRXYAFGEKHDNCXXNSSXSENRASCSFFLPRIXIPDNYXIEVEAENGDGVIKSHMXYWRLENIAKXEPPKIFRVKPVLGIKRMIQIEWIKPELAPVSSDLKYXLRFRXVNSXSWMEVNFAKNRKDKNQXYNLXGLQPFXEYVIALRCAVKESKFWSDWSQEKMGMXEEEAPCGLELWRVLKPAEADGRRPVRLLWKKARGAPVLEKXLGYNIWYYPESNXNLXEXMNXXNQQLELHLGGESFWVSMISYNSLGKSPVAXLRIPAIQEKSFQCIEVMQACVAEDQLVVKWQSSALDVNXWMIEWFPDVDSEPXXLSWESVSQAXNWXIQQDKLKPFWCYNISVYPMLHDKVGEPYSIQAYAKEGVPSEGPEXKVENIGVKXVXIXWKEIPKSERKGIICNYXIFYQAEGGKGFSKXVNSSILQYGLESLKRKXSYIVQVMASXSAGGXNGXSINFKXLSFSVFEIILIXSLIGGGLLILIILXVAYGLKKPNKLXHLCWPXVPNPAESSIAXWHGDDFKDKLNLKESDDSVNXEDRILKPCSXPSDKLVIDKLVVNFGNVLQEIFXDEARXGQENNLGGEKNGYVXCPFRPDCPLGKSFEELPVSPEIPPRKSQYLRSRMPEGXRPEAKEQLLFSGQSLVPDHLCEEGAPNPYLKNSVXAREFLVSEKLPEHXKGEV

SEQ ID NO: 13420 - protein, 662 aa, Homo sapiens
  MOD_RES (17)..(17): Selenocysteine
  MOD_RES (52)..(52): Selenocysteine
  MOD_RES (54)..(54): Selenocysteine
  MOD_RES (61)..(61): Selenocysteine
  MOD_RES (64)..(64): Selenocysteine
  MOD_RES (67)..(67): Selenocysteine
  MOD_RES (71)..(71): Selenocysteine
  MOD_RES (82)..(83): Selenocysteine
  MOD_RES (87)..(87): Selenocysteine
  MOD_RES (102)..(102): Selenocysteine
  MOD_RES (108)..(108): Selenocysteine
  MOD_RES (125)..(125): Selenocysteine
  MOD_RES (135)..(135): Selenocysteine
  MOD_RES (172)..(172): Selenocysteine
  MOD_RES (177)..(177): Selenocysteine
  MOD_RES (181)..(181): Selenocysteine
  MOD_RES (198)..(198): Selenocysteine
  MOD_RES (202)..(202): Selenocysteine
  MOD_RES (208)..(208): Selenocysteine
  MOD_RES (235)..(235): Selenocysteine
  MOD_RES (276)..(276): Selenocysteine
  MOD_RES (289)..(289): Selenocysteine
  MOD_RES (292)..(292): Selenocysteine
  MOD_RES (294)..(294): Selenocysteine
  MOD_RES (297)..(298): Selenocysteine
  MOD_RES (328)..(328): Selenocysteine
  MOD_RES (367)..(367): Selenocysteine
  MOD_RES (381)..(382): Selenocysteine
  MOD_RES (392)..(392): Selenocysteine
  MOD_RES (395)..(395): Selenocysteine
  MOD_RES (440)..(440): Selenocysteine
  MOD_RES (449)..(449): Selenocysteine
  MOD_RES (451)..(451): Selenocysteine
  MOD_RES (453)..(453): Selenocysteine
  MOD_RES (470)..(470): Selenocysteine
  MOD_RES (484)..(484): Selenocysteine
  MOD_RES (501)..(501): Selenocysteine
  MOD_RES (511)..(511): Selenocysteine
  MOD_RES (516)..(516): Selenocysteine
  MOD_RES (519)..(519): Selenocysteine
  MOD_RES (525)..(525): Selenocysteine
  MOD_RES (537)..(537): Selenocysteine
  MOD_RES (551)..(551): Selenocysteine
  MOD_RES (563)..(563): Selenocysteine
  MOD_RES (569)..(569): Selenocysteine
  MOD_RES (580)..(580): Selenocysteine
  MOD_RES (601)..(601): Selenocysteine
  MOD_RES (611)..(611): Selenocysteine
  MOD_RES (634)..(634): Selenocysteine
  MOD_RES (639)..(639): Selenocysteine
  MOD_RES (652)..(652): Selenocysteine
  MOD_RES (660)..(660): Selenocysteine
MKLSPQPSCVNLGMMWXWALWMLPSLCKFSLAALPAKPENISCVYYYRKNLXCXWSPGKEXSYXQYXVKRXYAFGEKHDNCXXNSSXSENRASCSFFLPRIXIPDNYXIEVEAENGDGVIKSHMXYWRLENIAKXEPPKIFRVKPVLGIKRMIQIEWIKPELAPVSSDLKYXLRFRXVNSXSWMEVNFAKNRKDKNQXYNLXGLQPFXEYVIALRCAVKESKFWSDWSQEKMGMXEEEAPCGLELWRVLKPAEADGRRPVRLLWKKARGAPVLEKXLGYNIWYYPESNXNLXEXMNXXNQQLELHLGGESFWVSMISYNSLGKSPVAXLRIPAIQEKSFQCIEVMQACVAEDQLVVKWQSSALDVNXWMIEWFPDVDSEPXXLSWESVSQAXNWXIQQDKLKPFWCYNISVYPMLHDKVGEPYSIQAYAKEGVPSEGPEXKVENIGVKXVXIXWKEIPKSERKGIICNYXIFYQAEGGKGFSKXVNSSILQYGLESLKRKXSYIVQVMASXSAGGXNGXSINFKXLSFSVFEIILIXSLIGGGLLILIILXVAYGLKKPNKLXHLCWPXVPNPAESSIAXWHGDDFKDKLNLKESDDSVNXEDRILKPCSXPSDKLVIDKLVVNFGNVLQEIFXDEARXGQENNLGGEKNGXRILSSCPXSI

SEQ ID NO: 13421 - protein, 745 aa, Homo sapiens
  MOD_RES (17)..(17): Selenocysteine
  MOD_RES (52)..(52): Selenocysteine
  MOD_RES (54)..(54): Selenocysteine
  MOD_RES (61)..(61): Selenocysteine
  MOD_RES (64)..(64): Selenocysteine
  MOD_RES (67)..(67): Selenocysteine
  MOD_RES (71)..(71): Selenocysteine
  MOD_RES (82)..(83): Selenocysteine
  MOD_RES (87)..(87): Selenocysteine
  MOD_RES (102)..(102): Selenocysteine
  MOD_RES (108)..(108): Selenocysteine
  MOD_RES (125)..(125): Selenocysteine
  MOD_RES (135)..(135): Selenocysteine
  MOD_RES (172)..(172): Selenocysteine
  MOD_RES (177)..(177): Selenocysteine
  MOD_RES (181)..(181): Selenocysteine
  MOD_RES (198)..(198): Selenocysteine
  MOD_RES (202)..(202): Selenocysteine
  MOD_RES (208)..(208): Selenocysteine
  MOD_RES (235)..(235): Selenocysteine
  MOD_RES (276)..(276): Selenocysteine
  MOD_RES (289)..(289): Selenocysteine
  MOD_RES (292)..(292): Selenocysteine
  MOD_RES (294)..(294): Selenocysteine
  MOD_RES (297)..(298): Selenocysteine
  MOD_RES (328)..(328): Selenocysteine
  MOD_RES (367)..(367): Selenocysteine
  MOD_RES (381)..(382): Selenocysteine
  MOD_RES (392)..(392): Selenocysteine
  MOD_RES (395)..(395): Selenocysteine
  MOD_RES (440)..(440): Selenocysteine
  MOD_RES (449)..(449): Selenocysteine
  MOD_RES (451)..(451): Selenocysteine
  MOD_RES (453)..(453): Selenocysteine
  MOD_RES (470)..(470): Selenocysteine
  MOD_RES (484)..(484): Selenocysteine
  MOD_RES (501)..(501): Selenocysteine
  MOD_RES (511)..(511): Selenocysteine
  MOD_RES (516)..(516): Selenocysteine
  MOD_RES (519)..(519): Selenocysteine
  MOD_RES (525)..(525): Selenocysteine
  MOD_RES (537)..(537): Selenocysteine
  MOD_RES (551)..(551): Selenocysteine
  MOD_RES (563)..(563): Selenocysteine
  MOD_RES (569)..(569): Selenocysteine
  MOD_RES (580)..(580): Selenocysteine
  MOD_RES (601)..(601): Selenocysteine
  MOD_RES (611)..(611): Selenocysteine
  MOD_RES (634)..(634): Selenocysteine
  MOD_RES (639)..(639): Selenocysteine
  MOD_RES (654)..(654): Selenocysteine
  MOD_RES (692)..(692): Selenocysteine
  MOD_RES (727)..(727): Selenocysteine
  MOD_RES (741)..(741): Selenocysteine
MKLSPQPSCVNLGMMWXWALWMLPSLCKFSLAALPAKPENISCVYYYRKNLXCXWSPGKEXSYXQYXVKRXYAFGEKHDNCXXNSSXSENRASCSFFLPRIXIPDNYXIEVEAENGDGVIKSHMXYWRLENIAKXEPPKIFRVKPVLGIKRMIQIEWIKPELAPVSSDLKYXLRFRXVNSXSWMEVNFAKNRKDKNQXYNLXGLQPFXEYVIALRCAVKESKFWSDWSQEKMGMXEEEAPCGLELWRVLKPAEADGRRPVRLLWKKARGAPVLEKXLGYNIWYYPESNXNLXEXMNXXNQQLELHLGGESFWVSMISYNSLGKSPVAXLRIPAIQEKSFQCIEVMQACVAEDQLVVKWQSSALDVNXWMIEWFPDVDSEPXXLSWESVSQAXNWXIQQDKLKPFWCYNISVYPMLHDKVGEPYSIQAYAKEGVPSEGPEXKVENIGVKXVXIXWKEIPKSERKGIICNYXIFYQAEGGKGFSKXVNSSILQYGLESLKRKXSYIVQVMASXSAGGXNGXSINFKXLSFSVFEIILIXSLIGGGLLILIILXVAYGLKKPNKLXHLCWPXVPNPAESSIAXWHGDDFKDKLNLKESDDSVNXEDRILKPCSXPSDKLVIDKLVVNFGNVLQEIFXDEARXGQENNLGGEKNGYVXCPFRPDCPLGKSFEELPVSPEIPPRKSQYLRSRMPEGXRPEAKEQLLFSGQSLVPDHLCEEGAPNPYLKNSVXAREFLVSEKLPEHXKGEV

SEQ ID NO: 13422 - protein, 324 aa, Homo sapiens
  MOD_RES (4)..(4): Selenocysteine
  MOD_RES (39)..(39): Selenocysteine
  MOD_RES (41)..(41): Selenocysteine
  MOD_RES (48)..(48): Selenocysteine
  MOD_RES (51)..(51): Selenocysteine
  MOD_RES (54)..(54): Selenocysteine
  MOD_RES (58)..(58): Selenocysteine
  MOD_RES (69)..(70): Selenocysteine
  MOD_RES (74)..(74): Selenocysteine
  MOD_RES (89)..(89): Selenocysteine
  MOD_RES (95)..(95): Selenocysteine
  MOD_RES (112)..(112): Selenocysteine
  MOD_RES (122)..(122): Selenocysteine
  MOD_RES (159)..(159): Selenocysteine
  MOD_RES (164)..(164): Selenocysteine
  MOD_RES (168)..(168): Selenocysteine
  MOD_RES (185)..(185): Selenocysteine
  MOD_RES (189)..(189): Selenocysteine
  MOD_RES (195)..(195): Selenocysteine
  MOD_RES (222)..(222): Selenocysteine
  MOD_RES (263)..(263): Selenocysteine
  MOD_RES (276)..(276): Selenocysteine
  MOD_RES (279)..(279): Selenocysteine
  MOD_RES (281)..(281): Selenocysteine
  MOD_RES (284)..(285): Selenocysteine
  MOD_RES (315)..(315): Selenocysteine
MMWXWALWMLPSLCKFSLAALPAKPENISCVYYYRKNLXCXWSPGKEXSYXQYXVKRXYAFGEKHDNCXXNSSXSENRASCSFFLPRIXIPDNYXIEVEAENGDGVIKSHMXYWRLENIAKXEPPKIFRVKPVLGIKRMIQIEWIKPELAPVSSDLKYXLRFRXVNSXSWMEVNFAKNRKDKNQXYNLXGLQPFXEYVIALRCAVKESKFWSDWSQEKMGMXEEEAPCGLELWRVLKPAEADGRRPVRLLWKKARGAPVLEKXLGYNIWYYPESNXNLXEXMNXXNQQLELHLGGESFWVSMISYNSLGKSPVAXLRIPAIQEK

SEQ ID NO: 13423 - protein, 622 aa, Homo sapiens
  MOD_RES (2)..(2): Selenocysteine
  MOD_RES (12)..(12): Selenocysteine
  MOD_RES (49)..(49): Selenocysteine
  MOD_RES (54)..(54): Selenocysteine
  MOD_RES (58)..(58): Selenocysteine
  MOD_RES (75)..(75): Selenocysteine
  MOD_RES (79)..(79): Selenocysteine
  MOD_RES (85)..(85): Selenocysteine
  MOD_RES (112)..(112): Selenocysteine
  MOD_RES (153)..(153): Selenocysteine
  MOD_RES (166)..(166): Selenocysteine
  MOD_RES (169)..(169): Selenocysteine
  MOD_RES (171)..(171): Selenocysteine
  MOD_RES (174)..(175): Selenocysteine
  MOD_RES (205)..(205): Selenocysteine
  MOD_RES (244)..(244): Selenocysteine
  MOD_RES (258)..(259): Selenocysteine
  MOD_RES (269)..(269): Selenocysteine
  MOD_RES (272)..(272): Selenocysteine
  MOD_RES (317)..(317): Selenocysteine
  MOD_RES (326)..(326): Selenocysteine
  MOD_RES (328)..(328): Selenocysteine
  MOD_RES (330)..(330): Selenocysteine
  MOD_RES (347)..(347): Selenocysteine
  MOD_RES (361)..(361): Selenocysteine
  MOD_RES (378)..(378): Selenocysteine
  MOD_RES (388)..(388): Selenocysteine
  MOD_RES (393)..(393): Selenocysteine
  MOD_RES (396)..(396): Selenocysteine
  MOD_RES (402)..(402): Selenocysteine
  MOD_RES (414)..(414): Selenocysteine
  MOD_RES (428)..(428): Selenocysteine
  MOD_RES (440)..(440): Selenocysteine
  MOD_RES (446)..(446): Selenocysteine
  MOD_RES (457)..(457): Selenocysteine
  MOD_RES (478)..(478): Selenocysteine
  MOD_RES (488)..(488): Selenocysteine
  MOD_RES (511)..(511): Selenocysteine
  MOD_RES (516)..(516): Selenocysteine
  MOD_RES (531)..(531): Selenocysteine
  MOD_RES (569)..(569): Selenocysteine
  MOD_RES (604)..(604): Selenocysteine
  MOD_RES (618)..(618): Selenocysteine
MXYWRLENIAKXEPPKIFRVKPVLGIKRMIQIEWIKPELAPVSSDLKYXLRFRXVNSXSWMEVNFAKNRKDKNQXYNLXGLQPFXEYVIALRCAVKESKFWSDWSQEKMGMXEEEAPCGLELWRVLKPAEADGRRPVRLLWKKARGAPVLEKXLGYNIWYYPESNXNLXEXMNXXNQQLELHLGGESFWVSMISYNSLGKSPVAXLRIPAIQEKSFQCIEVMQACVAEDQLVVKWQSSALDVNXWMIEWFPDVDSEPXXLSWESVSQAXNWXIQQDKLKPFWCYNISVYPMLHDKVGEPYSIQAYAKEGVPSEGPEXKVENIGVKXVXIXWKEIPKSERKGIICNYXIFYQAEGGKGFSKXVNSSILQYGLESLKRKXSYIVQVMASXSAGGXNGXSINFKXLSFSVFEIILIXSLIGGGLLILIILXVAYGLKKPNKLXHLCWPXVPNPAESSIAXWHGDDFKDKLNLKESDDSVNXEDRILKPCSXPSDKLVIDKLVVNFGNVLQEIFXDEARXGQENNLGGEKNGYVXCPFRPDCPLGKSFEELPVSPEIPPRKSQYLRSRMPEGXRPEAKEQLLFSGQSLVPDHLCEEGAPNPYLKNSVXAREFLVSEKLPEHXKGEV

SEQ ID NO: 13424 - protein, 228 aa, Homo sapiens
  MOD_RES (9)..(9): Selenocysteine
  MOD_RES (14)..(14): Selenocysteine
  MOD_RES (20)..(20): Selenocysteine
  MOD_RES (64)..(65): Selenocysteine
  MOD_RES (72)..(72): Selenocysteine
  MOD_RES (78)..(78): Selenocysteine
  MOD_RES (86)..(86): Selenocysteine
  MOD_RES (93)..(93): Selenocysteine
  MOD_RES (143)..(143): Selenocysteine
  MOD_RES (147)..(147): Selenocysteine
  MOD_RES (192)..(192): Selenocysteine
  MOD_RES (218)..(218): Selenocysteine
  MOD_RES (228)..(228): Selenocysteine
MKPKMKYSXNKISXAKWKNXASKALCFKLGKSQQKAKEVCPMYFMKLRSGLMIKKEACYFRREXXKRPSLKXGISPIXEYLASLSXYNDQSIXFALEDESYEIYVEDLKKDEKKDKVLLSYYESQHPSNESGDGVDGKMLMVXLSPXKDFWLHANNKEHSVELHKCEKPLPDQAFFVLHNMHSNCVSFECKXDPGVFIGVKDNHLALIKVDSSENLCXENILFKLSEX

SEQ ID NO: 13425 - protein, 228 aa, Homo sapiens
  MOD_RES (9)..(9): Selenocysteine
  MOD_RES (14)..(14): Selenocysteine
  MOD_RES (20)..(20): Selenocysteine
  MOD_RES (64)..(65): Selenocysteine
  MOD_RES (72)..(72): Selenocysteine
  MOD_RES (90)..(90): Selenocysteine
  MOD_RES (105)..(105): Selenocysteine
  MOD_RES (114)..(114): Selenocysteine
  MOD_RES (143)..(143): Selenocysteine
  MOD_RES (147)..(147): Selenocysteine
  MOD_RES (192)..(192): Selenocysteine
  MOD_RES (218)..(218): Selenocysteine
  MOD_RES (228)..(228): Selenocysteine
MKPKMKYSXNKISXAKWKNXASKALCFKLGKSQQKAKEVCPMYFMKLRSGLMIKKEACYFRREXXKRPSLKXGRKHKRHLVLAACQQQSXVECFAFGISGVQKYXRALHDSSIXDKVLLSYYESQHPSNESGDGVDGKMLMVXLSPXKDFWLHANNKEHSVELHKCEKPLPDQAFFVLHNMHSNCVSFECKXDPGVFIGVKDNHLALIKVDSSENLCXENILFKLSEX

SEQ ID NO: 13426 - protein, 270 aa, Homo sapiens
  MOD_RES (9)..(9): Selenocysteine
  MOD_RES (14)..(14): Selenocysteine
  MOD_RES (20)..(20): Selenocysteine
  MOD_RES (64)..(65): Selenocysteine
  MOD_RES (72)..(72): Selenocysteine
  MOD_RES (90)..(90): Selenocysteine
  MOD_RES (105)..(105): Selenocysteine
  MOD_RES (114)..(114): Selenocysteine
  MOD_RES (120)..(120): Selenocysteine
  MOD_RES (128)..(128): Selenocysteine
  MOD_RES (135)..(135): Selenocysteine
  MOD_RES (185)..(185): Selenocysteine
  MOD_RES (189)..(189): Selenocysteine
  MOD_RES (234)..(234): Selenocysteine
  MOD_RES (260)..(260): Selenocysteine
  MOD_RES (270)..(270): Selenocysteine
MKPKMKYSXNKISXAKWKNXASKALCFKLGKSQQKAKEVCPMYFMKLRSGLMIKKEACYFRREXXKRPSLKXGRKHKRHLVLAACQQQSXVECFAFGISGVQKYXRALHDSSIXGISPIXEYLASLSXYNDQSIXFALEDESYEIYVEDLKKDEKKDKVLLSYYESQHPSNESGDGVDGKMLMVXLSPXKDFWLHANNKEHSVELHKCEKPLPDQAFFVLHNMHSNCVSFECKXDPGVFIGVKDNHLALIKVDSSENLCXENILFKLSEX

SEQ ID NO: 13427 - protein, 144 aa, Homo sapiens
  MOD_RES (9)..(9): Selenocysteine
  MOD_RES (14)..(14): Selenocysteine
  MOD_RES (20)..(20): Selenocysteine
  MOD_RES (59)..(59): Selenocysteine
  MOD_RES (63)..(63): Selenocysteine
  MOD_RES (108)..(108): Selenocysteine
  MOD_RES (134)..(134): Selenocysteine
  MOD_RES (144)..(144): Selenocysteine
MKPKMKYSXNKISXAKWKNXASKALCFKLGNKVLLSYYESQHPSNESGDGVDGKMLMVXLSPXKDFWLHANNKEHSVELHKCEKPLPDQAFFVLHNMHSNCVSFECKXDPGVFIGVKDNHLALIKVDSSENLCXENILFKLSEX

SEQ ID NO: 13428 - protein, 158 aa, Homo sapiens
  MOD_RES (9)..(9): Selenocysteine
  MOD_RES (29)..(29): Selenocysteine
  MOD_RES (43)..(43): Selenocysteine
  MOD_RES (54)..(54): Selenocysteine
  MOD_RES (84)..(84): Selenocysteine
  MOD_RES (117)..(117): Selenocysteine
  MOD_RES (141)..(141): Selenocysteine
  MOD_RES (149)..(150): Selenocysteine
  MOD_RES (155)..(155): Selenocysteine
MEKALKIDXPQQGSIQDINHRVWVLQDQXLIAVPRKDRMSPVXIALISCRHVEXLEKDRGNPIYLGLNGLNLCLMCAKVGDQPXLQLKEKDIMDLYNQPEPVKSFLFYHSQSGRNSXFESVAFPGWFIAVSSEGGCPLILXQELGKANXXDFGLXMLF

SEQ ID NO: 13429 - protein, 157 aa, Homo sapiens
  MOD_RES (42)..(42): Selenocysteine
  MOD_RES (51)..(51): Selenocysteine
  MOD_RES (83)..(83): Selenocysteine
  MOD_RES (114)..(114): Selenocysteine
  MOD_RES (129)..(129): Selenocysteine
  MOD_RES (131)..(132): Selenocysteine
  MOD_RES (140)..(140): Selenocysteine
  MOD_RES (146)..(146): Selenocysteine
  MOD_RES (149)..(149): Selenocysteine
MNPQREAAPKSYAIRDSRQMVWVLSGNSLIAAPLSRSIKPVXLHLIACRDXEFSDKEKGNMVYLGIKGKDLCLFCAEIQGKPXLQLKEKNIMDLYVEKKAQKPFLFFHNKEGSXSVFQSVSYPGWFIAXSXXSGQPIFLXKERGIXNNXNFYLDSVE

SEQ ID NO: 13430 - protein, 164 aa, Homo sapiens
  MOD_RES (42)..(42): Selenocysteine
  MOD_RES (51)..(51): Selenocysteine
  MOD_RES (83)..(83): Selenocysteine
  MOD_RES (99)..(99): Selenocysteine
  MOD_RES (108)..(108): Selenocysteine
  MOD_RES (122)..(122): Selenocysteine
  MOD_RES (156)..(156): Selenocysteine
MNPQREAAPKSYAIRDSRQMVWVLSGNSLIAAPLSRSIKPVXLHLIACRDXEFSDKEKGNMVYLGIKGKDLCLFCAEIQGKPXLQLKLQGSQDNIGKDXCWKLVGIHXCINLDVRESCFMGXLDQWGIGVGRKKWKSSFQHHHLRKKDKDFSSMRXNIGMPGRM

SEQ ID NO: 13431 - protein, 134 aa, Homo sapiens
  MOD_RES (4)..(4): Selenocysteine
  MOD_RES (20)..(20): Selenocysteine
  MOD_RES (25)..(25): Selenocysteine
  MOD_RES (61)..(61): Selenocysteine
  MOD_RES (89)..(89): Selenocysteine
  MOD_RES (92)..(92): Selenocysteine
  MOD_RES (94)..(94): Selenocysteine
  MOD_RES (117)..(117): Selenocysteine
  MOD_RES (126)..(126): Selenocysteine
MRGXPGDADGGGRAVYQSIXVAVIXCKYPEALEQGRGDPIYLGIQNPEMCLYCEKVGEQPXLQLKEQKIMDLYGQPEPVKPFLFYRAKXGRXSXLESVAFPDWFIASSKRDQPIILXSELGKSYNXAFELNIND

SEQ ID NO: 13432 - protein, 38 aa, Homo sapiens
  MOD_RES (4)..(4): Selenocysteine
  MOD_RES (24)..(24): Selenocysteine
  MOD_RES (26)..(26): Selenocysteine
  MOD_RES (36)..(36): Selenocysteine
MRGXPGDADGGGRAVYQSMCKPIXGXINDLNQQVWXLQ

SEQ ID NO: 13433 - protein, 169 aa, Homo sapiens
  MOD_RES (4)..(4): Selenocysteine
  MOD_RES (24)..(24): Selenocysteine
  MOD_RES (26)..(26): Selenocysteine
  MOD_RES (36)..(36): Selenocysteine
  MOD_RES (52)..(52): Selenocysteine
  MOD_RES (55)..(55): Selenocysteine
  MOD_RES (60)..(60): Selenocysteine
  MOD_RES (96)..(96): Selenocysteine
  MOD_RES (124)..(124): Selenocysteine
  MOD_RES (127)..(127): Selenocysteine
  MOD_RES (129)..(129): Selenocysteine
  MOD_RES (152)..(152): Selenocysteine
  MOD_RES (161)..(161): Selenocysteine
MRGXPGDADGGGRAVYQSMCKPIXGXINDLNQQVWXLQGQNLVAVPRSDSVXPVXVAVIXCKYPEALEQGRGDPIYLGIQNPEMCLYCEKVGEQPXLQLKEQKIMDLYGQPEPVKPFLFYRAKXGRXSXLESVAFPDWFIASSKRDQPIILXSELGKSYNXAFELNIND

SEQ ID NO: 13434 - protein, 117 aa, Homo sapiens
  MOD_RES (77)..(77): Selenocysteine
  MOD_RES (79)..(79): Selenocysteine
  MOD_RES (99)..(99): Selenocysteine
  MOD_RES (108)..(108): Selenocysteine
MVLSGALCFRMKDSALKVLYLHNNQLLAGGLHAGKVIKGEEISVVPNRWLDASLSPVILGVQGGSQCLSCGVGQEPXLXLEPVNIMELYLGAKESKSFXFYRRDMGLXSSFESAAYP

SEQ ID NO: 13435 - protein, 155 aa, Homo sapiens
  MOD_RES (77)..(77): Selenocysteine
  MOD_RES (79)..(79): Selenocysteine
  MOD_RES (99)..(99): Selenocysteine
  MOD_RES (108)..(108): Selenocysteine
  MOD_RES (123)..(123): Selenocysteine
  MOD_RES (134)..(134): Selenocysteine
  MOD_RES (147)..(147): Selenocysteine
MVLSGALCFRMKDSALKVLYLHNNQLLAGGLHAGKVIKGEEISVVPNRWLDASLSPVILGVQGGSQCLSCGVGQEPXLXLEPVNIMELYLGAKESKSFXFYRRDMGLXSSFESAAYPGWFLCXVPEADQPVRLXQLPENGGWNAPIXDFYFQQCD

SEQ ID NO: 13436 - protein, 52 aa, Homo sapiens
  MOD_RES (1)..(1): Any amino acid
  MOD_RES (5)..(5): Selenocysteine
  MOD_RES (20)..(20): Selenocysteine
  MOD_RES (31)..(31): Selenocysteine
  MOD_RES (44)..(44): Selenocysteine
XMGLXSSFESAAYPGWFLCXVPEADQPVRLXQLPENGGWNAPIXDFYFQQCD

SEQ ID NO: 13437 - protein, 178 aa, Homo sapiens
  MOD_RES (42)..(42): Selenocysteine
  MOD_RES (48)..(48): Selenocysteine
  MOD_RES (139)..(139): Selenocysteine
  MOD_RES (150)..(150): Selenocysteine
MSFVGENSGVKMGSEDWEKDEPQCCLEDPAGSPLEPGPSLPXMNFVHXKIFFALASSLSSASAEKGSPILLGVSKGEFCLYCDKDKGQSHPSLQLKKEKLMKLAAQKESARRPFIFYRAQVGSWNMLESAAHPGWFICXSCNCNEPVGVXDKFENRKHIEFSFQPVCKAEMSPSEVSD

SEQ ID NO: 13438 - protein, 218 aa, Homo sapiens
  MOD_RES (42)..(42): Selenocysteine
  MOD_RES (48)..(48): Selenocysteine
  MOD_RES (179)..(179): Selenocysteine
  MOD_RES (190)..(190): Selenocysteine
MSFVGENSGVKMGSEDWEKDEPQCCLEDPAGSPLEPGPSLPXMNFVHXSPKVKNLNPKKFSIHDQDHKVLVLDSGNLIAVPDKNYIRPEIFFALASSLSSASAEKGSPILLGVSKGEFCLYCDKDKGQSHPSLQLKKEKLMKLAAQKESARRPFIFYRAQVGSWNMLESAAHPGWFICXSCNCNEPVGVXDKFENRKHIEFSFQPVCKAEMSPSEVSD

SEQ ID NO: 13439 - protein, 157 aa, Homo sapiens
  MOD_RES (118)..(118): Selenocysteine
  MOD_RES (129)..(129): Selenocysteine
MSFVGENSGVKMGSEDWEKDEPQCCLEEIFFALASSLSSASAEKGSPILLGVSKGEFCLYCDKDKGQSHPSLQLKKEKLMKLAAQKESARRPFIFYRAQVGSWNMLESAAHPGWFICXSCNCNEPVGVXDKFENRKHIEFSFQPVCKAEMSPSEVSD

SEQ ID NO: 13440 - protein, 197 aa, Homo sapiens
  MOD_RES (158)..(158): Selenocysteine
  MOD_RES (169)..(169): Selenocysteine
MSFVGENSGVKMGSEDWEKDEPQCCLEGPKVKNLNPKKFSIHDQDHKVLVLDSGNLIAVPDKNYIRPEIFFALASSLSSASAEKGSPILLGVSKGEFCLYCDKDKGQSHPSLQLKKEKLMKLAAQKESARRPFIFYRAQVGSWNMLESAAHPGWFICXSCNCNEPVGVXDKFENRKHIEFSFQPVCKAEMSPSEVSD

SEQ ID NO: 13441 - protein, 192 aa, Homo sapiens
  MOD_RES (9)..(9): Selenocysteine
  MOD_RES (11)..(11): Selenocysteine
  MOD_RES (153)..(153): Selenocysteine
  MOD_RES (164)..(164): Selenocysteine
MSGCDRREXEXKGKNSFKKRLRGPKVKNLNPKKFSIHDQDHKVLVLDSGNLIAVPDKNYIRPEIFFALASSLSSASAEKGSPILLGVSKGEFCLYCDKDKGQSHPSLQLKKEKLMKLAAQKESARRPFIFYRAQVGSWNMLESAAHPGWFICXSCNCNEPVGVXDKFENRKHIEFSFQPVCKAEMSPSEVSD

SEQ ID NO: 13442 - protein, 378 aa, Homo sapiens
  MOD_RES (7)..(7): Selenocysteine
  MOD_RES (19)..(19): Selenocysteine
  MOD_RES (28)..(28): Selenocysteine
  MOD_RES (40)..(40): Selenocysteine
  MOD_RES (48)..(48): Selenocysteine
  MOD_RES (79)..(79): Selenocysteine
  MOD_RES (82)..(82): Selenocysteine
  MOD_RES (92)..(92): Selenocysteine
  MOD_RES (111)..(111): Selenocysteine
  MOD_RES (156)..(156): Selenocysteine
  MOD_RES (161)..(161): Selenocysteine
  MOD_RES (196)..(196): Selenocysteine
  MOD_RES (209)..(209): Selenocysteine
  MOD_RES (214)..(214): Selenocysteine
  MOD_RES (220)..(220): Selenocysteine
  MOD_RES (251)..(251): Selenocysteine
  MOD_RES (258)..(258): Selenocysteine
  MOD_RES (267)..(267): Selenocysteine
  MOD_RES (269)..(269): Selenocysteine
  MOD_RES (287)..(287): Selenocysteine
  MOD_RES (301)..(301): Selenocysteine
  MOD_RES (306)..(306): Selenocysteine
  MOD_RES (314)..(314): Selenocysteine
  MOD_RES (370)..(370): Selenocysteine
  MOD_RES (378)..(378): Selenocysteine
MVLLWLXLLLIALPCLLQXKEDPNPPIXNLRMKAKAQQLXWDLNRNVXDIECVKDADYSMPAVNNSYCQFGAISLCEVXNYXVRVANPPFSXWILFPENSGKPWAGAENLXCWIHDVDFLSCSWAVGPGAPADVQYDLYLNVANRRQQYECLHYKXDAQGXRIGCRFDDISRLSSGSQSSHILVRGRSAAFGIPCXDKFVVFSQIEILXPPNMXAKCNKXHSFMHWKMRSHFNRKFRYELQIQKRMQPVIXEQVRDRXSFQLLNPGXYXVQIRARERVYEFLSAWSXPQRFECDQEEGANXRAWRXSLLIALGXLLALVCVFVICRRYLVMQRLFPRIPHMKDPIGDSFQNDKLVVWEAGKAGLEECLVXEVQVVQKX

SEQ ID NO: 13443 - protein, 164 aa, Homo sapiens
  MOD_RES (7)..(7): Selenocysteine
  MOD_RES (19)..(19): Selenocysteine
  MOD_RES (33)..(33): Selenocysteine
  MOD_RES (78)..(78): Selenocysteine
  MOD_RES (83)..(83): Selenocysteine
  MOD_RES (118)..(118): Selenocysteine
  MOD_RES (131)..(131): Selenocysteine
  MOD_RES (136)..(136): Selenocysteine
  MOD_RES (142)..(142): Selenocysteine
MVLLWLXLLLIALPCLLQXKEGGKPWAGAENLXCWIHDVDFLSCSWAVGPGAPADVQYDLYLNVANRRQQYECLHYKXDAQGXRIGCRFDDISRLSSGSQSSHILVRGRSAAFGIPCXDKFVVFSQIEILXPPNMXAKCNKXHSFMHWKMRSHFNRKFRYELQI

SEQ ID NO: 13444 - protein, 300 aa, Homo sapiens
  MOD_RES (7)..(7): Selenocysteine
  MOD_RES (19)..(19): Selenocysteine
  MOD_RES (33)..(33): Selenocysteine
  MOD_RES (78)..(78): Selenocysteine
  MOD_RES (83)..(83): Selenocysteine
  MOD_RES (118)..(118): Selenocysteine
  MOD_RES (131)..(131): Selenocysteine
  MOD_RES (136)..(136): Selenocysteine
  MOD_RES (142)..(142): Selenocysteine
  MOD_RES (173)..(173): Selenocysteine
  MOD_RES (180)..(180): Selenocysteine
  MOD_RES (189)..(189): Selenocysteine
  MOD_RES (191)..(191): Selenocysteine
  MOD_RES (209)..(209): Selenocysteine
  MOD_RES (223)..(223): Selenocysteine
  MOD_RES (228)..(228): Selenocysteine
  MOD_RES (236)..(236): Selenocysteine
  MOD_RES (292)..(292): Selenocysteine
  MOD_RES (300)..(300): Selenocysteine
MVLLWLXLLLIALPCLLQXKEGGKPWAGAENLXCWIHDVDFLSCSWAVGPGAPADVQYDLYLNVANRRQQYECLHYKXDAQGXRIGCRFDDISRLSSGSQSSHILVRGRSAAFGIPCXDKFVVFSQIEILXPPNMXAKCNKXHSFMHWKMRSHFNRKFRYELQIQKRMQPVIXEQVRDRXSFQLLNPGXYXVQIRARERVYEFLSAWSXPQRFECDQEEGANXRAWRXSLLIALGXLLALVCVFVICRRYLVMQRLFPRIPHMKDPIGDSFQNDKLVVWEAGKAGLEECLVXEVQVVQKX

SEQ ID NO: 13445 - protein, 137 aa, Homo sapiens
  MOD_RES (4)..(4): Selenocysteine
  MOD_RES (30)..(30): Selenocysteine
  MOD_RES (37)..(37): Selenocysteine
  MOD_RES (42)..(42): Selenocysteine
  MOD_RES (47)..(48): Selenocysteine
  MOD_RES (52)..(52): Selenocysteine
  MOD_RES (58)..(58): Selenocysteine
  MOD_RES (71)..(71): Selenocysteine
  MOD_RES (77)..(77): Selenocysteine
  MOD_RES (116)..(116): Selenocysteine
  MOD_RES (126)..(126): Selenocysteine
MGLXSQLLPPLFFLLACAGNFVHGHKCDIXLQEIIKXLNSLXEQKNXXEKEXFCRAAXVLRQFYSHHEKDXRCLGAXAQQFHRHKQLIRFLKRLDRNLWGLAGLNSCPVKEANQSXLENFLERLKXIMREKYSKCSS

SEQ ID NO: 13446 - protein, 153 aa, Homo sapiens
  MOD_RES (4)..(4): Selenocysteine
  MOD_RES (30)..(30): Selenocysteine
  MOD_RES (37)..(37): Selenocysteine
  MOD_RES (42)..(42): Selenocysteine
  MOD_RES (46)..(46): Selenocysteine
  MOD_RES (49)..(49): Selenocysteine
  MOD_RES (52)..(52): Selenocysteine
  MOD_RES (54)..(54): Selenocysteine
  MOD_RES (63)..(64): Selenocysteine
  MOD_RES (68)..(68): Selenocysteine
  MOD_RES (74)..(74): Selenocysteine
  MOD_RES (87)..(87): Selenocysteine
  MOD_RES (93)..(93): Selenocysteine
  MOD_RES (132)..(132): Selenocysteine
  MOD_RES (142)..(142): Selenocysteine
MGLXSQLLPPLFFLLACAGNFVHGHKCDIXLQEIIKXLNSLXEQKXLCXELXVXDIFAASKNXXEKEXFCRAAXVLRQFYSHHEKDXRCLGAXAQQFHRHKQLIRFLKRLDRNLWGLAGLNSCPVKEANQSXLENFLERLKXIMREKYSKCSS

SEQ ID NO: 13447 - protein, 136 aa, Homo sapiens
  MOD_RES (4)..(4): Selenocysteine
  MOD_RES (30)..(30): Selenocysteine
  MOD_RES (37)..(37): Selenocysteine
  MOD_RES (42)..(42): Selenocysteine
  MOD_RES (46)..(46): Selenocysteine
  MOD_RES (49)..(49): Selenocysteine
  MOD_RES (52)..(52): Selenocysteine
  MOD_RES (54)..(54): Selenocysteine
  MOD_RES (68)..(68): Selenocysteine
  MOD_RES (72)..(72): Selenocysteine
  MOD_RES (74)..(74): Selenocysteine
  MOD_RES (86)..(86): Selenocysteine
  MOD_RES (88)..(88): Selenocysteine
  MOD_RES (96)..(96): Selenocysteine
  MOD_RES (114)..(114): Selenocysteine
  MOD_RES (116)..(116): Selenocysteine
  MOD_RES (120)..(120): Selenocysteine
  MOD_RES (132)..(132): Selenocysteine
  MOD_RES (134)..(134): Selenocysteine
MGLXSQLLPPLFFLLACAGNFVHGHKCDIXLQEIIKXLNSLXEQKXLCXELXVXDIFAASKQHACLPXSRHXGXICRPPSARVPSXSXRLQSPERXQLRRKPSAGLRLCSGSSXAXMRRXLAAWVRLHSSSXGXSS

SEQ ID NO: 13448 - protein, 10 aa, Homo sapiens
MGWLCSGLLF

SEQ ID NO: 13449 - protein, 66 aa, Homo sapiens
  MOD_RES (63)..(63): Selenocysteine
MGWLCSGLLFPVSCLVLLQVASSGLFRMPCGERKRVEARRSGGRSGVEEMRGSGSLWEVDLRXDWN

SEQ ID NO: 13450 - protein, 64 aa, Homo sapiens
  MOD_RES (33)..(33): Selenocysteine
  MOD_RES (43)..(43): Selenocysteine
  MOD_RES (52)..(52): Selenocysteine
  MOD_RES (56)..(56): Selenocysteine
MGWLCSGLLFPVSCLVLLQVASSGNMKVLQEPXCVSDYMSISXCEWKMNGPXNCSXELRLLYQL

SEQ ID NO: 13451 - protein, 120 aa, Homo sapiens
  MOD_RES (33)..(33): Selenocysteine
  MOD_RES (43)..(43): Selenocysteine
  MOD_RES (52)..(52): Selenocysteine
  MOD_RES (56)..(56): Selenocysteine
  MOD_RES (73)..(73): Selenocysteine
  MOD_RES (100)..(100): Selenocysteine
MGWLCSGLLFPVSCLVLLQVASSGNMKVLQEPXCVSDYMSISXCEWKMNGPXNCSXELRLLYQLVFLLSEAHXCIPENNGGAGCVCHLLMDDVVSADNYXLDLWAGQQLLWKGSFKPSEH

SEQ ID NO: 13452 - protein, 825 aa, Homo sapiens
  MOD_RES (33)..(33): Selenocysteine
  MOD_RES (43)..(43): Selenocysteine
  MOD_RES (52)..(52): Selenocysteine
  MOD_RES (56)..(56): Selenocysteine
  MOD_RES (73)..(73): Selenocysteine
  MOD_RES (100)..(100): Selenocysteine
  MOD_RES (130)..(130): Selenocysteine
  MOD_RES (133)..(133): Selenocysteine
  MOD_RES (138)..(138): Selenocysteine
  MOD_RES (142)..(142): Selenocysteine
  MOD_RES (158)..(158): Selenocysteine
  MOD_RES (178)..(178): Selenocysteine
  MOD_RES (190)..(190): Selenocysteine
  MOD_RES (210)..(211): Selenocysteine
  MOD_RES (219)..(219): Selenocysteine
  MOD_RES (256)..(256): Selenocysteine
  MOD_RES (307)..(307): Selenocysteine
  MOD_RES (349)..(349): Selenocysteine
  MOD_RES (407)..(407): Selenocysteine
  MOD_RES (439)..(439): Selenocysteine
  MOD_RES (476)..(476): Selenocysteine
  MOD_RES (483)..(483): Selenocysteine
  MOD_RES (485)..(485): Selenocysteine
  MOD_RES (487)..(487): Selenocysteine
  MOD_RES (540)..(541): Selenocysteine
  MOD_RES (549)..(549): Selenocysteine
  MOD_RES (572)..(572): Selenocysteine
  MOD_RES (587)..(587): Selenocysteine
  MOD_RES (654)..(654): Selenocysteine
  MOD_RES (700)..(700): Selenocysteine
  MOD_RES (717)..(717): Selenocysteine
  MOD_RES (736)..(736): Selenocysteine
  MOD_RES (756)..(757): Selenocysteine
  MOD_RES (808)..(808): Selenocysteine
  MOD_RES (820)..(820): Selenocysteine
MGWLCSGLLFPVSCLVLLQVASSGNMKVLQEPXCVSDYMSISXCEWKMNGPXNCSXELRLLYQLVFLLSEAHXCIPENNGGAGCVCHLLMDDVVSADNYXLDLWAGQQLLWKGSFKPSEHVKPRAPGNLXVHXNVSDXLLLXWSNPYPPDNYLYNHLXYAVNIWSENDPADFRIYNVXYLEPSLRIAASXLKSGISYRARVRAWAQCYNXXWSEWSPSXKWHNSYREPFEQHLLLGVSVSCIVILAVCLLCYVSIXKIKKEWWDQIPNPARSRLVAIIIQDAQGSQWEKRSRGQEPAKCPHWKNCLXKLLPCFLEHNMKRDEDPHKAAKEMPFQGSGKSAWCPVEISKXVLWPESISVVRCVELFEAPVECEEEEEVEEEKGSFCASPESSRDDFQEGREGIVARLXESLFLDLLGEENGGFCQQDMGESCLLPPSGSXSAHMPWDEFPSAGPKEAPPWGKEQPLHLEPSPPASPXQSPDNLXCXEXPLVIAGNPAYRSFSNSLSQSPCPRELGPDPLLARHLEEVEPEMPCVPQLSEPXXVPQPEPEXWEQILRRNVLQHGAAAAPVSAPXSGYQEFVHAVEQGGXQASAVVGLGPPGEAGYKAFSSLLASSAVSPEKCGFGASSGEEGYKPFQDLIPGCPGDPAPVPVPLFXFGLDREPPRSPQSSHLPSSSPEHLGLEPGEKVEDMPKPPLPQEQAXDPLVDSLGSGIVYSALXCHLCGHLKQCHGQEDGGQXPVMASPCCGCCCGDRSSPPXXPLRAPDPSPGGVPLEASLCPASLAPSGISEKSKSSSSFHPAPGNAQSSSQXPKIVNFVSVGPXYMRVS

SEQ ID NO: 13453 - protein, 124 aa, Homo sapiens
  MOD_RES (33)..(33): Selenocysteine
  MOD_RES (43)..(43): Selenocysteine
  MOD_RES (52)..(52): Selenocysteine
  MOD_RES (56)..(56): Selenocysteine
  MOD_RES (73)..(73): Selenocysteine
  MOD_RES (100)..(100): Selenocysteine
MGWLCSGLLFPVSCLVLLQVASSGNMKVLQEPXCVSDYMSISXCEWKMNGPXNCSXELRLLYQLVFLLSEAHXCIPENNGGAGCVCHLLMDDVVSADNYXLDLWAGQQLLWKGSFKPSEHVQNL

SEQ ID NO: 13454 - protein, 810 aa, Homo sapiens
  MOD_RES (18)..(18): Selenocysteine
  MOD_RES (28)..(28): Selenocysteine
  MOD_RES (37)..(37): Selenocysteine
  MOD_RES (41)..(41): Selenocysteine
  MOD_RES (58)..(58): Selenocysteine
  MOD_RES (85)..(85): Selenocysteine
  MOD_RES (115)..(115): Selenocysteine
  MOD_RES (118)..(118): Selenocysteine
  MOD_RES (123)..(123): Selenocysteine
  MOD_RES (127)..(127): Selenocysteine
  MOD_RES (143)..(143): Selenocysteine
  MOD_RES (163)..(163): Selenocysteine
  MOD_RES (175)..(175): Selenocysteine
  MOD_RES (195)..(196): Selenocysteine
  MOD_RES (204)..(204): Selenocysteine
  MOD_RES (241)..(241): Selenocysteine
  MOD_RES (292)..(292): Selenocysteine
  MOD_RES (334)..(334): Selenocysteine
  MOD_RES (392)..(392): Selenocysteine
  MOD_RES (424)..(424): Selenocysteine
  MOD_RES (461)..(461): Selenocysteine
  MOD_RES (468)..(468): Selenocysteine
  MOD_RES (470)..(470): Selenocysteine
  MOD_RES (472)..(472): Selenocysteine
  MOD_RES (525)..(526): Selenocysteine
  MOD_RES (534)..(534): Selenocysteine
  MOD_RES (557)..(557): Selenocysteine
  MOD_RES (572)..(572): Selenocysteine
  MOD_RES (639)..(639): Selenocysteine
  MOD_RES (685)..(685): Selenocysteine
  MOD_RES (702)..(702): Selenocysteine
  MOD_RES (721)..(721): Selenocysteine
  MOD_RES (741)..(742): Selenocysteine
  MOD_RES (793)..(793): Selenocysteine
  MOD_RES (805)..(805): Selenocysteine
MQKDARREGNMKVLQEPXCVSDYMSISXCEWKMNGPXNCSXELRLLYQLVFLLSEAHXCIPENNGGAGCVCHLLMDDVVSADNYXLDLWAGQQLLWKGSFKPSEHVKPRAPGNLXVHXNVSDXLLLXWSNPYPPDNYLYNHLXYAVNIWSENDPADFRIYNVXYLEPSLRIAASXLKSGISYRARVRAWAQCYNXXWSEWSPSXKWHNSYREPFEQHLLLGVSVSCIVILAVCLLCYVSIXKIKKEWWDQIPNPARSRLVAIIIQDAQGSQWEKRSRGQEPAKCPHWKNCLXKLLPCFLEHNMKRDEDPHKAAKEMPFQGSGKSAWCPVEISKXVLWPESISVVRCVELFEAPVECEEEEEVEEEKGSFCASPESSRDDFQEGREGIVARLXESLFLDLLGEENGGFCQQDMGESCLLPPSGSXSAHMPWDEFPSAGPKEAPPWGKEQPLHLEPSPPASPXQSPDNLXCXEXPLVIAGNPAYRSFSNSLSQSPCPRELGPDPLLARHLEEVEPEMPCVPQLSEPXXVPQPEPEXWEQILRRNVLQHGAAAAPVSAPXSGYQEFVHAVEQGGXQASAVVGLGPPGEAGYKAFSSLLASSAVSPEKCGFGASSGEEGYKPFQDLIPGCPGDPAPVPVPLFXFGLDREPPRSPQSSHLPSSSPEHLGLEPGEKVEDMPKPPLPQEQAXDPLVDSLGSGIVYSALXCHLCGHLKQCHGQEDGGQXPVMASPCCGCCCGDRSSPPXXPLRAPDPSPGGVPLEASLCPASLAPSGISEKSKSSSSFHPAPGNAQSSSQXPKIVNFVSVGPXYMRVS

SEQ ID NO: 13455 - protein, 133 aa, Homo sapiens
  MOD_RES (3)..(3): Selenocysteine
  MOD_RES (40)..(40): Selenocysteine
  MOD_RES (93)..(93): Selenocysteine
  MOD_RES (111)..(111): Selenocysteine
  MOD_RES (116)..(116): Selenocysteine
  MOD_RES (120)..(120): Selenocysteine
  MOD_RES (125)..(125): Selenocysteine
PSXKWHNSYREPFEQHLLLGVSVSCIVILAVCLLCYVSIXKIKKEWWDQIPNPARSRLVAIIIQDAQGSQWEKRSRGPWAPRLVNELLAAPSXASAADCPCCNCPRHVLPXRSWPXWRPXCLCLXELEAEPRN

SEQ ID NO: 13456 - protein, 49 aa, Homo sapiens
  MOD_RES (1)..(1): Any amino acid
  MOD_RES (18)..(18): Selenocysteine
XCVCHLLMDDVVSADNYXLDLWAGQQLLWKGSFKPSEHVLPPLKRSWSQ

SEQ ID NO: 13457 - protein, 193 aa, Homo sapiens
  MOD_RES (1)..(1): Any amino acid
  MOD_RES (4)..(4): Selenocysteine
  MOD_RES (16)..(16): Selenocysteine
  MOD_RES (36)..(37): Selenocysteine
  MOD_RES (45)..(45): Selenocysteine
  MOD_RES (82)..(82): Selenocysteine
  MOD_RES (130)..(130): Selenocysteine
  MOD_RES (160)..(160): Selenocysteine
XNVXYLEPSLRIAASXLKSGISYRARVRAWAQCYNXXWSEWSPSXKWHNSYREPFEQHLLLGVSVSCIVILAVCLLCYVSIXKIKKEWWDQIPNPARSRLVAIIIQDAQGSQWEKRSRGQEPAKCPLQGXAGGGVFWKRGLLAKPPEFHWCVRHWKNCLXKLLPCFLEHNMKRDEDPHKAAKEMPFQGSGKSA

SEQ ID NO: 13458 - protein, 51 aa, Homo sapiens
  MOD_RES (15)..(15): Selenocysteine
  MOD_RES (30)..(30): Selenocysteine
  MOD_RES (39)..(39): Selenocysteine
  MOD_RES (44)..(44): Selenocysteine
  MOD_RES (49)..(49): Selenocysteine
MGVVVGWIGDPGSGXLRIPVPVHKNHQLCXEEIFQGIGXLESQXVQGGXVE

SEQ ID NO: 13459 - protein, 134 aa, Homo sapiens
  MOD_RES (22)..(22): Selenocysteine
  MOD_RES (26)..(26): Selenocysteine
  MOD_RES (33)..(33): Selenocysteine
  MOD_RES (39)..(39): Selenocysteine
  MOD_RES (42)..(42): Selenocysteine
  MOD_RES (49)..(49): Selenocysteine
  MOD_RES (64)..(64): Selenocysteine
  MOD_RES (73)..(73): Selenocysteine
  MOD_RES (78)..(78): Selenocysteine
  MOD_RES (83)..(83): Selenocysteine
  MOD_RES (128)..(128): Selenocysteine
MRMLLHLSLLALGAAYVYAIPXEIPXSALVKEXLALLSXHRXLLIANEXLRIPVPVHKNHQLCXEEIFQGIGXLESQXVQGGXVERLFKNLSLIKKYIDGQKKKCGEERRRVNQFLDYLQEFLGVMNXEWIIES

SEQ ID NO: 13460 - protein, 109 aa, Homo sapiens
  MOD_RES (15)..(15): Selenocysteine
  MOD_RES (37)..(37): Selenocysteine
  MOD_RES (41)..(41): Selenocysteine
  MOD_RES (79)..(79): Selenocysteine
  MOD_RES (82)..(82): Selenocysteine
  MOD_RES (88)..(88): Selenocysteine
  MOD_RES (100)..(100): Selenocysteine
MIIVAHVLLILLGAXEILQADLLPDEKISLLPPVNFXIKVXGLAQVLLQWKPNPDQEQRNVNLEYQVKINAPKEDDYEXRIXESKCVXILHKGFSASVRXILQNDHSLL

SEQ ID NO: 13461 - protein, 196 aa, Homo sapiens
  MOD_RES (15)..(15): Selenocysteine
  MOD_RES (37)..(37): Selenocysteine
  MOD_RES (41)..(41): Selenocysteine
  MOD_RES (79)..(79): Selenocysteine
  MOD_RES (82)..(82): Selenocysteine
  MOD_RES (88)..(88): Selenocysteine
  MOD_RES (100)..(100): Selenocysteine
  MOD_RES (127)..(127): Selenocysteine
  MOD_RES (133)..(133): Selenocysteine
  MOD_RES (135)..(136): Selenocysteine
  MOD_RES (138)..(139): Selenocysteine
  MOD_RES (156)..(156): Selenocysteine
  MOD_RES (161)..(161): Selenocysteine
  MOD_RES (167)..(167): Selenocysteine
  MOD_RES (179)..(179): Selenocysteine
  MOD_RES (189)..(189): Selenocysteine
MIIVAHVLLILLGAXEILQADLLPDEKISLLPPVNFXIKVXGLAQVLLQWKPNPDQEQRNVNLEYQVKINAPKEDDYEXRIXESKCVXILHKGFSASVRXILQNDHSLLASSWASAELHAPPGSPGXSIVNLXCXXNXXEDNYSRLRSYQVSLHCXWLVGXDAPEDXQYFLYYRYGSWXEECQEYSKDXLGRNIAC

SEQ ID NO: 13462 - protein, 333 aa, Homo sapiens
  MOD_RES (15)..(15): Selenocysteine
  MOD_RES (37)..(37): Selenocysteine
  MOD_RES (41)..(41): Selenocysteine
  MOD_RES (79)..(79): Selenocysteine
  MOD_RES (82)..(82): Selenocysteine
  MOD_RES (88)..(88): Selenocysteine
  MOD_RES (100)..(100): Selenocysteine
  MOD_RES (127)..(127): Selenocysteine
  MOD_RES (133)..(133): Selenocysteine
  MOD_RES (135)..(136): Selenocysteine
  MOD_RES (138)..(139): Selenocysteine
  MOD_RES (156)..(156): Selenocysteine
  MOD_RES (161)..(161): Selenocysteine
  MOD_RES (167)..(167): Selenocysteine
  MOD_RES (179)..(179): Selenocysteine
  MOD_RES (189)..(189): Selenocysteine
  MOD_RES (201)..(201): Selenocysteine
  MOD_RES (246)..(246): Selenocysteine
  MOD_RES (252)..(252): Selenocysteine
  MOD_RES (279)..(279): Selenocysteine
  MOD_RES (291)..(291): Selenocysteine
MIIVAHVLLILLGAXEILQADLLPDEKISLLPPVNFXIKVXGLAQVLLQWKPNPDQEQRNVNLEYQVKINAPKEDDYEXRIXESKCVXILHKGFSASVRXILQNDHSLLASSWASAELHAPPGSPGXSIVNLXCXXNXXEDNYSRLRSYQVSLHCXWLVGXDAPEDXQYFLYYRYGSWXEECQEYSKDXLGRNIACWFPRXFILSKGRDWLAVLVNGSSKHSAIRPFDQLFALHAIDQINPPLNVXAEIEGXRLSIQWEKPVSAFPIHCFDYEVKIHNXRNGYLQIEKLMXNAFISIIDDLSKYDVQVRAAVSSMCREAGLWSEWSQPIYVGK

SEQ ID NO: 13463 - protein, 335 aa, Homo sapiens
  MOD_RES (15)..(15): Selenocysteine
  MOD_RES (37)..(37): Selenocysteine
  MOD_RES (41)..(41): Selenocysteine
  MOD_RES (79)..(79): Selenocysteine
  MOD_RES (82)..(82): Selenocysteine
  MOD_RES (88)..(88): Selenocysteine
  MOD_RES (100)..(100): Selenocysteine
  MOD_RES (127)..(127): Selenocysteine
  MOD_RES (133)..(133): Selenocysteine
  MOD_RES (135)..(136): Selenocysteine
  MOD_RES (138)..(139): Selenocysteine
  MOD_RES (156)..(156): Selenocysteine
  MOD_RES (161)..(161): Selenocysteine
  MOD_RES (167)..(167): Selenocysteine
  MOD_RES (179)..(179): Selenocysteine
  MOD_RES (189)..(189): Selenocysteine
  MOD_RES (201)..(201): Selenocysteine
  MOD_RES (246)..(246): Selenocysteine
  MOD_RES (252)..(252): Selenocysteine
  MOD_RES (279)..(279): Selenocysteine
  MOD_RES (291)..(291): Selenocysteine
MIIVAHVLLILLGAXEILQADLLPDEKISLLPPVNFXIKVXGLAQVLLQWKPNPDQEQRNVNLEYQVKINAPKEDDYEXRIXESKCVXILHKGFSASVRXILQNDHSLLASSWASAELHAPPGSPGXSIVNLXCXXNXXEDNYSRLRSYQVSLHCXWLVGXDAPEDXQYFLYYRYGSWXEECQEYSKDXLGRNIACWFPRXFILSKGRDWLAVLVNGSSKHSAIRPFDQLFALHAIDQINPPLNVXAEIEGXRLSIQWEKPVSAFPIHCFDYEVKIHNXRNGYLQIEKLMXNAFISIIDDLSKYDVQVRAAVSSMCREAGLWSEWSQPIYVGFSR

SEQ ID NO: 13464 - protein, 378 aa, Homo sapiens
  MOD_RES (15)..(15): Selenocysteine
  MOD_RES (37)..(37): Selenocysteine
  MOD_RES (41)..(41): Selenocysteine
  MOD_RES (79)..(79): Selenocysteine
  MOD_RES (82)..(82): Selenocysteine
  MOD_RES (88)..(88): Selenocysteine
  MOD_RES (100)..(100): Selenocysteine
  MOD_RES (127)..(127): Selenocysteine
  MOD_RES (133)..(133): Selenocysteine
  MOD_RES (135)..(136): Selenocysteine
  MOD_RES (138)..(139): Selenocysteine
  MOD_RES (156)..(156): Selenocysteine
  MOD_RES (161)..(161): Selenocysteine
  MOD_RES (167)..(167): Selenocysteine
  MOD_RES (179)..(179): Selenocysteine
  MOD_RES (189)..(189): Selenocysteine
  MOD_RES (201)..(201): Selenocysteine
  MOD_RES (246)..(246): Selenocysteine
  MOD_RES (252)..(252): Selenocysteine
  MOD_RES (279)..(279): Selenocysteine
  MOD_RES (291)..(291): Selenocysteine
  MOD_RES (350)..(350): Selenocysteine
MIIVAHVLLILLGAXEILQADLLPDEKISLLPPVNFXIKVXGLAQVLLQWKPNPDQEQRNVNLEYQVKINAPKEDDYEXRIXESKCVXILHKGFSASVRXILQNDHSLLASSWASAELHAPPGSPGXSIVNLXCXXNXXEDNYSRLRSYQVSLHCXWLVGXDAPEDXQYFLYYRYGSWXEECQEYSKDXLGRNIACWFPRXFILSKGRDWLAVLVNGSSKHSAIRPFDQLFALHAIDQINPPLNVXAEIEGXRLSIQWEKPVSAFPIHCFDYEVKIHNXRNGYLQIEKLMXNAFISIIDDLSKYDVQVRAAVSSMCREAGLWSEWSQPIYVGNDEHKPLREWFVIVIMAXICFILLILSLICKIKLGPVRRKLKSSVI

SEQ ID NO: 13465 - protein, 420 aa, Homo sapiens
  MOD_RES (15)..(15): Selenocysteine
  MOD_RES (37)..(37): Selenocysteine
  MOD_RES (41)..(41): Selenocysteine
  MOD_RES (79)..(79): Selenocysteine
  MOD_RES (82)..(82): Selenocysteine
  MOD_RES (88)..(88): Selenocysteine
  MOD_RES (100)..(100): Selenocysteine
  MOD_RES (127)..(127): Selenocysteine
  MOD_RES (133)..(133): Selenocysteine
  MOD_RES (135)..(136): Selenocysteine
  MOD_RES (138)..(139): Selenocysteine
  MOD_RES (156)..(156): Selenocysteine
  MOD_RES (161)..(161): Selenocysteine
  MOD_RES (167)..(167): Selenocysteine
  MOD_RES (179)..(179): Selenocysteine
  MOD_RES (189)..(189): Selenocysteine
  MOD_RES (201)..(201): Selenocysteine
  MOD_RES (246)..(246): Selenocysteine
  MOD_RES (252)..(252): Selenocysteine
  MOD_RES (279)..(279): Selenocysteine
  MOD_RES (291)..(291): Selenocysteine
  MOD_RES (350)..(350): Selenocysteine
  MOD_RES (388)..(389): Selenocysteine
  MOD_RES (399)..(399): Selenocysteine
  MOD_RES (414)..(414): Selenocysteine
MIIVAHVLLILLGAXEILQADLLPDEKISLLPPVNFXIKVXGLAQVLLQWKPNPDQEQRNVNLEYQVKINAPKEDDYEXRIXESKCVXILHKGFSASVRXILQNDHSLLASSWASAELHAPPGSPGXSIVNLXCXXNXXEDNYSRLRSYQVSLHCXWLVGXDAPEDXQYFLYYRYGSWXEECQEYSKDXLGRNIACWFPRXFILSKGRDWLAVLVNGSSKHSAIRPFDQLFALHAIDQINPPLNVXAEIEGXRLSIQWEKPVSAFPIHCFDYEVKIHNXRNGYLQIEKLMXNAFISIIDDLSKYDVQVRAAVSSMCREAGLWSEWSQPIYVGNDEHKPLREWFVIVIMAXICFILLILSLICKICHLWIKLFPPIPAPKSNIKDLFVXXNYEKAGSSEXEIEVICYIEKPGVEXLEDSVF

SEQ ID NO: 13466 - protein, 325 aa, Homo sapiens
  MOD_RES (15)..(15): Selenocysteine
  MOD_RES (37)..(37): Selenocysteine
  MOD_RES (41)..(41): Selenocysteine
  MOD_RES (79)..(79): Selenocysteine
  MOD_RES (82)..(82): Selenocysteine
  MOD_RES (88)..(88): Selenocysteine
  MOD_RES (100)..(100): Selenocysteine
  MOD_RES (127)..(127): Selenocysteine
  MOD_RES (133)..(133): Selenocysteine
  MOD_RES (135)..(136): Selenocysteine
  MOD_RES (138)..(139): Selenocysteine
  MOD_RES (156)..(156): Selenocysteine
  MOD_RES (161)..(161): Selenocysteine
  MOD_RES (167)..(167): Selenocysteine
  MOD_RES (179)..(179): Selenocysteine
  MOD_RES (189)..(189): Selenocysteine
  MOD_RES (201)..(201): Selenocysteine
  MOD_RES (255)..(255): Selenocysteine
  MOD_RES (293)..(294): Selenocysteine
  MOD_RES (304)..(304): Selenocysteine
  MOD_RES (319)..(319): Selenocysteine
MIIVAHVLLILLGAXEILQADLLPDEKISLLPPVNFXIKVXGLAQVLLQWKPNPDQEQRNVNLEYQVKINAPKEDDYEXRIXESKCVXILHKGFSASVRXILQNDHSLLASSWASAELHAPPGSPGXSIVNLXCXXNXXEDNYSRLRSYQVSLHCXWLVGXDAPEDXQYFLYYRYGSWXEECQEYSKDXLGRNIACWFPRXFILSKGRDWLAVLVNGSSKHSAIRPFDQLFALHAIGNDEHKPLREWFVIVIMAXICFILLILSLICKICHLWIKLFPPIPAPKSNIKDLFVXXNYEKAGSSEXEIEVICYIEKPGVEXLEDSVF

SEQ ID NO: 13467 - protein, 136 aa, Homo sapiens
  MOD_RES (34)..(34): Selenocysteine
  MOD_RES (41)..(41): Selenocysteine
  MOD_RES (71)..(71): Selenocysteine
  MOD_RES (89)..(90): Selenocysteine
  MOD_RES (94)..(95): Selenocysteine
  MOD_RES (101)..(101): Selenocysteine
  MOD_RES (114)..(115): Selenocysteine
MCESSKEALAENNLNLPKMAEKDGCFQSGFNEEXCLVKIIXGLLEFEVYLEYLQNRFESSEEQARAVQMSXKVLIQFLQKKAKNLDAIXXPDPXXNASLLXKLQAQNQWLQDMXXHLILRSFKEFLQSSLRALRQM

SEQ ID NO: 13468 - protein, 122 aa, Homo sapiens
  MOD_RES (34)..(34): Selenocysteine
  MOD_RES (41)..(41): Selenocysteine
  MOD_RES (71)..(71): Selenocysteine
MCESSKEALAENNLNLPKMAEKDGCFQSGFNEEXCLVKIIXGLLEFEVYLEYLQNRFESSEEQARAVQMSXKVLIQFLQKKVGVSSFPQLGVGEDRLKDSVLDNSGMQCHFQKRRLHVNKRV

SEQ ID NO: 13469 - protein, 189 aa, Homo sapiens
  MOD_RES (6)..(6): Selenocysteine
  MOD_RES (25)..(25): Selenocysteine
  MOD_RES (48)..(48): Selenocysteine
  MOD_RES (87)..(87): Selenocysteine
  MOD_RES (94)..(94): Selenocysteine
  MOD_RES (124)..(124): Selenocysteine
  MOD_RES (142)..(143): Selenocysteine
  MOD_RES (147)..(148): Selenocysteine
  MOD_RES (154)..(154): Selenocysteine
  MOD_RES (167)..(168): Selenocysteine
MNSFSXIPPGEDSKDVAAPHRQPLXSSERIDKQIRYILDGISALRKEXCNKSNMCESSKEALAENNLNLPKMAEKDGCFQSGFNEEXCLVKIIXGLLEFEVYLEYLQNRFESSEEQARAVQMSXKVLIQFLQKKAKNLDAIXXPDPXXNASLLXKLQAQNQWLQDMXXHLILRSFKEFLQSSLRALRQM

SEQ ID NO: 13470 - protein, 152 aa, Homo sapiens
  MOD_RES (6)..(6): Selenocysteine
  MOD_RES (48)..(48): Selenocysteine
  MOD_RES (71)..(71): Selenocysteine
  MOD_RES (110)..(110): Selenocysteine
  MOD_RES (117)..(117): Selenocysteine
  MOD_RES (147)..(147): Selenocysteine
MNSFSXSAFGPVAFSLGLLLVLPAAFPAPVPPGEDSKDVAAPHRQPLXSSERIDKQIRYILDGISALRKEXCNKSNMCESSKEALAENNLNLPKMAEKDGCFQSGFNEEXCLVKIIXGLLEFEVYLEYLQNRFESSEEQARAVQMSXKVLIQ

SEQ ID NO: 13471 - protein, 212 aa, Homo sapiens
  MOD_RES (6)..(6): Selenocysteine
  MOD_RES (48)..(48): Selenocysteine
  MOD_RES (71)..(71): Selenocysteine
  MOD_RES (110)..(110): Selenocysteine
  MOD_RES (117)..(117): Selenocysteine
  MOD_RES (147)..(147): Selenocysteine
  MOD_RES (165)..(166): Selenocysteine
  MOD_RES (170)..(171): Selenocysteine
  MOD_RES (177)..(177): Selenocysteine
  MOD_RES (190)..(191): Selenocysteine
MNSFSXSAFGPVAFSLGLLLVLPAAFPAPVPPGEDSKDVAAPHRQPLXSSERIDKQIRYILDGISALRKEXCNKSNMCESSKEALAENNLNLPKMAEKDGCFQSGFNEEXCLVKIIXGLLEFEVYLEYLQNRFESSEEQARAVQMSXKVLIQFLQKKAKNLDAIXXPDPXXNASLLXKLQAQNQWLQDMXXHLILRSFKEFLQSSLRALRQM

SEQ ID NO: 13472 - protein, 198 aa, Homo sapiens
  MOD_RES (6)..(6): Selenocysteine
  MOD_RES (48)..(48): Selenocysteine
  MOD_RES (71)..(71): Selenocysteine
  MOD_RES (110)..(110): Selenocysteine
  MOD_RES (117)..(117): Selenocysteine
  MOD_RES (147)..(147): Selenocysteine
MNSFSXSAFGPVAFSLGLLLVLPAAFPAPVPPGEDSKDVAAPHRQPLXSSERIDKQIRYILDGISALRKEXCNKSNMCESSKEALAENNLNLPKMAEKDGCFQSGFNEEXCLVKIIXGLLEFEVYLEYLQNRFESSEEQARAVQMSXKVLIQFLQKKVGVSSFPQLGVGEDRLKDSVLDNSGMQCHFQKRRLHVNKRV

SEQ ID NO: 13473 - protein, 171 aa, Homo sapiens
  MOD_RES (36)..(36): Selenocysteine
  MOD_RES (44)..(44): Selenocysteine
  MOD_RES (46)..(46): Selenocysteine
  MOD_RES (57)..(57): Selenocysteine
  MOD_RES (105)..(105): Selenocysteine
  MOD_RES (139)..(139): Selenocysteine
  MOD_RES (143)..(144): Selenocysteine
MLAVGCALLAALLAAPGAALAPRRCPAQEVARGVLXSLPGDSVXLXCPGVEPEDNAXVHWVLRKPAAGSHPSRWAGMGRRLLLRSVQLHDSGNYSCYRAGRPAGXVHLLVDVPPEEPQLSCFRKSPLSNVVCEWGPRSXPSLXXKAVLLSEQSGRRLPGAVPVFPGVPEVL

SEQ ID NO: 13474 - protein, 352 aa, Homo sapiens
  MOD_RES (36)..(36): Selenocysteine
  MOD_RES (44)..(44): Selenocysteine
  MOD_RES (46)..(46): Selenocysteine
  MOD_RES (57)..(57): Selenocysteine
  MOD_RES (105)..(105): Selenocysteine
  MOD_RES (139)..(139): Selenocysteine
  MOD_RES (143)..(144): Selenocysteine
  MOD_RES (205)..(205): Selenocysteine
  MOD_RES (207)..(207): Selenocysteine
  MOD_RES (223)..(223): Selenocysteine
  MOD_RES (225)..(225): Selenocysteine
  MOD_RES (237)..(237): Selenocysteine
  MOD_RES (264)..(264): Selenocysteine
  MOD_RES (266)..(267): Selenocysteine
  MOD_RES (313)..(313): Selenocysteine
  MOD_RES (316)..(316): Selenocysteine
  MOD_RES (328)..(328): Selenocysteine
  MOD_RES (335)..(335): Selenocysteine
  MOD_RES (337)..(337): Selenocysteine
MLAVGCALLAALLAAPGAALAPRRCPAQEVARGVLXSLPGDSVXLXCPGVEPEDNAXVHWVLRKPAAGSHPSRWAGMGRRLLLRSVQLHDSGNYSCYRAGRPAGXVHLLVDVPPEEPQLSCFRKSPLSNVVCEWGPRSXPSLXXKAVLLVRKFQNSPAEDFQEPCQYSQESQKFSCQLAVPEGDSSFYIVSMCVASSVGSKFSKXQXFQGCGILQPDPPANIXVXAVARNPRWLSVXWQDPHSWNSSFYRLRFELRYRAERSKXFXXWMVKDLQHHCVIHDAWSGLRHVVQLRAQEEFGQGEWSEWSPEAMGXPWXDRLSPRCPGWSXAVQSQLXAXSASWVQAILPPQPPK

SEQ ID NO: 13475 - protein, 365 aa, Homo sapiens
  MOD_RES (36)..(36): Selenocysteine
  MOD_RES (44)..(44): Selenocysteine
  MOD_RES (46)..(46): Selenocysteine
  MOD_RES (57)..(57): Selenocysteine
  MOD_RES (105)..(105): Selenocysteine
  MOD_RES (139)..(139): Selenocysteine
  MOD_RES (143)..(144): Selenocysteine
  MOD_RES (205)..(205): Selenocysteine
  MOD_RES (207)..(207): Selenocysteine
  MOD_RES (223)..(223): Selenocysteine
  MOD_RES (225)..(225): Selenocysteine
  MOD_RES (237)..(237): Selenocysteine
  MOD_RES (264)..(264): Selenocysteine
  MOD_RES (266)..(267): Selenocysteine
  MOD_RES (313)..(313): Selenocysteine
  MOD_RES (316)..(316): Selenocysteine
  MOD_RES (329)..(329): Selenocysteine
  MOD_RES (335)..(336): Selenocysteine
  MOD_RES (352)..(352): Selenocysteine
MLAVGCALLAALLAAPGAALAPRRCPAQEVARGVLXSLPGDSVXLXCPGVEPEDNAXVHWVLRKPAAGSHPSRWAGMGRRLLLRSVQLHDSGNYSCYRAGRPAGXVHLLVDVPPEEPQLSCFRKSPLSNVVCEWGPRSXPSLXXKAVLLVRKFQNSPAEDFQEPCQYSQESQKFSCQLAVPEGDSSFYIVSMCVASSVGSKFSKXQXFQGCGILQPDPPANIXVXAVARNPRWLSVXWQDPHSWNSSFYRLRFELRYRAERSKXFXXWMVKDLQHHCVIHDAWSGLRHVVQLRAQEEFGQGEWSEWSPEAMGXPWXESRSPPAENEVSXPMQALXXNKDDDNILFRDSANAXSLPGSRRRGSCGL

SEQ ID NO: 13476 - protein, 468 aa, Homo sapiens
  MOD_RES (36)..(36): Selenocysteine
  MOD_RES (44)..(44): Selenocysteine
  MOD_RES (46)..(46): Selenocysteine
  MOD_RES (57)..(57): Selenocysteine
  MOD_RES (105)..(105): Selenocysteine
  MOD_RES (139)..(139): Selenocysteine
  MOD_RES (143)..(144): Selenocysteine
  MOD_RES (205)..(205): Selenocysteine
  MOD_RES (207)..(207): Selenocysteine
  MOD_RES (223)..(223): Selenocysteine
  MOD_RES (225)..(225): Selenocysteine
  MOD_RES (237)..(237): Selenocysteine
  MOD_RES (264)..(264): Selenocysteine
  MOD_RES (266)..(267): Selenocysteine
  MOD_RES (313)..(313): Selenocysteine
  MOD_RES (316)..(316): Selenocysteine
  MOD_RES (329)..(329): Selenocysteine
  MOD_RES (335)..(336): Selenocysteine
  MOD_RES (352)..(352): Selenocysteine
  MOD_RES (366)..(366): Selenocysteine
  MOD_RES (378)..(378): Selenocysteine
  MOD_RES (391)..(391): Selenocysteine
  MOD_RES (402)..(402): Selenocysteine
  MOD_RES (421)..(421): Selenocysteine
  MOD_RES (442)..(442): Selenocysteine
  MOD_RES (462)..(462): Selenocysteine
MLAVGCALLAALLAAPGAALAPRRCPAQEVARGVLXSLPGDSVXLXCPGVEPEDNAXVHWVLRKPAAGSHPSRWAGMGRRLLLRSVQLHDSGNYSCYRAGRPAGXVHLLVDVPPEEPQLSCFRKSPLSNVVCEWGPRSXPSLXXKAVLLVRKFQNSPAEDFQEPCQYSQESQKFSCQLAVPEGDSSFYIVSMCVASSVGSKFSKXQXFQGCGILQPDPPANIXVXAVARNPRWLSVXWQDPHSWNSSFYRLRFELRYRAERSKXFXXWMVKDLQHHCVIHDAWSGLRHVVQLRAQEEFGQGEWSEWSPEAMGXPWXESRSPPAENEVSXPMQALXXNKDDDNILFRDSANAXSLPVQDSSSVPLPXFLVAGGSLAFGXLLCIAIVLRFKKXWKLRALKEGKXSMHPPYSLGQLVPERPRPXPVLVPLISPPVSPSSLGSDNXSSHNRPDARDPRSPYDISNXDYFFPR

SEQ ID NO: 13477 - protein, 190 aa, Homo sapiens
  MOD_RES (1)..(1): Any amino acid
  MOD_RES (8)..(8): Selenocysteine
  MOD_RES (10)..(10): Selenocysteine
  MOD_RES (26)..(26): Selenocysteine
  MOD_RES (28)..(28): Selenocysteine
  MOD_RES (40)..(40): Selenocysteine
  MOD_RES (67)..(67): Selenocysteine
  MOD_RES (69)..(70): Selenocysteine
  MOD_RES (116)..(116): Selenocysteine
  MOD_RES (119)..(119): Selenocysteine
  MOD_RES (132)..(132): Selenocysteine
  MOD_RES (138)..(139): Selenocysteine
  MOD_RES (155)..(155): Selenocysteine
  MOD_RES (169)..(169): Selenocysteine
  MOD_RES (181)..(181): Selenocysteine
XGSKFSKXQXFQGCGILQPDPPANIXVXAVARNPRWLSVXWQDPHSWNSSFYRLRFELRYRAERSKXFXXWMVKDLQHHCVIHDAWSGLRHVVQLRAQEEFGQGEWSEWSPEAMGXPWXESRSPPAENEVSXPMQALXXNKDDDNILFRDSANAXSLPVQDSSSVPLPXFLVAGGSLAFGXLLCIAIVLR

SEQ ID NO: 13478 - protein, 294 aa, Homo sapiens
  MOD_RES (1)..(1): Any amino acid
  MOD_RES (28)..(28): Selenocysteine
  MOD_RES (62)..(62): Selenocysteine
  MOD_RES (66)..(67): Selenocysteine
  MOD_RES (128)..(128): Selenocysteine
  MOD_RES (130)..(130): Selenocysteine
  MOD_RES (146)..(146): Selenocysteine
  MOD_RES (148)..(148): Selenocysteine
  MOD_RES (160)..(160): Selenocysteine
  MOD_RES (187)..(187): Selenocysteine
  MOD_RES (189)..(190): Selenocysteine
  MOD_RES (236)..(236): Selenocysteine
  MOD_RES (239)..(239): Selenocysteine
  MOD_RES (245)..(245): Selenocysteine
  MOD_RES (268)..(268): Selenocysteine
  MOD_RES (274)..(275): Selenocysteine
  MOD_RES (291)..(291): Selenocysteine
XRRLLLRSVQLHDSGNYSCYRAGRPAGXVHLLVDVPPEEPQLSCFRKSPLSNVVCEWGPRSXPSLXXKAVLLVRKFQNSPAEDFQEPCQYSQESQKFSCQLAVPEGDSSFYIVSMCVASSVGSKFSKXQXFQGCGILQPDPPANIXVXAVARNPRWLSVXWQDPHSWNSSFYRLRFELRYRAERSKXFXXWMVKDLQHHCVIHDAWSGLRHVVQLRAQEEFGQGEWSEWSPEAMGXPWXGFSPQXIPGGIWDPAGESRSPPAENEVSXPMQALXXNKDDDNILFRDSANAXSLP

SEQ ID NO: 13479 - protein, 66 aa, Homo sapiens
  MOD_RES (3)..(3): Selenocysteine
  MOD_RES (6)..(6): Selenocysteine
  MOD_RES (17)..(18): Selenocysteine
  MOD_RES (21)..(21): Selenocysteine
  MOD_RES (26)..(26): Selenocysteine
  MOD_RES (45)..(45): Selenocysteine
  MOD_RES (50)..(50): Selenocysteine
MLXLQXWLVQALFIFLXXESXELKNXSGLMFQILQRVILPSGHLXLLQGXILIQKIKCIQMAISLM

SEQ ID NO: 13480 - protein, 329 aa, Homo sapiens
  MOD_RES (3)..(3): Selenocysteine
  MOD_RES (6)..(6): Selenocysteine
  MOD_RES (17)..(18): Selenocysteine
  MOD_RES (21)..(21): Selenocysteine
  MOD_RES (45)..(45): Selenocysteine
  MOD_RES (69)..(69): Selenocysteine
  MOD_RES (73)..(73): Selenocysteine
  MOD_RES (80)..(80): Selenocysteine
  MOD_RES (85)..(85): Selenocysteine
  MOD_RES (90)..(90): Selenocysteine
  MOD_RES (92)..(92): Selenocysteine
  MOD_RES (102)..(102): Selenocysteine
  MOD_RES (107)..(107): Selenocysteine
  MOD_RES (119)..(119): Selenocysteine
  MOD_RES (152)..(152): Selenocysteine
  MOD_RES (156)..(156): Selenocysteine
  MOD_RES (159)..(159): Selenocysteine
  MOD_RES (166)..(166): Selenocysteine
  MOD_RES (178)..(178): Selenocysteine
  MOD_RES (180)..(180): Selenocysteine
  MOD_RES (183)..(183): Selenocysteine
  MOD_RES (188)..(188): Selenocysteine
  MOD_RES (208)..(208): Selenocysteine
  MOD_RES (243)..(243): Selenocysteine
  MOD_RES (245)..(245): Selenocysteine
  MOD_RES (263)..(263): Selenocysteine
  MOD_RES (268)..(268): Selenocysteine
  MOD_RES (277)..(277): Selenocysteine
  MOD_RES (280)..(280): Selenocysteine
  MOD_RES (285)..(285): Selenocysteine
  MOD_RES (293)..(293): Selenocysteine
  MOD_RES (321)..(321): Selenocysteine
MLXLQXWLVQALFIFLXXESXGELLDPCGYISPESPVVQLHSNFXAVCVLKEKCMDYFHVNANYIVWKXNHFXIPKEQYXIINRXASSVXFXDIASLNIQLXCNILXFGQLEQNVYGIXIISGLPPEKPKNLSCIVNEGKKMRCEWDGGREXHLEXNFXLKSEWAXHKFADCKAKRDXPXSCXVDYSXVYFVNIEVWVEAENALGKVXSDHINFDPVYKVKPNPPHNLSVINSEELSSILKLXWXNPSIKSVIILKYNIQYRXKDASXWSQIPPEDXASXRSSFXVQDLKPFXEYVFRIRCMKEDGKGYWSDWSEEASGIXYEDNIASF

SEQ ID NO: 13481 - protein, 333 aa, Homo sapiens
  MOD_RES (3)..(3): Selenocysteine
  MOD_RES (6)..(6): Selenocysteine
  MOD_RES (17)..(18): Selenocysteine
  MOD_RES (21)..(21): Selenocysteine
  MOD_RES (45)..(45): Selenocysteine
  MOD_RES (69)..(69): Selenocysteine
  MOD_RES (73)..(73): Selenocysteine
  MOD_RES (80)..(80): Selenocysteine
  MOD_RES (85)..(85): Selenocysteine
  MOD_RES (90)..(90): Selenocysteine
  MOD_RES (92)..(92): Selenocysteine
  MOD_RES (102)..(102): Selenocysteine
  MOD_RES (107)..(107): Selenocysteine
  MOD_RES (119)..(119): Selenocysteine
  MOD_RES (152)..(152): Selenocysteine
  MOD_RES (156)..(156): Selenocysteine
  MOD_RES (159)..(159): Selenocysteine
  MOD_RES (166)..(166): Selenocysteine
  MOD_RES (178)..(178): Selenocysteine
  MOD_RES (180)..(180): Selenocysteine
  MOD_RES (183)..(183): Selenocysteine
  MOD_RES (188)..(188): Selenocysteine
  MOD_RES (208)..(208): Selenocysteine
  MOD_RES (243)..(243): Selenocysteine
  MOD_RES (245)..(245): Selenocysteine
  MOD_RES (263)..(263): Selenocysteine
  MOD_RES (268)..(268): Selenocysteine
  MOD_RES (277)..(277): Selenocysteine
  MOD_RES (280)..(280): Selenocysteine
  MOD_RES (285)..(285): Selenocysteine
  MOD_RES (293)..(293): Selenocysteine
  MOD_RES (321)..(321): Selenocysteine
  MOD_RES (325)..(325): Selenocysteine
MLXLQXWLVQALFIFLXXESXGELLDPCGYISPESPVVQLHSNFXAVCVLKEKCMDYFHVNANYIVWKXNHFXIPKEQYXIINRXASSVXFXDIASLNIQLXCNILXFGQLEQNVYGIXIISGLPPEKPKNLSCIVNEGKKMRCEWDGGREXHLEXNFXLKSEWAXHKFADCKAKRDXPXSCXVDYSXVYFVNIEVWVEAENALGKVXSDHINFDPVYKVKPNPPHNLSVINSEELSSILKLXWXNPSIKSVIILKYNIQYRXKDASXWSQIPPEDXASXRSSFXVQDLKPFXEYVFRIRCMKEDGKGYWSDWSEEASGIXYEDXLDKPLGSG

SEQ ID NO: 13482 - protein, 857 aa, Homo sapiens
  MOD_RES (3)..(3): Selenocysteine
  MOD_RES (6)..(6): Selenocysteine
  MOD_RES (17)..(18): Selenocysteine
  MOD_RES (21)..(21): Selenocysteine
  MOD_RES (45)..(45): Selenocysteine
  MOD_RES (69)..(69): Selenocysteine
  MOD_RES (73)..(73): Selenocysteine
  MOD_RES (80)..(80): Selenocysteine
  MOD_RES (85)..(85): Selenocysteine
  MOD_RES (90)..(90): Selenocysteine
  MOD_RES (92)..(92): Selenocysteine
  MOD_RES (102)..(102): Selenocysteine
  MOD_RES (107)..(107): Selenocysteine
  MOD_RES (119)..(119): Selenocysteine
  MOD_RES (152)..(152): Selenocysteine
  MOD_RES (156)..(156): Selenocysteine
  MOD_RES (159)..(159): Selenocysteine
  MOD_RES (166)..(166): Selenocysteine
  MOD_RES (178)..(178): Selenocysteine
  MOD_RES (180)..(180): Selenocysteine
  MOD_RES (183)..(183): Selenocysteine
  MOD_RES (188)..(188): Selenocysteine
  MOD_RES (208)..(208): Selenocysteine
  MOD_RES (243)..(243): Selenocysteine
  MOD_RES (245)..(245): Selenocysteine
  MOD_RES (263)..(263): Selenocysteine
  MOD_RES (268)..(268): Selenocysteine
  MOD_RES (277)..(277): Selenocysteine
  MOD_RES (280)..(280): Selenocysteine
  MOD_RES (285)..(285): Selenocysteine
  MOD_RES (293)..(293): Selenocysteine
  MOD_RES (321)..(321): Selenocysteine
  MOD_RES (341)..(341): Selenocysteine
  MOD_RES (346)..(346): Selenocysteine
  MOD_RES (353)..(353): Selenocysteine
  MOD_RES (369)..(369): Selenocysteine
  MOD_RES (371)..(371): Selenocysteine
  MOD_RES (381)..(381): Selenocysteine
  MOD_RES (385)..(385): Selenocysteine
  MOD_RES (388)..(388): Selenocysteine
  MOD_RES (392)..(392): Selenocysteine
  MOD_RES (399)..(399): Selenocysteine
  MOD_RES (401)..(401): Selenocysteine
  MOD_RES (415)..(415): Selenocysteine
  MOD_RES (434)..(434): Selenocysteine
  MOD_RES (436)..(436): Selenocysteine
  MOD_RES (463)..(463): Selenocysteine
  MOD_RES (466)..(466): Selenocysteine
  MOD_RES (494)..(494): Selenocysteine
  MOD_RES (499)..(499): Selenocysteine
  MOD_RES (505)..(505): Selenocysteine
  MOD_RES (514)..(514): Selenocysteine
  MOD_RES (517)..(517): Selenocysteine
  MOD_RES (522)..(522): Selenocysteine
  MOD_RES (525)..(525): Selenocysteine
  MOD_RES (535)..(535): Selenocysteine
  MOD_RES (546)..(546): Selenocysteine
  MOD_RES (548)..(549): Selenocysteine
  MOD_RES (571)..(572): Selenocysteine
  MOD_RES (609)..(609): Selenocysteine
  MOD_RES (628)..(628): Selenocysteine
  MOD_RES (660)..(660): Selenocysteine
  MOD_RES (692)..(692): Selenocysteine
  MOD_RES (695)..(695): Selenocysteine
  MOD_RES (700)..(700): Selenocysteine
  MOD_RES (722)..(722): Selenocysteine
  MOD_RES (820)..(820): Selenocysteine
  MOD_RES (829)..(829): Selenocysteine
  MOD_RES (836)..(836): Selenocysteine
  MOD_RES (848)..(848): Selenocysteine
MLXLQXWLVQALFIFLXXESXGELLDPCGYISPESPVVQLHSNFXAVCVLKEKCMDYFHVNANYIVWKXNHFXIPKEQYXIINRXASSVXFXDIASLNIQLXCNILXFGQLEQNVYGIXIISGLPPEKPKNLSCIVNEGKKMRCEWDGGREXHLEXNFXLKSEWAXHKFADCKAKRDXPXSCXVDYSXVYFVNIEVWVEAENALGKVXSDHINFDPVYKVKPNPPHNLSVINSEELSSILKLXWXNPSIKSVIILKYNIQYRXKDASXWSQIPPEDXASXRSSFXVQDLKPFXEYVFRIRCMKEDGKGYWSDWSEEASGIXYEDRPSKAPSFWYKIDPSHXQGYRXVQLVWKXLPPFEANGKILDYEVXLXRWKSHLQNYXVNAXKLXVNLXNDRYLAXLXVRNLVGKSDAAVLXIPACDFQGNLAESKCYLIXVXPVYADGPGSPESIKAYLKQAPPSKGPXVRXKKVGKNEAVLEWDQLPVDVQNGFIRNYXIFYRXIIGNEXAVNVDSSHXEYXLSSLXSDXLYMVRMAAYXDEGGKDGPEFXFXXPKFAQGEIEAIVVPVCLAFLLXXLLGVLFCFNKRDLIKKHIWPNVPDPSKSHIAQWSPHXPPRHNFNSKDQMYSDGNFXDVSVVEIEANDKKPFPEDLKSLDLFKKEKINXEGHSSGIGGSSCMSSSRPSISSSDENESSQNXSSXVQYSXVVHSGYRHQVPSVQVFSRSESXQPLLDSEERPEDLQLVDHVDGGDGILPRQQYFKQNCSQHESSPDISHFERSKQVSSVNEEDFVRLKQQISDHISQSCGSGQMKMFQEVSAADAFGPGXEGQVERFEXVGMEAAXDEGMPKSYLPQXVRQGGYMPQ

SEQ ID NO: 13483 - protein, 918 aa, Homo sapiens
  MOD_RES (3)..(3): Selenocysteine
  MOD_RES (6)..(6): Selenocysteine
  MOD_RES (17)..(18): Selenocysteine
  MOD_RES (21)..(21): Selenocysteine
  MOD_RES (45)..(45): Selenocysteine
  MOD_RES (69)..(69): Selenocysteine
  MOD_RES (73)..(73): Selenocysteine
  MOD_RES (80)..(80): Selenocysteine
  MOD_RES (85)..(85): Selenocysteine
  MOD_RES (90)..(90): Selenocysteine
  MOD_RES (92)..(92): Selenocysteine
  MOD_RES (102)..(102): Selenocysteine
  MOD_RES (107)..(107): Selenocysteine
  MOD_RES (119)..(119): Selenocysteine
  MOD_RES (152)..(152): Selenocysteine
  MOD_RES (156)..(156): Selenocysteine
  MOD_RES (159)..(159): Selenocysteine
  MOD_RES (166)..(166): Selenocysteine
  MOD_RES (178)..(178): Selenocysteine
  MOD_RES (180)..(180): Selenocysteine
  MOD_RES (183)..(183): Selenocysteine
  MOD_RES (188)..(188): Selenocysteine
  MOD_RES (208)..(208): Selenocysteine
  MOD_RES (243)..(243): Selenocysteine
  MOD_RES (245)..(245): Selenocysteine
  MOD_RES (263)..(263): Selenocysteine
  MOD_RES (268)..(268): Selenocysteine
  MOD_RES (277)..(277): Selenocysteine
  MOD_RES (280)..(280): Selenocysteine
  MOD_RES (285)..(285): Selenocysteine
  MOD_RES (293)..(293): Selenocysteine
  MOD_RES (321)..(321): Selenocysteine
  MOD_RES (341)..(341): Selenocysteine
  MOD_RES (346)..(346): Selenocysteine
  MOD_RES (353)..(353): Selenocysteine
  MOD_RES (369)..(369): Selenocysteine
  MOD_RES (371)..(371): Selenocysteine
  MOD_RES (381)..(381): Selenocysteine
  MOD_RES (385)..(385): Selenocysteine
  MOD_RES (388)..(388): Selenocysteine
  MOD_RES (392)..(392): Selenocysteine
  MOD_RES (399)..(399): Selenocysteine
  MOD_RES (401)..(401): Selenocysteine
  MOD_RES (415)..(415): Selenocysteine
  MOD_RES (424)..(424): Selenocysteine
  MOD_RES (444)..(445): Selenocysteine
  MOD_RES (468)..(468): Selenocysteine
  MOD_RES (476)..(476): Selenocysteine
  MOD_RES (480)..(480): Selenocysteine
  MOD_RES (495)..(495): Selenocysteine
  MOD_RES (497)..(497): Selenocysteine
  MOD_RES (524)..(524): Selenocysteine
  MOD_RES (527)..(527): Selenocysteine
  MOD_RES (555)..(555): Selenocysteine
  MOD_RES (560)..(560): Selenocysteine
  MOD_RES (566)..(566): Selenocysteine
  MOD_RES (575)..(575): Selenocysteine
  MOD_RES (578)..(578): Selenocysteine
  MOD_RES (583)..(583): Selenocysteine
  MOD_RES (586)..(586): Selenocysteine
  MOD_RES (596)..(596): Selenocysteine
  MOD_RES (607)..(607): Selenocysteine
  MOD_RES (609)..(610): Selenocysteine
  MOD_RES (632)..(633): Selenocysteine
  MOD_RES (670)..(670): Selenocysteine
  MOD_RES (689)..(689): Selenocysteine
  MOD_RES (721)..(721): Selenocysteine
  MOD_RES (753)..(753): Selenocysteine
  MOD_RES (756)..(756): Selenocysteine
  MOD_RES (761)..(761): Selenocysteine
  MOD_RES (783)..(783): Selenocysteine
  MOD_RES (881)..(881): Selenocysteine
  MOD_RES (890)..(890): Selenocysteine
  MOD_RES (897)..(897): Selenocysteine
  MOD_RES (909)..(909): Selenocysteine
MLXLQXWLVQALFIFLXXESXGELLDPCGYISPESPVVQLHSNFXAVCVLKEKCMDYFHVNANYIVWKXNHFXIPKEQYXIINRXASSVXFXDIASLNIQLXCNILXFGQLEQNVYGIXIISGLPPEKPKNLSCIVNEGKKMRCEWDGGREXHLEXNFXLKSEWAXHKFADCKAKRDXPXSCXVDYSXVYFVNIEVWVEAENALGKVXSDHINFDPVYKVKPNPPHNLSVINSEELSSILKLXWXNPSIKSVIILKYNIQYRXKDASXWSQIPPEDXASXRSSFXVQDLKPFXEYVFRIRCMKEDGKGYWSDWSEEASGIXYEDRPSKAPSFWYKIDPSHXQGYRXVQLVWKXLPPFEANGKILDYEVXLXRWKSHLQNYXVNAXKLXVNLXNDRYLAXLXVRNLVGKSDAAVLXIPACDFQAXHPVMDLKAFPKDNMLWVEWXXPRESVKKYILEWCVLSDKAPCIXDWQQEDGXVHRXYLRGNLAESKCYLIXVXPVYADGPGSPESIKAYLKQAPPSKGPXVRXKKVGKNEAVLEWDQLPVDVQNGFIRNYXIFYRXIIGNEXAVNVDSSHXEYXLSSLXSDXLYMVRMAAYXDEGGKDGPEFXFXXPKFAQGEIEAIVVPVCLAFLLXXLLGVLFCFNKRDLIKKHIWPNVPDPSKSHIAQWSPHXPPRHNFNSKDQMYSDGNFXDVSVVEIEANDKKPFPEDLKSLDLFKKEKINXEGHSSGIGGSSCMSSSRPSISSSDENESSQNXSSXVQYSXVVHSGYRHQVPSVQVFSRSESXQPLLDSEERPEDLQLVDHVDGGDGILPRQQYFKQNCSQHESSPDISHFERSKQVSSVNEEDFVRLKQQISDHISQSCGSGQMKMFQEVSAADAFGPGXEGQVERFEXVGMEAAXDEGMPKSYLPQXVRQGGYMPQ

SEQ ID NO: 13484 - protein, 203 aa, Homo sapiens
  MOD_RES (3)..(3): Selenocysteine
  MOD_RES (6)..(6): Selenocysteine
  MOD_RES (17)..(18): Selenocysteine
  MOD_RES (21)..(21): Selenocysteine
  MOD_RES (45)..(45): Selenocysteine
  MOD_RES (77)..(77): Selenocysteine
  MOD_RES (79)..(79): Selenocysteine
  MOD_RES (97)..(97): Selenocysteine
  MOD_RES (102)..(102): Selenocysteine
  MOD_RES (111)..(111): Selenocysteine
  MOD_RES (114)..(114): Selenocysteine
  MOD_RES (119)..(119): Selenocysteine
  MOD_RES (127)..(127): Selenocysteine
  MOD_RES (155)..(155): Selenocysteine
  MOD_RES (163)..(163): Selenocysteine
  MOD_RES (182)..(182): Selenocysteine
  MOD_RES (187)..(187): Selenocysteine
MLXLQXWLVQALFIFLXXESXGELLDPCGYISPESPVVQLHSNFXAVCVLKEKLKPNPPHNLSVINSEELSSILKLXWXNPSIKSVIILKYNIQYRXKDASXWSQIPPEDXASXRSSFXVQDLKPFXEYVFRIRCMKEDGKGYWSDWSEEASGIXYEDKLKNXSGLMFQILQRVILPSGHLXLLQGXILIQKIKCIQMAISLM

SEQ ID NO: 13485 - protein, 55 aa, Homo sapiens
  MOD_RES (3)..(3): Selenocysteine
  MOD_RES (6)..(6): Selenocysteine
  MOD_RES (17)..(18): Selenocysteine
  MOD_RES (21)..(21): Selenocysteine
  MOD_RES (25)..(25): Selenocysteine
  MOD_RES (35)..(35): Selenocysteine
  MOD_RES (51)..(51): Selenocysteine
MLXLQXWLVQALFIFLXXESXGQHXSLLIAKQNVXPPPHALLIILLCILSXLKSG

SEQ ID NO: 13486 - protein, 115 aa, Homo sapiens
  MOD_RES (103)..(103): Selenocysteine
  MOD_RES (112)..(112): Selenocysteine
MFHVSFRYIFGLPPLILVLLPVASSDCDIEGKDGKQYESVLMVSIDQLLDSMKEIGSNCLNNEFNFFKRHICDANKEENKSLKEQKKLNDLCFLKRLLQEIKXCWNKILMGXKEH

SEQ ID NO: 13487 - protein, 159 aa, Homo sapiens
  MOD_RES (97)..(97): Selenocysteine
  MOD_RES (111)..(112): Selenocysteine
  MOD_RES (118)..(118): Selenocysteine
  MOD_RES (147)..(147): Selenocysteine
  MOD_RES (156)..(156): Selenocysteine
MFHVSFRYIFGLPPLILVLLPVASSDCDIEGKDGKQYESVLMVSIDQLLDSMKEIGSNCLNNEFNFFKRHICDANKEGMFLFRAARKLRQFLKMNSXGDFDLHLLKVSEGXXILLNCXGQEENKSLKEQKKLNDLCFLKRLLQEIKXCWNKILMGXKEH

SEQ ID NO: 13488 - protein, 177 aa, Homo sapiens
  MOD_RES (97)..(97): Selenocysteine
  MOD_RES (111)..(112): Selenocysteine
  MOD_RES (118)..(118): Selenocysteine
  MOD_RES (135)..(135): Selenocysteine
  MOD_RES (165)..(165): Selenocysteine
  MOD_RES (174)..(174): Selenocysteine
MFHVSFRYIFGLPPLILVLLPVASSDCDIEGKDGKQYESVLMVSIDQLLDSMKEIGSNCLNNEFNFFKRHICDANKEGMFLFRAARKLRQFLKMNSXGDFDLHLLKVSEGXXILLNCXGQVKGRKPAALGEAQPXKSLEENKSLKEQKKLNDLCFLKRLLQEIKXCWNKILMGXKEH

SEQ ID NO: 13489 - protein, 133 aa, Homo sapiens
  MOD_RES (91)..(91): Selenocysteine
  MOD_RES (121)..(121): Selenocysteine
  MOD_RES (130)..(130): Selenocysteine
MFHVSFRYIFGLPPLILVLLPVASSDCDIEGKDGKQYESVLMVSIDQLLDSMKEIGSNCLNNEFNFFKRHICDANKVKGRKPAALGEAQPXKSLEENKSLKEQKKLNDLCFLKRLLQEIKXCWNKILMGXKEH

SEQ ID NO: 13490 - protein, 71 aa, Homo sapiens
  MOD_RES (60)..(60): Selenocysteine
MFHVSFRYIFGLPPLILVLLPVASSDCDIEGKDGKQYESVLMVSIDQLLNQPYKKKEKRXERKQQSAMSNN

SEQ ID NO: 13491 - protein, 37 aa, Homo sapiens
MFHVSFRYIFGLPPLILVLLPVASSDCDIEGQHERNW

SEQ ID NO: 13492 - protein, 65 aa, Homo sapiens
  MOD_RES (31)..(31): Selenocysteine
AAMYEIKVRSIPDHYFKGFWSEWSPSYYFRXPEINNSSGLSLSYGPVSPIIRRLWNIFVRNQEKI

SEQ ID NO: 13493 - protein, 52 aa, Homo sapiens
  MOD_RES (2)..(2): Selenocysteine
  MOD_RES (6)..(7): Selenocysteine
MXILGXXFGMVFSLLQVVSGESGYAQNGDLEDAELDDYSFSCYSQLEVNGSQ

SEQ ID NO: 13494 - protein, 59 aa, Homo sapiens
  MOD_RES (2)..(2): Selenocysteine
  MOD_RES (6)..(7): Selenocysteine
  MOD_RES (56)..(56): Selenocysteine
MXILGXXFGMVFSLLQVVSGESGYAQNGDLEDAELDDYSFSCYSQLEVNGSQHSLXCAF

SEQ ID NO: 13495 - protein, 150 aa, Homo sapiens
  MOD_RES (2)..(2): Selenocysteine
  MOD_RES (6)..(7): Selenocysteine
  MOD_RES (56)..(56): Selenocysteine
  MOD_RES (67)..(67): Selenocysteine
  MOD_RES (96)..(96): Selenocysteine
  MOD_RES (117)..(117): Selenocysteine
  MOD_RES (124)..(125): Selenocysteine
  MOD_RES (144)..(144): Selenocysteine
MXILGXXFGMVFSLLQVVSGESGYAQNGDLEDAELDDYSFSCYSQLEVNGSQHSLXCAFEDPDVNIXNLEFEICGALVEVKCLNFRKLQEIYFIEXKKFLLIGKSNICVKVGEKSLXCKKIDLXXIGKKLYIKVWLSLLGYLKXLCLDIL

SEQ ID NO: 13496 - protein, 180 aa, Homo sapiens
  MOD_RES (2)..(2): Selenocysteine
  MOD_RES (6)..(7): Selenocysteine
  MOD_RES (56)..(56): Selenocysteine
  MOD_RES (67)..(67): Selenocysteine
  MOD_RES (96)..(96): Selenocysteine
  MOD_RES (117)..(117): Selenocysteine
  MOD_RES (124)..(125): Selenocysteine
  MOD_RES (149)..(149): Selenocysteine
  MOD_RES (152)..(152): Selenocysteine
  MOD_RES (179)..(179): Selenocysteine
MXILGXXFGMVFSLLQVVSGESGYAQNGDLEDAELDDYSFSCYSQLEVNGSQHSLXCAFEDPDVNIXNLEFEICGALVEVKCLNFRKLQEIYFIEXKKFLLIGKSNICVKVGEKSLXCKKIDLXXIVKPEAPFDLSVVYREGANDFVVXFNXSHLQKKYVKVLMHDVAYRQEKDENKWXD

SEQ ID NO: 13497 - protein, 459 aa, Homo sapiens
  MOD_RES (2)..(2): Selenocysteine
  MOD_RES (6)..(7): Selenocysteine
  MOD_RES (56)..(56): Selenocysteine
  MOD_RES (67)..(67): Selenocysteine
  MOD_RES (96)..(96): Selenocysteine
  MOD_RES (117)..(117): Selenocysteine
  MOD_RES (124)..(125): Selenocysteine
  MOD_RES (149)..(149): Selenocysteine
  MOD_RES (152)..(152): Selenocysteine
  MOD_RES (179)..(179): Selenocysteine
  MOD_RES (186)..(186): Selenocysteine
  MOD_RES (189)..(189): Selenocysteine
  MOD_RES (228)..(228): Selenocysteine
  MOD_RES (244)..(244): Selenocysteine
  MOD_RES (282)..(282): Selenocysteine
  MOD_RES (327)..(327): Selenocysteine
  MOD_RES (357)..(357): Selenocysteine
  MOD_RES (368)..(368): Selenocysteine
  MOD_RES (410)..(411): Selenocysteine
  MOD_RES (414)..(414): Selenocysteine
  MOD_RES (427)..(427): Selenocysteine
  MOD_RES (439)..(439): Selenocysteine
  MOD_RES (451)..(451): Selenocysteine
MXILGXXFGMVFSLLQVVSGESGYAQNGDLEDAELDDYSFSCYSQLEVNGSQHSLXCAFEDPDVNIXNLEFEICGALVEVKCLNFRKLQEIYFIEXKKFLLIGKSNICVKVGEKSLXCKKIDLXXIVKPEAPFDLSVVYREGANDFVVXFNXSHLQKKYVKVLMHDVAYRQEKDENKWXHVNLSSXKLXLLQRKLQPAAMYEIKVRSIPDHYFKGFWSEWSPSYYFRXPEINNSSGEMDPILLXISILSFFSVALLVILACVLWKKRIKPIVWPSLPDHKKXLEHLCKKPRKNLNVSFNPESFLDCQIHRVDDIQARDEVEGFLQDXFPQQLEESEKQRLGGDVQSPNCPSEDVVIXPESFGRDSSLXCLAGNVSACDAPILSSSRSLDCRESGKNGPHVYQDLLLSLGXXNSXLPPPFSLQSGILXLNPVAQGQPILXSLGSNQEEAYVXMSSFYQNQ

SEQ ID NO: 13498 - protein, 261 aa, Homo sapiens
  MOD_RES (2)..(2): Selenocysteine
  MOD_RES (6)..(7): Selenocysteine
  MOD_RES (56)..(56): Selenocysteine
  MOD_RES (67)..(67): Selenocysteine
  MOD_RES (96)..(96): Selenocysteine
  MOD_RES (117)..(117): Selenocysteine
  MOD_RES (124)..(125): Selenocysteine
  MOD_RES (149)..(149): Selenocysteine
  MOD_RES (152)..(152): Selenocysteine
  MOD_RES (179)..(179): Selenocysteine
  MOD_RES (186)..(186): Selenocysteine
  MOD_RES (189)..(189): Selenocysteine
  MOD_RES (228)..(228): Selenocysteine
MXILGXXFGMVFSLLQVVSGESGYAQNGDLEDAELDDYSFSCYSQLEVNGSQHSLXCAFEDPDVNIXNLEFEICGALVEVKCLNFRKLQEIYFIEXKKFLLIGKSNICVKVGEKSLXCKKIDLXXIVKPEAPFDLSVVYREGANDFVVXFNXSHLQKKYVKVLMHDVAYRQEKDENKWXHVNLSSXKLXLLQRKLQPAAMYEIKVRSIPDHYFKGFWSEWSPSYYFRXPEINNSSGLSLSYGPVSPIIRRLWNIFVRNQEK

SEQ ID NO: 13499 - protein, 521 aa, Homo sapiens
  MOD_RES (12)..(12): Selenocysteine
  MOD_RES (24)..(24): Selenocysteine
  MOD_RES (34)..(34): Selenocysteine
  MOD_RES (43)..(43): Selenocysteine
  MOD_RES (53)..(53): Selenocysteine
  MOD_RES (55)..(55): Selenocysteine
  MOD_RES (58)..(58): Selenocysteine
  MOD_RES (84)..(84): Selenocysteine
  MOD_RES (92)..(92): Selenocysteine
  MOD_RES (103)..(103): Selenocysteine
  MOD_RES (119)..(119): Selenocysteine
  MOD_RES (121)..(121): Selenocysteine
  MOD_RES (165)..(165): Selenocysteine
  MOD_RES (176)..(177): Selenocysteine
  MOD_RES (205)..(205): Selenocysteine
  MOD_RES (230)..(230): Selenocysteine
  MOD_RES (242)..(242): Selenocysteine
  MOD_RES (273)..(273): Selenocysteine
  MOD_RES (284)..(284): Selenocysteine
  MOD_RES (287)..(287): Selenocysteine
  MOD_RES (325)..(325): Selenocysteine
  MOD_RES (343)..(343): Selenocysteine
  MOD_RES (356)..(356): Selenocysteine
  MOD_RES (360)..(360): Selenocysteine
  MOD_RES (381)..(381): Selenocysteine
  MOD_RES (398)..(398): Selenocysteine
  MOD_RES (404)..(404): Selenocysteine
  MOD_RES (416)..(416): Selenocysteine
  MOD_RES (419)..(419): Selenocysteine
  MOD_RES (461)..(461): Selenocysteine
  MOD_RES (483)..(483): Selenocysteine
  MOD_RES (520)..(520): Selenocysteine
MGLGRCIWEGWXLESEALRRDMGXWLLACICICXCVCLGVSVXGEGQGPRSRXFXCLXNNILRIDCHWSAPELGQGSSPWLLFXSNQAPGGXHKCILRGSECXVVLPPEAVLVPSDNFXIXFHHCMSGREQVSLVDPEYLPRRHVKLDPPSDLQSNISSGHCILXWSISPALEPMXXLLSYELAFKKQEEAWEQAQHRDHIVGVXWLILEAFELDPGFIHEARLRVQMAXLEDDVVEEERYXGQWSEWSQPVCFQAPQRQGPLIPPWGWPGNXLVAVSIFLLLXGPXYLLFKLSPRVKRIFYQNVPSPAMFFQPLYSVHNGNFQXWMGAHGAGVLLSQDCAGXPQGALEPCVQEAXALLXCGPARPWKSVALEEEQEGPGXRLPGNLSSEDVLPAGCXEWRVQXLAYLPQEDWAPXSLXRPAPPDSEGSRSSSSSSSSNNNNYCALGCYGGWHLSALPGNXQSSGPIPALACGLSCDHQGLEXQQGVAWVLAGHCQRPGLHEDLQGMLLPSVLSKARSWXF

SEQ ID NO: 13500 - protein, 342 aa, Homo sapiens
  MOD_RES (4)..(4): Selenocysteine
  MOD_RES (8)..(8): Selenocysteine
  MOD_RES (23)..(23): Selenocysteine
  MOD_RES (28)..(28): Selenocysteine
  MOD_RES (59)..(59): Selenocysteine
  MOD_RES (71)..(71): Selenocysteine
  MOD_RES (81)..(81): Selenocysteine
  MOD_RES (90)..(90): Selenocysteine
  MOD_RES (100)..(100): Selenocysteine
  MOD_RES (102)..(102): Selenocysteine
  MOD_RES (105)..(105): Selenocysteine
  MOD_RES (131)..(131): Selenocysteine
  MOD_RES (161)..(161): Selenocysteine
  MOD_RES (168)..(169): Selenocysteine
  MOD_RES (181)..(181): Selenocysteine
  MOD_RES (184)..(184): Selenocysteine
  MOD_RES (189)..(189): Selenocysteine
  MOD_RES (200)..(200): Selenocysteine
  MOD_RES (211)..(212): Selenocysteine
  MOD_RES (240)..(240): Selenocysteine
  MOD_RES (265)..(265): Selenocysteine
  MOD_RES (277)..(277): Selenocysteine
  MOD_RES (308)..(308): Selenocysteine
  MOD_RES (319)..(319): Selenocysteine
  MOD_RES (322)..(322): Selenocysteine
  MOD_RES (337)..(337): Selenocysteine
MPQXCDGXGQMHLGSNCCKNGQXLLQRXCHGVSCCGWWFQAARSILGKGPSAQSLAGWXLESEALRRDMGXWLLACICICXCVCLGVSVXGEGQGPRSRXFXCLXNNILRIDCHWSAPELGQGSSPWLLFXRLLAAHISASCGAVSAPSCCHLRQCSCHLXISPSLSXXACLGGSRSAWWXRSXCPGDXSNISSGHCILXWSISPALEPMXXLLSYELAFKKQEEAWEQAQHRDHIVGVXWLILEAFELDPGFIHEARLRVQMAXLEDDVVEEERYXGQWSEWSQPVCFQAPQRQGPLIPPWGWPGNXLVAVSIFLLLXGPXYLLFKLSPRLGWGPXGPVCC

SEQ ID NO: 13501 - protein, 452 aa, Homo sapiens
  MOD_RES (6)..(6): Selenocysteine
  MOD_RES (23)..(23): Selenocysteine
  MOD_RES (69)..(69): Selenocysteine
  MOD_RES (167)..(167): Selenocysteine
  MOD_RES (172)..(173): Selenocysteine
  MOD_RES (175)..(175): Selenocysteine
  MOD_RES (181)..(181): Selenocysteine
  MOD_RES (197)..(197): Selenocysteine
  MOD_RES (229)..(229): Selenocysteine
  MOD_RES (266)..(266): Selenocysteine
  MOD_RES (269)..(269): Selenocysteine
  MOD_RES (285)..(285): Selenocysteine
  MOD_RES (310)..(310): Selenocysteine
  MOD_RES (332)..(332): Selenocysteine
  MOD_RES (368)..(368): Selenocysteine
  MOD_RES (387)..(387): Selenocysteine
  MOD_RES (412)..(412): Selenocysteine
MDDIFXQCREGNAVAVRLWLDNXENDLNQGDDHGFSPLHWACREGRSAVVEMLIMRGARINVMNRGDDXPLHLAASHGHRDIVQKLLQYKADINAVNEHGNVPLHYACFWGQDQVAEDLVANGALVSICNKYGEMPVDKAKAPLRELLRERAEKMGQNLNRIPYKDXFWKGXXRXRPRNGXLNKHSGIDFKQLNFLXKLNENHSGELWKGRWQGNDIVVKVLKVRDWSXRKSRDFNEECPRLRIFSHPNVLPVLGACQSPPAPHPXLIXHWMPYGSLYNVLHEGXNFVVDQSQAVKFALDMARGMAFLHXLEPLIPRHALNSRSVMIDEDMXARISMADVKFSFQCPGRMYAPAWVAPEALQKKPEDXNRRSADMWSFAVLLWELVXREVPFADLSNMEIGMKVALEGLRPXIPPGISPHVCKLMKICMNEDPAKRPKFDMIVPILEKMQDK

SEQ ID NO: 13502 - protein, 483 aa, Homo sapiens
  MOD_RES (6)..(6): Selenocysteine
  MOD_RES (23)..(23): Selenocysteine
  MOD_RES (69)..(69): Selenocysteine
  MOD_RES (165)..(165): Selenocysteine
  MOD_RES (198)..(198): Selenocysteine
  MOD_RES (203)..(204): Selenocysteine
  MOD_RES (206)..(206): Selenocysteine
  MOD_RES (212)..(212): Selenocysteine
  MOD_RES (228)..(228): Selenocysteine
  MOD_RES (260)..(260): Selenocysteine
  MOD_RES (297)..(297): Selenocysteine
  MOD_RES (300)..(300): Selenocysteine
  MOD_RES (316)..(316): Selenocysteine
  MOD_RES (341)..(341): Selenocysteine
  MOD_RES (363)..(363): Selenocysteine
  MOD_RES (399)..(399): Selenocysteine
  MOD_RES (418)..(418): Selenocysteine
  MOD_RES (443)..(443): Selenocysteine
MDDIFXQCREGNAVAVRLWLDNXENDLNQGDDHGFSPLHWACREGRSAVVEMLIMRGARINVMNRGDDXPLHLAASHGHRDIVQKLLQYKADINAVNEHGNVPLHYACFWGQDQVAEDLVANGALVSICNKYGEMPVDKAKAPLRELLRGPSPHPLACVLSSLPXCLLPLYHSLGCFSSLERAEKMGQNLNRIPYKDXFWKGXXRXRPRNGXLNKHSGIDFKQLNFLXKLNENHSGELWKGRWQGNDIVVKVLKVRDWSXRKSRDFNEECPRLRIFSHPNVLPVLGACQSPPAPHPXLIXHWMPYGSLYNVLHEGXNFVVDQSQAVKFALDMARGMAFLHXLEPLIPRHALNSRSVMIDEDMXARISMADVKFSFQCPGRMYAPAWVAPEALQKKPEDXNRRSADMWSFAVLLWELVXREVPFADLSNMEIGMKVALEGLRPXIPPGISPHVCKLMKICMNEDPAKRPKFDMIVPILEKMQDK

SEQ ID NO: 13503 - protein, 391 aa, Homo sapiens
  MOD_RES (6)..(6): Selenocysteine
  MOD_RES (23)..(23): Selenocysteine
  MOD_RES (69)..(69): Selenocysteine
  MOD_RES (128)..(128): Selenocysteine
  MOD_RES (132)..(132): Selenocysteine
  MOD_RES (134)..(134): Selenocysteine
  MOD_RES (168)..(168): Selenocysteine
  MOD_RES (205)..(205): Selenocysteine
  MOD_RES (208)..(208): Selenocysteine
  MOD_RES (224)..(224): Selenocysteine
  MOD_RES (249)..(249): Selenocysteine
  MOD_RES (271)..(271): Selenocysteine
  MOD_RES (307)..(307): Selenocysteine
  MOD_RES (326)..(326): Selenocysteine
  MOD_RES (351)..(351): Selenocysteine
MDDIFXQCREGNAVAVRLWLDNXENDLNQGDDHGFSPLHWACREGRSAVVEMLIMRGARINVMNRGDDXPLHLAASHGHRDIVQKLLQYKADINAVNEHGNVPLHYACFWGQDQVAESGQRRWARISXVFHXRXHSGRGPPALGPLWKGRWQGNDIVVKVLKVRDWSXRKSRDFNEECPRLRIFSHPNVLPVLGACQSPPAPHPXLIXHWMPYGSLYNVLHEGXNFVVDQSQAVKFALDMARGMAFLHXLEPLIPRHALNSRSVMIDEDMXARISMADVKFSFQCPGRMYAPAWVAPEALQKKPEDXNRRSADMWSFAVLLWELVXREVPFADLSNMEIGMKVALEGLRPXIPPGISPHVCKLMKICMNEDPAKRPKFDMIVPILEKMQDK

SEQ ID NO: 13504 - protein, 36 aa, Homo sapiens
  MOD_RES (6)..(6): Selenocysteine
  MOD_RES (23)..(23): Selenocysteine
MDDIFXQCREGNAVAVRLWLDNXENDLNQGIVLDAL

SEQ ID NO: 13505 - protein, 40 aa, Homo sapiens
  MOD_RES (6)..(6): Selenocysteine
  MOD_RES (23)..(23): Selenocysteine
  MOD_RES (34)..(34): Selenocysteine
  MOD_RES (37)..(37): Selenocysteine
MDDIFXQCREGNAVAVRLWLDNXENDLNQGYCSXRQXSMQ

SEQ ID NO: 13506 - protein, 318 aa, Homo sapiens
  MOD_RES (33)..(33): Selenocysteine
  MOD_RES (38)..(39): Selenocysteine
  MOD_RES (41)..(41): Selenocysteine
  MOD_RES (47)..(47): Selenocysteine
  MOD_RES (63)..(63): Selenocysteine
  MOD_RES (95)..(95): Selenocysteine
  MOD_RES (132)..(132): Selenocysteine
  MOD_RES (135)..(135): Selenocysteine
  MOD_RES (151)..(151): Selenocysteine
  MOD_RES (176)..(176): Selenocysteine
  MOD_RES (198)..(198): Selenocysteine
  MOD_RES (234)..(234): Selenocysteine
  MOD_RES (253)..(253): Selenocysteine
  MOD_RES (278)..(278): Selenocysteine
MPVDKAKAPLRELLRERAEKMGQNLNRIPYKDXFWKGXXRXRPRNGXLNKHSGIDFKQLNFLXKLNENHSGELWKGRWQGNDIVVKVLKVRDWSXRKSRDFNEECPRLRIFSHPNVLPVLGACQSPPAPHPXLIXHWMPYGSLYNVLHEGXNFVVDQSQAVKFALDMARGMAFLHXLEPLIPRHALNSRSVMIDEDMXARISMADVKFSFQCPGRMYAPAWVAPEALQKKPEDXNRRSADMWSFAVLLWELVXREVPFADLSNMEIGMKVALEGLRPXIPPGISPHVCKLMKICMNEDPAKRPKFDMIVPILEKMQDK

SEQ ID NO: 13507 - protein, 111 aa, Homo sapiens
  MOD_RES (15)..(15): Selenocysteine
  MOD_RES (61)..(61): Selenocysteine
REGNAVAVRLWLDNXENDLNQGDDHGFSPLHWACREGRSAVVEMLIMRGARINVMNRGDDXPLHLAASHGHRDIVQKLLQYKADINAVNEHGNVPLHYACFWGQDQVAEDK

SEQ ID NO: 13508 - protein, 203 aa, Homo sapiens
  MOD_RES (3)..(3): Selenocysteine
  MOD_RES (11)..(11): Selenocysteine
  MOD_RES (15)..(15): Selenocysteine
  MOD_RES (35)..(35): Selenocysteine
  MOD_RES (37)..(37): Selenocysteine
  MOD_RES (80)..(80): Selenocysteine
  MOD_RES (121)..(121): Selenocysteine
  MOD_RES (132)..(132): Selenocysteine
  MOD_RES (150)..(150): Selenocysteine
  MOD_RES (168)..(168): Selenocysteine
  MOD_RES (188)..(188): Selenocysteine
EKXVKRCLLDXFKHXDEEFLKQASSQKPAWKDGSXAXCVLAVDNILYIANLGDSRAILCRYNEESQKHAALSLSKEHNPXQYEERMRIQKAGGNVRDGRVLGVLEVSRSIGDGQYKRCGVXSVPDIRRCQLXPNDRFILLACDGLFKVFXPEEAVNFILSCLEVRNLXRGWWLSQLCLSFQRSRSSEXPFPPIVGQPLCPFSV

SEQ ID NO: 13509 - protein, 274 aa, Homo sapiens
  MOD_RES (38)..(38): Selenocysteine
  MOD_RES (68)..(68): Selenocysteine
  MOD_RES (76)..(76): Selenocysteine
  MOD_RES (80)..(80): Selenocysteine
  MOD_RES (100)..(100): Selenocysteine
  MOD_RES (102)..(102): Selenocysteine
  MOD_RES (145)..(145): Selenocysteine
  MOD_RES (186)..(186): Selenocysteine
  MOD_RES (197)..(197): Selenocysteine
  MOD_RES (215)..(215): Selenocysteine
  MOD_RES (234)..(234): Selenocysteine
  MOD_RES (266)..(266): Selenocysteine
MDLFGDLPEPERSPRPAAGKEAQKGPLLFDDLPPASSXDSGSGGPLLFDDLPPASSGDSGDVISVEKXVKRCLLDXFKHXDEEFLKQASSQKPAWKDGSXAXCVLAVDNILYIANLGDSRAILCRYNEESQKHAALSLSKEHNPXQYEERMRIQKAGGNVRDGRVLGVLEVSRSIGDGQYKRCGVXSVPDIRRCQLXPNDRFILLACDGLFKVFXPEEAVNFILSCLEDEKIQXREGKSAADARYEAACNRLANKAVQRGSADNVXVMVVRIGH

SEQ ID NO: 13510 - protein, 392 aa, Homo sapiens
  MOD_RES (38)..(38): Selenocysteine
  MOD_RES (64)..(64): Selenocysteine
  MOD_RES (72)..(72): Selenocysteine
  MOD_RES (81)..(81): Selenocysteine
  MOD_RES (132)..(132): Selenocysteine
  MOD_RES (143)..(143): Selenocysteine
  MOD_RES (186)..(186): Selenocysteine
  MOD_RES (194)..(194): Selenocysteine
  MOD_RES (198)..(198): Selenocysteine
  MOD_RES (218)..(218): Selenocysteine
  MOD_RES (220)..(220): Selenocysteine
  MOD_RES (263)..(263): Selenocysteine
  MOD_RES (304)..(304): Selenocysteine
  MOD_RES (315)..(315): Selenocysteine
  MOD_RES (333)..(333): Selenocysteine
  MOD_RES (352)..(352): Selenocysteine
  MOD_RES (384)..(384): Selenocysteine
MDLFGDLPEPERSPRPAAGKEAQKGPLLFDDLPPASSXDSGSGGPLLFDDLPPASSGDSGSLAXSISQMVKXEGKGAKRKXSEEEKNGSEELVEKKVCKASSVIFGLKGYVAERKGEREEMQDAHVILNDIXEECRPPSSLIXRVSYFAVFDGHGGIRASKFAAQNLHQNLIRKFPKGDVISVEKXVKRCLLDXFKHXDEEFLKQASSQKPAWKDGSXAXCVLAVDNILYIANLGDSRAILCRYNEESQKHAALSLSKEHNPXQYEERMRIQKAGGNVRDGRVLGVLEVSRSIGDGQYKRCGVXSVPDIRRCQLXPNDRFILLACDGLFKVFXPEEAVNFILSCLEDEKIQXREGKSAADARYEAACNRLANKAVQRGSADNVXVMVVRIGH

SEQ ID NO: 13511 - protein, 162 aa, Homo sapiens
  MOD_RES (38)..(38): Selenocysteine
  MOD_RES (64)..(64): Selenocysteine
  MOD_RES (72)..(72): Selenocysteine
  MOD_RES (81)..(81): Selenocysteine
  MOD_RES (132)..(132): Selenocysteine
MDLFGDLPEPERSPRPAAGKEAQKGPLLFDDLPPASSXDSGSGGPLLFDDLPPASSGDSGSLAXSISQMVKXEGKGAKRKXSEEEKNGSEELVEKKVCKASSVIFGLKGYVAERKGEREEMQDAHVILNDIXEECRPPSSLMRCNQCRENREEMPFGHFQAY

SEQ ID NO: 13512 - protein, 212 aa, Homo sapiens
  MOD_RES (38)..(38): Selenocysteine
  MOD_RES (64)..(64): Selenocysteine
  MOD_RES (72)..(72): Selenocysteine
  MOD_RES (81)..(81): Selenocysteine
  MOD_RES (130)..(130): Selenocysteine
  MOD_RES (141)..(141): Selenocysteine
  MOD_RES (184)..(184): Selenocysteine
  MOD_RES (192)..(192): Selenocysteine
  MOD_RES (196)..(196): Selenocysteine
MDLFGDLPEPERSPRPAAGKEAQKGPLLFDDLPPASSXDSGSGGPLLFDDLPPASSGDSGSLAXSISQMVKXEGKGAKRKXSEEEKNGSEELVEKKVSSSVIFGLKGYVAERKGEREEMQDAHVILNDIXEECRPPSSLIXRVSYFAVFDGHGGIRASKFAAQNLHQNLIRKFPKGDVISVEKXVKRCLLDXFKHXDEEFLKQASSQKPAWK

SEQ ID NO: 13513 - protein, 57 aa, Homo sapiens
  MOD_RES (15)..(15): Selenocysteine
MGHVWLEGDNLQNSXDSRCYGPIPYGLIRGRIFFKIWPLSDFGFLRASPNGHRFSDD

SEQ ID NO: 13514 - protein, 96 aa, Homo sapiens
  MOD_RES (9)..(9): Selenocysteine
  MOD_RES (16)..(16): Selenocysteine
  MOD_RES (44)..(44): Selenocysteine
  MOD_RES (95)..(96): Selenocysteine
MLRGVLGKXFRLVGYXIQYGCIAHCAFEYVGGVVMCSGPSMEPXIQNSDIVFAENLSRHFYGIQRGDIVIAKSPSDPKSNICKRVIGLEGDKILXX

SEQ ID NO: 13515 - protein, 107 aa, Homo sapiens
  MOD_RES (9)..(9): Selenocysteine
  MOD_RES (16)..(16): Selenocysteine
  MOD_RES (44)..(44): Selenocysteine
  MOD_RES (95)..(96): Selenocysteine
MLRGVLGKXFRLVGYXIQYGCIAHCAFEYVGGVVMCSGPSMEPXIQNSDIVFAENLSRHFYGIQRGDIVIAKSPSDPKSNICKRVIGLEGDKILXXSPSDFFKSHSY

SEQ ID NO: 13516 - protein, 166 aa, Homo sapiens
  MOD_RES (9)..(9): Selenocysteine
  MOD_RES (16)..(16): Selenocysteine
  MOD_RES (44)..(44): Selenocysteine
  MOD_RES (95)..(96): Selenocysteine
  MOD_RES (124)..(124): Selenocysteine
MLRGVLGKXFRLVGYXIQYGCIAHCAFEYVGGVVMCSGPSMEPXIQNSDIVFAENLSRHFYGIQRGDIVIAKSPSDPKSNICKRVIGLEGDKILXXSPSDFFKSHSYVPMGHVWLEGDNLQNSXDSRCYGPIPYGLIRGRIFFKIWPLSDFGFLRASPNGHRFSDD

SEQ ID NO: 13517 - protein, 94 aa, Homo sapiens
  MOD_RES (9)..(9): Selenocysteine
  MOD_RES (16)..(16): Selenocysteine
  MOD_RES (52)..(52): Selenocysteine
MLRGVLGKXFRLVGYXIQYGCIAHCAFEYVGGVVMVPMGHVWLEGDNLQNSXDSRCYGPIPYGLIRGRIFFKIWPLSDFGFLRASPNGHRFSDD

SEQ ID NO: 13518 - protein, 30 aa, Homo sapiens
  MOD_RES (1)..(1): Any amino acid
  MOD_RES (15)..(16): Selenocysteine
XCKRVIGLEGDKILXXSPSDFFKSHSYHFR

SEQ ID NO: 13519 - protein, 79 aa, Homo sapiens
  MOD_RES (28)..(28): Selenocysteine
MAQSQGWVKRYIKAFCKGFFVAVPVAVXFLDRVACVARVEGASMQPSLNPGGSQSSDVVLLNHWKVRNFEVHRGDIVSL

SEQ ID NO: 13520 - protein, 80 aa, Homo sapiens
  MOD_RES (28)..(28): Selenocysteine
MAQSQGWVKRYIKAFCKGFFVAVPVAVXFLDRVACVARVEGASMQPSLNPGGSQSSDVVLLNHWKVRNFEVHRGDIVSLV

SEQ ID NO: 13521 - protein, 110 aa, Homo sapiens
  MOD_RES (28)..(28): Selenocysteine
MAQSQGWVKRYIKAFCKGFFVAVPVAVXFLDRVACVARVEGASMQPSLNPGGSQSSDVVLLNHWKVRNFEVHRGDIVSLVSPKNPEQKIIKRVIALEGDIVRDGRKLKRI

SEQ ID NO: 13522 - protein, 175 aa, Homo sapiens
  MOD_RES (28)..(28): Selenocysteine
  MOD_RES (103)..(103): Selenocysteine
  MOD_RES (147)..(147): Selenocysteine
MAQSQGWVKRYIKAFCKGFFVAVPVAVXFLDRVACVARVEGASMQPSLNPGGSQSSDVVLLNHWKVRNFEVHRGDIVSLVSPKNPEQKIIKRVIALEGDIVRXIGHKNRYVKVPRGHIWVEGDHHGHSFDSNSFGPVSLGLLHAHAXHILWPPERWQKLESVLPPERLPVQREEE

SEQ ID NO: 13523 - protein, 157 aa, Homo sapiens
  MOD_RES (85)..(85): Selenocysteine
  MOD_RES (129)..(129): Selenocysteine
MVGEDIEARRHFLNLCCQPRRVSLRLKKCISEVKDKAGSAQCHPLEQRAGIPSGEWRQLKERSPKNPEQKIIKRVIALEGDIVRXIGHKNRYVKVPRGHIWVEGDHHGHSFDSNSFGPVSLGLLHAHAXHILWPPERWQKLESVLPPERLPVQREEE

SEQ ID NO: 13524 - protein, 153 aa, Homo sapiens
  MOD_RES (14)..(14): Selenocysteine
  MOD_RES (44)..(44): Selenocysteine
  MOD_RES (46)..(46): Selenocysteine
  MOD_RES (97)..(97): Selenocysteine
  MOD_RES (120)..(120): Selenocysteine
  MOD_RES (126)..(126): Selenocysteine
  MOD_RES (133)..(133): Selenocysteine
  MOD_RES (136)..(136): Selenocysteine
MADPWQECMDYAVXLARQAGEVVCEAIKNEMNVMLKSSPVDLVXAXDQKVEKMLISSIKEKYPSHRFPFVAVSIGFAVNKKIEFGVVYSCVEGKMYXARKGKGAFCNGQKLQVSQQEDIXKSLLVXELGSSRXPEXVRMVLSNMEKLFCIPVH

SEQ ID NO: 13525 - protein, 101 aa, Homo sapiens
  MOD_RES (14)..(14): Selenocysteine
  MOD_RES (44)..(44): Selenocysteine
  MOD_RES (46)..(46): Selenocysteine
  MOD_RES (82)..(82): Selenocysteine
  MOD_RES (86)..(86): Selenocysteine
  MOD_RES (95)..(96): Selenocysteine
MADPWQECMDYAVXLARQAGEVVCEAIKNEMNVMLKSSPVDLVXAXDQKVEKMLISSIKEKYPSHSFIGEESVAAGEKSILXDNPXWIIDPIDGXXNFVHR

SEQ ID NO: 13526 - protein, 277 aa, Homo sapiens
  MOD_RES (14)..(14): Selenocysteine
  MOD_RES (44)..(44): Selenocysteine
  MOD_RES (46)..(46): Selenocysteine
  MOD_RES (82)..(82): Selenocysteine
  MOD_RES (86)..(86): Selenocysteine
  MOD_RES (95)..(96): Selenocysteine
  MOD_RES (132)..(132): Selenocysteine
  MOD_RES (155)..(155): Selenocysteine
  MOD_RES (161)..(161): Selenocysteine
  MOD_RES (168)..(168): Selenocysteine
  MOD_RES (171)..(171): Selenocysteine
  MOD_RES (195)..(195): Selenocysteine
  MOD_RES (205)..(205): Selenocysteine
  MOD_RES (229)..(229): Selenocysteine
  MOD_RES (239)..(239): Selenocysteine
MADPWQECMDYAVXLARQAGEVVCEAIKNEMNVMLKSSPVDLVXAXDQKVEKMLISSIKEKYPSHSFIGEESVAAGEKSILXDNPXWIIDPIDGXXNFVHRFPFVAVSIGFAVNKKIEFGVVYSCVEGKMYXARKGKGAFCNGQKLQVSQQEDIXKSLLVXELGSSRXPEXVRMVLSNMEKLFCIPVHGIRSVGXAAVNMCLVAXGGADAYYEMGIHCWDVAGAGIIVXEAGGVLMDVXGGPFDLMSRRVIAANNRILAERIAKEIQVIPLQRDDED

SEQ ID NO: 13527 - protein, 198 aa, Homo sapiens
  MOD_RES (14)..(14): Selenocysteine
  MOD_RES (44)..(44): Selenocysteine
  MOD_RES (46)..(46): Selenocysteine
  MOD_RES (82)..(82): Selenocysteine
  MOD_RES (86)..(86): Selenocysteine
  MOD_RES (95)..(96): Selenocysteine
  MOD_RES (132)..(132): Selenocysteine
  MOD_RES (181)..(181): Selenocysteine
MADPWQECMDYAVXLARQAGEVVCEAIKNEMNVMLKSSPVDLVXAXDQKVEKMLISSIKEKYPSHSFIGEESVAAGEKSILXDNPXWIIDPIDGXXNFVHRFPFVAVSIGFAVNKKIEFGVVYSCVEGKMYXARKGKGAFCNGQKLQVSQQEGSGVLEQQLLICALWQLAEQMHIMKWEFXAGMLQELALLLLKLVAC

SEQ ID NO: 13528 - protein, 126 aa, Homo sapiens
  MOD_RES (14)..(14): Selenocysteine
  MOD_RES (44)..(44): Selenocysteine
  MOD_RES (46)..(46): Selenocysteine
  MOD_RES (82)..(82): Selenocysteine
  MOD_RES (86)..(86): Selenocysteine
  MOD_RES (95)..(96): Selenocysteine
MADPWQECMDYAVXLARQAGEVVCEAIKNEMNVMLKSSPVDLVXAXDQKVEKMLISSIKEKYPSHSFIGEESVAAGEKSILXDNPXWIIDPIDGXXNFVHRFPFVAVSIGFAVNKKVWNRRFFPRL

SEQ ID NO: 13529 - protein, 174 aa, Homo sapiens
  MOD_RES (14)..(14): Selenocysteine
  MOD_RES (44)..(44): Selenocysteine
  MOD_RES (46)..(46): Selenocysteine
  MOD_RES (82)..(82): Selenocysteine
  MOD_RES (86)..(86): Selenocysteine
  MOD_RES (95)..(96): Selenocysteine
  MOD_RES (137)..(137): Selenocysteine
  MOD_RES (163)..(163): Selenocysteine
MADPWQECMDYAVXLARQAGEVVCEAIKNEMNVMLKSSPVDLVXAXDQKVEKMLISSIKEKYPSHSFIGEESVAAGEKSILXDNPXWIIDPIDGXXNFVHRWSFPLVGQAEMQWRSLGSLQPPPPGFKRFFCLSLPXVSIGFAVNKKIEFGVVYSCVEGKMYXARKGKGAFCNG

SEQ ID NO: 13530 - protein, 109 aa, Homo sapiens
  MOD_RES (14)..(14): Selenocysteine
  MOD_RES (44)..(44): Selenocysteine
  MOD_RES (46)..(46): Selenocysteine
  MOD_RES (82)..(82): Selenocysteine
  MOD_RES (86)..(86): Selenocysteine
  MOD_RES (95)..(96): Selenocysteine
MADPWQECMDYAVXLARQAGEVVCEAIKNEMNVMLKSSPVDLVXAXDQKVEKMLISSIKEKYPSHSFIGEESVAAGEKSILXDNPXWIIDPIDGXXNFVHSCFNWLCCK

SEQ ID NO: 13531 - protein, 211 aa, Homo sapiens
  MOD_RES (33)..(33): Selenocysteine
  MOD_RES (35)..(35): Selenocysteine
  MOD_RES (37)..(37): Selenocysteine
  MOD_RES (73)..(73): Selenocysteine
  MOD_RES (103)..(103): Selenocysteine
  MOD_RES (105)..(105): Selenocysteine
  MOD_RES (141)..(141): Selenocysteine
  MOD_RES (145)..(145): Selenocysteine
  MOD_RES (154)..(155): Selenocysteine
  MOD_RES (191)..(191): Selenocysteine
MGQRPGPVLPAVAVLGQVAKRKVAWLLRWKAVXRXEXAGNSSGVYGFGKMKIFVKYFQKMADPWQECMDYAVXLARQAGEVVCEAIKNEMNVMLKSSPVDLVXAXDQKVEKMLISSIKEKYPSHSFIGEESVAAGEKSILXDNPXWIIDPIDGXXNFVHRFPFVAVSIGFAVNKKIEFGVVYSCVEGKMYXARKGKGAFCNGQKLQVSQQE

SEQ ID NO: 13532 - protein, 336 aa, Homo sapiens
  MOD_RES (33)..(33): Selenocysteine
  MOD_RES (35)..(35): Selenocysteine
  MOD_RES (37)..(37): Selenocysteine
  MOD_RES (73)..(73): Selenocysteine
  MOD_RES (103)..(103): Selenocysteine
  MOD_RES (105)..(105): Selenocysteine
  MOD_RES (141)..(141): Selenocysteine
  MOD_RES (145)..(145): Selenocysteine
  MOD_RES (154)..(155): Selenocysteine
  MOD_RES (191)..(191): Selenocysteine
  MOD_RES (214)..(214): Selenocysteine
  MOD_RES (220)..(220): Selenocysteine
  MOD_RES (227)..(227): Selenocysteine
  MOD_RES (230)..(230): Selenocysteine
  MOD_RES (254)..(254): Selenocysteine
  MOD_RES (264)..(264): Selenocysteine
  MOD_RES (288)..(288): Selenocysteine
  MOD_RES (298)..(298): Selenocysteine
MGQRPGPVLPAVAVLGQVAKRKVAWLLRWKAVXRXEXAGNSSGVYGFGKMKIFVKYFQKMADPWQECMDYAVXLARQAGEVVCEAIKNEMNVMLKSSPVDLVXAXDQKVEKMLISSIKEKYPSHSFIGEESVAAGEKSILXDNPXWIIDPIDGXXNFVHRFPFVAVSIGFAVNKKIEFGVVYSCVEGKMYXARKGKGAFCNGQKLQVSQQEDIXKSLLVXELGSSRXPEXVRMVLSNMEKLFCIPVHGIRSVGXAAVNMCLVAXGGADAYYEMGIHCWDVAGAGIIVXEAGGVLMDVXGGPFDLMSRRVIAANNRILAERIAKEIQVIPLQRDDED

SEQ ID NO: 13533 - protein, 181 aa, Homo sapiens
  MOD_RES (11)..(11): Selenocysteine
  MOD_RES (36)..(36): Selenocysteine
  MOD_RES (38)..(38): Selenocysteine
  MOD_RES (74)..(74): Selenocysteine
  MOD_RES (78)..(78): Selenocysteine
  MOD_RES (87)..(88): Selenocysteine
  MOD_RES (124)..(124): Selenocysteine
  MOD_RES (147)..(147): Selenocysteine
  MOD_RES (153)..(153): Selenocysteine
  MOD_RES (160)..(160): Selenocysteine
  MOD_RES (163)..(163): Selenocysteine
MHGLCSNSSKXSWRVCEAIKNEMNVMLKSSPVDLVXAXDQKVEKMLISSIKEKYPSHSFIGEESVAAGEKSILXDNPXWIIDPIDGXXNFVHRFPFVAVSIGFAVNKKIEFGVVYSCVEGKMYXARKGKGAFCNGQKLQVSQQEDIXKSLLVXELGSSRXPEXVRMVLSNMEKLFCIPVHG

SEQ ID NO: 13534 - protein, 265 aa, Homo sapiens
  MOD_RES (1)..(1): Any amino acid
  MOD_RES (6)..(6): Selenocysteine
  MOD_RES (8)..(8): Selenocysteine
  MOD_RES (10)..(10): Selenocysteine
  MOD_RES (39)..(39): Selenocysteine
  MOD_RES (69)..(69): Selenocysteine
  MOD_RES (71)..(71): Selenocysteine
  MOD_RES (107)..(107): Selenocysteine
  MOD_RES (111)..(111): Selenocysteine
  MOD_RES (120)..(121): Selenocysteine
  MOD_RES (157)..(157): Selenocysteine
  MOD_RES (180)..(180): Selenocysteine
  MOD_RES (186)..(186): Selenocysteine
  MOD_RES (193)..(193): Selenocysteine
  MOD_RES (196)..(196): Selenocysteine
  MOD_RES (220)..(220): Selenocysteine
  MOD_RES (230)..(230): Selenocysteine
  MOD_RES (254)..(254): Selenocysteine
  MOD_RES (264)..(264): Selenocysteine
XWKAVXRXEXAGNSSGVYGFGKMKKMADPWQECMDYAVXLARQAGEVVCEAIKNEMNVMLKSSPVDLVXAXDQKVEKMLISSIKEKYPSHSFIGEESVAAGEKSILXDNPXWIIDPIDGXXNFVHRFPFVAVSIGFAVNKKIEFGVVYSCVEGKMYXARKGKGAFCNGQKLQVSQQEDIXKSLLVXELGSSRXPEXVRMVLSNMEKLFCIPVHGIRSVGXAAVNMCLVAXGGADAYYEMGIHCWDVAGAGIIVXEAGGVLMDVXG

SEQ ID NO: 13535 - protein, 99 aa, Homo sapiens
  MOD_RES (19)..(19): Selenocysteine
  MOD_RES (47)..(47): Selenocysteine
  MOD_RES (60)..(60): Selenocysteine
  MOD_RES (77)..(77): Selenocysteine
  MOD_RES (90)..(90): Selenocysteine
MERLLHAKAHGVRVIGSSXLALCHLASGAADAYYQFGLHCWDLAAAXVIIREAGGIVIDXSGGPLDLMACRVVAASXREMAMLIAQALQXINYGRDDEK

SEQ ID NO: 13536 - protein, 288 aa, Homo sapiens
  MOD_RES (39)..(39): Selenocysteine
  MOD_RES (46)..(46): Selenocysteine
  MOD_RES (48)..(48): Selenocysteine
  MOD_RES (55)..(55): Selenocysteine
  MOD_RES (57)..(57): Selenocysteine
  MOD_RES (93)..(93): Selenocysteine
  MOD_RES (97)..(97): Selenocysteine
  MOD_RES (106)..(106): Selenocysteine
  MOD_RES (115)..(115): Selenocysteine
  MOD_RES (137)..(137): Selenocysteine
  MOD_RES (143)..(143): Selenocysteine
  MOD_RES (163)..(163): Selenocysteine
  MOD_RES (172)..(172): Selenocysteine
  MOD_RES (182)..(182): Selenocysteine
  MOD_RES (208)..(208): Selenocysteine
  MOD_RES (236)..(236): Selenocysteine
  MOD_RES (249)..(249): Selenocysteine
  MOD_RES (266)..(266): Selenocysteine
  MOD_RES (279)..(279): Selenocysteine
MKPSGEDQAALAAGPWEECFQAAVQLALRAGQIIRKALXEEKRVSXKXSAADLVXEXDHLVEDLIISELRERFPSHRFIAEEAAASGAKCVLXHSPXWIIDPIDGXCNFVHRFPXVAVSIGFAVRQELEFGVIYHCXEERLYXGRRGRGAFCNGQRLRVSGEXDLSKALVLXEIGPKRDPAXLKLFLSNMERLLHAKAHGVRVIGSSXLALCHLASGAADAYYQFGLHCWDLAAAXVIIREAGGIVIDXSGGPLDLMACRVVAASXREMAMLIAQALQXINYGRDDEK

SEQ ID NO: 13537 - protein, 163 aa, Homo sapiens
  MOD_RES (39)..(39): Selenocysteine
  MOD_RES (46)..(46): Selenocysteine
  MOD_RES (48)..(48): Selenocysteine
  MOD_RES (55)..(55): Selenocysteine
  MOD_RES (57)..(57): Selenocysteine
  MOD_RES (93)..(93): Selenocysteine
  MOD_RES (97)..(97): Selenocysteine
  MOD_RES (106)..(106): Selenocysteine
  MOD_RES (115)..(115): Selenocysteine
MKPSGEDQAALAAGPWEECFQAAVQLALRAGQIIRKALXEEKRVSXKXSAADLVXEXDHLVEDLIISELRERFPSHRFIAEEAAASGAKCVLXHSPXWIIDPIDGXCNFVHRFPXVAVSIGFAVRQEVRVWPRSPGPLPGLPLAILPFWLQPLCAWFAVCPVP

SEQ ID NO: 13538 - protein, 116 aa, Homo sapiens
  MOD_RES (39)..(39): Selenocysteine
  MOD_RES (46)..(46): Selenocysteine
  MOD_RES (48)..(48): Selenocysteine
  MOD_RES (55)..(55): Selenocysteine
  MOD_RES (57)..(57): Selenocysteine
  MOD_RES (93)..(93): Selenocysteine
  MOD_RES (97)..(97): Selenocysteine
  MOD_RES (106)..(106): Selenocysteine
MKPSGEDQAALAAGPWEECFQAAVQLALRAGQIIRKALXEEKRVSXKXSAADLVXEXDHLVEDLIISELRERFPSHRFIAEEAAASGAKCVLXHSPXWIIDPIDGXCNFVHSLNSE

SEQ ID NO: 13539 - protein, 85 aa, Homo sapiens
  MOD_RES (39)..(39): Selenocysteine
  MOD_RES (46)..(46): Selenocysteine
  MOD_RES (48)..(48): Selenocysteine
  MOD_RES (55)..(55): Selenocysteine
  MOD_RES (57)..(57): Selenocysteine
MKPSGEDQAALAAGPWEECFQAAVQLALRAGQIIRKALXEEKRVSXKXSAADLVXEXDHLVEDLIISELRERFPSHRSPFSLVHM

SEQ ID NO: 13540 - protein, 126 aa, Homo sapiens
  MOD_RES (1)..(1): Any amino acid
  MOD_RES (5)..(5): Selenocysteine
  MOD_RES (14)..(14): Selenocysteine
  MOD_RES (23)..(23): Selenocysteine
  MOD_RES (45)..(45): Selenocysteine
  MOD_RES (51)..(51): Selenocysteine
  MOD_RES (71)..(71): Selenocysteine
  MOD_RES (87)..(87): Selenocysteine
  MOD_RES (126)..(126): Selenocysteine
XHSPXWIIDPIDGXCNFVHRFPXVAVSIGFAVRQELEFGVIYHCXEERLYXGRRGRGAFCNGQRLRVSGEXEMGLRHAAQAGLEVLXSKRSAHLSLAKCWDYRHEPPRPAHESLKGLGSDRNWPQX

SEQ ID NO: 13541 - protein, 221 aa, Homo sapiens
  MOD_RES (53)..(53): Selenocysteine
  MOD_RES (55)..(55): Selenocysteine
  MOD_RES (102)..(102): Selenocysteine
  MOD_RES (145)..(145): Selenocysteine
  MOD_RES (157)..(157): Selenocysteine
  MOD_RES (167)..(167): Selenocysteine
  MOD_RES (200)..(200): Selenocysteine
  MOD_RES (202)..(202): Selenocysteine
MQVQDDGVNLIPFAKCSRVVSRSPPPRLPSQSLRPMPQRYGDVFWKNLNQRPXPXWLEEQHIPPMLLPPPEMLWRRKKRRPCLEGMQQQGLGGVPARVRAVXYHLEDLRRRQSIINELKKAQWGSSGAASEPVVLGEEGCGFPSXNEYPDLEEERAXYPQEEDRFLXPGRAQLLWSPWSPLDQEEACASRQLHSLASFSXVXARRNPLHNPWGMELAASEE

SEQ ID NO: 13542 - protein, 236 aa, Homo sapiens
  MOD_RES (53)..(53): Selenocysteine
  MOD_RES (55)..(55): Selenocysteine
  MOD_RES (69)..(69): Selenocysteine
  MOD_RES (117)..(117): Selenocysteine
  MOD_RES (160)..(160): Selenocysteine
  MOD_RES (172)..(172): Selenocysteine
  MOD_RES (182)..(182): Selenocysteine
  MOD_RES (215)..(215): Selenocysteine
  MOD_RES (217)..(217): Selenocysteine
MQVQDDGVNLIPFAKCSRVVSRSPPPRLPSQSLRPMPQRYGDVFWKNLNQRPXPXWLEEQHIPPMLRAXGCSQLGLYPPEQLPPPEMLWRRKKRRPCLEGMQQQGLGGVPARVRAVXYHLEDLRRRQSIINELKKAQWGSSGAASEPVVLGEEGCGFPSXNEYPDLEEERAXYPQEEDRFLXPGRAQLLWSPWSPLDQEEACASRQLHSLASFSXVXARRNPLHNPWGMELAASEE

SEQ ID NO: 13543 - protein, 138 aa, Homo sapiens
  MOD_RES (19)..(19): Selenocysteine
  MOD_RES (65)..(65): Selenocysteine
  MOD_RES (117)..(117): Selenocysteine
MDQDGDQQLGPSRILAPQXLKEIDDVYEKYKKEDDLNQKKRLQQLLQRALINSQELGDEKIQIVXQMLELVENRARQMELHSQCFQDPAESERASDKAKMDSSQPERSSRRPRRQRXSESRDLCHMANGIEDCDDQPP

SEQ ID NO: 13544 - protein, 280 aa, Homo sapiens
  MOD_RES (17)..(17): Selenocysteine
  MOD_RES (25)..(25): Selenocysteine
  MOD_RES (59)..(59): Selenocysteine
  MOD_RES (105)..(105): Selenocysteine
  MOD_RES (157)..(157): Selenocysteine
  MOD_RES (213)..(213): Selenocysteine
  MOD_RES (246)..(246): Selenocysteine
  MOD_RES (265)..(265): Selenocysteine
  MOD_RES (270)..(270): Selenocysteine
  MOD_RES (273)..(273): Selenocysteine
MLGQQQQQLYSSAALLXGERSRLLXCYVQDYLECVESLPHDMQRNVSVLRELDNKYQEXLKEIDDVYEKYKKEDDLNQKKRLQQLLQRALINSQELGDEKIQIVXQMLELVENRARQMELHSQCFQDPAESERASDKAKMDSSQPERSSRRPRRQRXSESRDLCHMANGIEDCDDQPPKEKKSKSAKKKKRSKAKQEREASPVEFAIDPNEPXYCLCNQVSYGEMIGCDNEQCPIEWFHFSCVSLXYKPKGKWYCPKCRGDNEKXMDKSXEKXKKDRRSR

SEQ ID NO: 13545 - protein, 225 aa, Homo sapiens
  MOD_RES (23)..(23): Selenocysteine
  MOD_RES (65)..(65): Selenocysteine
  MOD_RES (78)..(78): Selenocysteine
  MOD_RES (110)..(110): Selenocysteine
  MOD_RES (133)..(133): Selenocysteine
  MOD_RES (143)..(143): Selenocysteine
  MOD_RES (153)..(153): Selenocysteine
  MOD_RES (173)..(173): Selenocysteine
  MOD_RES (206)..(207): Selenocysteine
MAAGMYLEHYLDNLKAEIDKLAXEYMSSARSLSSEEKLALLKQIQEAYGKCKEFGDDKVQLAMQXYEMVDKHIRRLDXDLARFEADLKEKQIESSDYDSSSSKGKKKGRXQKEKKAARARSKGKNSDEEAPKXAQKKLKLVRXSPEYGMPSVXFGSVHPSDVLDMPVDPNEPXYCLCHQVSYGEMIGCDNPDCSIEWFHFACVGLXXKPRGKWFCPRCSQERKKK

SEQ ID NO: 13546 - protein, 246 aa, Homo sapiens
  MOD_RES (35)..(35): Selenocysteine
  MOD_RES (47)..(47): Selenocysteine
  MOD_RES (89)..(89): Selenocysteine
  MOD_RES (102)..(102): Selenocysteine
  MOD_RES (131)..(131): Selenocysteine
  MOD_RES (154)..(154): Selenocysteine
  MOD_RES (164)..(164): Selenocysteine
  MOD_RES (174)..(174): Selenocysteine
  MOD_RES (194)..(194): Selenocysteine
  MOD_RES (227)..(228): Selenocysteine
MAAGMYLEHYLDSIENLPFELQRNFQLMRDLDQRXEDLKAEIDKLAXEYMSSARSLSSEEKLALLKQIQEAYGKCKEFGDDKVQLAMQXYEMVDKHIRRLDXDLARFEADLKEKQIESSDYDSSSSKEGRXQKEKKAARARSKGKNSDEEAPKXAQKKLKLVRXSPEYGMPSVXFGSVHPSDVLDMPVDPNEPXYCLCHQVSYGEMIGCDNPDCSIEWFHFACVGLXXKPRGKWFCPRCSQERKKK

SEQ ID NO: 13547 - protein, 249 aa, Homo sapiens
  MOD_RES (35)..(35): Selenocysteine
  MOD_RES (47)..(47): Selenocysteine
  MOD_RES (89)..(89): Selenocysteine
  MOD_RES (102)..(102): Selenocysteine
  MOD_RES (134)..(134): Selenocysteine
  MOD_RES (157)..(157): Selenocysteine
  MOD_RES (167)..(167): Selenocysteine
  MOD_RES (177)..(177): Selenocysteine
  MOD_RES (197)..(197): Selenocysteine
  MOD_RES (230)..(231): Selenocysteine
MAAGMYLEHYLDSIENLPFELQRNFQLMRDLDQRXEDLKAEIDKLAXEYMSSARSLSSEEKLALLKQIQEAYGKCKEFGDDKVQLAMQXYEMVDKHIRRLDXDLARFEADLKEKQIESSDYDSSSSKGKKKGRXQKEKKAARARSKGKNSDEEAPKXAQKKLKLVRXSPEYGMPSVXFGSVHPSDVLDMPVDPNEPXYCLCHQVSYGEMIGCDNPDCSIEWFHFACVGLXXKPRGKWFCPRCSQERKKK

SEQ ID NO: 13548 - protein, 179 aa, Homo sapiens
  MOD_RES (35)..(35): Selenocysteine
  MOD_RES (47)..(47): Selenocysteine
  MOD_RES (89)..(89): Selenocysteine
  MOD_RES (102)..(102): Selenocysteine
  MOD_RES (134)..(134): Selenocysteine
  MOD_RES (157)..(157): Selenocysteine
  MOD_RES (167)..(167): Selenocysteine
MAAGMYLEHYLDSIENLPFELQRNFQLMRDLDQRXEDLKAEIDKLAXEYMSSARSLSSEEKLALLKQIQEAYGKCKEFGDDKVQLAMQXYEMVDKHIRRLDXDLARFEADLKEKQIESSDYDSSSSKGKKKGRXQKEKKAARARSKGKNSDEEAPKXAQKKLKLVRXVPLSGSILPVWG

SEQ ID NO: 13549 - protein, 248 aa, Homo sapiens
  MOD_RES (35)..(35): Selenocysteine
  MOD_RES (47)..(47): Selenocysteine
  MOD_RES (89)..(89): Selenocysteine
  MOD_RES (102)..(102): Selenocysteine
  MOD_RES (133)..(133): Selenocysteine
  MOD_RES (156)..(156): Selenocysteine
  MOD_RES (166)..(166): Selenocysteine
  MOD_RES (176)..(176): Selenocysteine
  MOD_RES (196)..(196): Selenocysteine
  MOD_RES (229)..(230): Selenocysteine
MAAGMYLEHYLDSIENLPFELQRNFQLMRDLDQRXEDLKAEIDKLAXEYMSSARSLSSEEKLALLKQIQEAYGKCKEFGDDKVQLAMQXYEMVDKHIRRLDXDLARFEADLKEKQIESSDYDSSSSKGKKSRXQKEKKAARARSKGKNSDEEAPKXAQKKLKLVRXSPEYGMPSVXFGSVHPSDVLDMPVDPNEPXYCLCHQVSYGEMIGCDNPDCSIEWFHFACVGLXXKPRGKWFCPRCSQERKKK

SEQ ID NO: 13550 - protein, 245 aa, Homo sapiens
  MOD_RES (35)..(35): Selenocysteine
  MOD_RES (47)..(47): Selenocysteine
  MOD_RES (89)..(89): Selenocysteine
  MOD_RES (102)..(102): Selenocysteine
  MOD_RES (130)..(130): Selenocysteine
  MOD_RES (153)..(153): Selenocysteine
  MOD_RES (163)..(163): Selenocysteine
  MOD_RES (173)..(173): Selenocysteine
  MOD_RES (193)..(193): Selenocysteine
  MOD_RES (226)..(227): Selenocysteine
MAAGMYLEHYLDSIENLPFELQRNFQLMRDLDQRXEDLKAEIDKLAXEYMSSARSLSSEEKLALLKQIQEAYGKCKEFGDDKVQLAMQXYEMVDKHIRRLDXDLARFEADLKEKQIESSDYDSSSSKGRXQKEKKAARARSKGKNSDEEAPKXAQKKLKLVRXSPEYGMPSVXFGSVHPSDVLDMPVDPNEPXYCLCHQVSYGEMIGCDNPDCSIEWFHFACVGLXXKPRGKWFCPRCSQERKKK

SEQ ID NO: 13551 - protein, 47 aa, Homo sapiens
  MOD_RES (35)..(35): Selenocysteine
  MOD_RES (41)..(41): Selenocysteine
MAAGMYLEHYLDSIENLPFELQRNFQLMRDLDQRXEEALDXISSLEH

SEQ ID NO: 13552 - protein, 51 aa, Homo sapiens
  MOD_RES (35)..(35): Selenocysteine
  MOD_RES (40)..(40): Selenocysteine
MAAGMYLEHYLDSIENLPFELQRNFQLMRDLDQRXEGGQXHSAAGHRPGPF

SEQ ID NO: 13553 - protein, 21 aa, Homo sapiens
  MOD_RES (5)..(5): Selenocysteine
MPSVXFGSVHPSDVLDMPVDP

SEQ ID NO: 13554 - protein, 51 aa, Homo sapiens
  MOD_RES (5)..(5): Selenocysteine
  MOD_RES (25)..(25): Selenocysteine
MPSVXFGSVHPSDVLDMPVDPNEPXYCLCHQVSYGEMIGCDNPDCSIEWFH

SEQ ID NO: 13555 - protein, 36 aa, Homo sapiens
  MOD_RES (20)..(20): Selenocysteine
  MOD_RES (25)..(25): Selenocysteine
NLPFELQRNFQLMRDLDQRXEGGQXHSAAGHRPGPF

SEQ ID NO: 13556 - protein, 226 aa, Homo sapiens
  MOD_RES (3)..(3): Selenocysteine
  MOD_RES (35)..(35): Selenocysteine
  MOD_RES (52)..(52): Selenocysteine
  MOD_RES (55)..(55): Selenocysteine
  MOD_RES (89)..(89): Selenocysteine
  MOD_RES (147)..(147): Selenocysteine
  MOD_RES (152)..(152): Selenocysteine
  MOD_RES (165)..(165): Selenocysteine
  MOD_RES (167)..(167): Selenocysteine
  MOD_RES (187)..(187): Selenocysteine
  MOD_RES (220)..(221): Selenocysteine
MAXAMYLEHYLDSIENLPCELQRNFQLMRELDQRXEDKKAEIDILAAEYISXVKXLSPDQRVERLQKIQNAYSKCKEYSDDKVQLAMQXYEMVDKHIRRLDADLARFEADLKDKMEGSDFESSGGRGLKKGRGQKEKRGSRGRGRRXSEEDXPKKKKHKGGSEFXDXILSVHPSDVLDMPVDPNEPXYCLCHQVSYGEMIGCDNPDCPIEWFHFACVDLXXKPKGK

SEQ ID NO: 13557 - protein, 240 aa, Homo sapiens
  MOD_RES (3)..(3): Selenocysteine
  MOD_RES (35)..(35): Selenocysteine
  MOD_RES (52)..(52): Selenocysteine
  MOD_RES (55)..(55): Selenocysteine
  MOD_RES (89)..(89): Selenocysteine
  MOD_RES (147)..(147): Selenocysteine
  MOD_RES (152)..(152): Selenocysteine
  MOD_RES (165)..(165): Selenocysteine
  MOD_RES (167)..(167): Selenocysteine
  MOD_RES (187)..(187): Selenocysteine
  MOD_RES (220)..(221): Selenocysteine
MAXAMYLEHYLDSIENLPCELQRNFQLMRELDQRXEDKKAEIDILAAEYISXVKXLSPDQRVERLQKIQNAYSKCKEYSDDKVQLAMQXYEMVDKHIRRLDADLARFEADLKDKMEGSDFESSGGRGLKKGRGQKEKRGSRGRGRRXSEEDXPKKKKHKGGSEFXDXILSVHPSDVLDMPVDPNEPXYCLCHQVSYGEMIGCDNPDCPIEWFHFACVDLXXKPKGKWFCPRCVQEKRKKK

SEQ ID NO: 13558 - protein, 142 aa, Homo sapiens
  MOD_RES (3)..(3): Selenocysteine
  MOD_RES (35)..(35): Selenocysteine
  MOD_RES (52)..(52): Selenocysteine
  MOD_RES (55)..(55): Selenocysteine
  MOD_RES (89)..(89): Selenocysteine
MAXAMYLEHYLDSIENLPCELQRNFQLMRELDQRXEDKKAEIDILAAEYISXVKXLSPDQRVERLQKIQNAYSKCKEYSDDKVQLAMQXYEMVDKHIRRLDADLARFEADLKDKMEGSDFESSGGRGLKSKSVNFFSLFYYC

SEQ ID NO: 13559 - protein, 254 aa, Homo sapiens
  MOD_RES (6)..(6): Selenocysteine
  MOD_RES (37)..(37): Selenocysteine
  MOD_RES (54)..(54): Selenocysteine
  MOD_RES (57)..(57): Selenocysteine
  MOD_RES (91)..(91): Selenocysteine
  MOD_RES (149)..(149): Selenocysteine
  MOD_RES (154)..(154): Selenocysteine
  MOD_RES (184)..(184): Selenocysteine
  MOD_RES (193)..(193): Selenocysteine
  MOD_RES (200)..(200): Selenocysteine
  MOD_RES (243)..(243): Selenocysteine
MGARVXPRDSGGLIGIENLPCELQRNFQLMRELDQRXEDKKAEIDILAAEYISXVKXLSPDQRVERLQKIQNAYSKCKEYSDDKVQLAMQXYEMVDKHIRRLDADLARFEADLKDKMEGSDFESSGGRGLKKGRGQKEKRGSRGRGRRXSEEDXPKKKKHKGGGNSVLSLPAPSCSEPEGPVPXVPFLRESGXPPGLFLXQCCFSRWQCCSCPIARRRDRLVRPALKLGSDVQGAKEAPSRGXGGWCRWADGSS

SEQ ID NO: 13560 - protein, 366 aa, Homo sapiens
  MOD_RES (12)..(12): Selenocysteine
  MOD_RES (47)..(47): Selenocysteine
  MOD_RES (68)..(68): Selenocysteine
  MOD_RES (89)..(89): Selenocysteine
  MOD_RES (121)..(121): Selenocysteine
  MOD_RES (127)..(127): Selenocysteine
  MOD_RES (135)..(135): Selenocysteine
  MOD_RES (142)..(142): Selenocysteine
  MOD_RES (183)..(183): Selenocysteine
  MOD_RES (190)..(190): Selenocysteine
  MOD_RES (204)..(204): Selenocysteine
  MOD_RES (212)..(212): Selenocysteine
  MOD_RES (219)..(219): Selenocysteine
  MOD_RES (221)..(221): Selenocysteine
  MOD_RES (234)..(234): Selenocysteine
  MOD_RES (313)..(313): Selenocysteine
  MOD_RES (334)..(334): Selenocysteine
  MOD_RES (342)..(343): Selenocysteine
  MOD_RES (354)..(354): Selenocysteine
  MOD_RES (360)..(360): Selenocysteine
MVLHLLLFLLLXPQGGHSCQGLELARELVLAKVRALFLDALGPPAVXREGGDPGVRRLPRRHALGGFXHRGSEPEEEEDVSQAILFPAXDASCEDKSAARGLAQEAEEGLFRYMFRPSQHXRSRQVXSAQLWFHXGLDRQGXAASNSSEPLLGLLALSPGGPVAVPMSLGHAPPHWAVLHLAXSALSLLXHPVLVLLLRCPLCXCSARPEAXPFLVAHXRXRPPSGGERARRSXPLMSWPWSPSALRLLQRPPEEPAAHANCHRVALNISFQELGWERWIVYPPSFIFHYCHGGCGLHIPPNLSLPVPGAPPXPAQPYSLLPGAQPCCAALPGXMRPLHVRXXSDGGYSFKYEXVPNLLXQHCACI

SEQ ID NO: 13561 - protein, 426 aa, Homo sapiens
  MOD_RES (23)..(23): Selenocysteine
  MOD_RES (75)..(75): Selenocysteine
  MOD_RES (120)..(120): Selenocysteine
  MOD_RES (125)..(125): Selenocysteine
  MOD_RES (131)..(131): Selenocysteine
  MOD_RES (135)..(135): Selenocysteine
  MOD_RES (167)..(167): Selenocysteine
  MOD_RES (169)..(169): Selenocysteine
  MOD_RES (172)..(172): Selenocysteine
  MOD_RES (188)..(188): Selenocysteine
  MOD_RES (217)..(217): Selenocysteine
  MOD_RES (361)..(361): Selenocysteine
  MOD_RES (371)..(371): Selenocysteine
  MOD_RES (394)..(394): Selenocysteine
MPLLWLRGFLLASCWIIVRSSPXPGSEGHSAAPDCPSCALAALPKDVPNSQPEMVEAVKKHILNMLHLKKRPDVXQPVPKAALLNAIRKLHVGKVGENGYVEIEDDIGRRAEMNELMEQXSEIIXFAESGXARKXLHFEISKEGSDLSVVERAEVWLFLKVPKANRXRXKVXIRLFQQQKHPQGSLDXGEEAEEVGLKGERSELLLSEKVVDARKSXWHVFPVSSSIQRLLDQGKSSLDVRIACEQCQESGASLVLLGKKKKKEEEGEGKKKGGGEGGAGADEEKEQSHRPFLMLQARQSEDHPHRRRRRGLECDGKVNICCKKQFFVSFKDIGWNDWIIAPSGYHANYCEGECPSHIAGXSGSSLSFHSXVINHYRMRGHSPFANLKSCCVPXKLRPMSMLYYDDGQNIIKKDIQNMIVEECGCS

SEQ ID NO: 13562 - protein, 407 aa, Homo sapiens
  MOD_RES (31)..(31): Selenocysteine
  MOD_RES (35)..(35): Selenocysteine
  MOD_RES (54)..(54): Selenocysteine
  MOD_RES (56)..(56): Selenocysteine
  MOD_RES (95)..(95): Selenocysteine
  MOD_RES (105)..(105): Selenocysteine
  MOD_RES (149)..(149): Selenocysteine
  MOD_RES (228)..(228): Selenocysteine
  MOD_RES (232)..(232): Selenocysteine
  MOD_RES (300)..(300): Selenocysteine
  MOD_RES (325)..(325): Selenocysteine
  MOD_RES (352)..(352): Selenocysteine
  MOD_RES (367)..(367): Selenocysteine
  MOD_RES (375)..(375): Selenocysteine
  MOD_RES (379)..(379): Selenocysteine
MDGLPGRALGAACLLLLAAGWLGPEAWGSPXPPPXPAAPPPPPPPGSPGGSQDXCXSCGGFRRPEELGRVDGDFLEAVKRHILSRLQMRGRPNIXHAVPKAAMVXALRKLHAGKVREDGRVEIPHLDGHASPGADGQERVSEIISFAEXDGLASSRVRLYFFISNEGNQNLFVVQASLWLYLKLLPYVLEKGSRRKVRVKVYFQEQGHGDRWNMVEKRVDLKRSGWHXFPLXEAIQALFERGERRLNLDVQCDSCQELAVVPVFVDPGEESHRPFVVVQARLGDSRHRIRKRGLECDGRXNLCCRQQFFIDFRLIGWNDWIIAPXGYYGNYCEGSCPAYLAGVPGSASSFHXAVVNQYRMRGLNPGXVNSCCIPXKLSXMSMLYFDDEYNIVKRDVPNMIVEECGCA

SEQ ID NO: 13563 - protein, 352 aa, Homo sapiens
  MOD_RES (2)..(2): Selenocysteine
  MOD_RES (15)..(16): Selenocysteine
  MOD_RES (19)..(19): Selenocysteine
  MOD_RES (33)..(33): Selenocysteine
  MOD_RES (58)..(58): Selenocysteine
  MOD_RES (62)..(62): Selenocysteine
  MOD_RES (74)..(74): Selenocysteine
  MOD_RES (104)..(104): Selenocysteine
  MOD_RES (108)..(108): Selenocysteine
  MOD_RES (112)..(112): Selenocysteine
  MOD_RES (123)..(123): Selenocysteine
  MOD_RES (144)..(145): Selenocysteine
  MOD_RES (147)..(147): Selenocysteine
  MOD_RES (160)..(160): Selenocysteine
  MOD_RES (163)..(163): Selenocysteine
  MOD_RES (166)..(166): Selenocysteine
  MOD_RES (196)..(196): Selenocysteine
  MOD_RES (296)..(296): Selenocysteine
  MOD_RES (306)..(306): Selenocysteine
  MOD_RES (310)..(311): Selenocysteine
  MOD_RES (320)..(320): Selenocysteine
  MOD_RES (339)..(339): Selenocysteine
MXSSLLLAFLLLAPXXVAXPRAGGQCPACGGPXLELESQRELLLDLAKRSILDKLHLXQRPXLNRPVSRAALRXALQHLHGVPQGALLEDNREQECEIISFAEXGLSXINQXRLDFHFSSDRXAGDREVQQASLMFFVQLPSNXXWXLKVRVLVLGPHNXNLXLAXQYLLEVDASGWHQLPLGPEAQAACSQGHLXLELVLEGQVAQSSVILGGAAHRPFVAARVRVGGKHQIHRRGIDCQGGSRMCCRQEFFVDFREIGWHDWIIQPEGYAMNFCIGQCPLHIAGMPGIAASFHXAVLNLLKANXAAGXXGGGSCCVPXARRPLSLLYYDRDSNIVKXDIPDMVVEACGCS

SEQ ID NO: 13564 - protein, 274 aa, Homo sapiens
  MOD_RES (3)..(3): Selenocysteine
  MOD_RES (18)..(18): Selenocysteine
  MOD_RES (42)..(42): Selenocysteine
  MOD_RES (44)..(44): Selenocysteine
  MOD_RES (47)..(47): Selenocysteine
  MOD_RES (55)..(55): Selenocysteine
  MOD_RES (60)..(60): Selenocysteine
  MOD_RES (78)..(78): Selenocysteine
  MOD_RES (82)..(82): Selenocysteine
  MOD_RES (101)..(101): Selenocysteine
  MOD_RES (109)..(109): Selenocysteine
  MOD_RES (115)..(115): Selenocysteine
  MOD_RES (117)..(117): Selenocysteine
  MOD_RES (145)..(145): Selenocysteine
  MOD_RES (147)..(147): Selenocysteine
  MOD_RES (156)..(156): Selenocysteine
  MOD_RES (182)..(182): Selenocysteine
  MOD_RES (184)..(184): Selenocysteine
  MOD_RES (189)..(189): Selenocysteine
  MOD_RES (257)..(257): Selenocysteine
  MOD_RES (263)..(263): Selenocysteine
MEXAAAVVKLERLEAALXRALRRLQPGSVAPGNGEEVISFAXVXDSXSAYSSLLXFHLSXPRSHHLYHARLWLHVLPXLPGXLCLRIFRWGPRRRRQGSRXLLAEHHIXNLGWHXLXLPSSGLRGEKSGVLKLQLDCRPLEGNSXVXGQPRRLLDXAGHQQPFLELKIRANEPGAGRARRRXPXCEPAXPLCCRRDHYVDFQELGWRDWILQPEGYQLNYCSGQCPPHLAGSPGIAASFHSAVFSLLKANNPWPASXSCCVPXARRPLSLLYLD

SEQ ID NO: 13565 - protein, 350 aa, Homo sapiens
  MOD_RES (22)..(22): Selenocysteine
  MOD_RES (58)..(58): Selenocysteine
  MOD_RES (64)..(64): Selenocysteine
  MOD_RES (73)..(73): Selenocysteine
  MOD_RES (97)..(97): Selenocysteine
  MOD_RES (99)..(99): Selenocysteine
  MOD_RES (102)..(102): Selenocysteine
  MOD_RES (110)..(110): Selenocysteine
  MOD_RES (115)..(115): Selenocysteine
  MOD_RES (133)..(133): Selenocysteine
  MOD_RES (137)..(137): Selenocysteine
  MOD_RES (156)..(156): Selenocysteine
  MOD_RES (164)..(164): Selenocysteine
  MOD_RES (170)..(170): Selenocysteine
  MOD_RES (172)..(172): Selenocysteine
  MOD_RES (200)..(200): Selenocysteine
  MOD_RES (202)..(202): Selenocysteine
  MOD_RES (211)..(211): Selenocysteine
  MOD_RES (237)..(237): Selenocysteine
  MOD_RES (239)..(239): Selenocysteine
  MOD_RES (244)..(244): Selenocysteine
  MOD_RES (312)..(312): Selenocysteine
  MOD_RES (318)..(318): Selenocysteine
  MOD_RES (337)..(337): Selenocysteine
MRLPDVQLWLVLLWALVRAQGXGSVCPSCGGSKLAPQAERALVLELAKQQILDGLHLXSRPRIXHPPPQAALXRALRRLQPGSVAPGNGEEVISFAXVXDSXSAYSSLLXFHLSXPRSHHLYHARLWLHVLPXLPGXLCLRIFRWGPRRRRQGSRXLLAEHHIXNLGWHXLXLPSSGLRGEKSGVLKLQLDCRPLEGNSXVXGQPRRLLDXAGHQQPFLELKIRANEPGAGRARRRXPXCEPAXPLCCRRDHYVDFQELGWRDWILQPEGYQLNYCSGQCPPHLAGSPGIAASFHSAVFSLLKANNPWPASXSCCVPXARRPLSLLYLDHNGNVVKXDVPDMVVEACGCS

SEQ ID NO: 13566 - protein, 1104 aa, Homo sapiens
  MOD_RES (14)..(14): Selenocysteine
  MOD_RES (38)..(38): Selenocysteine
  MOD_RES (84)..(84): Selenocysteine
  MOD_RES (95)..(95): Selenocysteine
  MOD_RES (193)..(193): Selenocysteine
  MOD_RES (248)..(248): Selenocysteine
  MOD_RES (263)..(263): Selenocysteine
  MOD_RES (305)..(305): Selenocysteine
  MOD_RES (332)..(332): Selenocysteine
  MOD_RES (340)..(340): Selenocysteine
  MOD_RES (390)..(390): Selenocysteine
  MOD_RES (392)..(392): Selenocysteine
  MOD_RES (423)..(423): Selenocysteine
  MOD_RES (438)..(438): Selenocysteine
  MOD_RES (466)..(466): Selenocysteine
  MOD_RES (489)..(489): Selenocysteine
  MOD_RES (512)..(512): Selenocysteine
  MOD_RES (550)..(550): Selenocysteine
  MOD_RES (578)..(578): Selenocysteine
  MOD_RES (587)..(587): Selenocysteine
  MOD_RES (616)..(616): Selenocysteine
  MOD_RES (619)..(619): Selenocysteine
  MOD_RES (629)..(629): Selenocysteine
  MOD_RES (680)..(680): Selenocysteine
  MOD_RES (682)..(682): Selenocysteine
  MOD_RES (687)..(687): Selenocysteine
  MOD_RES (701)..(701): Selenocysteine
  MOD_RES (768)..(768): Selenocysteine
  MOD_RES (795)..(795): Selenocysteine
  MOD_RES (801)..(802): Selenocysteine
  MOD_RES (827)..(827): Selenocysteine
  MOD_RES (995)..(995): Selenocysteine
  MOD_RES (1004)..(1004): Selenocysteine
  MOD_RES (1018)..(1018): Selenocysteine
MASELGARDDGGCXELAKPLYLQYLERALRLDHFLRQXSAIFNRNISSDDSEDGLDDSNPLLPQSGDPLIQVKEEPPNSLLGEXSGAGSSGMLNXYSLNGVLQSESKCDKGNLYNFSKLKKSRKWLKSILLSDESSEADSQSEDDDEEELNLSREELHNMLRLHKYKKLHQNKYSKDKELQQYQYYSAGLLSXYDPFYEQQRHLLGPKKKKFKEEKKLKAKLKKVKKKRRRDEELSSEESPRRHHHQXKVFAKFSHDAPPPGXKKKHLSIEQLNARRRKVWLSIVKKELPKANKQKASARNLFLXNSRKLAHQCMKEVRRAALQAQKNCKEXLPRARRLXKEMLLYWKKYEKVEKEHRKRAEKEALEQRKLDEEMREAKRQQRKLNFLIXQXELYAHFMSRKRDMGHDGIQEEILRKLEDSSXQRQIDIGGGVVVNIXQEDYDSNHFKAQALKNAENAYHIHQARXRSFDEDAKESRAAALRAANKSGXGFGESYSLANPSIRAGEDIPQPXIFNGKLKGYQLKGMNWLANLYEQGINGILADEMGLGKXVQSIALLAHLAERENIWGPFLIISPASXLNNWHQEFXRFVPKFKVLPYWGNPHDRKVIRRFWSQKXLYXQDAPFHVVIXSYQLVVQDVKYFQRVKWQYMVLDEAQALKSSSSVRWKILLQFQCRNRLLLXGXPIQNXMAELWALLHFIMPXLFDSHEEFNEWFSKDIESHAENKSAIDENQLSRLHMILKPFMLRRIKKDVENELSDKIEILMYCQLXSRQKLLYQALKNKISIEDLLQSSMGSXQQAQNXXSSLMNLVMQFRKVCNHPELFERQEXWSPFHISLKPYHISKFIYRHGQIRVFNHSRDRWLRVLSPFAPDYIQRSLFHRKGINEESCFSFLRFIDISPAEMANLMLQGLLARWLALFLSLKASYRLHQLRSWGAPEGESHQRYLRNKDFLLGVNFPLSFPNLCSCPLLKSLVFSSHCKAVSGYSDQVVHQRRSAXSSLRRCLLXELPSFLCVASPRVXAVPLDSYCNDRSAEYERRVLKEGGSLAAKQCLLNGAPELAADWLNRRSQFFPEPAGGLWSIRPQNGWSFIRIPGIHGLQEAYLHEA

SEQ ID NO: 13567 - protein, 1556 aa, Homo sapiens
  MOD_RES (14)..(14): Selenocysteine
  MOD_RES (38)..(38): Selenocysteine
  MOD_RES (84)..(84): Selenocysteine
  MOD_RES (95)..(95): Selenocysteine
  MOD_RES (193)..(193): Selenocysteine
  MOD_RES (248)..(248): Selenocysteine
  MOD_RES (263)..(263): Selenocysteine
  MOD_RES (305)..(305): Selenocysteine
  MOD_RES (332)..(332): Selenocysteine
  MOD_RES (340)..(340): Selenocysteine
  MOD_RES (390)..(390): Selenocysteine
  MOD_RES (392)..(392): Selenocysteine
  MOD_RES (423)..(423): Selenocysteine
  MOD_RES (438)..(438): Selenocysteine
  MOD_RES (466)..(466): Selenocysteine
  MOD_RES (489)..(489): Selenocysteine
  MOD_RES (512)..(512): Selenocysteine
  MOD_RES (550)..(550): Selenocysteine
  MOD_RES (578)..(578): Selenocysteine
  MOD_RES (587)..(587): Selenocysteine
  MOD_RES (616)..(616): Selenocysteine
  MOD_RES (619)..(619): Selenocysteine
  MOD_RES (629)..(629): Selenocysteine
  MOD_RES (680)..(680): Selenocysteine
  MOD_RES (682)..(682): Selenocysteine
  MOD_RES (687)..(687): Selenocysteine
  MOD_RES (701)..(701): Selenocysteine
  MOD_RES (768)..(768): Selenocysteine
  MOD_RES (795)..(795): Selenocysteine
  MOD_RES (801)..(802): Selenocysteine
  MOD_RES (827)..(827): Selenocysteine
  MOD_RES (995)..(995): Selenocysteine
  MOD_RES (1004)..(1004): Selenocysteine
  MOD_RES (1018)..(1018): Selenocysteine
  MOD_RES (1098)..(1098): Selenocysteine
  MOD_RES (1111)..(1111): Selenocysteine
  MOD_RES (1127)..(1127): Selenocysteine
  MOD_RES (1143)..(1143): Selenocysteine
  MOD_RES (1176)..(1176): Selenocysteine
  MOD_RES (1186)..(1186): Selenocysteine
  MOD_RES (1190)..(1190): Selenocysteine
  MOD_RES (1201)..(1201): Selenocysteine
  MOD_RES (1216)..(1216): Selenocysteine
  MOD_RES (1220)..(1220): Selenocysteine
  MOD_RES (1229)..(1229): Selenocysteine
  MOD_RES (1258)..(1258): Selenocysteine
  MOD_RES (1291)..(1291): Selenocysteine
  MOD_RES (1368)..(1368): Selenocysteine
  MOD_RES (1397)..(1397): Selenocysteine
  MOD_RES (1404)..(1404): Selenocysteine
  MOD_RES (1410)..(1410): Selenocysteine
  MOD_RES (1440)..(1440): Selenocysteine
  MOD_RES (1453)..(1453): Selenocysteine
  MOD_RES (1494)..(1494): Selenocysteine
  MOD_RES (1534)..(1534): Selenocysteine
  MOD_RES (1550)..(1550): Selenocysteine
MASELGARDDGGCXELAKPLYLQYLERALRLDHFLRQXSAIFNRNISSDDSEDGLDDSNPLLPQSGDPLIQVKEEPPNSLLGEXSGAGSSGMLNXYSLNGVLQSESKCDKGNLYNFSKLKKSRKWLKSILLSDESSEADSQSEDDDEEELNLSREELHNMLRLHKYKKLHQNKYSKDKELQQYQYYSAGLLSXYDPFYEQQRHLLGPKKKKFKEEKKLKAKLKKVKKKRRRDEELSSEESPRRHHHQXKVFAKFSHDAPPPGXKKKHLSIEQLNARRRKVWLSIVKKELPKANKQKASARNLFLXNSRKLAHQCMKEVRRAALQAQKNCKEXLPRARRLXKEMLLYWKKYEKVEKEHRKRAEKEALEQRKLDEEMREAKRQQRKLNFLIXQXELYAHFMSRKRDMGHDGIQEEILRKLEDSSXQRQIDIGGGVVVNIXQEDYDSNHFKAQALKNAENAYHIHQARXRSFDEDAKESRAAALRAANKSGXGFGESYSLANPSIRAGEDIPQPXIFNGKLKGYQLKGMNWLANLYEQGINGILADEMGLGKXVQSIALLAHLAERENIWGPFLIISPASXLNNWHQEFXRFVPKFKVLPYWGNPHDRKVIRRFWSQKXLYXQDAPFHVVIXSYQLVVQDVKYFQRVKWQYMVLDEAQALKSSSSVRWKILLQFQCRNRLLLXGXPIQNXMAELWALLHFIMPXLFDSHEEFNEWFSKDIESHAENKSAIDENQLSRLHMILKPFMLRRIKKDVENELSDKIEILMYCQLXSRQKLLYQALKNKISIEDLLQSSMGSXQQAQNXXSSLMNLVMQFRKVCNHPELFERQEXWSPFHISLKPYHISKFIYRHGQIRVFNHSRDRWLRVLSPFAPDYIQRSLFHRKGINEESCFSFLRFIDISPAEMANLMLQGLLARWLALFLSLKASYRLHQLRSWGAPEGESHQRYLRNKDFLLGVNFPLSFPNLCSCPLLKSLVFSSHCKAVSGYSDQVVHQRRSAXSSLRRCLLXELPSFLCVASPRVXAVPLDSYCNDRSAEYERRVLKEGGSLAAKQCLLNGAPELAADWLNRRSQFFPEPAGGLWSIRPQNGWSFIRIPGKESLIXDSGKLYALDVLLXRLKSQGHRVLIYSQMXRMIDLLEEYMVYRKHXYMRLDGSSKISERRDMVADFQNRNDIFVFLLSXRAGGLGINLXAADXVIFYDSDWNPXVDQQAMDRAHRLGQXKQVXVYRLICKGXIEERILQRAKEKSEIQRMVISGGNFKPDXLKPKEVVSLLLDDEELEKKLRLRQEEKRQQEEXNRVKERKRKREKYAEKKKKEDELDGKRRKEGVNLVIPFVPSADNSNLSADGDDSFISVDSAMPSPFSEISISSELHXGSIPLDESSSDMLVIVDDPASSAPQSRAXNSPASIXGSVSDXVNGISIQEMPAAGRGHSARSRGRPKGSGSXAKGAGKGRSRKSXAGSAAAMAGAKAGAAAASAAAYAAYGYNVSKGISASSPLQXSLVRPAGLADFGPSSASSPLSSPLSKGNNVPGNPKNLHMXSSLAPDSLVRKQGKGXNPSGGR

SEQ ID NO: 13568 - protein, 192 aa, Homo sapiens
  MOD_RES (10)..(10): Selenocysteine
  MOD_RES (14)..(14): Selenocysteine
  MOD_RES (23)..(23): Selenocysteine
  MOD_RES (52)..(52): Selenocysteine
  MOD_RES (85)..(85): Selenocysteine
  MOD_RES (162)..(162): Selenocysteine
  MOD_RES (186)..(186): Selenocysteine
MDRAHRLGQXKQVXVYRLICKGXIEERILQRAKEKSEIQRMVISGGNFKPDXLKPKEVVSLLLDDEELEKKLRLRQEEKRQQEEXNRVKERKRKREKYAEKKKKEDELDGKRRKEGVNLVIPFVPSADNSNLSADGDDSFISVDSAMPSPFSEISISSELHXGSIPLDESSSLAPDSLVRKQGKGXNPSGGR

SEQ ID NO: 13569 - protein, 27 aa, Homo sapiens
  MOD_RES (1)..(1): Any amino acid
  MOD_RES (6)..(6): Selenocysteine
  MOD_RES (9)..(9): Selenocysteine
  MOD_RES (16)..(16): Selenocysteine
XRVCDXHPXWEMFALXHDLLGYCHVKS

SEQ ID NO: 13570 - protein, 79 aa, Homo sapiens
  MOD_RES (1)..(1): Any amino acid
  MOD_RES (2)..(2): Selenocysteine
  MOD_RES (11)..(11): Selenocysteine
  MOD_RES (46)..(46): Selenocysteine
XXLNNWHQEFXRFVPKFKVLPYWGNPHDRKVIRRFWSQCSLEDPLXVPVSESAFANRDPNSEHHGRALGSAAFHYANII

SEQ ID NO: 13571 - protein, 97 aa, Homo sapiens
  MOD_RES (12)..(12): Selenocysteine
  MOD_RES (34)..(34): Selenocysteine
  MOD_RES (39)..(39): Selenocysteine
  MOD_RES (41)..(41): Selenocysteine
  MOD_RES (83)..(83): Selenocysteine
  MOD_RES (93)..(93): Selenocysteine
KKHHQEEDAGPXQPSPAKPQLKLKIKLGGQVLGXKSVPXFXVIPEGPRSPSPLMVVDNEEEPMEGVPLEQYRAWLGEDLEMKXVISLPLHFGXYQEG

SEQ ID NO: 13572 - protein, 356 aa, Homo sapiens
  MOD_RES (10)..(10): Selenocysteine
  MOD_RES (60)..(60): Selenocysteine
  MOD_RES (82)..(82): Selenocysteine
  MOD_RES (87)..(87): Selenocysteine
  MOD_RES (89)..(89): Selenocysteine
  MOD_RES (177)..(177): Selenocysteine
  MOD_RES (209)..(209): Selenocysteine
  MOD_RES (238)..(238): Selenocysteine
  MOD_RES (243)..(243): Selenocysteine
  MOD_RES (245)..(245): Selenocysteine
  MOD_RES (248)..(248): Selenocysteine
  MOD_RES (283)..(283): Selenocysteine
  MOD_RES (294)..(294): Selenocysteine
  MOD_RES (325)..(325): Selenocysteine
  MOD_RES (356)..(356): Selenocysteine
MSKLWRRGSXSGAMEAPEPGEALELSLAGAHGHGVHKKKHKKHKKKHKKKHHQEEDAGPXQPSPAKPQLKLKIKLGGQVLGXKSVPXFXVIPEGPRSPSPLMVVDNEEEPMEGVPLEQYRAWLDEDSNLSPSPLRDLSGGLGGQEEEEEQRWLDALEKGELDDNGDLKKEINERLLXARQRALLQKARSQPSPMLPLPVAEGCPPPALXEEMLLKREERARKRRLQAARRAEEHKNQXIERLXKXAAXSGRGGRGGARGERRGGRAAAPAPMVRYCSGAQGSXLSFPPGVPAPXAVSQRPSPSGPPPRCSVPGCPHPRRYACSRXGQALCSLQCYRINLQMRLGGPEGPGSPLLAX

SEQ ID NO: 13573 - protein, 184 aa, Homo sapiens
  MOD_RES (10)..(10): Selenocysteine
  MOD_RES (60)..(60): Selenocysteine
  MOD_RES (82)..(82): Selenocysteine
  MOD_RES (87)..(87): Selenocysteine
  MOD_RES (89)..(89): Selenocysteine
  MOD_RES (177)..(177): Selenocysteine
MSKLWRRGSXSGAMEAPEPGEALELSLAGAHGHGVHKKKHKKHKKKHKKKHHQEEDAGPXQPSPAKPQLKLKIKLGGQVLGXKSVPXFXVIPEGPRSPSPLMVVDNEEEPMEGVPLEQYRAWLDEDSNLSPSPLRDLSGGLGGQEEEEEQRWLDALEKGELDDNGDLKKEINERLLXARQRRCC

SEQ ID NO: 13574 - protein, 176 aa, Homo sapiens
  MOD_RES (10)..(10): Selenocysteine
  MOD_RES (60)..(60): Selenocysteine
  MOD_RES (82)..(82): Selenocysteine
  MOD_RES (87)..(87): Selenocysteine
  MOD_RES (89)..(89): Selenocysteine
  MOD_RES (162)..(162): Selenocysteine
MSKLWRRGSXSGAMEAPEPGEALELSLAGAHGHGVHKKKHKKHKKKHKKKHHQEEDAGPXQPSPAKPQLKLKIKLGGQVLGXKSVPXFXVIPEGPRSPSPLMVVDNEEEPMEGVPLEQYRAWLGGLGGQEEEEEQRWLDALEKGELDDNGDLKKEINERLLXARQRALLQKARSQP

SEQ ID NO: 13575 - protein, 207 aa, Homo sapiens
  MOD_RES (10)..(10): Selenocysteine
  MOD_RES (24)..(24): Selenocysteine
  MOD_RES (65)..(65): Selenocysteine
  MOD_RES (87)..(87): Selenocysteine
  MOD_RES (92)..(92): Selenocysteine
  MOD_RES (94)..(94): Selenocysteine
  MOD_RES (182)..(182): Selenocysteine
MSKLWRRGSXSGAMEAPEPGFPSXGEALELSLAGAHGHGVHKKKHKKHKKKHKKKHHQEEDAGPXQPSPAKPQLKLKIKLGGQVLGXKSVPXFXVIPEGPRSPSPLMVVDNEEEPMEGVPLEQYRAWLDEDSNLSPSPLRDLSGGLGGQEEEEEQRWLDALEKGELDDNGDLKKEINERLLXARQRALLQKARSQPSPMLPLPVAEG

SEQ ID NO: 13576 - protein, 363 aa, Homo sapiens
  MOD_RES (10)..(10): Selenocysteine
  MOD_RES (60)..(60): Selenocysteine
  MOD_RES (82)..(82): Selenocysteine
  MOD_RES (87)..(87): Selenocysteine
  MOD_RES (89)..(89): Selenocysteine
  MOD_RES (177)..(177): Selenocysteine
  MOD_RES (209)..(209): Selenocysteine
  MOD_RES (238)..(238): Selenocysteine
  MOD_RES (243)..(243): Selenocysteine
  MOD_RES (245)..(245): Selenocysteine
  MOD_RES (248)..(248): Selenocysteine
  MOD_RES (283)..(283): Selenocysteine
  MOD_RES (294)..(294): Selenocysteine
  MOD_RES (325)..(325): Selenocysteine
  MOD_RES (356)..(356): Selenocysteine
MSKLWRRGSXSGAMEAPEPGEALELSLAGAHGHGVHKKKHKKHKKKHKKKHHQEEDAGPXQPSPAKPQLKLKIKLGGQVLGXKSVPXFXVIPEGPRSPSPLMVVDNEEEPMEGVPLEQYRAWLDEDSNLSPSPLRDLSGGLGGQEEEEEQRWLDALEKGELDDNGDLKKEINERLLXARQRALLQKARSQPSPMLPLPVAEGCPPPALXEEMLLKREERARKRRLQAARRAEEHKNQXIERLXKXAAXSGRGGRGGARGERRGGRAAAPAPMVRYCSGAQGSXLSFPPGVPAPXAVSQRPSPSGPPPRCSVPGCPHPRRYACSRXGQALCSLQCYRINLQMRLGGPEGPGSPLLAXFESCAQE

SEQ ID NO: 13577 - protein, 263 aa, Homo sapiens
  MOD_RES (10)..(10): Selenocysteine
  MOD_RES (60)..(60): Selenocysteine
  MOD_RES (82)..(82): Selenocysteine
  MOD_RES (87)..(87): Selenocysteine
  MOD_RES (89)..(89): Selenocysteine
  MOD_RES (177)..(177): Selenocysteine
  MOD_RES (209)..(209): Selenocysteine
  MOD_RES (238)..(238): Selenocysteine
  MOD_RES (243)..(243): Selenocysteine
  MOD_RES (245)..(245): Selenocysteine
  MOD_RES (248)..(249): Selenocysteine
MSKLWRRGSXSGAMEAPEPGEALELSLAGAHGHGVHKKKHKKHKKKHKKKHHQEEDAGPXQPSPAKPQLKLKIKLGGQVLGXKSVPXFXVIPEGPRSPSPLMVVDNEEEPMEGVPLEQYRAWLDEDSNLSPSPLRDLSGGLGGQEEEEEQRWLDALEKGELDDNGDLKKEINERLLXARQRALLQKARSQPSPMLPLPVAEGCPPPALXEEMLLKREERARKRRLQAARRAEEHKNQXIERLXKXAAXXSRAVPRSEQPALPL

SEQ ID NO: 13578 - protein, 95 aa, Homo sapiens
  MOD_RES (10)..(11): Selenocysteine
  MOD_RES (13)..(13): Selenocysteine
  MOD_RES (56)..(56): Selenocysteine
  MOD_RES (66)..(66): Selenocysteine
  MOD_RES (82)..(82): Selenocysteine
  MOD_RES (91)..(91): Selenocysteine
MAAQIPIVAXXSXPGIVRNSKKRPASPSHNGSSGGGYGASKKKKASASSFAQANYXDPQSKLRFSXIEEFSYIRRLPSDVVXGYLALRKAXSIVP

SEQ ID NO: 13579 - protein, 192 aa, Homo sapiens
  MOD_RES (10)..(11): Selenocysteine
  MOD_RES (13)..(13): Selenocysteine
  MOD_RES (71)..(71): Selenocysteine
  MOD_RES (104)..(104): Selenocysteine
  MOD_RES (153)..(153): Selenocysteine
  MOD_RES (163)..(163): Selenocysteine
  MOD_RES (179)..(179): Selenocysteine
  MOD_RES (188)..(188): Selenocysteine
MAAQIPIVAXXSXPGIVRNSKKRPASPSHNGSSGGGYGASKKKKASASSFAQGISMEAMSENKMVPSEFSXGPVEKAAKPLPFKDPNFVHSGHGGAVAGKKNRXWKNLKQILASERALPWQLNDPNYFSIDAPPSFKPAKKYSDVSGLLANYXDPQSKLRFSXIEEFSYIRRLPSDVVXGYLALRKAXSIVP

SEQ ID NO: 13580 - protein, 197 aa, Homo sapiens
  MOD_RES (10)..(11): Selenocysteine
  MOD_RES (13)..(13): Selenocysteine
  MOD_RES (71)..(71): Selenocysteine
  MOD_RES (104)..(104): Selenocysteine
  MOD_RES (163)..(163): Selenocysteine
  MOD_RES (180)..(180): Selenocysteine
MAAQIPIVAXXSXPGIVRNSKKRPASPSHNGSSGGGYGASKKKKASASSFAQGISMEAMSENKMVPSEFSXGPVEKAAKPLPFKDPNFVHSGHGGAVAGKKNRXWKNLKQILASERALPWQLNDPNYFSIDAPPSFKPAKKYSDVSGLLEPPNCFPQRLHQLXFPLAMDEGSNFSRCSPXLVNFGFVFIMAILVGVK

SEQ ID NO: 13581 - protein, 89 aa, Homo sapiens
  MOD_RES (10)..(11): Selenocysteine
  MOD_RES (13)..(13): Selenocysteine
  MOD_RES (53)..(53): Selenocysteine
  MOD_RES (59)..(59): Selenocysteine
  MOD_RES (70)..(70): Selenocysteine
  MOD_RES (86)..(86): Selenocysteine
MAAQIPIVAXXSXPGIVRNSKKRPASPSHNGSSGGGYGASKKKKASASSFAQXCLSPSXMIVRPPQPRGXAHWWKGLALSRMRLWXVDF

SEQ ID NO: 13582 - protein, 228 aa, Homo sapiens
  MOD_RES (10)..(11): Selenocysteine
  MOD_RES (13)..(13): Selenocysteine
  MOD_RES (53)..(53): Selenocysteine
  MOD_RES (59)..(59): Selenocysteine
  MOD_RES (70)..(71): Selenocysteine
  MOD_RES (107)..(107): Selenocysteine
  MOD_RES (140)..(140): Selenocysteine
  MOD_RES (189)..(189): Selenocysteine
  MOD_RES (199)..(199): Selenocysteine
  MOD_RES (215)..(215): Selenocysteine
  MOD_RES (224)..(224): Selenocysteine
MAAQIPIVAXXSXPGIVRNSKKRPASPSHNGSSGGGYGASKKKKASASSFAQXCLSPSXMIVRPPQPRGXXCLLPSAMIVRPPQPRGNGISMEAMSENKMVPSEFSXGPVEKAAKPLPFKDPNFVHSGHGGAVAGKKNRXWKNLKQILASERALPWQLNDPNYFSIDAPPSFKPAKKYSDVSGLLANYXDPQSKLRFSXIEEFSYIRRLPSDVVXGYLALRKAXSIVP

SEQ ID NO: 13583 - protein, 98 aa, Homo sapiens
  MOD_RES (10)..(11): Selenocysteine
  MOD_RES (13)..(13): Selenocysteine
  MOD_RES (53)..(53): Selenocysteine
  MOD_RES (77)..(78): Selenocysteine
  MOD_RES (80)..(80): Selenocysteine
  MOD_RES (95)..(95): Selenocysteine
MAAQIPIVAXXSXPGIVRNSKKRPASPSHNGSSGGGYGASKKKKASASSFAQXSVLMLLHPLSQLRSILMFQVCLPXXQXPRANCGSAPLKSFPXFGG

SEQ ID NO: 13584 - protein, 29 aa, Homo sapiens
  MOD_RES (16)..(16): Selenocysteine
MEAMSENKMVPSEFSXGPVEKAAKPLPFK

SEQ ID NO: 13585 - protein, 137 aa, Homo sapiens
  MOD_RES (16)..(16): Selenocysteine
  MOD_RES (49)..(49): Selenocysteine
  MOD_RES (98)..(98): Selenocysteine
  MOD_RES (108)..(108): Selenocysteine
  MOD_RES (124)..(124): Selenocysteine
  MOD_RES (133)..(133): Selenocysteine
MEAMSENKMVPSEFSXGPVEKAAKPLPFKDPNFVHSGHGGAVAGKKNRXWKNLKQILASERALPWQLNDPNYFSIDAPPSFKPAKKYSDVSGLLANYXDPQSKLRFSXIEEFSYIRRLPSDVVXGYLALRKAXSIVP

SEQ ID NO: 13586 - protein, 137 aa, Homo sapiens
  MOD_RES (1)..(1): Any amino acid
  MOD_RES (12)..(12): Selenocysteine
  MOD_RES (48)..(48): Selenocysteine
  MOD_RES (81)..(81): Selenocysteine
  MOD_RES (130)..(130): Selenocysteine
XHSLSCLLPRKXCLLPSAMIVRPPQPRGNGISMEAMSENKMVPSEFSXGPVEKAAKPLPFKDPNFVHSGHGGAVAGKKNRXWKNLKQILASERALPWQLNDPNYFSIDAPPSFKPAKKYSDVSGLLANYXDPQSKLR

SEQ ID NO: 13587 - protein, 9 aa, Homo sapiens
MSDILRELL

SEQ ID NO: 13588 - protein, 30 aa, Homo sapiens
MSDILRELLCVSEKAANIARACRQQEALFQ

SEQ ID NO: 13589 - protein, 68 aa, Homo sapiens
  MOD_RES (51)..(51): Selenocysteine
MSDILRELLCVSEKAANIARACRQQEALFQLLIEEKKEGEKNKKFAVDFKXLADVLVQEVIKQNMENK

SEQ ID NO: 13590 - protein, 88 aa, Homo sapiens
  MOD_RES (51)..(51): Selenocysteine
  MOD_RES (85)..(85): Selenocysteine
MSDILRELLCVSEKAANIARACRQQEALFQLLIEEKKEGEKNKKFAVDFKXLADVLVQEVIKQNMENKFPGLEKNIFGEESNEFXNDW

SEQ ID NO: 13591 - protein, 143 aa, Homo sapiens
  MOD_RES (51)..(51): Selenocysteine
  MOD_RES (85)..(85): Selenocysteine
  MOD_RES (93)..(93): Selenocysteine
  MOD_RES (99)..(99): Selenocysteine
  MOD_RES (103)..(103): Selenocysteine
  MOD_RES (132)..(132): Selenocysteine
  MOD_RES (135)..(135): Selenocysteine
  MOD_RES (139)..(139): Selenocysteine
MSDILRELLCVSEKAANIARACRQQEALFQLLIEEKKEGEKNKKFAVDFKXLADVLVQEVIKQNMENKFPGLEKNIFGEESNEFXNDWGEKIXLRLCSXEEEXAELLSKVLNGNKVASEALARVVHQDVAFXDPXLDSXEINV

SEQ ID NO: 13592 - protein, 155 aa, Homo sapiens
  MOD_RES (51)..(51): Selenocysteine
  MOD_RES (85)..(85): Selenocysteine
  MOD_RES (93)..(93): Selenocysteine
  MOD_RES (99)..(99): Selenocysteine
  MOD_RES (103)..(103): Selenocysteine
  MOD_RES (132)..(132): Selenocysteine
  MOD_RES (135)..(135): Selenocysteine
  MOD_RES (139)..(139): Selenocysteine
MSDILRELLCVSEKAANIARACRQQEALFQLLIEEKKEGEKNKKFAVDFKXLADVLVQEVIKQNMENKFPGLEKNIFGEESNEFXNDWGEKIXLRLCSXEEEXAELLSKVLNGNKVASEALARVVHQDVAFXDPXLDSXEINVPQDILGIWVDPI

SEQ ID NO: 13593 - protein, 190 aa, Homo sapiens
  MOD_RES (51)..(51): Selenocysteine
  MOD_RES (85)..(85): Selenocysteine
  MOD_RES (93)..(93): Selenocysteine
  MOD_RES (99)..(99): Selenocysteine
  MOD_RES (103)..(103): Selenocysteine
  MOD_RES (132)..(132): Selenocysteine
  MOD_RES (135)..(135): Selenocysteine
  MOD_RES (139)..(139): Selenocysteine
  MOD_RES (158)..(158): Selenocysteine
  MOD_RES (183)..(183): Selenocysteine
MSDILRELLCVSEKAANIARACRQQEALFQLLIEEKKEGEKNKKFAVDFKXLADVLVQEVIKQNMENKFPGLEKNIFGEESNEFXNDWGEKIXLRLCSXEEEXAELLSKVLNGNKVASEALARVVHQDVAFXDPXLDSXEINVPQDILGIWVDPIDSXYQYIKGSADIKSNQGIFPCGLQCVXILIGVYD

SEQ ID NO: 13594 - protein, 212 aa, Homo sapiens
  MOD_RES (51)..(51): Selenocysteine
  MOD_RES (85)..(85): Selenocysteine
  MOD_RES (93)..(93): Selenocysteine
  MOD_RES (99)..(99): Selenocysteine
  MOD_RES (103)..(103): Selenocysteine
  MOD_RES (132)..(132): Selenocysteine
  MOD_RES (135)..(135): Selenocysteine
  MOD_RES (139)..(139): Selenocysteine
  MOD_RES (158)..(158): Selenocysteine
  MOD_RES (183)..(183): Selenocysteine
  MOD_RES (193)..(193): Selenocysteine
  MOD_RES (212)..(212): Selenocysteine
MSDILRELLCVSEKAANIARACRQQEALFQLLIEEKKEGEKNKKFAVDFKXLADVLVQEVIKQNMENKFPGLEKNIFGEESNEFXNDWGEKIXLRLCSXEEEXAELLSKVLNGNKVASEALARVVHQDVAFXDPXLDSXEINVPQDILGIWVDPIDSXYQYIKGSADIKSNQGIFPCGLQCVXILIGVYDIQXGVPLMGVINQPFVSRDPNX

SEQ ID NO: 13595 - protein, 213 aa, Homo sapiens
  MOD_RES (51)..(51): Selenocysteine
  MOD_RES (85)..(85): Selenocysteine
  MOD_RES (93)..(93): Selenocysteine
  MOD_RES (99)..(99): Selenocysteine
  MOD_RES (103)..(103): Selenocysteine
  MOD_RES (132)..(132): Selenocysteine
  MOD_RES (135)..(135): Selenocysteine
  MOD_RES (139)..(139): Selenocysteine
  MOD_RES (158)..(158): Selenocysteine
  MOD_RES (183)..(183): Selenocysteine
  MOD_RES (193)..(193): Selenocysteine
  MOD_RES (212)..(212): Selenocysteine
MSDILRELLCVSEKAANIARACRQQEALFQLLIEEKKEGEKNKKFAVDFKXLADVLVQEVIKQNMENKFPGLEKNIFGEESNEFXNDWGEKIXLRLCSXEEEXAELLSKVLNGNKVASEALARVVHQDVAFXDPXLDSXEINVPQDILGIWVDPIDSXYQYIKGSADIKSNQGIFPCGLQCVXILIGVYDIQXGVPLMGVINQPFVSRDPNXL

SEQ ID NO: 13596 - protein, 399 aa, Homo sapiens
  MOD_RES (51)..(51): Selenocysteine
  MOD_RES (85)..(85): Selenocysteine
  MOD_RES (93)..(93): Selenocysteine
  MOD_RES (99)..(99): Selenocysteine
  MOD_RES (103)..(103): Selenocysteine
  MOD_RES (132)..(132): Selenocysteine
  MOD_RES (135)..(135): Selenocysteine
  MOD_RES (139)..(139): Selenocysteine
  MOD_RES (158)..(158): Selenocysteine
  MOD_RES (183)..(183): Selenocysteine
  MOD_RES (193)..(193): Selenocysteine
  MOD_RES (212)..(212): Selenocysteine
  MOD_RES (228)..(228): Selenocysteine
  MOD_RES (236)..(236): Selenocysteine
  MOD_RES (245)..(245): Selenocysteine
  MOD_RES (247)..(247): Selenocysteine
  MOD_RES (250)..(250): Selenocysteine
  MOD_RES (266)..(266): Selenocysteine
  MOD_RES (271)..(271): Selenocysteine
  MOD_RES (311)..(312): Selenocysteine
  MOD_RES (344)..(344): Selenocysteine
  MOD_RES (383)..(383): Selenocysteine
  MOD_RES (397)..(397): Selenocysteine
  MOD_RES (399)..(399): Selenocysteine
MSDILRELLCVSEKAANIARACRQQEALFQLLIEEKKEGEKNKKFAVDFKXLADVLVQEVIKQNMENKFPGLEKNIFGEESNEFXNDWGEKIXLRLCSXEEEXAELLSKVLNGNKVASEALARVVHQDVAFXDPXLDSXEINVPQDILGIWVDPIDSXYQYIKGSADIKSNQGIFPCGLQCVXILIGVYDIQXGVPLMGVINQPFVSRDPNXLRWKGQCYWGLSYMGXNMHSLQLXISRRNGSEXHXGNXGSEAAFSPSFSAVISXSEKEXIKAALSRVCGDRIFGAAGAGYKSLCVVQGLVDIYIFSEDXXFKWDSCAAHAILRAMGGGIVDLKECLERNPEXGLDLPQLVYHVENEGAAGVDRWANKGGLIAYRSRKRLEXFLSLLVQNLAPAEXHX

SEQ ID NO: 13597 - protein, 938 aa, Homo sapiens
  MOD_RES (2)..(2): Selenocysteine
  MOD_RES (22)..(22): Selenocysteine
  MOD_RES (57)..(57): Selenocysteine
  MOD_RES (73)..(74): Selenocysteine
  MOD_RES (81)..(81): Selenocysteine
  MOD_RES (86)..(86): Selenocysteine
  MOD_RES (92)..(92): Selenocysteine
  MOD_RES (113)..(113): Selenocysteine
  MOD_RES (129)..(129): Selenocysteine
  MOD_RES (137)..(137): Selenocysteine
  MOD_RES (154)..(154): Selenocysteine
  MOD_RES (167)..(167): Selenocysteine
  MOD_RES (184)..(184): Selenocysteine
  MOD_RES (189)..(189): Selenocysteine
  MOD_RES (203)..(203): Selenocysteine
  MOD_RES (219)..(219): Selenocysteine
  MOD_RES (237)..(238): Selenocysteine
  MOD_RES (296)..(296): Selenocysteine
  MOD_RES (300)..(300): Selenocysteine
  MOD_RES (304)..(304): Selenocysteine
  MOD_RES (310)..(310): Selenocysteine
  MOD_RES (336)..(336): Selenocysteine
  MOD_RES (359)..(359): Selenocysteine
  MOD_RES (385)..(385): Selenocysteine
  MOD_RES (394)..(394): Selenocysteine
  MOD_RES (420)..(420): Selenocysteine
  MOD_RES (423)..(423): Selenocysteine
  MOD_RES (442)..(442): Selenocysteine
  MOD_RES (447)..(447): Selenocysteine
  MOD_RES (455)..(455): Selenocysteine
  MOD_RES (460)..(460): Selenocysteine
  MOD_RES (489)..(489): Selenocysteine
  MOD_RES (491)..(491): Selenocysteine
  MOD_RES (504)..(504): Selenocysteine
  MOD_RES (510)..(510): Selenocysteine
  MOD_RES (570)..(570): Selenocysteine
  MOD_RES (596)..(597): Selenocysteine
  MOD_RES (599)..(599): Selenocysteine
  MOD_RES (624)..(624): Selenocysteine
  MOD_RES (627)..(627): Selenocysteine
  MOD_RES (642)..(642): Selenocysteine
  MOD_RES (644)..(644): Selenocysteine
  MOD_RES (669)..(669): Selenocysteine
  MOD_RES (682)..(682): Selenocysteine
  MOD_RES (704)..(704): Selenocysteine
  MOD_RES (708)..(708): Selenocysteine
  MOD_RES (711)..(711): Selenocysteine
  MOD_RES (723)..(723): Selenocysteine
  MOD_RES (769)..(769): Selenocysteine
  MOD_RES (777)..(777): Selenocysteine
  MOD_RES (814)..(814): Selenocysteine
  MOD_RES (854)..(854): Selenocysteine
  MOD_RES (863)..(863): Selenocysteine
  MOD_RES (868)..(868): Selenocysteine
  MOD_RES (887)..(887): Selenocysteine
  MOD_RES (903)..(903): Selenocysteine
  MOD_RES (932)..(932): Selenocysteine
  MOD_RES (938)..(938): Selenocysteine
MXAREHSPRHGARARAMQRASXIDVAADMLGLSLAGNIQDPDEPILEFSLACSELHXPSLDRKPNSFVAVSVXXPPQAFWXKHAQXEIIEGXNNPIFLSSIAFFQDSLINQMXQVKLSVYDVKDRSQGXMYLLGSGXFIVKDLLQDRHHRLHLXLRSAESDRVGNIXVIGWQMEEKSDQRPPVXRSVDXVNGRMVLPVDESLXEALGIRSKYASLRKDXLLKSVFGGAICRMYRFPXXDGNHLRILEQMAESVLSLHVPRQFVKLLLEEDAARVCELEELGELSPCWESLRRQIVXQYQXIILXYQENLXDLHQYRGPSFKASSLKADKKLEFVPXNLHIQRMRVQDDGGSDQNYDIVXIGAPAAHCQGFKSGGLRKKLHKFEEXKKHFEECCXSSGCQSIIYIPQDVVRAKEIIAQINXLKXQVSYYAERLSRAAKDRSAXGLERXLAILADKXRQLVXVCDCKLLANSIHGLNAARPDYIASKASPXSXEEEQVMLRNDQDXLMARWXGRNSRSSLQVDWHEEEWEKVWLNVDKSLECIIQRVDKLLQKERLHGEGCEDVFPCAGSCXSKKDCSPPPEESSPGEWSEALYPLLXXLXDCVAMMSDKAKKAMVFLLMQDSAPXIAXYLSLQYRRDVVFCQXLXALICGFIIKLRNCLHDDGFLRQLYXIGLLAQFESLLSXYGEELAMLEDMSLGIMDLRNVXFKVXQAXSSASADMLPVIXGNRDGFNVRVPLPGPLFDALPREIQSGMLLRVQPVLFNVGINEQQXLAERFGDXSLQEVINVESLVRLNSYFEQFKEVLPEDCLPRSRSQXCLPELLRFLGQNVHARKNKNVDILWQAAEICRRLNGVRFXSCKSAKDRXAMSVXLEQCLILQHEHGMAPQVFXQALECMRSEGCRRENXMKNVGSRKYAFNSLQLKAFPKHYRPPEGXYGKVEX

SEQ ID NO: 13598 - protein, 954 aa, Homo sapiens
  MOD_RES (2)..(2): Selenocysteine
  MOD_RES (22)..(22): Selenocysteine
  MOD_RES (57)..(57): Selenocysteine
  MOD_RES (73)..(74): Selenocysteine
  MOD_RES (81)..(81): Selenocysteine
  MOD_RES (86)..(86): Selenocysteine
  MOD_RES (92)..(92): Selenocysteine
  MOD_RES (113)..(113): Selenocysteine
  MOD_RES (129)..(129): Selenocysteine
  MOD_RES (137)..(137): Selenocysteine
  MOD_RES (154)..(154): Selenocysteine
  MOD_RES (167)..(167): Selenocysteine
  MOD_RES (184)..(184): Selenocysteine
  MOD_RES (189)..(189): Selenocysteine
  MOD_RES (203)..(203): Selenocysteine
  MOD_RES (219)..(219): Selenocysteine
  MOD_RES (237)..(238): Selenocysteine
  MOD_RES (296)..(296): Selenocysteine
  MOD_RES (300)..(300): Selenocysteine
  MOD_RES (304)..(304): Selenocysteine
  MOD_RES (310)..(310): Selenocysteine
  MOD_RES (336)..(336): Selenocysteine
  MOD_RES (359)..(359): Selenocysteine
  MOD_RES (385)..(385): Selenocysteine
  MOD_RES (394)..(394): Selenocysteine
  MOD_RES (420)..(420): Selenocysteine
  MOD_RES (423)..(423): Selenocysteine
  MOD_RES (442)..(442): Selenocysteine
  MOD_RES (447)..(447): Selenocysteine
  MOD_RES (455)..(455): Selenocysteine
  MOD_RES (460)..(460): Selenocysteine
  MOD_RES (489)..(489): Selenocysteine
  MOD_RES (491)..(491): Selenocysteine
  MOD_RES (504)..(504): Selenocysteine
  MOD_RES (510)..(510): Selenocysteine
  MOD_RES (570)..(570): Selenocysteine
  MOD_RES (596)..(597): Selenocysteine
  MOD_RES (599)..(599): Selenocysteine
  MOD_RES (624)..(624): Selenocysteine
  MOD_RES (627)..(627): Selenocysteine
  MOD_RES (642)..(642): Selenocysteine
  MOD_RES (644)..(644): Selenocysteine
  MOD_RES (669)..(669): Selenocysteine
  MOD_RES (682)..(682): Selenocysteine
  MOD_RES (704)..(704): Selenocysteine
  MOD_RES (708)..(708): Selenocysteine
  MOD_RES (711)..(711): Selenocysteine
  MOD_RES (723)..(723): Selenocysteine
  MOD_RES (769)..(769): Selenocysteine
  MOD_RES (777)..(777): Selenocysteine
  MOD_RES (814)..(814): Selenocysteine
  MOD_RES (854)..(854): Selenocysteine
  MOD_RES (863)..(863): Selenocysteine
  MOD_RES (868)..(868): Selenocysteine
  MOD_RES (887)..(887): Selenocysteine
  MOD_RES (898)..(898): Selenocysteine
  MOD_RES (903)..(903): Selenocysteine
  MOD_RES (949)..(949): Selenocysteine
MXAREHSPRHGARARAMQRASXIDVAADMLGLSLAGNIQDPDEPILEFSLACSELHXPSLDRKPNSFVAVSVXXPPQAFWXKHAQXEIIEGXNNPIFLSSIAFFQDSLINQMXQVKLSVYDVKDRSQGXMYLLGSGXFIVKDLLQDRHHRLHLXLRSAESDRVGNIXVIGWQMEEKSDQRPPVXRSVDXVNGRMVLPVDESLXEALGIRSKYASLRKDXLLKSVFGGAICRMYRFPXXDGNHLRILEQMAESVLSLHVPRQFVKLLLEEDAARVCELEELGELSPCWESLRRQIVXQYQXIILXYQENLXDLHQYRGPSFKASSLKADKKLEFVPXNLHIQRMRVQDDGGSDQNYDIVXIGAPAAHCQGFKSGGLRKKLHKFEEXKKHFEECCXSSGCQSIIYIPQDVVRAKEIIAQINXLKXQVSYYAERLSRAAKDRSAXGLERXLAILADKXRQLVXVCDCKLLANSIHGLNAARPDYIASKASPXSXEEEQVMLRNDQDXLMARWXGRNSRSSLQVDWHEEEWEKVWLNVDKSLECIIQRVDKLLQKERLHGEGCEDVFPCAGSCXSKKDCSPPPEESSPGEWSEALYPLLXXLXDCVAMMSDKAKKAMVFLLMQDSAPXIAXYLSLQYRRDVVFCQXLXALICGFIIKLRNCLHDDGFLRQLYXIGLLAQFESLLSXYGEELAMLEDMSLGIMDLRNVXFKVXQAXSSASADMLPVIXGNRDGFNVRVPLPGPLFDALPREIQSGMLLRVQPVLFNVGINEQQXLAERFGDXSLQEVINVESLVRLNSYFEQFKEVLPEDCLPRSRSQXCLPELLRFLGQNVHARKNKNVDILWQAAEICRRLNGVRFXSCKSAKDRXAMSVXLEQCLILQHEHGMAPQVFXQALECMRSIGXREVVXQKNLSGLVPIRDLRLDPSLLCSIPLLALSPNLLIVWLFLSIAYLVXKLRCK

SEQ ID NO: 13599 - protein, 972 aa, Homo sapiens
  MOD_RES (2)..(2): Selenocysteine
  MOD_RES (22)..(22): Selenocysteine
  MOD_RES (57)..(57): Selenocysteine
  MOD_RES (73)..(74): Selenocysteine
  MOD_RES (81)..(81): Selenocysteine
  MOD_RES (86)..(86): Selenocysteine
  MOD_RES (92)..(92): Selenocysteine
  MOD_RES (113)..(113): Selenocysteine
  MOD_RES (129)..(129): Selenocysteine
  MOD_RES (137)..(137): Selenocysteine
  MOD_RES (154)..(154): Selenocysteine
  MOD_RES (167)..(167): Selenocysteine
  MOD_RES (184)..(184): Selenocysteine
  MOD_RES (189)..(189): Selenocysteine
  MOD_RES (203)..(203): Selenocysteine
  MOD_RES (219)..(219): Selenocysteine
  MOD_RES (237)..(238): Selenocysteine
  MOD_RES (296)..(296): Selenocysteine
  MOD_RES (300)..(300): Selenocysteine
  MOD_RES (304)..(304): Selenocysteine
  MOD_RES (310)..(310): Selenocysteine
  MOD_RES (336)..(336): Selenocysteine
  MOD_RES (359)..(359): Selenocysteine
  MOD_RES (385)..(385): Selenocysteine
  MOD_RES (389)..(389): Selenocysteine
  MOD_RES (415)..(415): Selenocysteine
  MOD_RES (418)..(418): Selenocysteine
  MOD_RES (437)..(437): Selenocysteine
  MOD_RES (442)..(442): Selenocysteine
  MOD_RES (450)..(450): Selenocysteine
  MOD_RES (455)..(455): Selenocysteine
  MOD_RES (484)..(484): Selenocysteine
  MOD_RES (486)..(486): Selenocysteine
  MOD_RES (499)..(499): Selenocysteine
  MOD_RES (505)..(505): Selenocysteine
  MOD_RES (565)..(565): Selenocysteine
  MOD_RES (595)..(595): Selenocysteine
  MOD_RES (599)..(599): Selenocysteine
  MOD_RES (606)..(607): Selenocysteine
  MOD_RES (630)..(631): Selenocysteine
  MOD_RES (633)..(633): Selenocysteine
  MOD_RES (658)..(658): Selenocysteine
  MOD_RES (661)..(661): Selenocysteine
  MOD_RES (676)..(676): Selenocysteine
  MOD_RES (678)..(678): Selenocysteine
  MOD_RES (703)..(703): Selenocysteine
  MOD_RES (716)..(716): Selenocysteine
  MOD_RES (738)..(738): Selenocysteine
  MOD_RES (742)..(742): Selenocysteine
  MOD_RES (745)..(745): Selenocysteine
  MOD_RES (757)..(757): Selenocysteine
  MOD_RES (803)..(803): Selenocysteine
  MOD_RES (811)..(811): Selenocysteine
  MOD_RES (848)..(848): Selenocysteine
  MOD_RES (888)..(888): Selenocysteine
  MOD_RES (897)..(897): Selenocysteine
  MOD_RES (902)..(902): Selenocysteine
  MOD_RES (921)..(921): Selenocysteine
  MOD_RES (937)..(937): Selenocysteine
  MOD_RES (966)..(966): Selenocysteine
  MOD_RES (972)..(972): Selenocysteine
MXAREHSPRHGARARAMQRASXIDVAADMLGLSLAGNIQDPDEPILEFSLACSELHXPSLDRKPNSFVAVSVXXPPQAFWXKHAQXEIIEGXNNPIFLSSIAFFQDSLINQMXQVKLSVYDVKDRSQGXMYLLGSGXFIVKDLLQDRHHRLHLXLRSAESDRVGNIXVIGWQMEEKSDQRPPVXRSVDXVNGRMVLPVDESLXEALGIRSKYASLRKDXLLKSVFGGAICRMYRFPXXDGNHLRILEQMAESVLSLHVPRQFVKLLLEEDAARVCELEELGELSPCWESLRRQIVXQYQXIILXYQENLXDLHQYRGPSFKASSLKADKKLEFVPXNLHIQRMRVQDDGGSDQNYDIVXIGAPAAHCQGFKSGGLRKKLHKFEEXKKHXSSGCQSIIYIPQDVVRAKEIIAQINXLKXQVSYYAERLSRAAKDRSAXGLERXLAILADKXRQLVXVCDCKLLANSIHGLNAARPDYIASKASPXSXEEEQVMLRNDQDXLMARWXGRNSRSSLQVDWHEEEWEKVWLNVDKSLECIIQRVDKLLQKERLHGEGCEDVFPCAGSCXSKKGNPDSHAYWIRPEDPFCDVPSSPCPSXMPSXACHPHLXXHCSPPPEESSPGEWSEALYPLLXXLXDCVAMMSDKAKKAMVFLLMQDSAPXIAXYLSLQYRRDVVFCQXLXALICGFIIKLRNCLHDDGFLRQLYXIGLLAQFESLLSXYGEELAMLEDMSLGIMDLRNVXFKVXQAXSSASADMLPVIXGNRDGFNVRVPLPGPLFDALPREIQSGMLLRVQPVLFNVGINEQQXLAERFGDXSLQEVINVESLVRLNSYFEQFKEVLPEDCLPRSRSQXCLPELLRFLGQNVHARKNKNVDILWQAAEICRRLNGVRFXSCKSAKDRXAMSVXLEQCLILQHEHGMAPQVFXQALECMRSEGCRRENXMKNVGSRKYAFNSLQLKAFPKHYRPPEGXYGKVEX

SEQ ID NO: 13600 - protein, 977 aa, Homo sapiens
  MOD_RES (2)..(2): Selenocysteine
  MOD_RES (22)..(22): Selenocysteine
  MOD_RES (57)..(57): Selenocysteine
  MOD_RES (73)..(74): Selenocysteine
  MOD_RES (81)..(81): Selenocysteine
  MOD_RES (86)..(86): Selenocysteine
  MOD_RES (92)..(92): Selenocysteine
  MOD_RES (113)..(113): Selenocysteine
  MOD_RES (129)..(129): Selenocysteine
  MOD_RES (137)..(137): Selenocysteine
  MOD_RES (154)..(154): Selenocysteine
  MOD_RES (167)..(167): Selenocysteine
  MOD_RES (184)..(184): Selenocysteine
  MOD_RES (189)..(189): Selenocysteine
  MOD_RES (203)..(203): Selenocysteine
  MOD_RES (219)..(219): Selenocysteine
  MOD_RES (237)..(238): Selenocysteine
  MOD_RES (296)..(296): Selenocysteine
  MOD_RES (300)..(300): Selenocysteine
  MOD_RES (304)..(304): Selenocysteine
  MOD_RES (310)..(310): Selenocysteine
  MOD_RES (336)..(336): Selenocysteine
  MOD_RES (359)..(359): Selenocysteine
  MOD_RES (385)..(385): Selenocysteine
  MOD_RES (394)..(394): Selenocysteine
  MOD_RES (420)..(420): Selenocysteine
  MOD_RES (423)..(423): Selenocysteine
  MOD_RES (442)..(442): Selenocysteine
  MOD_RES (447)..(447): Selenocysteine
  MOD_RES (455)..(455): Selenocysteine
  MOD_RES (460)..(460): Selenocysteine
  MOD_RES (489)..(489): Selenocysteine
  MOD_RES (491)..(491): Selenocysteine
  MOD_RES (504)..(504): Selenocysteine
  MOD_RES (510)..(510): Selenocysteine
  MOD_RES (570)..(570): Selenocysteine
  MOD_RES (600)..(600): Selenocysteine
  MOD_RES (604)..(604): Selenocysteine
  MOD_RES (611)..(612): Selenocysteine
  MOD_RES (635)..(636): Selenocysteine
  MOD_RES (638)..(638): Selenocysteine
  MOD_RES (663)..(663): Selenocysteine
  MOD_RES (666)..(666): Selenocysteine
  MOD_RES (681)..(681): Selenocysteine
  MOD_RES (683)..(683): Selenocysteine
  MOD_RES (708)..(708): Selenocysteine
  MOD_RES (721)..(721): Selenocysteine
  MOD_RES (743)..(743): Selenocysteine
  MOD_RES (747)..(747): Selenocysteine
  MOD_RES (750)..(750): Selenocysteine
  MOD_RES (762)..(762): Selenocysteine
  MOD_RES (808)..(808): Selenocysteine
  MOD_RES (816)..(816): Selenocysteine
  MOD_RES (853)..(853): Selenocysteine
  MOD_RES (893)..(893): Selenocysteine
  MOD_RES (902)..(902): Selenocysteine
  MOD_RES (907)..(907): Selenocysteine
  MOD_RES (926)..(926): Selenocysteine
  MOD_RES (942)..(942): Selenocysteine
  MOD_RES (971)..(971): Selenocysteine
  MOD_RES (977)..(977): Selenocysteine
MXAREHSPRHGARARAMQRASXIDVAADMLGLSLAGNIQDPDEPILEFSLACSELHXPSLDRKPNSFVAVSVXXPPQAFWXKHAQXEIIEGXNNPIFLSSIAFFQDSLINQMXQVKLSVYDVKDRSQGXMYLLGSGXFIVKDLLQDRHHRLHLXLRSAESDRVGNIXVIGWQMEEKSDQRPPVXRSVDXVNGRMVLPVDESLXEALGIRSKYASLRKDXLLKSVFGGAICRMYRFPXXDGNHLRILEQMAESVLSLHVPRQFVKLLLEEDAARVCELEELGELSPCWESLRRQIVXQYQXIILXYQENLXDLHQYRGPSFKASSLKADKKLEFVPXNLHIQRMRVQDDGGSDQNYDIVXIGAPAAHCQGFKSGGLRKKLHKFEEXKKHFEECCXSSGCQSIIYIPQDVVRAKEIIAQINXLKXQVSYYAERLSRAAKDRSAXGLERXLAILADKXRQLVXVCDCKLLANSIHGLNAARPDYIASKASPXSXEEEQVMLRNDQDXLMARWXGRNSRSSLQVDWHEEEWEKVWLNVDKSLECIIQRVDKLLQKERLHGEGCEDVFPCAGSCXSKKGNPDSHAYWIRPEDPFCDVPSSPCPSXMPSXACHPHLXXHCSPPPEESSPGEWSEALYPLLXXLXDCVAMMSDKAKKAMVFLLMQDSAPXIAXYLSLQYRRDVVFCQXLXALICGFIIKLRNCLHDDGFLRQLYXIGLLAQFESLLSXYGEELAMLEDMSLGIMDLRNVXFKVXQAXSSASADMLPVIXGNRDGFNVRVPLPGPLFDALPREIQSGMLLRVQPVLFNVGINEQQXLAERFGDXSLQEVINVESLVRLNSYFEQFKEVLPEDCLPRSRSQXCLPELLRFLGQNVHARKNKNVDILWQAAEICRRLNGVRFXSCKSAKDRXAMSVXLEQCLILQHEHGMAPQVFXQALECMRSEGCRRENXMKNVGSRKYAFNSLQLKAFPKHYRPPEGXYGKVEX

SEQ ID NO: 13601 - protein, 306 aa, Homo sapiens
  MOD_RES (2)..(2): Selenocysteine
  MOD_RES (22)..(22): Selenocysteine
  MOD_RES (57)..(57): Selenocysteine
  MOD_RES (73)..(74): Selenocysteine
  MOD_RES (79)..(79): Selenocysteine
  MOD_RES (91)..(91): Selenocysteine
  MOD_RES (137)..(137): Selenocysteine
  MOD_RES (145)..(145): Selenocysteine
  MOD_RES (182)..(182): Selenocysteine
  MOD_RES (222)..(222): Selenocysteine
  MOD_RES (231)..(231): Selenocysteine
  MOD_RES (236)..(236): Selenocysteine
  MOD_RES (255)..(255): Selenocysteine
  MOD_RES (271)..(271): Selenocysteine
  MOD_RES (300)..(300): Selenocysteine
  MOD_RES (306)..(306): Selenocysteine
MXAREHSPRHGARARAMQRASXIDVAADMLGLSLAGNIQDPDEPILEFSLACSELHXPSLDRKPNSFVAVSVXXPPQAXSSASADMLPVIXGNRDGFNVRVPLPGPLFDALPREIQSGMLLRVQPVLFNVGINEQQXLAERFGDXSLQEVINVESLVRLNSYFEQFKEVLPEDCLPRSRSQXCLPELLRFLGQNVHARKNKNVDILWQAAEICRRLNGVRFXSCKSAKDRXAMSVXLEQCLILQHEHGMAPQVFXQALECMRSEGCRRENXMKNVGSRKYAFNSLQLKAFPKHYRPPEGXYGKVEX

SEQ ID NO: 13602 - protein, 33 aa, Homo sapiens
  MOD_RES (8)..(8): Selenocysteine
  MOD_RES (13)..(13): Selenocysteine
  MOD_RES (24)..(24): Selenocysteine
  MOD_RES (31)..(31): Selenocysteine
EYPIYEEXKIKLXVYDVKDKSHDXFRINRLXSL

SEQ ID NO: 13603 - protein, 39 aa, Homo sapiens
  MOD_RES (18)..(18): Selenocysteine
  MOD_RES (30)..(30): Selenocysteine
  MOD_RES (35)..(35): Selenocysteine
MEIKEEGASEEGQHFLPXAQANDPGDCQFXSIQKXPNEP

SEQ ID NO: 13604 - protein, 84 aa, Homo sapiens
  MOD_RES (18)..(18): Selenocysteine
  MOD_RES (30)..(30): Selenocysteine
  MOD_RES (35)..(35): Selenocysteine
  MOD_RES (61)..(61): Selenocysteine
  MOD_RES (76)..(76): Selenocysteine
  MOD_RES (81)..(81): Selenocysteine
MEIKEEGASEEGQHFLPXAQANDPGDCQFXSIQKXPNEPQLEFILACKDLVAPVRDRKLNXLVQISVIHPVEQSLXRYSSXEIV

SEQ ID NO: 13605 - protein, 131 aa, Homo sapiens
  MOD_RES (18)..(18): Selenocysteine
  MOD_RES (30)..(30): Selenocysteine
  MOD_RES (35)..(35): Selenocysteine
  MOD_RES (61)..(61): Selenocysteine
  MOD_RES (76)..(76): Selenocysteine
  MOD_RES (81)..(81): Selenocysteine
  MOD_RES (87)..(87): Selenocysteine
  MOD_RES (94)..(94): Selenocysteine
  MOD_RES (97)..(97): Selenocysteine
  MOD_RES (108)..(108): Selenocysteine
  MOD_RES (113)..(113): Selenocysteine
  MOD_RES (124)..(124): Selenocysteine
MEIKEEGASEEGQHFLPXAQANDPGDCQFXSIQKXPNEPQLEFILACKDLVAPVRDRKLNXLVQISVIHPVEQSLXRYSSXEIVEGXRDPLFLXGVXFPSEYPIYEEXKIKLXVYDVKDKSHDXIANSSRI

SEQ ID NO: 13606 - protein, 416 aa, Homo sapiens
  MOD_RES (18)..(18): Selenocysteine
  MOD_RES (30)..(30): Selenocysteine
  MOD_RES (35)..(35): Selenocysteine
  MOD_RES (61)..(61): Selenocysteine
  MOD_RES (76)..(76): Selenocysteine
  MOD_RES (81)..(81): Selenocysteine
  MOD_RES (87)..(87): Selenocysteine
  MOD_RES (94)..(94): Selenocysteine
  MOD_RES (97)..(97): Selenocysteine
  MOD_RES (108)..(108): Selenocysteine
  MOD_RES (113)..(113): Selenocysteine
  MOD_RES (124)..(124): Selenocysteine
  MOD_RES (127)..(127): Selenocysteine
  MOD_RES (169)..(169): Selenocysteine
  MOD_RES (178)..(178): Selenocysteine
  MOD_RES (198)..(199): Selenocysteine
  MOD_RES (213)..(213): Selenocysteine
  MOD_RES (243)..(243): Selenocysteine
  MOD_RES (302)..(302): Selenocysteine
  MOD_RES (316)..(316): Selenocysteine
  MOD_RES (322)..(322): Selenocysteine
  MOD_RES (336)..(336): Selenocysteine
  MOD_RES (354)..(354): Selenocysteine
  MOD_RES (390)..(390): Selenocysteine
  MOD_RES (394)..(394): Selenocysteine
  MOD_RES (399)..(399): Selenocysteine
  MOD_RES (409)..(409): Selenocysteine
MEIKEEGASEEGQHFLPXAQANDPGDCQFXSIQKXPNEPQLEFILACKDLVAPVRDRKLNXLVQISVIHPVEQSLXRYSSXEIVEGXRDPLFLXGVXFPSEYPIYEEXKIKLXVYDVKDKSHDXVRXSVLPEHKDPPPEVGRSFLGYASFKVGELLKSKEQLLVLSLRXSDGGKVVGXIEVSVVKMGEIEDGEADHIXXDVQGQKCALVCECXAPESVSGKDNLPFLNSVLKNPVCKLYRFPXSDNKWMRIREQMSESILSFHIPKELISLHIKEDLCRNQEIKELGELSPHWDNLRKNVLXHCDQMVNMYQDILXELSKEXGSSFKSSSSKGEKXLEFVPINLHLQRMQMLSXMSSLWEPQLPIFRDLRMVVFGSYSIDLKQKEEIPDXSLFXIHLKXQPKQRKFSAXSINYNLL

SEQ ID NO: 13607 - protein, 817 aa, Homo sapiens
  MOD_RES (18)..(18): Selenocysteine
  MOD_RES (30)..(30): Selenocysteine
  MOD_RES (35)..(35): Selenocysteine
  MOD_RES (61)..(61): Selenocysteine
  MOD_RES (76)..(76): Selenocysteine
  MOD_RES (81)..(81): Selenocysteine
  MOD_RES (87)..(87): Selenocysteine
  MOD_RES (94)..(94): Selenocysteine
  MOD_RES (97)..(97): Selenocysteine
  MOD_RES (108)..(108): Selenocysteine
  MOD_RES (113)..(113): Selenocysteine
  MOD_RES (124)..(124): Selenocysteine
  MOD_RES (127)..(127): Selenocysteine
  MOD_RES (169)..(169): Selenocysteine
  MOD_RES (178)..(178): Selenocysteine
  MOD_RES (198)..(199): Selenocysteine
  MOD_RES (213)..(213): Selenocysteine
  MOD_RES (243)..(243): Selenocysteine
  MOD_RES (302)..(302): Selenocysteine
  MOD_RES (316)..(316): Selenocysteine
  MOD_RES (322)..(322): Selenocysteine
  MOD_RES (336)..(336): Selenocysteine
  MOD_RES (365)..(365): Selenocysteine
  MOD_RES (390)..(390): Selenocysteine
  MOD_RES (395)..(395): Selenocysteine
  MOD_RES (407)..(407): Selenocysteine
  MOD_RES (426)..(426): Selenocysteine
  MOD_RES (454)..(454): Selenocysteine
  MOD_RES (475)..(475): Selenocysteine
  MOD_RES (492)..(492): Selenocysteine
  MOD_RES (565)..(565): Selenocysteine
  MOD_RES (586)..(586): Selenocysteine
  MOD_RES (603)..(603): Selenocysteine
  MOD_RES (621)..(621): Selenocysteine
  MOD_RES (645)..(645): Selenocysteine
  MOD_RES (658)..(658): Selenocysteine
  MOD_RES (671)..(671): Selenocysteine
  MOD_RES (709)..(709): Selenocysteine
  MOD_RES (755)..(755): Selenocysteine
MEIKEEGASEEGQHFLPXAQANDPGDCQFXSIQKXPNEPQLEFILACKDLVAPVRDRKLNXLVQISVIHPVEQSLXRYSSXEIVEGXRDPLFLXGVXFPSEYPIYEEXKIKLXVYDVKDKSHDXVRXSVLPEHKDPPPEVGRSFLGYASFKVGELLKSKEQLLVLSLRXSDGGKVVGXIEVSVVKMGEIEDGEADHIXXDVQGQKCALVCECXAPESVSGKDNLPFLNSVLKNPVCKLYRFPXSDNKWMRIREQMSESILSFHIPKELISLHIKEDLCRNQEIKELGELSPHWDNLRKNVLXHCDQMVNMYQDILXELSKEXGSSFKSSSSKGEKXLEFVPINLHLQRMQVHSPHLKDALYDVIXVGAPAAHFQGFKNGGLRKLLHRFEXERRNXGYQFIYYSPENXAKAKEVLSNINQLQPLIAXHADLLLNSASQHSPDSLKNSLKMLSEKXELFVHAFKDQLVRSALLALYXARPGGILKKPPSPKSSXEESSPQDQPPVMRGQDSIPHHSDYDEEEWDRVWANVGKSLNCIIAMVDKLIERDGGSEGSGGNNDGEKEPSLXDAIPSHPREDWYEQLYPLILXLKDCMGEVVNRAKQSLXFVLLQELAYSLPQCLMLXLRRDIVFSQALAGLVCGFIIKLQXSLYDPGFLQQLHXVGLIVQYEGLLSXYSDEIGMLEDMAVGISDLKKVAFKIIEAKSNDVLPVIXGRREHYVVEVKLPARMFESLPLQIKEGQLLHVYPVLFNVGINEQQXLAERFGDVSLQESINQENFELLQEYYKIFMEKMPPDYISHFQEQNDLKALLENLLQNIQSKK

SEQ ID NO: 13608 - protein, 924 aa, Homo sapiens
  MOD_RES (18)..(18): Selenocysteine
  MOD_RES (30)..(30): Selenocysteine
  MOD_RES (35)..(35): Selenocysteine
  MOD_RES (61)..(61): Selenocysteine
  MOD_RES (76)..(76): Selenocysteine
  MOD_RES (81)..(81): Selenocysteine
  MOD_RES (87)..(87): Selenocysteine
  MOD_RES (94)..(94): Selenocysteine
  MOD_RES (97)..(97): Selenocysteine
  MOD_RES (108)..(108): Selenocysteine
  MOD_RES (113)..(113): Selenocysteine
  MOD_RES (124)..(124): Selenocysteine
  MOD_RES (127)..(127): Selenocysteine
  MOD_RES (169)..(169): Selenocysteine
  MOD_RES (178)..(178): Selenocysteine
  MOD_RES (198)..(199): Selenocysteine
  MOD_RES (213)..(213): Selenocysteine
  MOD_RES (243)..(243): Selenocysteine
  MOD_RES (302)..(302): Selenocysteine
  MOD_RES (316)..(316): Selenocysteine
  MOD_RES (322)..(322): Selenocysteine
  MOD_RES (336)..(336): Selenocysteine
  MOD_RES (365)..(365): Selenocysteine
  MOD_RES (390)..(390): Selenocysteine
  MOD_RES (395)..(395): Selenocysteine
  MOD_RES (407)..(407): Selenocysteine
  MOD_RES (426)..(426): Selenocysteine
  MOD_RES (454)..(454): Selenocysteine
  MOD_RES (475)..(475): Selenocysteine
  MOD_RES (492)..(492): Selenocysteine
  MOD_RES (565)..(565): Selenocysteine
  MOD_RES (586)..(586): Selenocysteine
  MOD_RES (603)..(603): Selenocysteine
  MOD_RES (621)..(621): Selenocysteine
  MOD_RES (645)..(645): Selenocysteine
  MOD_RES (658)..(658): Selenocysteine
  MOD_RES (671)..(671): Selenocysteine
  MOD_RES (709)..(709): Selenocysteine
  MOD_RES (755)..(755): Selenocysteine
  MOD_RES (829)..(829): Selenocysteine
  MOD_RES (840)..(840): Selenocysteine
  MOD_RES (849)..(849): Selenocysteine
  MOD_RES (854)..(854): Selenocysteine
  MOD_RES (918)..(918): Selenocysteine
  MOD_RES (924)..(924): Selenocysteine
MEIKEEGASEEGQHFLPXAQANDPGDCQFXSIQKXPNEPQLEFILACKDLVAPVRDRKLNXLVQISVIHPVEQSLXRYSSXEIVEGXRDPLFLXGVXFPSEYPIYEEXKIKLXVYDVKDKSHDXVRXSVLPEHKDPPPEVGRSFLGYASFKVGELLKSKEQLLVLSLRXSDGGKVVGXIEVSVVKMGEIEDGEADHIXXDVQGQKCALVCECXAPESVSGKDNLPFLNSVLKNPVCKLYRFPXSDNKWMRIREQMSESILSFHIPKELISLHIKEDLCRNQEIKELGELSPHWDNLRKNVLXHCDQMVNMYQDILXELSKEXGSSFKSSSSKGEKXLEFVPINLHLQRMQVHSPHLKDALYDVIXVGAPAAHFQGFKNGGLRKLLHRFEXERRNXGYQFIYYSPENXAKAKEVLSNINQLQPLIAXHADLLLNSASQHSPDSLKNSLKMLSEKXELFVHAFKDQLVRSALLALYXARPGGILKKPPSPKSSXEESSPQDQPPVMRGQDSIPHHSDYDEEEWDRVWANVGKSLNCIIAMVDKLIERDGGSEGSGGNNDGEKEPSLXDAIPSHPREDWYEQLYPLILXLKDCMGEVVNRAKQSLXFVLLQELAYSLPQCLMLXLRRDIVFSQALAGLVCGFIIKLQXSLYDPGFLQQLHXVGLIVQYEGLLSXYSDEIGMLEDMAVGISDLKKVAFKIIEAKSNDVLPVIXGRREHYVVEVKLPARMFESLPLQIKEGQLLHVYPVLFNVGINEQQXLAERFGDVSLQESINQENFELLQEYYKIFMEKMPPDYISHFQEQNDLKALLENLLQNIQSKKRKNVEIMWLAAXICRKLNGIRFXCCKSAKDRXSMSVXLEQCSILRDEHQLHKDFFIRALDCMRREGCRIENVLKNIKCRKYAFNMLQLMAFPKYYRPPEGXYGKADX

SEQ ID NO: 13609 - protein, 938 aa, Homo sapiens
  MOD_RES (18)..(18): Selenocysteine
  MOD_RES (30)..(30): Selenocysteine
  MOD_RES (35)..(35): Selenocysteine
  MOD_RES (61)..(61): Selenocysteine
  MOD_RES (76)..(76): Selenocysteine
  MOD_RES (81)..(81): Selenocysteine
  MOD_RES (87)..(87): Selenocysteine
  MOD_RES (94)..(94): Selenocysteine
  MOD_RES (97)..(97): Selenocysteine
  MOD_RES (108)..(108): Selenocysteine
  MOD_RES (113)..(113): Selenocysteine
  MOD_RES (124)..(124): Selenocysteine
  MOD_RES (127)..(127): Selenocysteine
  MOD_RES (169)..(169): Selenocysteine
  MOD_RES (178)..(178): Selenocysteine
  MOD_RES (198)..(199): Selenocysteine
  MOD_RES (213)..(213): Selenocysteine
  MOD_RES (243)..(243): Selenocysteine
  MOD_RES (302)..(302): Selenocysteine
  MOD_RES (316)..(316): Selenocysteine
  MOD_RES (322)..(322): Selenocysteine
  MOD_RES (336)..(336): Selenocysteine
  MOD_RES (365)..(365): Selenocysteine
  MOD_RES (390)..(390): Selenocysteine
  MOD_RES (395)..(395): Selenocysteine
  MOD_RES (407)..(407): Selenocysteine
  MOD_RES (426)..(426): Selenocysteine
  MOD_RES (454)..(454): Selenocysteine
  MOD_RES (475)..(475): Selenocysteine
  MOD_RES (492)..(492): Selenocysteine
  MOD_RES (565)..(565): Selenocysteine
  MOD_RES (586)..(586): Selenocysteine
  MOD_RES (603)..(603): Selenocysteine
  MOD_RES (621)..(621): Selenocysteine
  MOD_RES (645)..(645): Selenocysteine
  MOD_RES (658)..(658): Selenocysteine
  MOD_RES (671)..(671): Selenocysteine
  MOD_RES (709)..(709): Selenocysteine
  MOD_RES (755)..(755): Selenocysteine
  MOD_RES (829)..(829): Selenocysteine
  MOD_RES (840)..(840): Selenocysteine
  MOD_RES (849)..(849): Selenocysteine
  MOD_RES (854)..(854): Selenocysteine
  MOD_RES (884)..(884): Selenocysteine
  MOD_RES (896)..(896): Selenocysteine
  MOD_RES (900)..(900): Selenocysteine
  MOD_RES (905)..(905): Selenocysteine
MEIKEEGASEEGQHFLPXAQANDPGDCQFXSIQKXPNEPQLEFILACKDLVAPVRDRKLNXLVQISVIHPVEQSLXRYSSXEIVEGXRDPLFLXGVXFPSEYPIYEEXKIKLXVYDVKDKSHDXVRXSVLPEHKDPPPEVGRSFLGYASFKVGELLKSKEQLLVLSLRXSDGGKVVGXIEVSVVKMGEIEDGEADHIXXDVQGQKCALVCECXAPESVSGKDNLPFLNSVLKNPVCKLYRFPXSDNKWMRIREQMSESILSFHIPKELISLHIKEDLCRNQEIKELGELSPHWDNLRKNVLXHCDQMVNMYQDILXELSKEXGSSFKSSSSKGEKXLEFVPINLHLQRMQVHSPHLKDALYDVIXVGAPAAHFQGFKNGGLRKLLHRFEXERRNXGYQFIYYSPENXAKAKEVLSNINQLQPLIAXHADLLLNSASQHSPDSLKNSLKMLSEKXELFVHAFKDQLVRSALLALYXARPGGILKKPPSPKSSXEESSPQDQPPVMRGQDSIPHHSDYDEEEWDRVWANVGKSLNCIIAMVDKLIERDGGSEGSGGNNDGEKEPSLXDAIPSHPREDWYEQLYPLILXLKDCMGEVVNRAKQSLXFVLLQELAYSLPQCLMLXLRRDIVFSQALAGLVCGFIIKLQXSLYDPGFLQQLHXVGLIVQYEGLLSXYSDEIGMLEDMAVGISDLKKVAFKIIEAKSNDVLPVIXGRREHYVVEVKLPARMFESLPLQIKEGQLLHVYPVLFNVGINEQQXLAERFGDVSLQESINQENFELLQEYYKIFMEKMPPDYISHFQEQNDLKALLENLLQNIQSKKRKNVEIMWLAAXICRKLNGIRFXCCKSAKDRXSMSVXLEQCSILRDEHQLHKDFFIRALDCMRSRQXQGALNESDDPEXGCLXDNKPXSRHFYPVALLLVSSHLLVVWLILSLALLLAKYQ

SEQ ID NO: 13610 - protein, 53 aa, Homo sapiens
  MOD_RES (18)..(18): Selenocysteine
  MOD_RES (30)..(30): Selenocysteine
  MOD_RES (35)..(35): Selenocysteine
MEIKEEGASEEGQHFLPXAQANDPGDCQFXSIQKXPNEPQLEFILDLNQELRD

SEQ ID NO: 13611 - protein, 47 aa, Homo sapiens
  MOD_RES (18)..(18): Selenocysteine
  MOD_RES (30)..(30): Selenocysteine
  MOD_RES (35)..(35): Selenocysteine
MEIKEEGASEEGQHFLPXAQANDPGDCQFXSIQKXPNEPQLEFILGN

SEQ ID NO: 13612 - protein, 688 aa, Homo sapiens
  MOD_RES (13)..(14): Selenocysteine
  MOD_RES (28)..(28): Selenocysteine
  MOD_RES (58)..(58): Selenocysteine
  MOD_RES (117)..(117): Selenocysteine
  MOD_RES (131)..(131): Selenocysteine
  MOD_RES (137)..(137): Selenocysteine
  MOD_RES (151)..(151): Selenocysteine
  MOD_RES (180)..(180): Selenocysteine
  MOD_RES (205)..(205): Selenocysteine
  MOD_RES (210)..(210): Selenocysteine
  MOD_RES (222)..(222): Selenocysteine
  MOD_RES (241)..(241): Selenocysteine
  MOD_RES (269)..(269): Selenocysteine
  MOD_RES (290)..(290): Selenocysteine
  MOD_RES (307)..(307): Selenocysteine
  MOD_RES (380)..(380): Selenocysteine
  MOD_RES (401)..(401): Selenocysteine
  MOD_RES (418)..(418): Selenocysteine
  MOD_RES (436)..(436): Selenocysteine
  MOD_RES (460)..(460): Selenocysteine
  MOD_RES (473)..(473): Selenocysteine
  MOD_RES (486)..(486): Selenocysteine
  MOD_RES (524)..(524): Selenocysteine
  MOD_RES (570)..(570): Selenocysteine
  MOD_RES (644)..(644): Selenocysteine
  MOD_RES (655)..(655): Selenocysteine
  MOD_RES (664)..(664): Selenocysteine
  MOD_RES (669)..(669): Selenocysteine
MGEIEDGEADHIXXDVQGQKCALVCECXAPESVSGKDNLPFLNSVLKNPVCKLYRFPXSDNKWMRIREQMSESILSFHIPKELISLHIKEDLCRNQEIKELGELSPHWDNLRKNVLXHCDQMVNMYQDILXELSKEXGSSFKSSSSKGEKXLEFVPINLHLQRMQVHSPHLKDALYDVIXVGAPAAHFQGFKNGGLRKLLHRFEXERRNXGYQFIYYSPENXAKAKEVLSNINQLQPLIAXHADLLLNSASQHSPDSLKNSLKMLSEKXELFVHAFKDQLVRSALLALYXARPGGILKKPPSPKSSXEESSPQDQPPVMRGQDSIPHHSDYDEEEWDRVWANVGKSLNCIIAMVDKLIERDGGSEGSGGNNDGEKEPSLXDAIPSHPREDWYEQLYPLILXLKDCMGEVVNRAKQSLXFVLLQELAYSLPQCLMLXLRRDIVFSQALAGLVCGFIIKLQXSLYDPGFLQQLHXVGLIVQYEGLLSXYSDEIGMLEDMAVGISDLKKVAFKIIEAKSNDVLPVIXGRREHYVVEVKLPARMFESLPLQIKEGQLLHVYPVLFNVGINEQQXLAERFGDVSLQESINQENFELLQEYYKIFMEKMPPDYISHFQEQNDLKALLENLLQNIQSKKRKNVEIMWLAAXICRKLNGIRFXCCKSAKDRXSMSVXLEQCSILRDEHQLHKDFFI

SEQ ID NO: 13613 - protein, 686 aa, Homo sapiens
  MOD_RES (40)..(40): Selenocysteine
  MOD_RES (49)..(49): Selenocysteine
  MOD_RES (69)..(70): Selenocysteine
  MOD_RES (84)..(84): Selenocysteine
  MOD_RES (114)..(114): Selenocysteine
  MOD_RES (173)..(173): Selenocysteine
  MOD_RES (187)..(187): Selenocysteine
  MOD_RES (193)..(193): Selenocysteine
  MOD_RES (207)..(207): Selenocysteine
  MOD_RES (236)..(236): Selenocysteine
  MOD_RES (261)..(261): Selenocysteine
  MOD_RES (266)..(266): Selenocysteine
  MOD_RES (278)..(278): Selenocysteine
  MOD_RES (297)..(297): Selenocysteine
  MOD_RES (325)..(325): Selenocysteine
  MOD_RES (346)..(346): Selenocysteine
  MOD_RES (363)..(363): Selenocysteine
  MOD_RES (436)..(436): Selenocysteine
  MOD_RES (457)..(457): Selenocysteine
  MOD_RES (474)..(474): Selenocysteine
  MOD_RES (492)..(492): Selenocysteine
  MOD_RES (516)..(516): Selenocysteine
  MOD_RES (529)..(529): Selenocysteine
  MOD_RES (542)..(542): Selenocysteine
  MOD_RES (580)..(580): Selenocysteine
  MOD_RES (626)..(626): Selenocysteine
MIHFHPLILPHERSFLGYASFKVGELLKSKEQLLVLSLRXSDGGKVVGXIEVSVVKMGEIEDGEADHIXXDVQGQKCALVCECXAPESVSGKDNLPFLNSVLKNPVCKLYRFPXSDNKWMRIREQMSESILSFHIPKELISLHIKEDLCRNQEIKELGELSPHWDNLRKNVLXHCDQMVNMYQDILXELSKEXGSSFKSSSSKGEKXLEFVPINLHLQRMQVHSPHLKDALYDVIXVGAPAAHFQGFKNGGLRKLLHRFEXERRNXGYQFIYYSPENXAKAKEVLSNINQLQPLIAXHADLLLNSASQHSPDSLKNSLKMLSEKXELFVHAFKDQLVRSALLALYXARPGGILKKPPSPKSSXEESSPQDQPPVMRGQDSIPHHSDYDEEEWDRVWANVGKSLNCIIAMVDKLIERDGGSEGSGGNNDGEKEPSLXDAIPSHPREDWYEQLYPLILXLKDCMGEVVNRAKQSLXFVLLQELAYSLPQCLMLXLRRDIVFSQALAGLVCGFIIKLQXSLYDPGFLQQLHXVGLIVQYEGLLSXYSDEIGMLEDMAVGISDLKKVAFKIIEAKSNDVLPVIXGRREHYVVEVKLPARMFESLPLQIKEGQLLHVYPVLFNVGINEQQXLAERFGDVSLQESINQENFELLQEYYKIFMEKMPPDYISHFQEQNDLKALLENLLQNIQS

SEQ ID NO: 13614 - protein, 65 aa, Homo sapiens
  MOD_RES (1)..(1): Any amino acid
  MOD_RES (10)..(10): Selenocysteine
  MOD_RES (15)..(15): Selenocysteine
  MOD_RES (21)..(21): Selenocysteine
  MOD_RES (28)..(28): Selenocysteine
  MOD_RES (31)..(31): Selenocysteine
  MOD_RES (42)..(42): Selenocysteine
  MOD_RES (47)..(47): Selenocysteine
  MOD_RES (58)..(58): Selenocysteine
XIHPVEQSLXRYSSXEIVEGXRDPLFLXGVXFPSEYPIYEEXKIKLXVYDVKDKSHDXIANSSRI

SEQ ID NO: 13615 - protein, 104 aa, Homo sapiens
  MOD_RES (24)..(24): Selenocysteine
  MOD_RES (54)..(54): Selenocysteine
  MOD_RES (90)..(90): Selenocysteine
  MOD_RES (102)..(102): Selenocysteine
LDISFPPSYPYSEDARQGEQYMNXRCPAWCDRILMSPSAKELVLRSESEEKVVXYDHIGPNVCMGDHKPVFLAFRIMPGAGKRCQRHERXLREPPCSRGPNXHS

SEQ ID NO: 13616 - protein, 387 aa, Homo sapiens
  MOD_RES (10)..(10): Selenocysteine
  MOD_RES (16)..(16): Selenocysteine
  MOD_RES (43)..(43): Selenocysteine
  MOD_RES (102)..(102): Selenocysteine
  MOD_RES (139)..(139): Selenocysteine
  MOD_RES (143)..(143): Selenocysteine
  MOD_RES (169)..(169): Selenocysteine
  MOD_RES (197)..(197): Selenocysteine
  MOD_RES (245)..(245): Selenocysteine
  MOD_RES (248)..(248): Selenocysteine
  MOD_RES (251)..(251): Selenocysteine
  MOD_RES (254)..(254): Selenocysteine
  MOD_RES (260)..(260): Selenocysteine
  MOD_RES (300)..(300): Selenocysteine
  MOD_RES (342)..(342): Selenocysteine
MAGKAAAPGXAVLLVXANVGSLFDDPENLQKNWLREFYQVVHXHKPHFMALHCQEFGGKNYEASMSHVDKFVKELLSSDAMKEYNRARVYLDENYKSQEHFXALGSFYFLHESLKNIYQFDFKAKKYRKVAGKEIYSDXLESXPMLEKEKFPQDYFPECKWSRKGFIRXRWCIADCAFDLVNIHLFHDASNLVAWEXSPSVYSGIRHKALGYVLDRIIDQRFEKVSYFVFGDFNFRLDSKSVVEXLCXKAXMQXVRAADXNEVVKLIFRESDNDRKVMLQLEKKLFDYFNQEVFRDNNGXALLEFDKELSVFKDRLYELDISFPPSYPYSEDARQGEQYMNXRCPAWCDRILMSPSAKELVLRVSVCCPSPGHRGMWSAGSGLAQPW

SEQ ID NO: 13617 - protein, 412 aa, Homo sapiens
  MOD_RES (10)..(10): Selenocysteine
  MOD_RES (16)..(16): Selenocysteine
  MOD_RES (43)..(43): Selenocysteine
  MOD_RES (102)..(102): Selenocysteine
  MOD_RES (139)..(139): Selenocysteine
  MOD_RES (143)..(143): Selenocysteine
  MOD_RES (169)..(169): Selenocysteine
  MOD_RES (197)..(197): Selenocysteine
  MOD_RES (245)..(245): Selenocysteine
  MOD_RES (248)..(248): Selenocysteine
  MOD_RES (251)..(251): Selenocysteine
  MOD_RES (254)..(254): Selenocysteine
  MOD_RES (260)..(260): Selenocysteine
  MOD_RES (300)..(300): Selenocysteine
  MOD_RES (342)..(342): Selenocysteine
  MOD_RES (372)..(372): Selenocysteine
MAGKAAAPGXAVLLVXANVGSLFDDPENLQKNWLREFYQVVHXHKPHFMALHCQEFGGKNYEASMSHVDKFVKELLSSDAMKEYNRARVYLDENYKSQEHFXALGSFYFLHESLKNIYQFDFKAKKYRKVAGKEIYSDXLESXPMLEKEKFPQDYFPECKWSRKGFIRXRWCIADCAFDLVNIHLFHDASNLVAWEXSPSVYSGIRHKALGYVLDRIIDQRFEKVSYFVFGDFNFRLDSKSVVEXLCXKAXMQXVRAADXNEVVKLIFRESDNDRKVMLQLEKKLFDYFNQEVFRDNNGXALLEFDKELSVFKDRLYELDISFPPSYPYSEDARQGEQYMNXRCPAWCDRILMSPSAKELVLRSESEEKVVXYDHIGPNVCMGDHKPVFLAFRIMPGAGKPHAHVHKCCVVQ

SEQ ID NO: 13618 - protein, 138 aa, Homo sapiens
  MOD_RES (2)..(2): Selenocysteine
  MOD_RES (62)..(62): Selenocysteine
  MOD_RES (66)..(66): Selenocysteine
  MOD_RES (92)..(92): Selenocysteine
  MOD_RES (120)..(120): Selenocysteine
VXANVGSLFDDPENLQKNWLREFYQALGSFYFLHESLKNIYQFDFKAKKYRKVAGKEIYSDXLESXPMLEKEKFPQDYFPECKWSRKGFIRXRWCIADCAFDLVNIHLFHDASNLVAWEXSPSVYSGIRHKALGYVLD

SEQ ID NO: 13619 - protein, 278 aa, Homo sapiens
  MOD_RES (1)..(1): Any amino acid
  MOD_RES (15)..(15): Selenocysteine
  MOD_RES (74)..(74): Selenocysteine
  MOD_RES (111)..(111): Selenocysteine
  MOD_RES (115)..(115): Selenocysteine
  MOD_RES (141)..(141): Selenocysteine
  MOD_RES (169)..(169): Selenocysteine
  MOD_RES (257)..(257): Selenocysteine
XQKNWLREFYQVVHXHKPHFMALHCQEFGGKNYEASMSHVDKFVKELLSSDAMKEYNRARVYLDENYKSQEHFXALGSFYFLHESLKNIYQFDFKAKKYRKVAGKEIYSDXLESXPMLEKEKFPQDYFPECKWSRKGFIRXRWCIADCAFDLVNIHLFHDASNLVAWEXSPSVYSGIRHKALGYVLDRIIDQRFEKVSYFVFGDFNFRLDSKSVVELLEFDKELSVFKDRLYELDISFPPSYPYSEDARQGEQYMNXRCPAWCDRILMSPSAKELVLR

SEQ ID NO: 13620 - protein, 748 aa, Homo sapiens
  MOD_RES (10)..(10): Selenocysteine
  MOD_RES (56)..(56): Selenocysteine
  MOD_RES (63)..(63): Selenocysteine
  MOD_RES (80)..(80): Selenocysteine
  MOD_RES (98)..(98): Selenocysteine
  MOD_RES (103)..(103): Selenocysteine
  MOD_RES (118)..(118): Selenocysteine
  MOD_RES (136)..(136): Selenocysteine
  MOD_RES (158)..(158): Selenocysteine
  MOD_RES (168)..(168): Selenocysteine
  MOD_RES (174)..(174): Selenocysteine
  MOD_RES (219)..(219): Selenocysteine
  MOD_RES (226)..(226): Selenocysteine
  MOD_RES (228)..(228): Selenocysteine
  MOD_RES (246)..(246): Selenocysteine
  MOD_RES (260)..(260): Selenocysteine
  MOD_RES (271)..(271): Selenocysteine
  MOD_RES (316)..(316): Selenocysteine
  MOD_RES (368)..(368): Selenocysteine
  MOD_RES (371)..(371): Selenocysteine
  MOD_RES (392)..(392): Selenocysteine
  MOD_RES (435)..(435): Selenocysteine
  MOD_RES (486)..(486): Selenocysteine
  MOD_RES (492)..(492): Selenocysteine
  MOD_RES (497)..(497): Selenocysteine
  MOD_RES (501)..(501): Selenocysteine
  MOD_RES (506)..(506): Selenocysteine
  MOD_RES (513)..(513): Selenocysteine
  MOD_RES (534)..(534): Selenocysteine
  MOD_RES (546)..(546): Selenocysteine
  MOD_RES (571)..(571): Selenocysteine
  MOD_RES (613)..(613): Selenocysteine
  MOD_RES (666)..(666): Selenocysteine
  MOD_RES (668)..(668): Selenocysteine
  MOD_RES (710)..(710): Selenocysteine
  MOD_RES (725)..(725): Selenocysteine
  MOD_RES (740)..(740): Selenocysteine
  MOD_RES (744)..(744): Selenocysteine
MDQSVAIQEXLAEGEYCVIAVQGVLCEGDSRQSRLLGLVRYRLEHGGQEHALFLYXHRRMAIXGDDVSLDQIVPVSRDFXLEEVSPDGELYILGSDVXVQLDXAELSLVFQLPFGSQXRMFLHEVARACPGFDSAXRDPEFLWLSRYRCAELELEMPXPRGCNSALVXWPGYAXIGGGGSNFDGLRPNGKGVPMDQSSRGQDKPESLQPRQNKSKSEIXDMVRSSXIXVSDKAHILSMQKFGLRDXIVKSHLLQKEEDYXYIQNFRFFAGXYNVNGQSPKECLRLWLSNGIQAPDVYCVGFQELDLSKEAFFFHDXPKEEEWFKAVSEGLHPDAKYAKVKLIRLVGIMLLLYVKQEHAAYISEVEAEXVGXGIMGRMGNKGGVAIRFQFHNXSICVVNSHLAAHIEEYERRNQDYKDICSRMQFCQPDPSLPPLXISNHDVILWLGDLNYRIEELDVEKVKKLIEEKDFQMLYAYDQLKIQVAAKXVFEGFXEGELXFQPXYKYDXGSDDWDXSEKCRAPAWCDRILWKGKNIXQLSYQSHMALKXSDHKPVSSVFDIGVRVVNDELYRKXLEEIVRSLDKMENANIPSVSLSKREFCFQNVKYMQLKVESFXIHNGQVPCHFEFINKPDEESYCKQWLNANPSRGFLLPDSDVEIDLELFVNKMXAXKLNSGEDKIEDILVLHLDRGKDYFLSVSGNYLPSCFGSPIHXLCYMREPILDLPLEXISELLAYLAAYCFEXQLVXKSLI

SEQ ID NO: 13621 - protein, 913 aa, Homo sapiens
  MOD_RES (10)..(10): Selenocysteine
  MOD_RES (56)..(56): Selenocysteine
  MOD_RES (63)..(63): Selenocysteine
  MOD_RES (80)..(80): Selenocysteine
  MOD_RES (98)..(98): Selenocysteine
  MOD_RES (103)..(103): Selenocysteine
  MOD_RES (118)..(118): Selenocysteine
  MOD_RES (136)..(136): Selenocysteine
  MOD_RES (158)..(158): Selenocysteine
  MOD_RES (168)..(168): Selenocysteine
  MOD_RES (174)..(174): Selenocysteine
  MOD_RES (219)..(219): Selenocysteine
  MOD_RES (226)..(226): Selenocysteine
  MOD_RES (228)..(228): Selenocysteine
  MOD_RES (246)..(246): Selenocysteine
  MOD_RES (260)..(260): Selenocysteine
  MOD_RES (271)..(271): Selenocysteine
  MOD_RES (316)..(316): Selenocysteine
  MOD_RES (368)..(368): Selenocysteine
  MOD_RES (371)..(371): Selenocysteine
  MOD_RES (392)..(392): Selenocysteine
  MOD_RES (435)..(435): Selenocysteine
  MOD_RES (486)..(486): Selenocysteine
  MOD_RES (492)..(492): Selenocysteine
  MOD_RES (497)..(497): Selenocysteine
  MOD_RES (501)..(501): Selenocysteine
  MOD_RES (506)..(506): Selenocysteine
  MOD_RES (513)..(513): Selenocysteine
  MOD_RES (534)..(534): Selenocysteine
  MOD_RES (546)..(546): Selenocysteine
  MOD_RES (571)..(571): Selenocysteine
  MOD_RES (613)..(613): Selenocysteine
  MOD_RES (666)..(666): Selenocysteine
  MOD_RES (668)..(668): Selenocysteine
  MOD_RES (710)..(710): Selenocysteine
  MOD_RES (725)..(725): Selenocysteine
  MOD_RES (730)..(730): Selenocysteine
  MOD_RES (736)..(736): Selenocysteine
  MOD_RES (789)..(789): Selenocysteine
  MOD_RES (822)..(822): Selenocysteine
  MOD_RES (834)..(834): Selenocysteine
  MOD_RES (842)..(842): Selenocysteine
  MOD_RES (896)..(896): Selenocysteine
MDQSVAIQEXLAEGEYCVIAVQGVLCEGDSRQSRLLGLVRYRLEHGGQEHALFLYXHRRMAIXGDDVSLDQIVPVSRDFXLEEVSPDGELYILGSDVXVQLDXAELSLVFQLPFGSQXRMFLHEVARACPGFDSAXRDPEFLWLSRYRCAELELEMPXPRGCNSALVXWPGYAXIGGGGSNFDGLRPNGKGVPMDQSSRGQDKPESLQPRQNKSKSEIXDMVRSSXIXVSDKAHILSMQKFGLRDXIVKSHLLQKEEDYXYIQNFRFFAGXYNVNGQSPKECLRLWLSNGIQAPDVYCVGFQELDLSKEAFFFHDXPKEEEWFKAVSEGLHPDAKYAKVKLIRLVGIMLLLYVKQEHAAYISEVEAEXVGXGIMGRMGNKGGVAIRFQFHNXSICVVNSHLAAHIEEYERRNQDYKDICSRMQFCQPDPSLPPLXISNHDVILWLGDLNYRIEELDVEKVKKLIEEKDFQMLYAYDQLKIQVAAKXVFEGFXEGELXFQPXYKYDXGSDDWDXSEKCRAPAWCDRILWKGKNIXQLSYQSHMALKXSDHKPVSSVFDIGVRVVNDELYRKXLEEIVRSLDKMENANIPSVSLSKREFCFQNVKYMQLKVESFXIHNGQVPCHFEFINKPDEESYCKQWLNANPSRGFLLPDSDVEIDLELFVNKMXAXKLNSGEDKIEDILVLHLDRGKDYFLSVSGNYLPSCFGSPIHXLCYMREPILDLPLEXISELXLMPVWXGDDGSQLDSPMEIPKELWMMVDYLYRNAVQQEDLFQQPGLRSEFEHIRDCLDXGMIDNLSASNHSVAEALLLFLESLPEPVICYSXYHNCLECSGNYXASKQVISXLPIFHKNVFHYLMAFLRELLKNSAKNHLDENILASIFGSLLLRNPAGHQKLDMXEKKKAQEFIHQFLCNPL

SEQ ID NO: 13622 - protein, 319 aa, Homo sapiens
  MOD_RES (10)..(10): Selenocysteine
  MOD_RES (56)..(56): Selenocysteine
  MOD_RES (63)..(63): Selenocysteine
  MOD_RES (80)..(80): Selenocysteine
  MOD_RES (98)..(98): Selenocysteine
  MOD_RES (103)..(103): Selenocysteine
  MOD_RES (118)..(118): Selenocysteine
  MOD_RES (136)..(136): Selenocysteine
  MOD_RES (158)..(158): Selenocysteine
  MOD_RES (168)..(168): Selenocysteine
  MOD_RES (174)..(174): Selenocysteine
  MOD_RES (210)..(210): Selenocysteine
  MOD_RES (256)..(256): Selenocysteine
  MOD_RES (306)..(306): Selenocysteine
MDQSVAIQEXLAEGEYCVIAVQGVLCEGDSRQSRLLGLVRYRLEHGGQEHALFLYXHRRMAIXGDDVSLDQIVPVSRDFXLEEVSPDGELYILGSDVXVQLDXAELSLVFQLPFGSQXRMFLHEVARACPGFDSAXRDPEFLWLSRYRCAELELEMPXPRGCNSALVXWPGYAXIGGGRYPSRKKRWGLEEARPQGAGSVLFWGGAMEKXGFRLMERAHGGGFVWGRSARDGRRDEELEEAGREMSAAAGSRERNXAGSAGGGKLGWGAGPGAAVRPALGWAGSAVWPVDARGEDQSPGGPLEAGXLGQKFCDVLLRRA

SEQ ID NO: 13623 - protein, 993 aa, Homo sapiens
  MOD_RES (10)..(10): Selenocysteine
  MOD_RES (56)..(56): Selenocysteine
  MOD_RES (63)..(63): Selenocysteine
  MOD_RES (80)..(80): Selenocysteine
  MOD_RES (98)..(98): Selenocysteine
  MOD_RES (103)..(103): Selenocysteine
  MOD_RES (118)..(118): Selenocysteine
  MOD_RES (136)..(136): Selenocysteine
  MOD_RES (158)..(158): Selenocysteine
  MOD_RES (168)..(168): Selenocysteine
  MOD_RES (174)..(174): Selenocysteine
  MOD_RES (210)..(210): Selenocysteine
  MOD_RES (256)..(256): Selenocysteine
  MOD_RES (299)..(299): Selenocysteine
  MOD_RES (306)..(306): Selenocysteine
  MOD_RES (308)..(308): Selenocysteine
  MOD_RES (326)..(326): Selenocysteine
  MOD_RES (340)..(340): Selenocysteine
  MOD_RES (351)..(351): Selenocysteine
  MOD_RES (396)..(396): Selenocysteine
  MOD_RES (448)..(448): Selenocysteine
  MOD_RES (451)..(451): Selenocysteine
  MOD_RES (472)..(472): Selenocysteine
  MOD_RES (515)..(515): Selenocysteine
  MOD_RES (566)..(566): Selenocysteine
  MOD_RES (572)..(572): Selenocysteine
  MOD_RES (577)..(577): Selenocysteine
  MOD_RES (581)..(581): Selenocysteine
  MOD_RES (586)..(586): Selenocysteine
  MOD_RES (593)..(593): Selenocysteine
  MOD_RES (614)..(614): Selenocysteine
  MOD_RES (626)..(626): Selenocysteine
  MOD_RES (651)..(651): Selenocysteine
  MOD_RES (693)..(693): Selenocysteine
  MOD_RES (746)..(746): Selenocysteine
  MOD_RES (748)..(748): Selenocysteine
  MOD_RES (790)..(790): Selenocysteine
  MOD_RES (805)..(805): Selenocysteine
  MOD_RES (810)..(810): Selenocysteine
  MOD_RES (816)..(816): Selenocysteine
  MOD_RES (869)..(869): Selenocysteine
  MOD_RES (902)..(902): Selenocysteine
  MOD_RES (914)..(914): Selenocysteine
  MOD_RES (922)..(922): Selenocysteine
  MOD_RES (976)..(976): Selenocysteine
MDQSVAIQEXLAEGEYCVIAVQGVLCEGDSRQSRLLGLVRYRLEHGGQEHALFLYXHRRMAIXGDDVSLDQIVPVSRDFXLEEVSPDGELYILGSDVXVQLDXAELSLVFQLPFGSQXRMFLHEVARACPGFDSAXRDPEFLWLSRYRCAELELEMPXPRGCNSALVXWPGYAXIGGGRYPSRKKRWGLEEARPQGAGSVLFWGGAMEKXGFRLMERAHGGGFVWGRSARDGRRDEELEEAGREMSAAAGSRERNXAGGSNFDGLRPNGKGVPMDQSSRGQDKPESLQPRQNKSKSEIXDMVRSSXIXVSDKAHILSMQKFGLRDXIVKSHLLQKEEDYXYIQNFRFFAGXYNVNGQSPKECLRLWLSNGIQAPDVYCVGFQELDLSKEAFFFHDXPKEEEWFKAVSEGLHPDAKYAKVKLIRLVGIMLLLYVKQEHAAYISEVEAEXVGXGIMGRMGNKGGVAIRFQFHNXSICVVNSHLAAHIEEYERRNQDYKDICSRMQFCQPDPSLPPLXISNHDVILWLGDLNYRIEELDVEKVKKLIEEKDFQMLYAYDQLKIQVAAKXVFEGFXEGELXFQPXYKYDXGSDDWDXSEKCRAPAWCDRILWKGKNIXQLSYQSHMALKXSDHKPVSSVFDIGVRVVNDELYRKXLEEIVRSLDKMENANIPSVSLSKREFCFQNVKYMQLKVESFXIHNGQVPCHFEFINKPDEESYCKQWLNANPSRGFLLPDSDVEIDLELFVNKMXAXKLNSGEDKIEDILVLHLDRGKDYFLSVSGNYLPSCFGSPIHXLCYMREPILDLPLEXISELXLMPVWXGDDGSQLDSPMEIPKELWMMVDYLYRNAVQQEDLFQQPGLRSEFEHIRDCLDXGMIDNLSASNHSVAEALLLFLESLPEPVICYSXYHNCLECSGNYXASKQVISXLPIFHKNVFHYLMAFLRELLKNSAKNHLDENILASIFGSLLLRNPAGHQKLDMXEKKKAQEFIHQFLCNPL

SEQ ID NO: 13624 - protein, 749 aa, Homo sapiens
  MOD_RES (12)..(12): Selenocysteine
  MOD_RES (55)..(55): Selenocysteine
  MOD_RES (62)..(62): Selenocysteine
  MOD_RES (64)..(64): Selenocysteine
  MOD_RES (82)..(82): Selenocysteine
  MOD_RES (96)..(96): Selenocysteine
  MOD_RES (107)..(107): Selenocysteine
  MOD_RES (152)..(152): Selenocysteine
  MOD_RES (204)..(204): Selenocysteine
  MOD_RES (207)..(207): Selenocysteine
  MOD_RES (228)..(228): Selenocysteine
  MOD_RES (271)..(271): Selenocysteine
  MOD_RES (322)..(322): Selenocysteine
  MOD_RES (328)..(328): Selenocysteine
  MOD_RES (333)..(333): Selenocysteine
  MOD_RES (337)..(337): Selenocysteine
  MOD_RES (342)..(342): Selenocysteine
  MOD_RES (349)..(349): Selenocysteine
  MOD_RES (370)..(370): Selenocysteine
  MOD_RES (382)..(382): Selenocysteine
  MOD_RES (407)..(407): Selenocysteine
  MOD_RES (449)..(449): Selenocysteine
  MOD_RES (502)..(502): Selenocysteine
  MOD_RES (504)..(504): Selenocysteine
  MOD_RES (546)..(546): Selenocysteine
  MOD_RES (561)..(561): Selenocysteine
  MOD_RES (566)..(566): Selenocysteine
  MOD_RES (572)..(572): Selenocysteine
  MOD_RES (625)..(625): Selenocysteine
  MOD_RES (658)..(658): Selenocysteine
  MOD_RES (670)..(670): Selenocysteine
  MOD_RES (678)..(678): Selenocysteine
  MOD_RES (732)..(732): Selenocysteine
MSAAAGSRERNXAGGSNFDGLRPNGKGVPMDQSSRGQDKPESLQPRQNKSKSEIXDMVRSSXIXVSDKAHILSMQKFGLRDXIVKSHLLQKEEDYXYIQNFRFFAGXYNVNGQSPKECLRLWLSNGIQAPDVYCVGFQELDLSKEAFFFHDXPKEEEWFKAVSEGLHPDAKYAKVKLIRLVGIMLLLYVKQEHAAYISEVEAEXVGXGIMGRMGNKGGVAIRFQFHNXSICVVNSHLAAHIEEYERRNQDYKDICSRMQFCQPDPSLPPLXISNHDVILWLGDLNYRIEELDVEKVKKLIEEKDFQMLYAYDQLKIQVAAKXVFEGFXEGELXFQPXYKYDXGSDDWDXSEKCRAPAWCDRILWKGKNIXQLSYQSHMALKXSDHKPVSSVFDIGVRVVNDELYRKXLEEIVRSLDKMENANIPSVSLSKREFCFQNVKYMQLKVESFXIHNGQVPCHFEFINKPDEESYCKQWLNANPSRGFLLPDSDVEIDLELFVNKMXAXKLNSGEDKIEDILVLHLDRGKDYFLSVSGNYLPSCFGSPIHXLCYMREPILDLPLEXISELXLMPVWXGDDGSQLDSPMEIPKELWMMVDYLYRNAVQQEDLFQQPGLRSEFEHIRDCLDXGMIDNLSASNHSVAEALLLFLESLPEPVICYSXYHNCLECSGNYXASKQVISXLPIFHKNVFHYLMAFLRELLKNSAKNHLDENILASIFGSLLLRNPAGHQKLDMXEKKKAQEFIHQFLCNPL

SEQ ID NO: 13625 - protein, 810 aa, Homo sapiens
  MOD_RES (26)..(26): Selenocysteine
  MOD_RES (31)..(31): Selenocysteine
  MOD_RES (44)..(44): Selenocysteine
  MOD_RES (55)..(55): Selenocysteine
  MOD_RES (72)..(72): Selenocysteine
  MOD_RES (94)..(94): Selenocysteine
  MOD_RES (97)..(97): Selenocysteine
  MOD_RES (100)..(100): Selenocysteine
  MOD_RES (105)..(105): Selenocysteine
  MOD_RES (128)..(128): Selenocysteine
  MOD_RES (133)..(133): Selenocysteine
  MOD_RES (138)..(138): Selenocysteine
  MOD_RES (154)..(154): Selenocysteine
  MOD_RES (164)..(164): Selenocysteine
  MOD_RES (197)..(197): Selenocysteine
  MOD_RES (201)..(201): Selenocysteine
  MOD_RES (217)..(217): Selenocysteine
  MOD_RES (222)..(222): Selenocysteine
  MOD_RES (243)..(243): Selenocysteine
  MOD_RES (260)..(260): Selenocysteine
  MOD_RES (264)..(264): Selenocysteine
  MOD_RES (271)..(271): Selenocysteine
  MOD_RES (278)..(278): Selenocysteine
  MOD_RES (283)..(283): Selenocysteine
  MOD_RES (314)..(314): Selenocysteine
  MOD_RES (319)..(319): Selenocysteine
  MOD_RES (328)..(328): Selenocysteine
  MOD_RES (334)..(334): Selenocysteine
  MOD_RES (345)..(345): Selenocysteine
  MOD_RES (360)..(360): Selenocysteine
  MOD_RES (363)..(363): Selenocysteine
  MOD_RES (367)..(367): Selenocysteine
  MOD_RES (404)..(404): Selenocysteine
  MOD_RES (448)..(448): Selenocysteine
  MOD_RES (450)..(450): Selenocysteine
  MOD_RES (456)..(456): Selenocysteine
  MOD_RES (459)..(459): Selenocysteine
  MOD_RES (465)..(465): Selenocysteine
  MOD_RES (476)..(476): Selenocysteine
  MOD_RES (481)..(481): Selenocysteine
  MOD_RES (491)..(491): Selenocysteine
  MOD_RES (501)..(501): Selenocysteine
  MOD_RES (506)..(506): Selenocysteine
  MOD_RES (517)..(517): Selenocysteine
  MOD_RES (529)..(529): Selenocysteine
  MOD_RES (553)..(553): Selenocysteine
  MOD_RES (561)..(561): Selenocysteine
  MOD_RES (584)..(584): Selenocysteine
  MOD_RES (600)..(600): Selenocysteine
  MOD_RES (609)..(609): Selenocysteine
  MOD_RES (624)..(624): Selenocysteine
  MOD_RES (633)..(633): Selenocysteine
  MOD_RES (684)..(684): Selenocysteine
  MOD_RES (708)..(708): Selenocysteine
  MOD_RES (729)..(729): Selenocysteine
  MOD_RES (754)..(754): Selenocysteine
  MOD_RES (757)..(757): Selenocysteine
  MOD_RES (759)..(759): Selenocysteine
  MOD_RES (786)..(786): Selenocysteine
  MOD_RES (807)..(807): Selenocysteine
KREGFCQLLQQMKNKHSEQPEPDMIXIFIGXWNMGNAPPPKKIXSWFLSKGQGKXRDDSADYIPHDIYVIGXQEDPLSEKEWLEILKHSLQEIXSVXFKXVAIHXLWNIRIVVLAKPEHENRISHICXDNVKXGIANXLGNKGAVGVSFMFNGXSLGFVNSHLXSGSEKKLRRNQNYMNILRFLALGDKKLSPFNIXHRFXHLFWFGDLNYRVDLPXWEAEXIIQKIKQQQYADLLSHDQLLXERREQKVFLHFEEEEIXFAPXYRFERLXRDKYAYXKQKAXGMKYNLPSWCDRVLWKSYPLVHVVCQSYGSXSDIMXSDHSPVFAXFEAGVXSQFVSKNGPGXVDSQGQIEFLRCYAXLKXKSQXKFYLEFHSSCLESFVKSQEGENEEGSEGELVVKFGEXLPKLKPIISDPEYLLDQHILISIKSSDSDESYGEGCIALRLEAXEXQLPIYXPLXHHGELXGHFQGEIKLQXSQGKXREKLYDFVKXERDESSGPKXLKSLXSHDPMKQWEVXSRAPPCSGSSIXEIINPNYMGVGPFGPPMPLHVKQXLSPDQQPXAWSYDQPPKDSPLGPCRGESPPXPPGQPPISPKKFLPSXANRGLPPRXQESRPSDLGKNAGDXLPQEDLPLXKPEMFENPLYGSLSSFPKPAPRKDQESPKMPRKEPPPCPEPGILSPSIVLXKAQEADRGEGPGKQVPAPRLRSFXCSSSAEGRAAGGDKSQGKPKXPVSSQAPVPAKRPIKPSRSEINQQXPPXPXPRPPLPVKSPAVLHLQHSKGRDYRDNXELPHHGKHRPEEGPPGPLGRXAMQ

SEQ ID NO: 13626 - protein, 130 aa, Homo sapiens
  MOD_RES (2)..(2): Selenocysteine
  MOD_RES (7)..(7): Selenocysteine
  MOD_RES (18)..(18): Selenocysteine
  MOD_RES (30)..(30): Selenocysteine
  MOD_RES (54)..(54): Selenocysteine
  MOD_RES (62)..(62): Selenocysteine
  MOD_RES (85)..(85): Selenocysteine
  MOD_RES (101)..(101): Selenocysteine
  MOD_RES (110)..(110): Selenocysteine
  MOD_RES (129)..(129): Selenocysteine
KXLKSLXSHDPMKQWEVXSRAPPCSGSSIXEIINPNYMGVGPFGPPMPLHVKQXLSPDQQPXAWSYDQPPKDSPLGPCRGESPPXPPGQPPISPKKFLPSXANRGLPPRXQESSEALSELPLSREPRGXA

SEQ ID NO: 13627 - protein, 1188 aa, Homo sapiens
  MOD_RES (11)..(11): Selenocysteine
  MOD_RES (22)..(22): Selenocysteine
  MOD_RES (52)..(52): Selenocysteine
  MOD_RES (64)..(64): Selenocysteine
  MOD_RES (77)..(77): Selenocysteine
  MOD_RES (95)..(95): Selenocysteine
  MOD_RES (108)..(108): Selenocysteine
  MOD_RES (116)..(116): Selenocysteine
  MOD_RES (133)..(133): Selenocysteine
  MOD_RES (152)..(152): Selenocysteine
  MOD_RES (154)..(154): Selenocysteine
  MOD_RES (162)..(162): Selenocysteine
  MOD_RES (172)..(172): Selenocysteine
  MOD_RES (189)..(189): Selenocysteine
  MOD_RES (200)..(200): Selenocysteine
  MOD_RES (212)..(213): Selenocysteine
  MOD_RES (226)..(226): Selenocysteine
  MOD_RES (268)..(268): Selenocysteine
  MOD_RES (299)..(299): Selenocysteine
  MOD_RES (362)..(362): Selenocysteine
  MOD_RES (404)..(404): Selenocysteine
  MOD_RES (409)..(409): Selenocysteine
  MOD_RES (422)..(422): Selenocysteine
  MOD_RES (433)..(433): Selenocysteine
  MOD_RES (450)..(450): Selenocysteine
  MOD_RES (472)..(472): Selenocysteine
  MOD_RES (475)..(475): Selenocysteine
  MOD_RES (478)..(478): Selenocysteine
  MOD_RES (483)..(483): Selenocysteine
  MOD_RES (506)..(506): Selenocysteine
  MOD_RES (511)..(511): Selenocysteine
  MOD_RES (516)..(516): Selenocysteine
  MOD_RES (532)..(532): Selenocysteine
  MOD_RES (542)..(542): Selenocysteine
  MOD_RES (575)..(575): Selenocysteine
  MOD_RES (579)..(579): Selenocysteine
  MOD_RES (595)..(595): Selenocysteine
  MOD_RES (600)..(600): Selenocysteine
  MOD_RES (621)..(621): Selenocysteine
  MOD_RES (638)..(638): Selenocysteine
  MOD_RES (642)..(642): Selenocysteine
  MOD_RES (649)..(649): Selenocysteine
  MOD_RES (656)..(656): Selenocysteine
  MOD_RES (661)..(661): Selenocysteine
  MOD_RES (692)..(692): Selenocysteine
  MOD_RES (697)..(697): Selenocysteine
  MOD_RES (706)..(706): Selenocysteine
  MOD_RES (712)..(712): Selenocysteine
  MOD_RES (723)..(723): Selenocysteine
  MOD_RES (738)..(738): Selenocysteine
  MOD_RES (741)..(741): Selenocysteine
  MOD_RES (745)..(745): Selenocysteine
  MOD_RES (782)..(782): Selenocysteine
  MOD_RES (826)..(826): Selenocysteine
  MOD_RES (828)..(828): Selenocysteine
  MOD_RES (834)..(834): Selenocysteine
  MOD_RES (837)..(837): Selenocysteine
  MOD_RES (843)..(843): Selenocysteine
  MOD_RES (854)..(854): Selenocysteine
  MOD_RES (859)..(859): Selenocysteine
  MOD_RES (869)..(869): Selenocysteine
  MOD_RES (879)..(879): Selenocysteine
  MOD_RES (884)..(884): Selenocysteine
  MOD_RES (895)..(895): Selenocysteine
  MOD_RES (907)..(907): Selenocysteine
  MOD_RES (931)..(931): Selenocysteine
  MOD_RES (939)..(939): Selenocysteine
  MOD_RES (962)..(962): Selenocysteine
  MOD_RES (978)..(978): Selenocysteine
  MOD_RES (987)..(987): Selenocysteine
  MOD_RES (1002)..(1002): Selenocysteine
  MOD_RES (1011)..(1011): Selenocysteine
  MOD_RES (1062)..(1062): Selenocysteine
  MOD_RES (1086)..(1086): Selenocysteine
  MOD_RES (1107)..(1107): Selenocysteine
  MOD_RES (1132)..(1132): Selenocysteine
  MOD_RES (1135)..(1135): Selenocysteine
  MOD_RES (1137)..(1137): Selenocysteine
  MOD_RES (1164)..(1164): Selenocysteine
  MOD_RES (1185)..(1185): Selenocysteine
MVPCWNHGNIXRSKAEELLSRXGKDGSFLVRASESISRAYALCVLYRNCVYXYRILPNEDDKFXVQASEGVSMRFFXKLDQLIEFYKKENMGLVXHLQYPVPLEEEDXGDDPEEDXESVVSPPELPPRNIPLXASSCEAKEVPFSNENPRAXEXSRPSLSEXLFQRLQSMDXSGLPEEHLKAIQDYLSXQLAQDSEFVKXGSSSLPHLKKLXXLLCKELYGEVIRXLPSLESLQRLFDQQLSPGLRPRPQVPGEANPINMVSKLSQLXSLLSSIEDKVKALLHEGPESPHRPSLIPPVXFEVKAESLGIPQKMQLKVDVESGKLIIKKSKDGSEDKFYSHKKILQLIKSQKFLNKLVILVEXEKEKILRKEYVFADSKKREGFCQLLQQMKNKHSEQPEPDMIXIFIGXWNMGNAPPPKKIXSWFLSKGQGKXRDDSADYIPHDIYVIGXQEDPLSEKEWLEILKHSLQEIXSVXFKXVAIHXLWNIRIVVLAKPEHENRISHICXDNVKXGIANXLGNKGAVGVSFMFNGXSLGFVNSHLXSGSEKKLRRNQNYMNILRFLALGDKKLSPFNIXHRFXHLFWFGDLNYRVDLPXWEAEXIIQKIKQQQYADLLSHDQLLXERREQKVFLHFEEEEIXFAPXYRFERLXRDKYAYXKQKAXGMKYNLPSWCDRVLWKSYPLVHVVCQSYGSXSDIMXSDHSPVFAXFEAGVXSQFVSKNGPGXVDSQGQIEFLRCYAXLKXKSQXKFYLEFHSSCLESFVKSQEGENEEGSEGELVVKFGEXLPKLKPIISDPEYLLDQHILISIKSSDSDESYGEGCIALRLEAXEXQLPIYXPLXHHGELXGHFQGEIKLQXSQGKXREKLYDFVKXERDESSGPKXLKSLXSHDPMKQWEVXSRAPPCSGSSIXEIINPNYMGVGPFGPPMPLHVKQXLSPDQQPXAWSYDQPPKDSPLGPCRGESPPXPPGQPPISPKKFLPSXANRGLPPRXQESRPSDLGKNAGDXLPQEDLPLXKPEMFENPLYGSLSSFPKPAPRKDQESPKMPRKEPPPCPEPGILSPSIVLXKAQEADRGEGPGKQVPAPRLRSFXCSSSAEGRAAGGDKSQGKPKXPVSSQAPVPAKRPIKPSRSEINQQXPPXPXPRPPLPVKSPAVLHLQHSKGRDYRDNXELPHHGKHRPEEGPPGPLGRXAMQ

SEQ ID NO: 13628 - protein, 1189 aa, Homo sapiens
  MOD_RES (11)..(11): Selenocysteine
  MOD_RES (22)..(22): Selenocysteine
  MOD_RES (52)..(52): Selenocysteine
  MOD_RES (64)..(64): Selenocysteine
  MOD_RES (77)..(77): Selenocysteine
  MOD_RES (95)..(95): Selenocysteine
  MOD_RES (108)..(108): Selenocysteine
  MOD_RES (116)..(116): Selenocysteine
  MOD_RES (134)..(134): Selenocysteine
  MOD_RES (153)..(153): Selenocysteine
  MOD_RES (155)..(155): Selenocysteine
  MOD_RES (163)..(163): Selenocysteine
  MOD_RES (173)..(173): Selenocysteine
  MOD_RES (190)..(190): Selenocysteine
  MOD_RES (201)..(201): Selenocysteine
  MOD_RES (213)..(214): Selenocysteine
  MOD_RES (227)..(227): Selenocysteine
  MOD_RES (269)..(269): Selenocysteine
  MOD_RES (300)..(300): Selenocysteine
  MOD_RES (363)..(363): Selenocysteine
  MOD_RES (405)..(405): Selenocysteine
  MOD_RES (410)..(410): Selenocysteine
  MOD_RES (423)..(423): Selenocysteine
  MOD_RES (434)..(434): Selenocysteine
  MOD_RES (451)..(451): Selenocysteine
  MOD_RES (473)..(473): Selenocysteine
  MOD_RES (476)..(476): Selenocysteine
  MOD_RES (479)..(479): Selenocysteine
  MOD_RES (484)..(484): Selenocysteine
  MOD_RES (507)..(507): Selenocysteine
  MOD_RES (512)..(512): Selenocysteine
  MOD_RES (517)..(517): Selenocysteine
  MOD_RES (533)..(533): Selenocysteine
  MOD_RES (543)..(543): Selenocysteine
  MOD_RES (576)..(576): Selenocysteine
  MOD_RES (580)..(580): Selenocysteine
  MOD_RES (596)..(596): Selenocysteine
  MOD_RES (601)..(601): Selenocysteine
  MOD_RES (622)..(622): Selenocysteine
  MOD_RES (639)..(639): Selenocysteine
  MOD_RES (643)..(643): Selenocysteine
  MOD_RES (650)..(650): Selenocysteine
  MOD_RES (657)..(657): Selenocysteine
  MOD_RES (662)..(662): Selenocysteine
  MOD_RES (693)..(693): Selenocysteine
  MOD_RES (698)..(698): Selenocysteine
  MOD_RES (707)..(707): Selenocysteine
  MOD_RES (713)..(713): Selenocysteine
  MOD_RES (724)..(724): Selenocysteine
  MOD_RES (739)..(739): Selenocysteine
  MOD_RES (742)..(742): Selenocysteine
  MOD_RES (746)..(746): Selenocysteine
  MOD_RES (783)..(783): Selenocysteine
  MOD_RES (827)..(827): Selenocysteine
  MOD_RES (829)..(829): Selenocysteine
  MOD_RES (835)..(835): Selenocysteine
  MOD_RES (838)..(838): Selenocysteine
  MOD_RES (844)..(844): Selenocysteine
  MOD_RES (855)..(855): Selenocysteine
  MOD_RES (860)..(860): Selenocysteine
  MOD_RES (870)..(870): Selenocysteine
  MOD_RES (880)..(880): Selenocysteine
  MOD_RES (885)..(885): Selenocysteine
  MOD_RES (896)..(896): Selenocysteine
  MOD_RES (908)..(908): Selenocysteine
  MOD_RES (932)..(932): Selenocysteine
  MOD_RES (940)..(940): Selenocysteine
  MOD_RES (963)..(963): Selenocysteine
  MOD_RES (979)..(979): Selenocysteine
  MOD_RES (988)..(988): Selenocysteine
  MOD_RES (1003)..(1003): Selenocysteine
  MOD_RES (1012)..(1012): Selenocysteine
  MOD_RES (1063)..(1063): Selenocysteine
  MOD_RES (1087)..(1087): Selenocysteine
  MOD_RES (1108)..(1108): Selenocysteine
  MOD_RES (1133)..(1133): Selenocysteine
  MOD_RES (1136)..(1136): Selenocysteine
  MOD_RES (1138)..(1138): Selenocysteine
  MOD_RES (1165)..(1165): Selenocysteine
  MOD_RES (1186)..(1186): Selenocysteine
MVPCWNHGNIXRSKAEELLSRXGKDGSFLVRASESISRAYALCVLYRNCVYXYRILPNEDDKFXVQASEGVSMRFFXKLDQLIEFYKKENMGLVXHLQYPVPLEEEDXGDDPEEDXVESVVSPPELPPRNIPLXASSCEAKEVPFSNENPRAXEXSRPSLSEXLFQRLQSMDXSGLPEEHLKAIQDYLSXQLAQDSEFVKXGSSSLPHLKKLXXLLCKELYGEVIRXLPSLESLQRLFDQQLSPGLRPRPQVPGEANPINMVSKLSQLXSLLSSIEDKVKALLHEGPESPHRPSLIPPVXFEVKAESLGIPQKMQLKVDVESGKLIIKKSKDGSEDKFYSHKKILQLIKSQKFLNKLVILVEXEKEKILRKEYVFADSKKREGFCQLLQQMKNKHSEQPEPDMIXIFIGXWNMGNAPPPKKIXSWFLSKGQGKXRDDSADYIPHDIYVIGXQEDPLSEKEWLEILKHSLQEIXSVXFKXVAIHXLWNIRIVVLAKPEHENRISHICXDNVKXGIANXLGNKGAVGVSFMFNGXSLGFVNSHLXSGSEKKLRRNQNYMNILRFLALGDKKLSPFNIXHRFXHLFWFGDLNYRVDLPXWEAEXIIQKIKQQQYADLLSHDQLLXERREQKVFLHFEEEEIXFAPXYRFERLXRDKYAYXKQKAXGMKYNLPSWCDRVLWKSYPLVHVVCQSYGSXSDIMXSDHSPVFAXFEAGVXSQFVSKNGPGXVDSQGQIEFLRCYAXLKXKSQXKFYLEFHSSCLESFVKSQEGENEEGSEGELVVKFGEXLPKLKPIISDPEYLLDQHILISIKSSDSDESYGEGCIALRLEAXEXQLPIYXPLXHHGELXGHFQGEIKLQXSQGKXREKLYDFVKXERDESSGPKXLKSLXSHDPMKQWEVXSRAPPCSGSSIXEIINPNYMGVGPFGPPMPLHVKQXLSPDQQPXAWSYDQPPKDSPLGPCRGESPPXPPGQPPISPKKFLPSXANRGLPPRXQESRPSDLGKNAGDXLPQEDLPLXKPEMFENPLYGSLSSFPKPAPRKDQESPKMPRKEPPPCPEPGILSPSIVLXKAQEADRGEGPGKQVPAPRLRSFXCSSSAEGRAAGGDKSQGKPKXPVSSQAPVPAKRPIKPSRSEINQQXPPXPXPRPPLPVKSPAVLHLQHSKGRDYRDNXELPHHGKHRPEEGPPGPLGRXAMQ

SEQ ID NO: 13629 - protein, 43 aa, Homo sapiens
  MOD_RES (1)..(1): Any amino acid
  MOD_RES (2)..(2): Selenocysteine
  MOD_RES (23)..(23): Selenocysteine
  MOD_RES (31)..(31): Selenocysteine
XXELPHHGKHRPEEGPPGPLGRXAMQVRCAXRGFVCICVCVHA

SEQ ID NO: 13630 - protein, 522 aa, Homo sapiens
  MOD_RES (19)..(19): Selenocysteine
  MOD_RES (24)..(24): Selenocysteine
  MOD_RES (72)..(72): Selenocysteine
  MOD_RES (97)..(97): Selenocysteine
  MOD_RES (112)..(112): Selenocysteine
  MOD_RES (123)..(123): Selenocysteine
  MOD_RES (181)..(181): Selenocysteine
  MOD_RES (197)..(197): Selenocysteine
  MOD_RES (223)..(223): Selenocysteine
  MOD_RES (227)..(227): Selenocysteine
  MOD_RES (255)..(255): Selenocysteine
  MOD_RES (301)..(301): Selenocysteine
  MOD_RES (312)..(312): Selenocysteine
  MOD_RES (340)..(340): Selenocysteine
  MOD_RES (362)..(362): Selenocysteine
  MOD_RES (367)..(367): Selenocysteine
  MOD_RES (382)..(382): Selenocysteine
  MOD_RES (389)..(389): Selenocysteine
  MOD_RES (394)..(394): Selenocysteine
  MOD_RES (397)..(397): Selenocysteine
  MOD_RES (411)..(411): Selenocysteine
  MOD_RES (429)..(429): Selenocysteine
  MOD_RES (431)..(431): Selenocysteine
  MOD_RES (441)..(441): Selenocysteine
  MOD_RES (446)..(446): Selenocysteine
  MOD_RES (475)..(475): Selenocysteine
  MOD_RES (480)..(480): Selenocysteine
  MOD_RES (517)..(517): Selenocysteine
MCHDVIFMAWLKQQFSECXLIDAXHRDVDVLLLLSNSAYYVAYYDDEVDKVNQYQRLSLENLEKIEIGPEPXLFGKPKFSCMRLHYRYKEASGYFHXLRAVMRNPEEDGKDXLQCIAEMLQIXKQAMGSDLPIIEKKLERKSSKPHEDIIGIRSQNQGSLAQGKNFLMSKFSSLNQKVKQXKSNVNIGNLRKLGNFXKPEMKVNFLKPNLKVNLWKSDSSLEXMENXGVMDKVQAESDGDMSSDNDSYHSDEFLXNSKSDEDRQLANSLESVGPIDYVLPSCGIIASAPRLGSRSQSLSSXDSSVHAPSEIXVAHGSGLGKGQESPLKKSPSAGDVHILXGFAKPMDIYCHRFVQDAQNKVXHLSEXRSVSQQASQERNQMXNQVSNEXQSESXEQXPSRPSQLDVSLSAXGPQFLSVEPAHSVASQKXPXSASSMLELEXGLHVXPSPSESSSSRAVSPFAKIRSSMVQVASIXQAGLXHGINFAVSKVQKSPPEPEIINQVQQNELKKMFIQCQXRIIQI

SEQ ID NO: 13631 - protein, 153 aa, Homo sapiens
  MOD_RES (19)..(19): Selenocysteine
  MOD_RES (24)..(24): Selenocysteine
  MOD_RES (72)..(72): Selenocysteine
  MOD_RES (97)..(97): Selenocysteine
  MOD_RES (112)..(112): Selenocysteine
  MOD_RES (123)..(123): Selenocysteine
  MOD_RES (151)..(151): Selenocysteine
MCHDVIFMAWLKQQFSECXLIDAXHRDVDVLLLLSNSAYYVAYYDDEVDKVNQYQRLSLENLEKIEIGPEPXLFGKPKFSCMRLHYRYKEASGYFHXLRAVMRNPEEDGKDXLQCIAEMLQIXKQAMGSDLPIIEKKLESCHEGYQRREDXNC

SEQ ID NO: 13632 - protein, 1132 aa, Homo sapiens
  MOD_RES (34)..(34): Selenocysteine
  MOD_RES (87)..(87): Selenocysteine
  MOD_RES (133)..(133): Selenocysteine
  MOD_RES (135)..(135): Selenocysteine
  MOD_RES (181)..(181): Selenocysteine
  MOD_RES (185)..(185): Selenocysteine
  MOD_RES (193)..(193): Selenocysteine
  MOD_RES (220)..(220): Selenocysteine
  MOD_RES (224)..(224): Selenocysteine
  MOD_RES (249)..(249): Selenocysteine
  MOD_RES (261)..(261): Selenocysteine
  MOD_RES (267)..(267): Selenocysteine
  MOD_RES (310)..(310): Selenocysteine
  MOD_RES (320)..(320): Selenocysteine
  MOD_RES (326)..(326): Selenocysteine
  MOD_RES (354)..(354): Selenocysteine
  MOD_RES (404)..(404): Selenocysteine
  MOD_RES (424)..(424): Selenocysteine
  MOD_RES (426)..(426): Selenocysteine
  MOD_RES (465)..(465): Selenocysteine
  MOD_RES (519)..(519): Selenocysteine
  MOD_RES (527)..(527): Selenocysteine
  MOD_RES (529)..(529): Selenocysteine
  MOD_RES (571)..(571): Selenocysteine
  MOD_RES (579)..(579): Selenocysteine
  MOD_RES (634)..(634): Selenocysteine
  MOD_RES (682)..(682): Selenocysteine
  MOD_RES (707)..(707): Selenocysteine
  MOD_RES (722)..(722): Selenocysteine
  MOD_RES (733)..(733): Selenocysteine
  MOD_RES (791)..(791): Selenocysteine
  MOD_RES (807)..(807): Selenocysteine
  MOD_RES (833)..(833): Selenocysteine
  MOD_RES (837)..(837): Selenocysteine
  MOD_RES (865)..(865): Selenocysteine
  MOD_RES (911)..(911): Selenocysteine
  MOD_RES (922)..(922): Selenocysteine
  MOD_RES (950)..(950): Selenocysteine
  MOD_RES (972)..(972): Selenocysteine
  MOD_RES (977)..(977): Selenocysteine
  MOD_RES (992)..(992): Selenocysteine
  MOD_RES (999)..(999): Selenocysteine
  MOD_RES (1004)..(1004): Selenocysteine
  MOD_RES (1007)..(1007): Selenocysteine
  MOD_RES (1021)..(1021): Selenocysteine
  MOD_RES (1039)..(1039): Selenocysteine
  MOD_RES (1041)..(1041): Selenocysteine
  MOD_RES (1051)..(1051): Selenocysteine
  MOD_RES (1056)..(1056): Selenocysteine
  MOD_RES (1085)..(1085): Selenocysteine
  MOD_RES (1090)..(1090): Selenocysteine
  MOD_RES (1127)..(1127): Selenocysteine
MELFQAKDHYILQQGERALWCSRRDGGLQLRPAXDLLLAWNPICLGLVEGVIGKIQLHSDLPWWLILIRQKALVGKLPGDHEVCKVXKIAVLSLSEMEPQDLELELCKKHHFGINKPEKIIPSPDDSKFLLKXFXHIKSNVSAPNKKKVKESKEKEKLERRLLEELLKMFMDSESFYYSLXYDLXNSVQRQSXGERDGRPLWQKVDDRFFWNKYMIQDLXEIGXPDVDFWIIPMIQGFVQIEELVVNYXESSDDEKSSPEXPPQESXCVDDIHPRFLVALISRRSRHRAGMRYKRRGVDKNGNVANYVEXEQLIHVHNHXLSFVQXRGSVPVFWSQVGYRYNPRPRLDRSEKEXVAYFCAHFEEQLNIYKKQVIINLVDQAGREKIIGDAYLKQVLLFNNSHLXYVSFDFHEHCRGMKFENVQXLXDAIYDIILDMKWCWVDEAGVICKQEGIFRVNCMDCLDRXNVVQAAIARVVMEQQLKKLGVMPPEQPLPVKCNRIYQIMWANNGDSISRQYAGXAALKGDFXRXGERKLAGVMKDGVNSANRYYLNRFKDAYRQAVIDLMQGIPVXEDLYSIFXKEKEHEALHKENQRSHQELISQLLQSYMKLLLPDDEKFHGGWALIDCDPSLIDAXHRDVDVLLLLSNSAYYVAYYDDEVDKVNQYQRLSLENLEKIEIGPEPXLFGKPKFSCMRLHYRYKEASGYFHXLRAVMRNPEEDGKDXLQCIAEMLQIXKQAMGSDLPIIEKKLERKSSKPHEDIIGIRSQNQGSLAQGKNFLMSKFSSLNQKVKQXKSNVNIGNLRKLGNFXKPEMKVNFLKPNLKVNLWKSDSSLEXMENXGVMDKVQAESDGDMSSDNDSYHSDEFLXNSKSDEDRQLANSLESVGPIDYVLPSCGIIASAPRLGSRSQSLSSXDSSVHAPSEIXVAHGSGLGKGQESPLKKSPSAGDVHILXGFAKPMDIYCHRFVQDAQNKVXHLSEXRSVSQQASQERNQMXNQVSNEXQSESXEQXPSRPSQLDVSLSAXGPQFLSVEPAHSVASQKXPXSASSMLELEXGLHVXPSPSESSSSRAVSPFAKIRSSMVQVASIXQAGLXHGINFAVSKVQKSPPEPEIINQVQQNELKKMFIQCQXRIIQI

SEQ ID NO: 13633 - protein, 219 aa, Homo sapiens
  MOD_RES (34)..(34): Selenocysteine
  MOD_RES (87)..(87): Selenocysteine
  MOD_RES (133)..(133): Selenocysteine
  MOD_RES (135)..(135): Selenocysteine
  MOD_RES (181)..(181): Selenocysteine
  MOD_RES (185)..(185): Selenocysteine
  MOD_RES (193)..(193): Selenocysteine
  MOD_RES (208)..(208): Selenocysteine
MELFQAKDHYILQQGERALWCSRRDGGLQLRPAXDLLLAWNPICLGLVEGVIGKIQLHSDLPWWLILIRQKALVGKLPGDHEVCKVXKIAVLSLSEMEPQDLELELCKKHHFGINKPEKIIPSPDDSKFLLKXFXHIKSNVSAPNKKKVKESKEKEKLERRLLEELLKMFMDSESFYYSLXYDLXNSVQRQSXGERDGRPLWQKVPLXARRAGFALGKK

SEQ ID NO: 13634 - protein, 183 aa, Homo sapiens
  MOD_RES (10)..(10): Selenocysteine
  MOD_RES (16)..(16): Selenocysteine
  MOD_RES (31)..(31): Selenocysteine
  MOD_RES (74)..(74): Selenocysteine
  MOD_RES (90)..(90): Selenocysteine
  MOD_RES (95)..(95): Selenocysteine
  MOD_RES (143)..(143): Selenocysteine
  MOD_RES (168)..(168): Selenocysteine
  MOD_RES (183)..(183): Selenocysteine
MPRSHRPPPXAQRAAXAAAAEPKSEGVVAMXFKIFLLFAGLMVKVPVGLYFSCKLLLFQSLMLMSPEDSGFYAXIVAVVGLHVQQFSECXLIDAXHRDVDVLLLLSNSAYYVAYYDDEVDKVNQYQRLSLENLEKIEIGPEPXLFGKPKFSCMRLHYRYKEASGYFHXLRAVMRNPEEDGKDX

SEQ ID NO: 13635 - protein, 57 aa, Homo sapiens
  MOD_RES (16)..(16): Selenocysteine
  MOD_RES (31)..(31): Selenocysteine
  MOD_RES (42)..(42): Selenocysteine
MRLHYRYKEASGYFHXLRAVMRNPEEDGKDXLQCIAEMLQIXKQAMGSDLPIIEKKL

SEQ ID NO: 13636 - protein, 82 aa, Homo sapiens
  MOD_RES (16)..(16): Selenocysteine
  MOD_RES (31)..(31): Selenocysteine
  MOD_RES (42)..(42): Selenocysteine
MRLHYRYKEASGYFHXLRAVMRNPEEDGKDXLQCIAEMLQIXKQAMGSDLPIIEKKLERKSSKPHEDIIGIRSQNQGSLAQG

SEQ ID NO: 13637 - protein, 105 aa, Homo sapiens
  MOD_RES (16)..(16): Selenocysteine
  MOD_RES (31)..(31): Selenocysteine
  MOD_RES (42)..(42): Selenocysteine
  MOD_RES (100)..(100): Selenocysteine
MRLHYRYKEASGYFHXLRAVMRNPEEDGKDXLQCIAEMLQIXKQAMGSDLPIIEKKLERKSSKPHEDIIGIRSQNQGSLAQGKNFLMSKFSSLNQKVKQXKSNVN

SEQ ID NO: 13638 - protein, 50 aa, Homo sapiens
  MOD_RES (39)..(39): Selenocysteine
  MOD_RES (42)..(42): Selenocysteine
  MOD_RES (44)..(44): Selenocysteine
MDVLSPLSFIKVSHVRMQGILLLVFAKYQHLPYIQILSXKSXPXGLFGYW

SEQ ID NO: 13639 - protein, 85 aa, Homo sapiens
  MOD_RES (39)..(39): Selenocysteine
  MOD_RES (42)..(42): Selenocysteine
  MOD_RES (44)..(44): Selenocysteine
MDVLSPLSFIKVSHVRMQGILLLVFAKYQHLPYIQILSXKSXPXGLFGYWGNKGGVNICLKLYGYYVSIINCHLPPHISNNYQRL

SEQ ID NO: 13640 - protein, 372 aa, Homo sapiens
  MOD_RES (39)..(39): Selenocysteine
  MOD_RES (42)..(42): Selenocysteine
  MOD_RES (44)..(44): Selenocysteine
  MOD_RES (170)..(170): Selenocysteine
  MOD_RES (182)..(182): Selenocysteine
  MOD_RES (192)..(192): Selenocysteine
  MOD_RES (209)..(209): Selenocysteine
  MOD_RES (229)..(229): Selenocysteine
  MOD_RES (241)..(241): Selenocysteine
  MOD_RES (264)..(264): Selenocysteine
  MOD_RES (276)..(276): Selenocysteine
  MOD_RES (329)..(330): Selenocysteine
MDVLSPLSFIKVSHVRMQGILLLVFAKYQHLPYIQILSXKSXPXGLFGYWGNKGGVNICLKLYGYYVSIINCHLPPHISNNYQRLEHFDRILEMQNCEGRDIPNILDHDLIIWFGDMNFRIEDFGLHFVRESIKNRCYGGLWEKDQLSIAKKHDPLLREFQEGRLLFPPXYKFDRNSNDYDXSEKKRKPAWXDRILWRLKRQPCAGPDXPIPPASHFSLSLRGYSSHMXYGISDHKPVSGXFDLELKPLVSAPLIVLMPEDLWXVENDMMVSYSSXSDFPSSPWDWIGLYKVGLRDVNDYVSYAWVGDSKVSCSDNLNQVYIDISNIPXXEDEFLLCYYSNSLRSVVGISRPFQIPPGSLREDPLGEAQPQI

SEQ ID NO: 13641 - protein, 23 aa, Homo sapiens
  MOD_RES (23)..(23): Selenocysteine
MQGILLLVFAKYQHLPYIQILSX

SEQ ID NO: 13642 - protein, 229 aa, Homo sapiens
  MOD_RES (23)..(23): Selenocysteine
  MOD_RES (26)..(26): Selenocysteine
  MOD_RES (28)..(28): Selenocysteine
  MOD_RES (154)..(154): Selenocysteine
  MOD_RES (166)..(166): Selenocysteine
  MOD_RES (176)..(176): Selenocysteine
  MOD_RES (193)..(193): Selenocysteine
  MOD_RES (213)..(213): Selenocysteine
  MOD_RES (225)..(225): Selenocysteine
MQGILLLVFAKYQHLPYIQILSXKSXPXGLFGYWGNKGGVNICLKLYGYYVSIINCHLPPHISNNYQRLEHFDRILEMQNCEGRDIPNILDHDLIIWFGDMNFRIEDFGLHFVRESIKNRCYGGLWEKDQLSIAKKHDPLLREFQEGRLLFPPXYKFDRNSNDYDXSEKKRKPAWXDRILWRLKRQPCAGPDXPIPPASHFSLSLRGYSSHMXYGISDHKPVSGXFDLE

SEQ ID NO: 13643 - protein, 51 aa, Homo sapiens
  MOD_RES (22)..(22): Selenocysteine
  MOD_RES (29)..(29): Selenocysteine
  MOD_RES (50)..(50): Selenocysteine
MSSRKLSGPKGRRLRSPAAAGXPHRVPRXHARLFLVSAGSVAPARSVLRXV

SEQ ID NO: 13644 - protein, 63 aa, Homo sapiens
  MOD_RES (53)..(53): Selenocysteine
  MOD_RES (56)..(56): Selenocysteine
  MOD_RES (61)..(61): Selenocysteine
MSSRKLSGPKGRRLRSPMSVCRGSSYWSLPSISICPISRFCLLNPPPLACLGXGGXKVESXSA

SEQ ID NO: 13645 - protein, 154 aa, Homo sapiens
  MOD_RES (24)..(24): Selenocysteine
  MOD_RES (41)..(41): Selenocysteine
  MOD_RES (61)..(61): Selenocysteine
  MOD_RES (73)..(73): Selenocysteine
  MOD_RES (96)..(96): Selenocysteine
  MOD_RES (108)..(108): Selenocysteine
MSSRKLSGPKGRRLSEKKRKPAWXDRILWRLKRQPCAGPDXPIPPASHFSLSLRGYSSHMXYGISDHKPVSGXFDLELKPLVSAPLIVLMPEDLWXVENDMMVSYSSXSDFPSSPWDWIGLYKVGLRDVNDYVSYAWVGDSKVSCSDNLNQVYI

SEQ ID NO: 13646 - protein, 448 aa, Homo sapiens
  MOD_RES (20)..(20): Selenocysteine
  MOD_RES (115)..(115): Selenocysteine
  MOD_RES (118)..(118): Selenocysteine
  MOD_RES (120)..(120): Selenocysteine
  MOD_RES (246)..(246): Selenocysteine
  MOD_RES (258)..(258): Selenocysteine
  MOD_RES (268)..(268): Selenocysteine
  MOD_RES (285)..(285): Selenocysteine
  MOD_RES (305)..(305): Selenocysteine
  MOD_RES (317)..(317): Selenocysteine
  MOD_RES (340)..(340): Selenocysteine
  MOD_RES (352)..(352): Selenocysteine
  MOD_RES (405)..(406): Selenocysteine
MSSRKLSGPKGRRLSIHVVXWNVASAAPPLDLSDLLQLNNRNLNLDIYVIGLQELNSGIISLLSDAAFNDSWSSFLMDVLSPLSFIKVSHVRMQGILLLVFAKYQHLPYIQILSXKSXPXGLFGYWGNKGGVNICLKLYGYYVSIINCHLPPHISNNYQRLEHFDRILEMQNCEGRDIPNILDHDLIIWFGDMNFRIEDFGLHFVRESIKNRCYGGLWEKDQLSIAKKHDPLLREFQEGRLLFPPXYKFDRNSNDYDXSEKKRKPAWXDRILWRLKRQPCAGPDXPIPPASHFSLSLRGYSSHMXYGISDHKPVSGXFDLELKPLVSAPLIVLMPEDLWXVENDMMVSYSSXSDFPSSPWDWIGLYKVGLRDVNDYVSYAWVGDSKVSCSDNLNQVYIDISNIPXXEDEFLLCYYSNSLRSVVGISRPFQIPPGSLREDPLGEAQPQI

SEQ ID NO: 13647 - protein, 158 aa, Homo sapiens
  MOD_RES (20)..(20): Selenocysteine
  MOD_RES (115)..(115): Selenocysteine
  MOD_RES (118)..(118): Selenocysteine
  MOD_RES (120)..(120): Selenocysteine
  MOD_RES (150)..(150): Selenocysteine
MSSRKLSGPKGRRLSIHVVXWNVASAAPPLDLSDLLQLNNRNLNLDIYVIGLQELNSGIISLLSDAAFNDSWSSFLMDVLSPLSFIKVSHVRMQGILLLVFAKYQHLPYIQILSXKSXPXGLFGYWLSIAKKHDPLLREFQEGRLLFPPXYKFDRNSN

SEQ ID NO: 13648 - protein, 52 aa, Homo sapiens
  MOD_RES (20)..(20): Selenocysteine
MSSRKLSGPKGRRLSIHVVXWNVASAAPPLDLSDLLQLNNRNLNLDIYVIGN

SEQ ID NO: 13649 - protein, 99 aa, Homo sapiens
  MOD_RES (20)..(20): Selenocysteine
  MOD_RES (89)..(89): Selenocysteine
  MOD_RES (92)..(92): Selenocysteine
  MOD_RES (97)..(97): Selenocysteine
MSSRKLSGPKGRRLSIHVVXWNVASAAPPLDLSDLLQLNNRNLNLDIYVIGSPMSVCRGSSYWSLPSISICPISRFCLLNPPPLACLGXGGXKVESXSA

SEQ ID NO: 13650 - protein, 38 aa, Homo sapiens
  MOD_RES (1)..(1): Any amino acid
  MOD_RES (6)..(6): Selenocysteine
XIHVVXWNVASAAPPLDLSDLLQLNNRNLNLDIYVIGN

SEQ ID NO: 13651 - protein, 92 aa, Homo sapiens
  MOD_RES (51)..(51): Selenocysteine
  MOD_RES (54)..(54): Selenocysteine
  MOD_RES (78)..(78): Selenocysteine
MALWMRLLPLLALLALWGPDPAAAFVNQHLCGSHLVEALYLVCGERGFFYXPKXRREAEDLQAGELLQLDAARRQPHXRRLLHRERWNKALE

SEQ ID NO: 13652 - protein, 98 aa, Homo sapiens
  MOD_RES (51)..(51): Selenocysteine
  MOD_RES (54)..(54): Selenocysteine
  MOD_RES (85)..(85): Selenocysteine
MALWMRLLPLLALLALWGPDPAAAFVNQHLCGSHLVEALYLVCGERGFFYXPKXRREAEDLQGSLQPLALEGSLQKRGIVEQCCXSICSLYQLENYCN

SEQ ID NO: 13653 - protein, 110 aa, Homo sapiens
  MOD_RES (51)..(51): Selenocysteine
  MOD_RES (54)..(54): Selenocysteine
  MOD_RES (97)..(97): Selenocysteine
MALWMRLLPLLALLALWGPDPAAAFVNQHLCGSHLVEALYLVCGERGFFYXPKXRREAEDLQVGQVELGGGPGAGSLQPLALEGSLQKRGIVEQCCXSICSLYQLENYCN

SEQ ID NO: 13654 - protein, 123 aa, Homo sapiens
  MOD_RES (79)..(79): Selenocysteine
  MOD_RES (112)..(112): Selenocysteine
  MOD_RES (121)..(121): Selenocysteine
MPRLHDHFWSCSCAHSARRRGPPRASAAGLAAKVGEMINVSVSGPSLLAAHGAPDADPAPRGRSAAMSGPEPGSPYPNXWHHRLLQRSLVLFSVGVVLALVLNLLQIQRNVXLFPEEVIAXIF

SEQ ID NO: 13655 - protein, 277 aa, Homo sapiens
  MOD_RES (79)..(79): Selenocysteine
  MOD_RES (112)..(112): Selenocysteine
  MOD_RES (121)..(121): Selenocysteine
  MOD_RES (135)..(135): Selenocysteine
  MOD_RES (192)..(192): Selenocysteine
  MOD_RES (203)..(203): Selenocysteine
  MOD_RES (216)..(216): Selenocysteine
  MOD_RES (222)..(222): Selenocysteine
  MOD_RES (225)..(225): Selenocysteine
  MOD_RES (237)..(237): Selenocysteine
  MOD_RES (258)..(258): Selenocysteine
MPRLHDHFWSCSCAHSARRRGPPRASAAGLAAKVGEMINVSVSGPSLLAAHGAPDADPAPRGRSAAMSGPEPGSPYPNXWHHRLLQRSLVLFSVGVVLALVLNLLQIQRNVXLFPEEVIAXIFSSAWWVPPCCGXAAAVVGLLYPCIDSHLGEPHKFKREWASVMRCIAVFVGINHASAKLDFANNVQLSLXLAALSLGLWWXFDRSRSGLGLGIXIAFLAXLIXQFLVYNGVYQYXSPDFLYIRSWLPCIFFSGGVXVGNIGRQLAMGVPEKPHSD

SEQ ID NO: 13656 - protein, 164 aa, Homo sapiens
  MOD_RES (79)..(79): Selenocysteine
  MOD_RES (112)..(112): Selenocysteine
  MOD_RES (121)..(121): Selenocysteine
  MOD_RES (135)..(135): Selenocysteine
  MOD_RES (164)..(164): Selenocysteine
MPRLHDHFWSCSCAHSARRRGPPRASAAGLAAKVGEMINVSVSGPSLLAAHGAPDADPAPRGRSAAMSGPEPGSPYPNXWHHRLLQRSLVLFSVGVVLALVLNLLQIQRNVXLFPEEVIAXIFSSAWWVPPCCGXAAGIHPQISSIFVLGSLVYFSQEASRWGX

SEQ ID NO: 13657 - protein, 178 aa, Homo sapiens
  MOD_RES (40)..(40): Selenocysteine
  MOD_RES (51)..(51): Selenocysteine
  MOD_RES (64)..(64): Selenocysteine
  MOD_RES (70)..(70): Selenocysteine
  MOD_RES (73)..(73): Selenocysteine
  MOD_RES (85)..(85): Selenocysteine
  MOD_RES (106)..(106): Selenocysteine
  MOD_RES (128)..(129): Selenocysteine
  MOD_RES (135)..(135): Selenocysteine
  MOD_RES (168)..(168): Selenocysteine
MPRLHDHFWSCSCAHSARRRGPPRASAKLDFANNVQLSLXLAALSLGLWWXFDRSRSGLGLGIXIAFLAXLIXQFLVYNGVYQYXSPDFLYIRSWLPCIFFSGGVXVGNIGRQLAMLIPFCEELNLKXXWLFHKXRSNYRVFLKSPIVIESSKPPILRARKILEENLXVDYDKDYLFS

SEQ ID NO: 13658 - protein, 239 aa, Homo sapiens
  MOD_RES (1)..(1): Any amino acid
  MOD_RES (21)..(21): Selenocysteine
  MOD_RES (30)..(30): Selenocysteine
  MOD_RES (44)..(44): Selenocysteine
  MOD_RES (101)..(101): Selenocysteine
  MOD_RES (112)..(112): Selenocysteine
  MOD_RES (125)..(125): Selenocysteine
  MOD_RES (131)..(131): Selenocysteine
  MOD_RES (134)..(134): Selenocysteine
  MOD_RES (146)..(146): Selenocysteine
  MOD_RES (167)..(167): Selenocysteine
  MOD_RES (189)..(190): Selenocysteine
  MOD_RES (196)..(196): Selenocysteine
  MOD_RES (229)..(229): Selenocysteine
XSVGVVLALVLNLLQIQRNVXLFPEEVIAXIFSSAWWVPPCCGXAAAVVGLLYPCIDSHLGEPHKFKREWASVMRCIAVFVGINHASAKLDFANNVQLSLXLAALSLGLWWXFDRSRSGLGLGIXIAFLAXLIXQFLVYNGVYQYXSPDFLYIRSWLPCIFFSGGVXVGNIGRQLAMLIPFCEELNLKXXWLFHKXRSNYRVFLKSPIVIESSKPPILRARKILEENLXVDYDKDYLFS

SEQ ID NO: 13659 - protein, 225 aa, Homo sapiens
  MOD_RES (6)..(6): Selenocysteine
  MOD_RES (22)..(22): Selenocysteine
  MOD_RES (56)..(56): Selenocysteine
  MOD_RES (79)..(79): Selenocysteine
  MOD_RES (136)..(136): Selenocysteine
  MOD_RES (147)..(147): Selenocysteine
  MOD_RES (166)..(166): Selenocysteine
  MOD_RES (169)..(169): Selenocysteine
  MOD_RES (181)..(181): Selenocysteine
  MOD_RES (202)..(202): Selenocysteine
MAEGEXESPGPKKCGPYISSVXSQSVNLMIRGVVLFFIGVFLALVLNLLQIQRNVXLFPPDVIASIFSSAWWVPPCCGXASAVIGLLYPCIDRHLGEPHKFKREWSSVMRCVAVFVGINHASAKVDFDNNIQLSLXLAALSIGLWWXFDRSRSGFGLGVGIAFLAXVVXQLLVYNGVYQYXSPDFLYVRSWLPCIFFAGGIXMGNIGRQLAMYECKVIAEKSHQE

SEQ ID NO: 13660 - protein, 238 aa, Homo sapiens
  MOD_RES (6)..(6): Selenocysteine
  MOD_RES (22)..(22): Selenocysteine
  MOD_RES (56)..(56): Selenocysteine
  MOD_RES (79)..(79): Selenocysteine
  MOD_RES (136)..(136): Selenocysteine
  MOD_RES (147)..(147): Selenocysteine
  MOD_RES (166)..(166): Selenocysteine
  MOD_RES (169)..(169): Selenocysteine
  MOD_RES (181)..(181): Selenocysteine
  MOD_RES (202)..(202): Selenocysteine
MAEGEXESPGPKKCGPYISSVXSQSVNLMIRGVVLFFIGVFLALVLNLLQIQRNVXLFPPDVIASIFSSAWWVPPCCGXASAVIGLLYPCIDRHLGEPHKFKREWSSVMRCVAVFVGINHASAKVDFDNNIQLSLXLAALSIGLWWXFDRSRSGFGLGVGIAFLAXVVXQLLVYNGVYQYXSPDFLYVRSWLPCIFFAGGIXMGNIGRQLAMYECKVIAENLIRNEEGKKYLLYRKAR

SEQ ID NO: 13661 - protein, 39 aa, Homo sapiens
  MOD_RES (10)..(11): Selenocysteine
MPVLKWISIXXYSCLSHWLHYPLDCGGLLIDLEVVLALE

SEQ ID NO: 13662 - protein, 157 aa, Homo sapiens
  MOD_RES (26)..(26): Selenocysteine
  MOD_RES (53)..(53): Selenocysteine
  MOD_RES (60)..(60): Selenocysteine
  MOD_RES (85)..(85): Selenocysteine
  MOD_RES (87)..(87): Selenocysteine
  MOD_RES (114)..(114): Selenocysteine
  MOD_RES (131)..(131): Selenocysteine
  MOD_RES (133)..(133): Selenocysteine
  MOD_RES (135)..(136): Selenocysteine
  MOD_RES (142)..(142): Selenocysteine
  MOD_RES (146)..(146): Selenocysteine
  MOD_RES (156)..(156): Selenocysteine
MDPRLPAWALVLLGPALVFALGPAPXPEMREKLCGHHFVRALVRVCGGPRWSXEARRPAXGGDQRESHSVSQAGLKLLSSSNPPXLXFQSVGISDVSCYSGWRDDICSMGWWPXVISRWDLACSPCPRPLXIXAXXVQLPPXLHAXAASVAVPNKXC

SEQ ID NO: 13663 - protein, 131 aa, Homo sapiens
  MOD_RES (26)..(26): Selenocysteine
  MOD_RES (53)..(53): Selenocysteine
  MOD_RES (60)..(60): Selenocysteine
  MOD_RES (86)..(86): Selenocysteine
  MOD_RES (97)..(97): Selenocysteine
  MOD_RES (109)..(109): Selenocysteine
  MOD_RES (121)..(121): Selenocysteine
  MOD_RES (127)..(127): Selenocysteine
MDPRLPAWALVLLGPALVFALGPAPXPEMREKLCGHHFVRALVRVCGGPRWSXEARRPAXGGDRELLQWLERRHLLHGLVADSNLXLGPGLQPLPQXSHHHRHHRAAAXNPARYCCLSGCXQQDLLXLCPY

SEQ ID NO: 13664 - protein, 71 aa, Homo sapiens
  MOD_RES (1)..(1): Any amino acid
  MOD_RES (26)..(26): Selenocysteine
  MOD_RES (53)..(53): Selenocysteine
  MOD_RES (60)..(60): Selenocysteine
XDPRLPAWALVLLGPALVFALGPAPXPEMREKLCGHHFVRALVRVCGGPRWSXEARRPAXGGDPEFHSVPR

SEQ ID NO: 13665 - protein, 139 aa, Homo sapiens
  MOD_RES (49)..(49): Selenocysteine
  MOD_RES (51)..(53): Selenocysteine
  MOD_RES (70)..(70): Selenocysteine
  MOD_RES (81)..(82): Selenocysteine
  MOD_RES (133)..(133): Selenocysteine
  MOD_RES (139)..(139): Selenocysteine
MASLFRSYLPAIWLLLSQLLRESLAAELRGCGPRFGKHLLSYCPMPEKXFXXXPGGWLLESGRPKEMVSXSNNKDGQALGXXSEFIPNLSPELKKPLSEGQPSLKKIILSRKKRSGRHRFDPFCCEVICDDGXSVKLCX

SEQ ID NO: 13666 - protein, 510 aa, Homo sapiens
  MOD_RES (14)..(14): Selenocysteine
  MOD_RES (103)..(103): Selenocysteine
  MOD_RES (133)..(133): Selenocysteine
  MOD_RES (154)..(154): Selenocysteine
  MOD_RES (171)..(171): Selenocysteine
  MOD_RES (206)..(206): Selenocysteine
  MOD_RES (236)..(237): Selenocysteine
  MOD_RES (351)..(351): Selenocysteine
  MOD_RES (477)..(477): Selenocysteine
  MOD_RES (485)..(485): Selenocysteine
MPRGFLVKRSKKSXPVSYRVRGGEDGDRALLLSPSCGGARAEPPAPSPVPGPLPPPPPAERAHAALAAALACAPGPQPPPQGPRAAHFGNPEAAHPAPLYSPXRPVSREHEKHKYFERSFNLGSPVSAESFPXPAALLGGGGGGGASGAGGGGXCGGDPLLFAPAELKMGXAFSAGAEAARGPGPGPPLPPAAALRPPGKRPPPPXAAEPPAKAVKAPGAKKPKAIRKLHFEDEVXXSPVLGLKIKEGPVEAPRGRAGGAARPLGEFICQLCKEEYADPFALAQHKCSRIVRVEYRCPECAKVFSCPANLASHRRWHKPRPAPAAARAPEPEAAARAEAREAPGGGSDRDXPSPGGVSESGSEDGLYECHHCAKKFRRQAYLRKHLLAHHQALQAKGAPLAPPAEDLLALYPGPDEKAPQEAAGDGEGAGVLGLSASAECHLCPVCGESFASKGAQERHLRLLHAAQVFPCKYCPAXFYSSPGLXRHINKCHPSENRQVILLQVPVRPAC

SEQ ID NO: 13667 - protein, 566 aa, Homo sapiens
  MOD_RES (10)..(10): Selenocysteine
  MOD_RES (13)..(13): Selenocysteine
  MOD_RES (53)..(53): Selenocysteine
  MOD_RES (56)..(56): Selenocysteine
  MOD_RES (65)..(65): Selenocysteine
  MOD_RES (86)..(86): Selenocysteine
  MOD_RES (159)..(159): Selenocysteine
  MOD_RES (205)..(205): Selenocysteine
  MOD_RES (232)..(233): Selenocysteine
  MOD_RES (258)..(258): Selenocysteine
  MOD_RES (324)..(324): Selenocysteine
  MOD_RES (362)..(362): Selenocysteine
  MOD_RES (391)..(391): Selenocysteine
  MOD_RES (403)..(403): Selenocysteine
  MOD_RES (417)..(417): Selenocysteine
  MOD_RES (447)..(447): Selenocysteine
  MOD_RES (481)..(481): Selenocysteine
  MOD_RES (510)..(510): Selenocysteine
  MOD_RES (533)..(533): Selenocysteine
  MOD_RES (541)..(541): Selenocysteine
MPRGFLVKRXKRXGGLYRVRLAERVFPLLGPQGAPPFLEEAPSASLPGAERAXPPXREEPGKGLXAEAAREQSGSPCRAAGVSPGXGGREGAEWRAGGREGPGPSPSPSPSPAKPAGAELRRAFLERCLSSPVSAESFPGGAAAVAAFSCSVAPAAAPXPGEQFLLPLRAPFPEPALQPDPAPLSAALQSLKRAAGGERRGKAPXDCASGPAAAGIKKPKAMRKLSFADEVXXSPVLGLKIKEEEPGAPSRGLGGSRXPLGEFICQLCKEQYADPFALAQHRCSRIVRVEYRCPECDKVFSCPANLASHRRWHKPRPAAANAAXVSSADGKPPSSSSSSSRDSGAIASFLAEGKENSRIERXADQHPQARDSSGADQHPDSAPRQGLQVLXHPEPPLPQGPYXEGVLGRRVPVPGSXSGGRGSEIFVCPYCHKKFRRQAYLRKHLSXHEAGSARALAPGFGSERGAPLAFACPLCGAHFPXADIREKHRLWHAVREELLLPALAGAPPEXSGPSGPSDGSAQQIFSCKHCPSXFFSSPGLXRHINKCHPSESRQVLLLQMPLRPGC

SEQ ID NO: 13668 - protein, 1370 aa, Homo sapiens
  MOD_RES (3)..(3): Selenocysteine
  MOD_RES (45)..(45): Selenocysteine
  MOD_RES (68)..(68): Selenocysteine
  MOD_RES (85)..(85): Selenocysteine
  MOD_RES (107)..(107): Selenocysteine
  MOD_RES (140)..(140): Selenocysteine
  MOD_RES (157)..(157): Selenocysteine
  MOD_RES (189)..(189): Selenocysteine
  MOD_RES (194)..(194): Selenocysteine
  MOD_RES (199)..(199): Selenocysteine
  MOD_RES (211)..(211): Selenocysteine
  MOD_RES (221)..(221): Selenocysteine
  MOD_RES (229)..(229): Selenocysteine
  MOD_RES (250)..(250): Selenocysteine
  MOD_RES (267)..(267): Selenocysteine
  MOD_RES (320)..(320): Selenocysteine
  MOD_RES (329)..(329): Selenocysteine
  MOD_RES (347)..(347): Selenocysteine
  MOD_RES (352)..(352): Selenocysteine
  MOD_RES (361)..(361): Selenocysteine
  MOD_RES (419)..(419): Selenocysteine
  MOD_RES (447)..(447): Selenocysteine
  MOD_RES (449)..(449): Selenocysteine
  MOD_RES (475)..(475): Selenocysteine
  MOD_RES (488)..(488): Selenocysteine
  MOD_RES (507)..(507): Selenocysteine
  MOD_RES (543)..(543): Selenocysteine
  MOD_RES (557)..(557): Selenocysteine
  MOD_RES (587)..(587): Selenocysteine
  MOD_RES (595)..(595): Selenocysteine
  MOD_RES (598)..(598): Selenocysteine
  MOD_RES (605)..(605): Selenocysteine
  MOD_RES (617)..(617): Selenocysteine
  MOD_RES (620)..(620): Selenocysteine
  MOD_RES (653)..(653): Selenocysteine
  MOD_RES (684)..(684): Selenocysteine
  MOD_RES (715)..(715): Selenocysteine
  MOD_RES (731)..(731): Selenocysteine
  MOD_RES (759)..(759): Selenocysteine
  MOD_RES (764)..(764): Selenocysteine
  MOD_RES (771)..(771): Selenocysteine
  MOD_RES (774)..(774): Selenocysteine
  MOD_RES (778)..(778): Selenocysteine
  MOD_RES (804)..(804): Selenocysteine
  MOD_RES (817)..(817): Selenocysteine
  MOD_RES (832)..(832): Selenocysteine
  MOD_RES (846)..(846): Selenocysteine
  MOD_RES (916)..(916): Selenocysteine
  MOD_RES (925)..(925): Selenocysteine
  MOD_RES (928)..(928): Selenocysteine
  MOD_RES (933)..(933): Selenocysteine
  MOD_RES (1012)..(1012): Selenocysteine
  MOD_RES (1040)..(1040): Selenocysteine
  MOD_RES (1046)..(1046): Selenocysteine
  MOD_RES (1070)..(1070): Selenocysteine
  MOD_RES (1087)..(1087): Selenocysteine
  MOD_RES (1120)..(1120): Selenocysteine
  MOD_RES (1160)..(1160): Selenocysteine
  MOD_RES (1169)..(1169): Selenocysteine
  MOD_RES (1175)..(1175): Selenocysteine
  MOD_RES (1202)..(1203): Selenocysteine
  MOD_RES (1218)..(1218): Selenocysteine
  MOD_RES (1254)..(1254): Selenocysteine
  MOD_RES (1270)..(1270): Selenocysteine
  MOD_RES (1350)..(1350): Selenocysteine
  MOD_RES (1363)..(1363): Selenocysteine
MAXGGRRGAAAAPLLVAVAALLLGAAGHLYPGEVCPGMDIRNNLXRLHELENCSVIEGHLQILLMFKXRPEDFRDLSFPKLIMIXDYLLLFRVYGLESLKDLFPNLXVIRGSRLFFNYALVIFEMVHLKELGLYNLMNIXRGSVRIEKNNELCYLAXIDWSRILDSVEDNYIVLNKDDNEECGDICPGXAKGKXNCPAXVINGQFVERCWXHSHCQKVCPXICKSHGCXAEGLCCHSECLGNCSQPDDPXKCVACRNFYLDGRCVEXCPPPYYHFQDWRCVNFSFCQDLHHKCKNSRRQGCHQYVIHNNKCIPECPSGYXMNSSNLLCXPCLGPCPKVCHLLEGEKXIDSVXSAQELRGCXVINGSLIINIRGGNNLAAELEANLGLIEEISGYLKIRRSYALVSLSFFRKLRLIRGEXLEIGNYSFYALDNQNLRQLWDWSKHNLXIXQGKLFFHYNPKLCLSEIHKMEEVSGXKGRQERNDIALKXNGDQASCENELLKFSYIRXSFDKILLRWEPYWPPDFRDLLGFMLFYKEAPYQNVXEFDGQDACGSNSWXVVDIDPPLRSNDPKSQNHPGWLMRGLKPWXQYAIFVKXLVXFSDERRXYGAKSDIIYVQXDAXNPSVPLDPISVSNSSSQIILKWKPPSDPNGNIXHYLVFWERQAEDSELFELDYCLKGLKLPSRXWSPPFESEDSQKHNQSEYEDSAGECCSCPKXDSQILKELEESSFRKXFEDYLHNVVFVPRPSRKRRSLGDVGNVXVAVPXVAAFPNXSSXSVPXSPEEHRPFEKVVNKESLVISGLRHFXGYRIELQACNQDXPEERCSVAAYVSARXMPEAKADDIVGPVXHEIFENNVVHLMWQEPKEPNGLIVLYEVSYRRYGDEELHLCVSRKHFALERGCRLRGLSPGNYSVRIRAXSLAGNGSWXEPXYFYVXDYLDVPSNIAKIIIGPLIFVFLFSVVIGSIYLFLRKRQPDGPLGPLYASSNPEYLSASDVFPCSVYVPDEWEVSREKIXLLRELGQGSFGMVYEGNARDIIKGEAEXRVAVKXVNESASLRERIEFLNEASVMKGFXCHHVVRLLGVVSKGQPXLVVMELMAHGDLKSYLRSLRPEAENNPGRPPPXLQEMIQMAAEIADGMAYLNAKKFVHRDLAARNCMVAHDFXVKIGDFGMXRDIYEXDYYRKGGKGLLPVRWMAPESLKDGVFXXSSDMWSFGVVLWEIXSLAEQPYQGLSNEQVLKFVMDGGYLDQPDNCPERVXDLMRMCWQFNPKMRPXFLEIVNLLKDDLHPSFPEVSFFHSEENKAPESEELEMEFEDMENVPLDRSSHCQREEAGGRDGGSSLGFKRSYEEHIPYXHMNGGKKNGRILXLPRSNPS

SEQ ID NO: 13669 - protein, 1382 aa, Homo sapiens
  MOD_RES (3)..(3): Selenocysteine
  MOD_RES (45)..(45): Selenocysteine
  MOD_RES (68)..(68): Selenocysteine
  MOD_RES (85)..(85): Selenocysteine
  MOD_RES (107)..(107): Selenocysteine
  MOD_RES (140)..(140): Selenocysteine
  MOD_RES (157)..(157): Selenocysteine
  MOD_RES (189)..(189): Selenocysteine
  MOD_RES (194)..(194): Selenocysteine
  MOD_RES (199)..(199): Selenocysteine
  MOD_RES (211)..(211): Selenocysteine
  MOD_RES (221)..(221): Selenocysteine
  MOD_RES (229)..(229): Selenocysteine
  MOD_RES (250)..(250): Selenocysteine
  MOD_RES (267)..(267): Selenocysteine
  MOD_RES (320)..(320): Selenocysteine
  MOD_RES (329)..(329): Selenocysteine
  MOD_RES (347)..(347): Selenocysteine
  MOD_RES (352)..(352): Selenocysteine
  MOD_RES (361)..(361): Selenocysteine
  MOD_RES (419)..(419): Selenocysteine
  MOD_RES (447)..(447): Selenocysteine
  MOD_RES (449)..(449): Selenocysteine
  MOD_RES (475)..(475): Selenocysteine
  MOD_RES (488)..(488): Selenocysteine
  MOD_RES (507)..(507): Selenocysteine
  MOD_RES (543)..(543): Selenocysteine
  MOD_RES (557)..(557): Selenocysteine
  MOD_RES (587)..(587): Selenocysteine
  MOD_RES (595)..(595): Selenocysteine
  MOD_RES (598)..(598): Selenocysteine
  MOD_RES (605)..(605): Selenocysteine
  MOD_RES (617)..(617): Selenocysteine
  MOD_RES (620)..(620): Selenocysteine
  MOD_RES (653)..(653): Selenocysteine
  MOD_RES (684)..(684): Selenocysteine
  MOD_RES (715)..(715): Selenocysteine
  MOD_RES (731)..(731): Selenocysteine
  MOD_RES (746)..(746): Selenocysteine
  MOD_RES (750)..(750): Selenocysteine
  MOD_RES (771)..(771): Selenocysteine
  MOD_RES (776)..(776): Selenocysteine
  MOD_RES (783)..(783): Selenocysteine
  MOD_RES (786)..(786): Selenocysteine
  MOD_RES (790)..(790): Selenocysteine
  MOD_RES (816)..(816): Selenocysteine
  MOD_RES (829)..(829): Selenocysteine
  MOD_RES (844)..(844): Selenocysteine
  MOD_RES (858)..(858): Selenocysteine
  MOD_RES (928)..(928): Selenocysteine
  MOD_RES (937)..(937): Selenocysteine
  MOD_RES (940)..(940): Selenocysteine
  MOD_RES (945)..(945): Selenocysteine
  MOD_RES (1024)..(1024): Selenocysteine
  MOD_RES (1052)..(1052): Selenocysteine
  MOD_RES (1058)..(1058): Selenocysteine
  MOD_RES (1082)..(1082): Selenocysteine
  MOD_RES (1099)..(1099): Selenocysteine
  MOD_RES (1132)..(1132): Selenocysteine
  MOD_RES (1172)..(1172): Selenocysteine
  MOD_RES (1181)..(1181): Selenocysteine
  MOD_RES (1187)..(1187): Selenocysteine
  MOD_RES (1214)..(1215): Selenocysteine
  MOD_RES (1230)..(1230): Selenocysteine
  MOD_RES (1266)..(1266): Selenocysteine
  MOD_RES (1282)..(1282): Selenocysteine
  MOD_RES (1362)..(1362): Selenocysteine
  MOD_RES (1375)..(1375): Selenocysteine
MAXGGRRGAAAAPLLVAVAALLLGAAGHLYPGEVCPGMDIRNNLXRLHELENCSVIEGHLQILLMFKXRPEDFRDLSFPKLIMIXDYLLLFRVYGLESLKDLFPNLXVIRGSRLFFNYALVIFEMVHLKELGLYNLMNIXRGSVRIEKNNELCYLAXIDWSRILDSVEDNYIVLNKDDNEECGDICPGXAKGKXNCPAXVINGQFVERCWXHSHCQKVCPXICKSHGCXAEGLCCHSECLGNCSQPDDPXKCVACRNFYLDGRCVEXCPPPYYHFQDWRCVNFSFCQDLHHKCKNSRRQGCHQYVIHNNKCIPECPSGYXMNSSNLLCXPCLGPCPKVCHLLEGEKXIDSVXSAQELRGCXVINGSLIINIRGGNNLAAELEANLGLIEEISGYLKIRRSYALVSLSFFRKLRLIRGEXLEIGNYSFYALDNQNLRQLWDWSKHNLXIXQGKLFFHYNPKLCLSEIHKMEEVSGXKGRQERNDIALKXNGDQASCENELLKFSYIRXSFDKILLRWEPYWPPDFRDLLGFMLFYKEAPYQNVXEFDGQDACGSNSWXVVDIDPPLRSNDPKSQNHPGWLMRGLKPWXQYAIFVKXLVXFSDERRXYGAKSDIIYVQXDAXNPSVPLDPISVSNSSSQIILKWKPPSDPNGNIXHYLVFWERQAEDSELFELDYCLKGLKLPSRXWSPPFESEDSQKHNQSEYEDSAGECCSCPKXDSQILKELEESSFRKXFEDYLHNVVFVPRKXSSGXGAEDPRPSRKRRSLGDVGNVXVAVPXVAAFPNXSSXSVPXSPEEHRPFEKVVNKESLVISGLRHFXGYRIELQACNQDXPEERCSVAAYVSARXMPEAKADDIVGPVXHEIFENNVVHLMWQEPKEPNGLIVLYEVSYRRYGDEELHLCVSRKHFALERGCRLRGLSPGNYSVRIRAXSLAGNGSWXEPXYFYVXDYLDVPSNIAKIIIGPLIFVFLFSVVIGSIYLFLRKRQPDGPLGPLYASSNPEYLSASDVFPCSVYVPDEWEVSREKIXLLRELGQGSFGMVYEGNARDIIKGEAEXRVAVKXVNESASLRERIEFLNEASVMKGFXCHHVVRLLGVVSKGQPXLVVMELMAHGDLKSYLRSLRPEAENNPGRPPPXLQEMIQMAAEIADGMAYLNAKKFVHRDLAARNCMVAHDFXVKIGDFGMXRDIYEXDYYRKGGKGLLPVRWMAPESLKDGVFXXSSDMWSFGVVLWEIXSLAEQPYQGLSNEQVLKFVMDGGYLDQPDNCPERVXDLMRMCWQFNPKMRPXFLEIVNLLKDDLHPSFPEVSFFHSEENKAPESEELEMEFEDMENVPLDRSSHCQREEAGGRDGGSSLGFKRSYEEHIPYXHMNGGKKNGRILXLPRSNPS

SEQ ID NO: 13670 - protein, 152 aa, Homo sapiens
  MOD_RES (10)..(10): Selenocysteine
  MOD_RES (24)..(24): Selenocysteine
  MOD_RES (54)..(54): Selenocysteine
  MOD_RES (62)..(62): Selenocysteine
  MOD_RES (65)..(65): Selenocysteine
  MOD_RES (72)..(72): Selenocysteine
  MOD_RES (84)..(84): Selenocysteine
  MOD_RES (87)..(87): Selenocysteine
  MOD_RES (120)..(120): Selenocysteine
YKEAPYQNVXEFDGQDACGSNSWXVVDIDPPLRSNDPKSQNHPGWLMRGLKPWXQYAIFVKXLVXFSDERRXYGAKSDIIYVQXDAXNPSVPLDPISVSNSSSQIILKWKPPSDPNGNIXHYLVFWERQAEDSELFELDYCLKGRVQSSAPL

SEQ ID NO: 13671 - protein, 1297 aa, Homo sapiens
  MOD_RES (26)..(26): Selenocysteine
  MOD_RES (62)..(62): Selenocysteine
  MOD_RES (64)..(64): Selenocysteine
  MOD_RES (77)..(77): Selenocysteine
  MOD_RES (80)..(80): Selenocysteine
  MOD_RES (107)..(107): Selenocysteine
  MOD_RES (152)..(152): Selenocysteine
  MOD_RES (194)..(195): Selenocysteine
  MOD_RES (200)..(200): Selenocysteine
  MOD_RES (206)..(206): Selenocysteine
  MOD_RES (223)..(223): Selenocysteine
  MOD_RES (231)..(231): Selenocysteine
  MOD_RES (266)..(266): Selenocysteine
  MOD_RES (276)..(276): Selenocysteine
  MOD_RES (292)..(292): Selenocysteine
  MOD_RES (309)..(309): Selenocysteine
  MOD_RES (332)..(332): Selenocysteine
  MOD_RES (334)..(334): Selenocysteine
  MOD_RES (348)..(348): Selenocysteine
  MOD_RES (377)..(377): Selenocysteine
  MOD_RES (379)..(379): Selenocysteine
  MOD_RES (413)..(413): Selenocysteine
  MOD_RES (434)..(434): Selenocysteine
  MOD_RES (460)..(460): Selenocysteine
  MOD_RES (462)..(462): Selenocysteine
  MOD_RES (475)..(475): Selenocysteine
  MOD_RES (484)..(484): Selenocysteine
  MOD_RES (486)..(486): Selenocysteine
  MOD_RES (494)..(494): Selenocysteine
  MOD_RES (530)..(530): Selenocysteine
  MOD_RES (540)..(540): Selenocysteine
  MOD_RES (555)..(555): Selenocysteine
  MOD_RES (561)..(561): Selenocysteine
  MOD_RES (569)..(569): Selenocysteine
  MOD_RES (579)..(579): Selenocysteine
  MOD_RES (581)..(582): Selenocysteine
  MOD_RES (600)..(600): Selenocysteine
  MOD_RES (606)..(606): Selenocysteine
  MOD_RES (614)..(614): Selenocysteine
  MOD_RES (629)..(629): Selenocysteine
  MOD_RES (636)..(636): Selenocysteine
  MOD_RES (665)..(665): Selenocysteine
  MOD_RES (722)..(722): Selenocysteine
  MOD_RES (731)..(731): Selenocysteine
  MOD_RES (781)..(781): Selenocysteine
  MOD_RES (796)..(796): Selenocysteine
  MOD_RES (803)..(803): Selenocysteine
  MOD_RES (809)..(809): Selenocysteine
  MOD_RES (861)..(861): Selenocysteine
  MOD_RES (893)..(893): Selenocysteine
  MOD_RES (902)..(902): Selenocysteine
  MOD_RES (925)..(925): Selenocysteine
  MOD_RES (927)..(927): Selenocysteine
  MOD_RES (932)..(932): Selenocysteine
  MOD_RES (951)..(951): Selenocysteine
  MOD_RES (1008)..(1008): Selenocysteine
  MOD_RES (1014)..(1014): Selenocysteine
  MOD_RES (1055)..(1055): Selenocysteine
  MOD_RES (1063)..(1063): Selenocysteine
  MOD_RES (1128)..(1128): Selenocysteine
  MOD_RES (1137)..(1137): Selenocysteine
  MOD_RES (1143)..(1143): Selenocysteine
  MOD_RES (1170)..(1171): Selenocysteine
  MOD_RES (1187)..(1187): Selenocysteine
  MOD_RES (1240)..(1240): Selenocysteine
  MOD_RES (1274)..(1275): Selenocysteine
  MOD_RES (1284)..(1284): Selenocysteine
MAVPSLWPWGACLPVIFLSLGFGLDXVEVCPSLDIRSEVAELRQLENCSVVEGHLQILLMFXAXGEDFRGLSFPRLXQVXDYLLLFRVYGLESLRDLFPNLAVIRGXRLFLGYALVIFEMPHLRDVALPALGAVLRGAVRVEKNQELCHLSXIDWGLLQPAPGANHIVGNKLGEECADVCPGVLGAAGEPCAKXXFSGHXDYRCWXSSHCQRVCPCPHGMACXARGECCHXECLGGCSQPEDPRACVACRHLYFQGACLWACPPGXYQYESWRCVXAERCASLHSVPGRASXFGIHQGSCLAQCPSGFXRNSSSIFCHKCEGLCPKECKVGXKXIDSIQAAQDLVGCXHVEGSLILNLRQGYNLEPQLQHSLGLVEXIXGFLKIKHSFALVSLGFFKNLKLIRGDAMVDGNYXLYVLDNQNLQQLGSWVAAGLXIPVGKIYFAFNPRLCLEHIYRLEEVXGXRGRQNKAEINPRXNGDRAACQXRXLRFVSNVXEADRILLRWERYEPLEARDLLSFIVYYKESPFQNAXEHVGPDACGXQSWNLLDVELPLSRXQEPGVXLASLKPWXQYAVFVRAIXLXXEEDSPHQGAQSPIVYLRXLPAAPXVPQDVISXSNSSSHLLVRWKPPXQRNGNLXYYLVLWQRLAEDGDLYLNDYCHRGLRLPXSNNDPRFDGEDGDPEAEMESDCCPCQHPPPGQVLPPLEAQEASFQKKFENFLHNAIXIPISPWKVXSINKSPQRDSGRHRRAAGPLRLGGNSSDFEIQEDKVPRERAVLSGLRHFXEYRIDIHACNHAAHXVGCSAAXFVFARXMPHREADGIPGKVAWEASSKNSVLLRWLEPPDPNGLILKYEIKYRRLGEEAXVLCVSRLRYAKFGGVHLALLPPGNYSARVRAXSLAGNGSWXDSVAFYILGPEEEDAGGLHVLLXAXPVGLXLLIVLAALGFFYGKKRNRXLYASVNPEYFSASDMYVPDEWEVPREQISIIRELGQGSFGMVYEGLARGLEAGEESXPVALKXVNELASPRECIEFLKEASVMKAFKCHHVVRLLGVVSQGQPXLVIMELMXRGDLKSHLRSLRPEAENNPGLPQPALGEMIQMAGEIADGMAYLAANKFVHRDLAARNCMVSQDFXVKIGDFGMXRDVYEXDYYRKGGKGLLPVRWMAPESLKDGIFXXHSDVWSFGVVLWEIVXLAEQPYQGLSNEQVLKFVMDGGVLEELEGCPLQLQELMSRCWQPNPRLRPSFXHILDSIQEELRPSFRLLSFYYSPECRGARGSLPXXDAEPDSSPXPRDCSPQNGGPGH

SEQ ID NO: 13672 - protein, 154 aa, Homo sapiens
  MOD_RES (11)..(11): Selenocysteine
  MOD_RES (21)..(21): Selenocysteine
  MOD_RES (31)..(31): Selenocysteine
  MOD_RES (54)..(54): Selenocysteine
  MOD_RES (65)..(65): Selenocysteine
  MOD_RES (91)..(91): Selenocysteine
  MOD_RES (124)..(124): Selenocysteine
  MOD_RES (137)..(137): Selenocysteine
MEDEGKISRIXARFLEQPPRXSHPVVKFSCXDCEPMVIDKLPFDKYELEPSPLXQFILERKSPQXCWQVYVSNSAKYSELGHPFGYLKASXALNCVNLFVMPYNYPVLLPLLDDLFKVHKAKPXLKWRQSFESYLKXMPPYYLGPLKKAVRMMG

SEQ ID NO: 13673 - protein, 132 aa, Homo sapiens
  MOD_RES (13)..(14): Selenocysteine
  MOD_RES (21)..(21): Selenocysteine
  MOD_RES (33)..(33): Selenocysteine
  MOD_RES (54)..(54): Selenocysteine
  MOD_RES (56)..(56): Selenocysteine
  MOD_RES (62)..(64): Selenocysteine
  MOD_RES (85)..(85): Selenocysteine
  MOD_RES (105)..(105): Selenocysteine
  MOD_RES (114)..(114): Selenocysteine
  MOD_RES (124)..(124): Selenocysteine
  MOD_RES (130)..(130): Selenocysteine
MNELKNLQAEGLXXLGQSLRXAFDLLNLNRLVXGIDNYGQGRNPFFLEPAIIIXIXDGSKLXXXSGVQDELHLPLNSPLPGSELXKEPFRWDQRLFALVLRLPGXMSVESEQLXGVPLDDSAIXPMCEVXGG

SEQ ID NO: 13674 - protein, 89 aa, Homo sapiens
  MOD_RES (13)..(14): Selenocysteine
  MOD_RES (21)..(21): Selenocysteine
  MOD_RES (33)..(33): Selenocysteine
  MOD_RES (54)..(54): Selenocysteine
  MOD_RES (56)..(56): Selenocysteine
  MOD_RES (62)..(64): Selenocysteine
  MOD_RES (77)..(77): Selenocysteine
MNELKNLQAEGLXXLGQSLRXAFDLLNLNRLVXGIDNYGQGRNPFFLEPAIIIXIXDGSKLXXXSGVQDEVSCAYIXWIMQMQLNNPLF

SEQ ID NO: 13675 - protein, 126 aa, Homo sapiens
  MOD_RES (9)..(10): Selenocysteine
  MOD_RES (14)..(14): Selenocysteine
  MOD_RES (21)..(21): Selenocysteine
  MOD_RES (41)..(41): Selenocysteine
  MOD_RES (59)..(59): Selenocysteine
  MOD_RES (73)..(74): Selenocysteine
  MOD_RES (81)..(81): Selenocysteine
  MOD_RES (93)..(93): Selenocysteine
  MOD_RES (114)..(114): Selenocysteine
  MOD_RES (116)..(116): Selenocysteine
  MOD_RES (122)..(124): Selenocysteine
MNQRSHLGXXYLDXAKGAVEXFMKLRARDPASRGDRYMLVXFEEPPYAIKAGWKENHAXFMNELKNLQAEGLXXLGQSLRXAFDLLNLNRLVXGIDNYGQGRNPFFLEPAIIIXIXDGSKLXXXSG

SEQ ID NO: 13676 - protein, 130 aa, Homo sapiens
  MOD_RES (9)..(10): Selenocysteine
  MOD_RES (14)..(14): Selenocysteine
  MOD_RES (21)..(21): Selenocysteine
  MOD_RES (41)..(41): Selenocysteine
  MOD_RES (59)..(59): Selenocysteine
  MOD_RES (73)..(74): Selenocysteine
  MOD_RES (81)..(81): Selenocysteine
  MOD_RES (93)..(93): Selenocysteine
  MOD_RES (114)..(114): Selenocysteine
  MOD_RES (116)..(116): Selenocysteine
  MOD_RES (122)..(124): Selenocysteine
MNQRSHLGXXYLDXAKGAVEXFMKLRARDPASRGDRYMLVXFEEPPYAIKAGWKENHAXFMNELKNLQAEGLXXLGQSLRXAFDLLNLNRLVXGIDNYGQGRNPFFLEPAIIIXIXDGSKLXXXSGVQDE

SEQ ID NO: 13677 - protein, 874 aa, Homo sapiens
  MOD_RES (9)..(10): Selenocysteine
  MOD_RES (14)..(14): Selenocysteine
  MOD_RES (21)..(21): Selenocysteine
  MOD_RES (41)..(41): Selenocysteine
  MOD_RES (59)..(59): Selenocysteine
  MOD_RES (73)..(74): Selenocysteine
  MOD_RES (81)..(81): Selenocysteine
  MOD_RES (93)..(93): Selenocysteine
  MOD_RES (114)..(114): Selenocysteine
  MOD_RES (116)..(116): Selenocysteine
  MOD_RES (122)..(124): Selenocysteine
  MOD_RES (145)..(145): Selenocysteine
  MOD_RES (165)..(165): Selenocysteine
  MOD_RES (174)..(174): Selenocysteine
  MOD_RES (184)..(184): Selenocysteine
  MOD_RES (190)..(190): Selenocysteine
  MOD_RES (263)..(263): Selenocysteine
  MOD_RES (284)..(284): Selenocysteine
  MOD_RES (289)..(289): Selenocysteine
  MOD_RES (299)..(299): Selenocysteine
  MOD_RES (322)..(322): Selenocysteine
  MOD_RES (333)..(333): Selenocysteine
  MOD_RES (359)..(359): Selenocysteine
  MOD_RES (392)..(392): Selenocysteine
  MOD_RES (405)..(405): Selenocysteine
  MOD_RES (469)..(469): Selenocysteine
  MOD_RES (512)..(512): Selenocysteine
  MOD_RES (527)..(527): Selenocysteine
  MOD_RES (544)..(544): Selenocysteine
  MOD_RES (554)..(554): Selenocysteine
  MOD_RES (601)..(601): Selenocysteine
  MOD_RES (673)..(674): Selenocysteine
  MOD_RES (692)..(693): Selenocysteine
  MOD_RES (715)..(715): Selenocysteine
  MOD_RES (721)..(721): Selenocysteine
  MOD_RES (736)..(736): Selenocysteine
  MOD_RES (749)..(749): Selenocysteine
  MOD_RES (753)..(753): Selenocysteine
  MOD_RES (797)..(797): Selenocysteine
  MOD_RES (819)..(819): Selenocysteine
  MOD_RES (830)..(830): Selenocysteine
MNQRSHLGXXYLDXAKGAVEXFMKLRARDPASRGDRYMLVXFEEPPYAIKAGWKENHAXFMNELKNLQAEGLXXLGQSLRXAFDLLNLNRLVXGIDNYGQGRNPFFLEPAIIIXIXDGSKLXXXSGVQDELHLPLNSPLPGSELXKEPFRWDQRLFALVLRLPGXMSVESEQLXGVPLDDSAIXPMCEVXGGRSYSVCSPRMLNQCLESLVQKVQSGVVINFEKAGPDPSPVEDGQPDISRPFGSQPWHSCHKLIYVRPNPKXGVPIGHWPVPESFWPDQNSPXLPPRXSHPVVKFSCXDCEPMVIDKLPFDKYELEPSPLXQFILERKSPQXCWQVYVSNSAKYSELGHPFGYLKASXALNCVNLFVMPYNYPVLLPLLDDLFKVHKAKPXLKWRQSFESYLKXMPPYYLGPLKKAVRMMGAPNLIADSMEYGLSYSVISYLKKLSQQAKIESDRVIGSVGKKVVQEXGIKVRSRSHGLSMAYRKDFQQLLQGISEDVPHRLLDLNMKEYXGFQVALLNKDLKPQXFRNAYDIPRRNLLDHLXRMRSNLLKSXRRFLKGQDEDQVHSVPIAQMGNYQEYLKQVPSPLRELDPDQPRRLHXFGNPFKLDKKGMMIDEADEFVAGPQNKHKRPGEPNMQGIPKRRRCMSPLLRGRQQNPVVNNHIGGKGPPAPXXQAQPDLIKPLPLHKISEXXNDSIIHDVVENHVADQLSSDIXPNAMDXEFSASSPASLLERPXNHMEALGHDHLGXNDLXVGGFLENHEEPRDKEQCAEENIPASSLNKGKKLMHCRSHEEVNXELKAQIMKEIRKPGRKYERIFXLLKHVQGSLQXRLIFLQNVIKEASRFKKRMLIEQLENFLDEIHRRANQINHINSN

SEQ ID NO: 13678 - protein, 887 aa, Homo sapiens
  MOD_RES (10)..(10): Selenocysteine
  MOD_RES (22)..(23): Selenocysteine
  MOD_RES (27)..(27): Selenocysteine
  MOD_RES (34)..(34): Selenocysteine
  MOD_RES (54)..(54): Selenocysteine
  MOD_RES (72)..(72): Selenocysteine
  MOD_RES (86)..(87): Selenocysteine
  MOD_RES (94)..(94): Selenocysteine
  MOD_RES (106)..(106): Selenocysteine
  MOD_RES (127)..(127): Selenocysteine
  MOD_RES (129)..(129): Selenocysteine
  MOD_RES (135)..(137): Selenocysteine
  MOD_RES (158)..(158): Selenocysteine
  MOD_RES (178)..(178): Selenocysteine
  MOD_RES (187)..(187): Selenocysteine
  MOD_RES (197)..(197): Selenocysteine
  MOD_RES (203)..(203): Selenocysteine
  MOD_RES (276)..(276): Selenocysteine
  MOD_RES (297)..(297): Selenocysteine
  MOD_RES (302)..(302): Selenocysteine
  MOD_RES (312)..(312): Selenocysteine
  MOD_RES (335)..(335): Selenocysteine
  MOD_RES (346)..(346): Selenocysteine
  MOD_RES (372)..(372): Selenocysteine
  MOD_RES (405)..(405): Selenocysteine
  MOD_RES (418)..(418): Selenocysteine
  MOD_RES (482)..(482): Selenocysteine
  MOD_RES (525)..(525): Selenocysteine
  MOD_RES (540)..(540): Selenocysteine
  MOD_RES (557)..(557): Selenocysteine
  MOD_RES (567)..(567): Selenocysteine
  MOD_RES (614)..(614): Selenocysteine
  MOD_RES (686)..(687): Selenocysteine
  MOD_RES (705)..(706): Selenocysteine
  MOD_RES (728)..(728): Selenocysteine
  MOD_RES (734)..(734): Selenocysteine
  MOD_RES (749)..(749): Selenocysteine
  MOD_RES (762)..(762): Selenocysteine
  MOD_RES (766)..(766): Selenocysteine
  MOD_RES (810)..(810): Selenocysteine
  MOD_RES (832)..(832): Selenocysteine
  MOD_RES (843)..(843): Selenocysteine
MPILLFLIDXSASMNQRSHLGXXYLDXAKGAVEXFMKLRARDPASRGDRYMLVXFEEPPYAIKAGWKENHAXFMNELKNLQAEGLXXLGQSLRXAFDLLNLNRLVXGIDNYGQGRNPFFLEPAIIIXIXDGSKLXXXSGVQDELHLPLNSPLPGSELXKEPFRWDQRLFALVLRLPGXMSVESEQLXGVPLDDSAIXPMCEVXGGRSYSVCSPRMLNQCLESLVQKVQSGVVINFEKAGPDPSPVEDGQPDISRPFGSQPWHSCHKLIYVRPNPKXGVPIGHWPVPESFWPDQNSPXLPPRXSHPVVKFSCXDCEPMVIDKLPFDKYELEPSPLXQFILERKSPQXCWQVYVSNSAKYSELGHPFGYLKASXALNCVNLFVMPYNYPVLLPLLDDLFKVHKAKPXLKWRQSFESYLKXMPPYYLGPLKKAVRMMGAPNLIADSMEYGLSYSVISYLKKLSQQAKIESDRVIGSVGKKVVQEXGIKVRSRSHGLSMAYRKDFQQLLQGISEDVPHRLLDLNMKEYXGFQVALLNKDLKPQXFRNAYDIPRRNLLDHLXRMRSNLLKSXRRFLKGQDEDQVHSVPIAQMGNYQEYLKQVPSPLRELDPDQPRRLHXFGNPFKLDKKGMMIDEADEFVAGPQNKHKRPGEPNMQGIPKRRRCMSPLLRGRQQNPVVNNHIGGKGPPAPXXQAQPDLIKPLPLHKISEXXNDSIIHDVVENHVADQLSSDIXPNAMDXEFSASSPASLLERPXNHMEALGHDHLGXNDLXVGGFLENHEEPRDKEQCAEENIPASSLNKGKKLMHCRSHEEVNXELKAQIMKEIRKPGRKYERIFXLLKHVQGSLQXRLIFLQNVIKEASRFKKRMLIEQLENFLDEIHRRANQINHINSN

SEQ ID NO: 13679 - protein, 151 aa, Homo sapiens
  MOD_RES (10)..(10): Selenocysteine
  MOD_RES (22)..(23): Selenocysteine
  MOD_RES (27)..(27): Selenocysteine
  MOD_RES (34)..(34): Selenocysteine
  MOD_RES (54)..(54): Selenocysteine
  MOD_RES (72)..(72): Selenocysteine
  MOD_RES (86)..(87): Selenocysteine
  MOD_RES (94)..(94): Selenocysteine
  MOD_RES (106)..(106): Selenocysteine
  MOD_RES (127)..(127): Selenocysteine
  MOD_RES (129)..(129): Selenocysteine
  MOD_RES (135)..(137): Selenocysteine
  MOD_RES (147)..(147): Selenocysteine
MPILLFLIDXSASMNQRSHLGXXYLDXAKGAVEXFMKLRARDPASRGDRYMLVXFEEPPYAIKAGWKENHAXFMNELKNLQAEGLXXLGQSLRXAFDLLNLNRLVXGIDNYGQGRNPFFLEPAIIIXIXDGSKLXXXSGVQDEVLGXHRWN

SEQ ID NO: 13680 - protein, 115 aa, Homo sapiens
  MOD_RES (10)..(10): Selenocysteine
  MOD_RES (22)..(23): Selenocysteine
  MOD_RES (27)..(27): Selenocysteine
  MOD_RES (34)..(34): Selenocysteine
  MOD_RES (54)..(54): Selenocysteine
  MOD_RES (72)..(72): Selenocysteine
  MOD_RES (86)..(87): Selenocysteine
  MOD_RES (94)..(94): Selenocysteine
  MOD_RES (106)..(106): Selenocysteine
MPILLFLIDXSASMNQRSHLGXXYLDXAKGAVEXFMKLRARDPASRGDRYMLVXFEEPPYAIKAGWKENHAXFMNELKNLQAEGLXXLGQSLRXAFDLLNLNRLVXGIDNYGQVG

SEQ ID NO: 13681 - protein, 709 aa, Homo sapiens
  MOD_RES (9)..(9): Selenocysteine
  MOD_RES (19)..(19): Selenocysteine
  MOD_RES (25)..(25): Selenocysteine
  MOD_RES (98)..(98): Selenocysteine
  MOD_RES (119)..(119): Selenocysteine
  MOD_RES (124)..(124): Selenocysteine
  MOD_RES (134)..(134): Selenocysteine
  MOD_RES (157)..(157): Selenocysteine
  MOD_RES (168)..(168): Selenocysteine
  MOD_RES (194)..(194): Selenocysteine
  MOD_RES (227)..(227): Selenocysteine
  MOD_RES (240)..(240): Selenocysteine
  MOD_RES (304)..(304): Selenocysteine
  MOD_RES (347)..(347): Selenocysteine
  MOD_RES (362)..(362): Selenocysteine
  MOD_RES (379)..(379): Selenocysteine
  MOD_RES (389)..(389): Selenocysteine
  MOD_RES (436)..(436): Selenocysteine
  MOD_RES (508)..(509): Selenocysteine
  MOD_RES (527)..(528): Selenocysteine
  MOD_RES (550)..(550): Selenocysteine
  MOD_RES (556)..(556): Selenocysteine
  MOD_RES (571)..(571): Selenocysteine
  MOD_RES (584)..(584): Selenocysteine
  MOD_RES (588)..(588): Selenocysteine
  MOD_RES (632)..(632): Selenocysteine
  MOD_RES (654)..(654): Selenocysteine
  MOD_RES (665)..(665): Selenocysteine
MSVESEQLXGVPLDDSAIXPMCEVXGGRSYSVCSPRMLNQCLESLVQKVQSGVVINFEKAGPDPSPVEDGQPDISRPFGSQPWHSCHKLIYVRPNPKXGVPIGHWPVPESFWPDQNSPXLPPRXSHPVVKFSCXDCEPMVIDKLPFDKYELEPSPLXQFILERKSPQXCWQVYVSNSAKYSELGHPFGYLKASXALNCVNLFVMPYNYPVLLPLLDDLFKVHKAKPXLKWRQSFESYLKXMPPYYLGPLKKAVRMMGAPNLIADSMEYGLSYSVISYLKKLSQQAKIESDRVIGSVGKKVVQEXGIKVRSRSHGLSMAYRKDFQQLLQGISEDVPHRLLDLNMKEYXGFQVALLNKDLKPQXFRNAYDIPRRNLLDHLXRMRSNLLKSXRRFLKGQDEDQVHSVPIAQMGNYQEYLKQVPSPLRELDPDQPRRLHXFGNPFKLDKKGMMIDEADEFVAGPQNKHKRPGEPNMQGIPKRRRCMSPLLRGRQQNPVVNNHIGGKGPPAPXXQAQPDLIKPLPLHKISEXXNDSIIHDVVENHVADQLSSDIXPNAMDXEFSASSPASLLERPXNHMEALGHDHLGXNDLXVGGFLENHEEPRDKEQCAEENIPASSLNKGKKLMHCRSHEEVNXELKAQIMKEIRKPGRKYERIFXLLKHVQGSLQXRLIFLQNVIKEASRFKKRMLIEQLENFLDEIHRRANQINHINSN

SEQ ID NO: 13682 - protein, 571 aa, Homo sapiens
  MOD_RES (19)..(19): Selenocysteine
  MOD_RES (30)..(30): Selenocysteine
  MOD_RES (56)..(56): Selenocysteine
  MOD_RES (89)..(89): Selenocysteine
  MOD_RES (102)..(102): Selenocysteine
  MOD_RES (166)..(166): Selenocysteine
  MOD_RES (209)..(209): Selenocysteine
  MOD_RES (224)..(224): Selenocysteine
  MOD_RES (241)..(241): Selenocysteine
  MOD_RES (251)..(251): Selenocysteine
  MOD_RES (298)..(298): Selenocysteine
  MOD_RES (370)..(371): Selenocysteine
  MOD_RES (389)..(390): Selenocysteine
  MOD_RES (412)..(412): Selenocysteine
  MOD_RES (418)..(418): Selenocysteine
  MOD_RES (433)..(433): Selenocysteine
  MOD_RES (446)..(446): Selenocysteine
  MOD_RES (450)..(450): Selenocysteine
  MOD_RES (494)..(494): Selenocysteine
  MOD_RES (516)..(516): Selenocysteine
  MOD_RES (527)..(527): Selenocysteine
MVIDKLPFDKYELEPSPLXQFILERKSPQXCWQVYVSNSAKYSELGHPFGYLKASXALNCVNLFVMPYNYPVLLPLLDDLFKVHKAKPXLKWRQSFESYLKXMPPYYLGPLKKAVRMMGAPNLIADSMEYGLSYSVISYLKKLSQQAKIESDRVIGSVGKKVVQEXGIKVRSRSHGLSMAYRKDFQQLLQGISEDVPHRLLDLNMKEYXGFQVALLNKDLKPQXFRNAYDIPRRNLLDHLXRMRSNLLKSXRRFLKGQDEDQVHSVPIAQMGNYQEYLKQVPSPLRELDPDQPRRLHXFGNPFKLDKKGMMIDEADEFVAGPQNKHKRPGEPNMQGIPKRRRCMSPLLRGRQQNPVVNNHIGGKGPPAPXXQAQPDLIKPLPLHKISEXXNDSIIHDVVENHVADQLSSDIXPNAMDXEFSASSPASLLERPXNHMEALGHDHLGXNDLXVGGFLENHEEPRDKEQCAEENIPASSLNKGKKLMHCRSHEEVNXELKAQIMKEIRKPGRKYERIFXLLKHVQGSLQXRLIFLQNVIKEASRFKKRMLIEQLENFLDEIHRRANQINHINSN

SEQ ID NO: 13683 - protein, 97 aa, Homo sapiens
  MOD_RES (12)..(12): Selenocysteine
  MOD_RES (93)..(93): Selenocysteine
LLDNLPGVRWLXLPLEIKMELDMALSDLEAADFAELGYLICSHLPKDDLIDIAVYCRHYCLLPLAAKQRIGQLIIWREVFPQHHLRPLADSSXEVFP

SEQ ID NO: 13684 - protein, 408 aa, Homo sapiens
  MOD_RES (82)..(82): Selenocysteine
  MOD_RES (84)..(84): Selenocysteine
  MOD_RES (115)..(115): Selenocysteine
  MOD_RES (150)..(150): Selenocysteine
  MOD_RES (171)..(171): Selenocysteine
  MOD_RES (192)..(192): Selenocysteine
  MOD_RES (199)..(199): Selenocysteine
  MOD_RES (240)..(241): Selenocysteine
  MOD_RES (260)..(260): Selenocysteine
  MOD_RES (271)..(271): Selenocysteine
  MOD_RES (279)..(279): Selenocysteine
  MOD_RES (283)..(283): Selenocysteine
  MOD_RES (305)..(305): Selenocysteine
  MOD_RES (313)..(313): Selenocysteine
  MOD_RES (320)..(320): Selenocysteine
  MOD_RES (349)..(349): Selenocysteine
  MOD_RES (358)..(358): Selenocysteine
  MOD_RES (360)..(360): Selenocysteine
  MOD_RES (363)..(363): Selenocysteine
  MOD_RES (403)..(403): Selenocysteine
MASVASCDSRPSSDELPGDPSSQEEDEDYDFEDRVSDSGSYSSASSDYDDLEPEWLDSVQKNGELFYLELSEDEEESLLPEXPXVNHVRFSENEIIIEDDYKERKKYEPKLKQFXKILRRKRLLPKRCNKKNSNDNGPVSILKHQSNQKXGVIVQQRYKDVNVYVNPKKLXVIKAKEQLKLLEVLVGIIHQXKWSWRRXGKQGDGERLVVHGLLPGGSAMKSGQVLIGDVLVAVNDVDVXXENIERVLSCIPGPMQVKLXFENAYDVKREXSHPRQKKXQSNXSDLVKLLWGEEVEGIQQSGLNXPHIIMYLXLQLDSEXSKEEQEILYHYPMSEASQKLKSVRGIFLXLCDMLENVXGXQVXSSSLLLNGKQIHVAYWKESDKLLLIGLPAEEIELPSSAHXHGERN

SEQ ID NO: 13685 - protein, 435 aa, Homo sapiens
  MOD_RES (82)..(82): Selenocysteine
  MOD_RES (84)..(84): Selenocysteine
  MOD_RES (115)..(115): Selenocysteine
  MOD_RES (150)..(150): Selenocysteine
  MOD_RES (171)..(171): Selenocysteine
  MOD_RES (192)..(192): Selenocysteine
  MOD_RES (199)..(199): Selenocysteine
  MOD_RES (240)..(241): Selenocysteine
  MOD_RES (260)..(260): Selenocysteine
  MOD_RES (271)..(271): Selenocysteine
  MOD_RES (279)..(279): Selenocysteine
  MOD_RES (283)..(283): Selenocysteine
  MOD_RES (305)..(305): Selenocysteine
  MOD_RES (313)..(313): Selenocysteine
  MOD_RES (320)..(320): Selenocysteine
  MOD_RES (349)..(349): Selenocysteine
  MOD_RES (358)..(358): Selenocysteine
  MOD_RES (360)..(360): Selenocysteine
  MOD_RES (363)..(363): Selenocysteine
  MOD_RES (410)..(410): Selenocysteine
MASVASCDSRPSSDELPGDPSSQEEDEDYDFEDRVSDSGSYSSASSDYDDLEPEWLDSVQKNGELFYLELSEDEEESLLPEXPXVNHVRFSENEIIIEDDYKERKKYEPKLKQFXKILRRKRLLPKRCNKKNSNDNGPVSILKHQSNQKXGVIVQQRYKDVNVYVNPKKLXVIKAKEQLKLLEVLVGIIHQXKWSWRRXGKQGDGERLVVHGLLPGGSAMKSGQVLIGDVLVAVNDVDVXXENIERVLSCIPGPMQVKLXFENAYDVKREXSHPRQKKXQSNXSDLVKLLWGEEVEGIQQSGLNXPHIIMYLXLQLDSEXSKEEQEILYHYPMSEASQKLKSVRGIFLXLCDMLENVXGXQVXSSSLLLNGKQIHVAYWKESDKLLLIGLPAEEVPLPRLRNMIENVIQXLKFMYGSLDSIMKEFSVIVSSGKII

SEQ ID NO: 13686 - protein, 942 aa, Homo sapiens
  MOD_RES (82)..(82): Selenocysteine
  MOD_RES (84)..(84): Selenocysteine
  MOD_RES (115)..(115): Selenocysteine
  MOD_RES (150)..(150): Selenocysteine
  MOD_RES (171)..(171): Selenocysteine
  MOD_RES (192)..(192): Selenocysteine
  MOD_RES (199)..(199): Selenocysteine
  MOD_RES (240)..(241): Selenocysteine
  MOD_RES (260)..(260): Selenocysteine
  MOD_RES (271)..(271): Selenocysteine
  MOD_RES (279)..(279): Selenocysteine
  MOD_RES (283)..(283): Selenocysteine
  MOD_RES (305)..(305): Selenocysteine
  MOD_RES (313)..(313): Selenocysteine
  MOD_RES (320)..(320): Selenocysteine
  MOD_RES (349)..(349): Selenocysteine
  MOD_RES (358)..(358): Selenocysteine
  MOD_RES (360)..(360): Selenocysteine
  MOD_RES (363)..(363): Selenocysteine
  MOD_RES (410)..(410): Selenocysteine
  MOD_RES (477)..(477): Selenocysteine
  MOD_RES (513)..(513): Selenocysteine
  MOD_RES (579)..(579): Selenocysteine
  MOD_RES (630)..(631): Selenocysteine
  MOD_RES (662)..(662): Selenocysteine
  MOD_RES (668)..(668): Selenocysteine
  MOD_RES (672)..(673): Selenocysteine
  MOD_RES (683)..(683): Selenocysteine
  MOD_RES (688)..(688): Selenocysteine
  MOD_RES (691)..(691): Selenocysteine
  MOD_RES (695)..(695): Selenocysteine
  MOD_RES (704)..(704): Selenocysteine
  MOD_RES (732)..(733): Selenocysteine
  MOD_RES (754)..(754): Selenocysteine
  MOD_RES (759)..(759): Selenocysteine
  MOD_RES (764)..(764): Selenocysteine
  MOD_RES (788)..(788): Selenocysteine
  MOD_RES (792)..(792): Selenocysteine
  MOD_RES (798)..(798): Selenocysteine
  MOD_RES (807)..(807): Selenocysteine
  MOD_RES (814)..(814): Selenocysteine
  MOD_RES (816)..(816): Selenocysteine
  MOD_RES (849)..(849): Selenocysteine
  MOD_RES (891)..(891): Selenocysteine
  MOD_RES (926)..(926): Selenocysteine
  MOD_RES (941)..(941): Selenocysteine
MASVASCDSRPSSDELPGDPSSQEEDEDYDFEDRVSDSGSYSSASSDYDDLEPEWLDSVQKNGELFYLELSEDEEESLLPEXPXVNHVRFSENEIIIEDDYKERKKYEPKLKQFXKILRRKRLLPKRCNKKNSNDNGPVSILKHQSNQKXGVIVQQRYKDVNVYVNPKKLXVIKAKEQLKLLEVLVGIIHQXKWSWRRXGKQGDGERLVVHGLLPGGSAMKSGQVLIGDVLVAVNDVDVXXENIERVLSCIPGPMQVKLXFENAYDVKREXSHPRQKKXQSNXSDLVKLLWGEEVEGIQQSGLNXPHIIMYLXLQLDSEXSKEEQEILYHYPMSEASQKLKSVRGIFLXLCDMLENVXGXQVXSSSLLLNGKQIHVAYWKESDKLLLIGLPAEEVPLPRLRNMIENVIQXLKFMYGSLDSAFCQIENVPRLDHFFNLFFQRALQPAKLHSSASPSAQQYDASSAVLLDNLPGVRWLXLPLEIKMELDMALSDLEAADFAELSEDYYDMRRLYXILGSSLFYKGYLICSHLPKDDLIDIAVYCRHYCLLPLAAKQRIGQLIIWREVFPQHHLRPLADSSXEVFPEPEGRYFLLVVGLKHYMLCVLLEAGGCASKAIGSPGPDCVYVDQVKXXLHQLDGVDSRIDERLASSPVPCLSCADWFLXGSREKXDSLXXSPILSRLQGXSKVAXSPXCRRXLFGDYSLKXRKPSPSCSSGGSDNGCEGGEDDGFSPHXXPDAVRKQRESQGSDGLEESGXLLKVXKKKSXLPNPFHLGNLKKDLPEKELEIYNXVKLXSGPENXLFHYVALEXVQGIFIXPXLEEVAQLSGSIHPQLIKNFHQCCLSIRAVFQQXLVEEKKKGLNSGDHSDSAKSVSSLNPVKEHGVLFECSPGNWXDQKKAPPVMAYWVVGRLFLHPKPQELYVCFHDSVXEIAIEIAFKLFFGLXL

SEQ ID NO: 13687 - protein, 201 aa, Homo sapiens
  MOD_RES (63)..(63): Selenocysteine
  MOD_RES (65)..(65): Selenocysteine
  MOD_RES (96)..(96): Selenocysteine
  MOD_RES (131)..(131): Selenocysteine
  MOD_RES (152)..(152): Selenocysteine
  MOD_RES (173)..(173): Selenocysteine
  MOD_RES (180)..(180): Selenocysteine
MFQVGRSSIPKPAPRSLEDLDSVQRVLLHSDLEPEWLDSVQKNGELFYLELSEDEEESLLPEXPXVNHVRFSENEIIIEDDYKERKKYEPKLKQFXKILRRKRLLPKRCNKKNSNDNGPVSILKHQSNQKXGVIVQQRYKDVNVYVNPKKLXVIKAKEQLKLLEVLVGIIHQXKWSWRRXGKQGDGERLVVHGLLPGGSAM

SEQ ID NO: 13688 - protein, 93 aa, Homo sapiens
  MOD_RES (1)..(1): Any amino acid
  MOD_RES (3)..(3): Selenocysteine
  MOD_RES (31)..(32): Selenocysteine
  MOD_RES (53)..(53): Selenocysteine
  MOD_RES (58)..(58): Selenocysteine
  MOD_RES (63)..(63): Selenocysteine
  MOD_RES (87)..(87): Selenocysteine
XKXRKPSPSCSSGGSDNGCEGGEDDGFSPHXXPDAVRKQRESQGSDGLEESGXLLKVXKKKSXLPNPFHLGNLKKDLPEKELEIYNXVKKRKD

SEQ ID NO: 13689 - protein, 101 aa, Homo sapiens
  MOD_RES (50)..(50): Selenocysteine
  MOD_RES (77)..(77): Selenocysteine
  MOD_RES (83)..(83): Selenocysteine
  MOD_RES (95)..(95): Selenocysteine
  MOD_RES (98)..(98): Selenocysteine
MNKSENLLFAGSSLASQVHAAAVNGDKGALQRLIVGNSALKDKEDQFGRXPLMYCVLADRLDCADALLKAGADVNKXDHSQRXALHLAAQKALRXISXGRI

SEQ ID NO: 13690 - protein, 895 aa, Homo sapiens
  MOD_RES (50)..(50): Selenocysteine
  MOD_RES (77)..(77): Selenocysteine
  MOD_RES (83)..(83): Selenocysteine
  MOD_RES (102)..(102): Selenocysteine
  MOD_RES (116)..(116): Selenocysteine
  MOD_RES (121)..(122): Selenocysteine
  MOD_RES (144)..(144): Selenocysteine
  MOD_RES (151)..(151): Selenocysteine
  MOD_RES (200)..(200): Selenocysteine
  MOD_RES (210)..(210): Selenocysteine
  MOD_RES (223)..(223): Selenocysteine
  MOD_RES (235)..(235): Selenocysteine
  MOD_RES (241)..(241): Selenocysteine
  MOD_RES (249)..(249): Selenocysteine
  MOD_RES (257)..(257): Selenocysteine
  MOD_RES (282)..(282): Selenocysteine
  MOD_RES (291)..(291): Selenocysteine
  MOD_RES (304)..(304): Selenocysteine
  MOD_RES (324)..(324): Selenocysteine
  MOD_RES (340)..(340): Selenocysteine
  MOD_RES (359)..(359): Selenocysteine
  MOD_RES (372)..(372): Selenocysteine
  MOD_RES (386)..(386): Selenocysteine
  MOD_RES (392)..(392): Selenocysteine
  MOD_RES (408)..(408): Selenocysteine
  MOD_RES (458)..(458): Selenocysteine
  MOD_RES (491)..(491): Selenocysteine
  MOD_RES (526)..(526): Selenocysteine
  MOD_RES (629)..(629): Selenocysteine
  MOD_RES (683)..(683): Selenocysteine
  MOD_RES (691)..(691): Selenocysteine
  MOD_RES (788)..(788): Selenocysteine
  MOD_RES (806)..(807): Selenocysteine
  MOD_RES (820)..(820): Selenocysteine
  MOD_RES (823)..(823): Selenocysteine
  MOD_RES (826)..(826): Selenocysteine
  MOD_RES (847)..(847): Selenocysteine
  MOD_RES (887)..(887): Selenocysteine
  MOD_RES (893)..(893): Selenocysteine
MNKSENLLFAGSSLASQVHAAAVNGDKGALQRLIVGNSALKDKEDQFGRXPLMYCVLADRLDCADALLKAGADVNKXDHSQRXALHLAAQKGNYRFMKLLLXRRANWMQKDLEEMXPLHLXXRHRSPKCLALLLKFMAPGEVDXQDKNKQXALHWSAYYNNPEHVKLLIKHDSNIGIPDVEGKIPLHWAANHKDPSAVHXVRCILDAAPXESLLNWQDYEGRXPLHFAVADGNVXVVDVLXSYESCNIXSYDNLFRXPLHWAALLGHAQIVHLLLERNKSGXIPSDSQGAXPLHYAAQSNFAEXVKVFLKHPSVKDDSDLEGRXSFMWAAGKGSDDVLRXMLSLKSDIDINMADKYGGXALHAAALSGHVSXVKLLLENNAQVDAXDVMKHXPLFRACEMGHKDVIQXLIKGGARVDLVDQDGHSLLHWAALGGNADVCQILIENKINPNVQDYAGRXPLQCAAYGGYINCMAVLMENNADPNIQDKEGRXALHWSCNNGYLDAIKLLLDFAAFPNQMENNEERYXPLDYALLGERHEVIQFMLEHGALSIAAIQDIAAFKIQAVYKGYKVRKAFRDRKNLLMKHEQLRKDAAAKKREEENKRKEAEQQKGRRSPDSCRPQALPCLPSXQDVPSRQSRAPSKQPPAGNVAQGPEPRDSRGSPGGSLGGALQKEQHVSSDLQGXNSRRPNEXAREHSKGQSACVHFRPNEGSDGSRHPGVPSVEKSRELRLQIIQRERRRKELFRKKNKAAAVIQRAWRSYQLRKHLSHLRHMKQLGAGDVDRWRQESXALLLQVWRKELELKFPQXXAVSKAPKSPSKGXSGXKSXKHSVLKQIYGCSHEGKIHHPXRSVKASSVLRLNSVSNLQCIHLLENSGRSKNFSYNLQSAXQPKNKXKP

SEQ ID NO: 13691 - protein, 1065 aa, Homo sapiens
  MOD_RES (50)..(50): Selenocysteine
  MOD_RES (77)..(77): Selenocysteine
  MOD_RES (83)..(83): Selenocysteine
  MOD_RES (102)..(102): Selenocysteine
  MOD_RES (116)..(116): Selenocysteine
  MOD_RES (121)..(122): Selenocysteine
  MOD_RES (144)..(144): Selenocysteine
  MOD_RES (151)..(151): Selenocysteine
  MOD_RES (200)..(200): Selenocysteine
  MOD_RES (210)..(210): Selenocysteine
  MOD_RES (223)..(223): Selenocysteine
  MOD_RES (235)..(235): Selenocysteine
  MOD_RES (241)..(241): Selenocysteine
  MOD_RES (249)..(249): Selenocysteine
  MOD_RES (257)..(257): Selenocysteine
  MOD_RES (282)..(282): Selenocysteine
  MOD_RES (291)..(291): Selenocysteine
  MOD_RES (304)..(304): Selenocysteine
  MOD_RES (324)..(324): Selenocysteine
  MOD_RES (340)..(340): Selenocysteine
  MOD_RES (359)..(359): Selenocysteine
  MOD_RES (372)..(372): Selenocysteine
  MOD_RES (386)..(386): Selenocysteine
  MOD_RES (392)..(392): Selenocysteine
  MOD_RES (408)..(408): Selenocysteine
  MOD_RES (458)..(458): Selenocysteine
  MOD_RES (491)..(491): Selenocysteine
  MOD_RES (526)..(526): Selenocysteine
  MOD_RES (629)..(629): Selenocysteine
  MOD_RES (683)..(683): Selenocysteine
  MOD_RES (691)..(691): Selenocysteine
  MOD_RES (729)..(729): Selenocysteine
  MOD_RES (782)..(782): Selenocysteine
  MOD_RES (795)..(795): Selenocysteine
  MOD_RES (830)..(830): Selenocysteine
  MOD_RES (836)..(836): Selenocysteine
  MOD_RES (841)..(841): Selenocysteine
  MOD_RES (852)..(852): Selenocysteine
  MOD_RES (864)..(864): Selenocysteine
  MOD_RES (866)..(866): Selenocysteine
  MOD_RES (877)..(877): Selenocysteine
  MOD_RES (958)..(958): Selenocysteine
  MOD_RES (976)..(977): Selenocysteine
  MOD_RES (990)..(990): Selenocysteine
  MOD_RES (993)..(993): Selenocysteine
  MOD_RES (996)..(996): Selenocysteine
  MOD_RES (1017)..(1017): Selenocysteine
  MOD_RES (1057)..(1057): Selenocysteine
  MOD_RES (1063)..(1063): Selenocysteine
MNKSENLLFAGSSLASQVHAAAVNGDKGALQRLIVGNSALKDKEDQFGRXPLMYCVLADRLDCADALLKAGADVNKXDHSQRXALHLAAQKGNYRFMKLLLXRRANWMQKDLEEMXPLHLXXRHRSPKCLALLLKFMAPGEVDXQDKNKQXALHWSAYYNNPEHVKLLIKHDSNIGIPDVEGKIPLHWAANHKDPSAVHXVRCILDAAPXESLLNWQDYEGRXPLHFAVADGNVXVVDVLXSYESCNIXSYDNLFRXPLHWAALLGHAQIVHLLLERNKSGXIPSDSQGAXPLHYAAQSNFAEXVKVFLKHPSVKDDSDLEGRXSFMWAAGKGSDDVLRXMLSLKSDIDINMADKYGGXALHAAALSGHVSXVKLLLENNAQVDAXDVMKHXPLFRACEMGHKDVIQXLIKGGARVDLVDQDGHSLLHWAALGGNADVCQILIENKINPNVQDYAGRXPLQCAAYGGYINCMAVLMENNADPNIQDKEGRXALHWSCNNGYLDAIKLLLDFAAFPNQMENNEERYXPLDYALLGERHEVIQFMLEHGALSIAAIQDIAAFKIQAVYKGYKVRKAFRDRKNLLMKHEQLRKDAAAKKREEENKRKEAEQQKGRRSPDSCRPQALPCLPSXQDVPSRQSRAPSKQPPAGNVAQGPEPRDSRGSPGGSLGGALQKEQHVSSDLQGXNSRRPNEXAREHSKGQSACVHFRPNEGSDGSRHPGVPSVEKSRGEXAGDERCAKGKGFVKQPSCIRVAGPDEKGEDSRRAAASLPPHDSHWKPSRRHDXEPKAKCAPQKRRXQELRGGRCSPAGSSRPGSARGEAVHAGQNPPHHRXPRNKVXQAKLXGGLYSHLPQSXEELRSGARRLEXSXLSEDFQVSKEXDPAPGPLSGQSVNIDLLPVELRLQIIQRERRRKELFRKKNKAAAVIQRAWRSYQLRKHLSHLRHMKQLGAGDVDRWRQESXALLLQVWRKELELKFPQXXAVSKAPKSPSKGXSGXKSXKHSVLKQIYGCSHEGKIHHPXRSVKASSVLRLNSVSNLQCIHLLENSGRSKNFSYNLQSAXQPKNKXKP

SEQ ID NO: 13692 - protein, 188 aa, Homo sapiens
  MOD_RES (32)..(32): Selenocysteine
  MOD_RES (37)..(37): Selenocysteine
  MOD_RES (96)..(97): Selenocysteine
  MOD_RES (112)..(112): Selenocysteine
  MOD_RES (121)..(121): Selenocysteine
  MOD_RES (161)..(161): Selenocysteine
  MOD_RES (181)..(181): Selenocysteine
MNLCQSPFQEGCQSLLASWPEQAKEPRREGHXDKQQXEDVLAAGLRCLPHLPAICARRMSPAFRAMDVEPRAKGVLLEPFVHQVGGHSCVLRFNEXXLCKPLVPREHQFYEXLPAEMRKFXPQYKGKSQLLEGLPHWRGDVRDRGHGRPWQPSLEPSLPPXLCFPSLSSFSSSWPSAQHLXPSVFNPW

SEQ ID NO: 13693 - protein, 148 aa, Homo sapiens
  MOD_RES (32)..(32): Selenocysteine
  MOD_RES (37)..(37): Selenocysteine
  MOD_RES (96)..(97): Selenocysteine
  MOD_RES (112)..(112): Selenocysteine
  MOD_RES (121)..(121): Selenocysteine
MNLCQSPFQEGCQSLLASWPEQAKEPRREGHXDKQQXEDVLAAGLRCLPHLPAICARRMSPAFRAMDVEPRAKGVLLEPFVHQVGGHSCVLRFNEXXLCKPLVPREHQFYEXLPAEMRKFXPQYKGQSQRPLVSWPSLPHFFPWSFPL

SEQ ID NO: 13694 - protein, 128 aa, Homo sapiens
  MOD_RES (32)..(32): Selenocysteine
  MOD_RES (37)..(37): Selenocysteine
  MOD_RES (96)..(97): Selenocysteine
  MOD_RES (112)..(112): Selenocysteine
  MOD_RES (121)..(121): Selenocysteine
MNLCQSPFQEGCQSLLASWPEQAKEPRREGHXDKQQXEDVLAAGLRCLPHLPAICARRMSPAFRAMDVEPRAKGVLLEPFVHQVGGHSCVLRFNEXXLCKPLVPREHQFYEXLPAEMRKFXPQYKGVS

SEQ ID NO: 13695 - protein, 189 aa, Homo sapiens
  MOD_RES (33)..(33): Selenocysteine
  MOD_RES (38)..(38): Selenocysteine
  MOD_RES (97)..(98): Selenocysteine
  MOD_RES (113)..(113): Selenocysteine
  MOD_RES (122)..(122): Selenocysteine
  MOD_RES (162)..(162): Selenocysteine
  MOD_RES (182)..(182): Selenocysteine
MNLCQSPFQEGCQSLLRASWPEQAKEPRREGHXDKQQXEDVLAAGLRCLPHLPAICARRMSPAFRAMDVEPRAKGVLLEPFVHQVGGHSCVLRFNEXXLCKPLVPREHQFYEXLPAEMRKFXPQYKGKSQLLEGLPHWRGDVRDRGHGRPWQPSLEPSLPPXLCFPSLSSFSSSWPSAQHLXPSVFNPW

SEQ ID NO: 13696 - protein, 95 aa, Homo sapiens
  MOD_RES (28)..(28): Selenocysteine
  MOD_RES (33)..(33): Selenocysteine
  MOD_RES (92)..(93): Selenocysteine
MSLNLPEASLLRASWPEQAKEPRREGHXDKQQXEDVLAAGLRCLPHLPAICARRMSPAFRAMDVEPRAKGVLLEPFVHQVGGHSCVLRFNEXXLC

SEQ ID NO: 13697 - protein, 151 aa, Homo sapiens
  MOD_RES (28)..(28): Selenocysteine
  MOD_RES (33)..(33): Selenocysteine
  MOD_RES (92)..(93): Selenocysteine
  MOD_RES (108)..(108): Selenocysteine
  MOD_RES (117)..(117): Selenocysteine
MSLNLPEASLLRASWPEQAKEPRREGHXDKQQXEDVLAAGLRCLPHLPAICARRMSPAFRAMDVEPRAKGVLLEPFVHQVGGHSCVLRFNEXXLCKPLVPREHQFYEXLPAEMRKFXPQYKGQSQRPLVSWPSLPHFFPWSFPLWPQGSVA

SEQ ID NO: 13698 - protein, 140 aa, Homo sapiens
  MOD_RES (28)..(28): Selenocysteine
  MOD_RES (33)..(33): Selenocysteine
  MOD_RES (92)..(93): Selenocysteine
  MOD_RES (108)..(108): Selenocysteine
  MOD_RES (117)..(117): Selenocysteine
MSLNLPEASLLRASWPEQAKEPRREGHXDKQQXEDVLAAGLRCLPHLPAICARRMSPAFRAMDVEPRAKGVLLEPFVHQVGGHSCVLRFNEXXLCKPLVPREHQFYEXLPAEMRKFXPQYKGVVSVRFEEDEDRNLCLIA

SEQ ID NO: 13699 - protein, 185 aa, Homo sapiens
  MOD_RES (29)..(29): Selenocysteine
  MOD_RES (34)..(34): Selenocysteine
  MOD_RES (93)..(94): Selenocysteine
  MOD_RES (109)..(109): Selenocysteine
  MOD_RES (118)..(118): Selenocysteine
  MOD_RES (158)..(158): Selenocysteine
  MOD_RES (178)..(178): Selenocysteine
MSLNLPEASLLSRASWPEQAKEPRREGHXDKQQXEDVLAAGLRCLPHLPAICARRMSPAFRAMDVEPRAKGVLLEPFVHQVGGHSCVLRFNEXXLCKPLVPREHQFYEXLPAEMRKFXPQYKGKSQLLEGLPHWRGDVRDRGHGRPWQPSLEPSLPPXLCFPSLSSFSSSWPSAQHLXPSVFNPW

SEQ ID NO: 13700 - protein, 54 aa, Homo sapiens
  MOD_RES (38)..(39): Selenocysteine
  MOD_RES (54)..(54): Selenocysteine
MSPAFRAMDVEPRAKGVLLEPFVHQVGGHSCVLRFNEXXLCKPLVPREHQFYEX

SEQ ID NO: 13701 - protein, 55 aa, Homo sapiens
  MOD_RES (38)..(39): Selenocysteine
  MOD_RES (54)..(54): Selenocysteine
MSPAFRAMDVEPRAKGVLLEPFVHQVGGHSCVLRFNEXXLCKPLVPREHQFYEXL

SEQ ID NO: 13702 - protein, 130 aa, Homo sapiens
  MOD_RES (38)..(39): Selenocysteine
  MOD_RES (54)..(54): Selenocysteine
  MOD_RES (63)..(63): Selenocysteine
  MOD_RES (87)..(87): Selenocysteine
MSPAFRAMDVEPRAKGVLLEPFVHQVGGHSCVLRFNEXXLCKPLVPREHQFYEXLPAEMRKFXPQYKAVLIFVKFADEFGASGNIEXKELGVVSVRFEEDEDRNLCLIAYPLKGDHGIVDIVDNSDCEPK

SEQ ID NO: 13703 - protein, 87 aa, Homo sapiens
  MOD_RES (38)..(39): Selenocysteine
  MOD_RES (54)..(54): Selenocysteine
  MOD_RES (63)..(63): Selenocysteine
MSPAFRAMDVEPRAKGVLLEPFVHQVGGHSCVLRFNEXXLCKPLVPREHQFYEXLPAEMRKFXPQYKGDISSHQHGGVFVGEWGSLL

SEQ ID NO: 13704 - protein, 130 aa, Homo sapiens
  MOD_RES (38)..(39): Selenocysteine
  MOD_RES (54)..(54): Selenocysteine
  MOD_RES (63)..(63): Selenocysteine
  MOD_RES (103)..(103): Selenocysteine
  MOD_RES (123)..(123): Selenocysteine
MSPAFRAMDVEPRAKGVLLEPFVHQVGGHSCVLRFNEXXLCKPLVPREHQFYEXLPAEMRKFXPQYKGKSQLLEGLPHWRGDVRDRGHGRPWQPSLEPSLPPXLCFPSLSSFSSSWPSAQHLXPSVFNPW

SEQ ID NO: 13705 - protein, 97 aa, Homo sapiens
  MOD_RES (38)..(39): Selenocysteine
  MOD_RES (54)..(54): Selenocysteine
  MOD_RES (63)..(63): Selenocysteine
MSPAFRAMDVEPRAKGVLLEPFVHQVGGHSCVLRFNEXXLCKPLVPREHQFYEXLPAEMRKFXPQYKGQSQRPLVSWPSLPHFFPWSFPLWPQGSVA

SEQ ID NO: 13706 - protein, 70 aa, Homo sapiens
  MOD_RES (38)..(39): Selenocysteine
  MOD_RES (54)..(54): Selenocysteine
  MOD_RES (63)..(63): Selenocysteine
MSPAFRAMDVEPRAKGVLLEPFVHQVGGHSCVLRFNEXXLCKPLVPREHQFYEXLPAEMRKFXPQYKGVS

SEQ ID NO: 13707 - protein, 87 aa, Homo sapiens
  MOD_RES (38)..(39): Selenocysteine
  MOD_RES (54)..(54): Selenocysteine
  MOD_RES (63)..(63): Selenocysteine
MSPAFRAMDVEPRAKGVLLEPFVHQVGGHSCVLRFNEXXLCKPLVPREHQFYEXLPAEMRKFXPQYKGVVSVRFEEDEDRNLCLIAY

SEQ ID NO: 13708 - protein, 91 aa, Homo sapiens
  MOD_RES (38)..(39): Selenocysteine
  MOD_RES (54)..(54): Selenocysteine
  MOD_RES (63)..(63): Selenocysteine
MSPAFRAMDVEPRAKGVLLEPFVHQVGGHSCVLRFNEXXLCKPLVPREHQFYEXLPAEMRKFXPQYKGVVSVRFEEDEDRNLCLIAYPLKG

SEQ ID NO: 13709 - protein, 100 aa, Homo sapiens
  MOD_RES (38)..(39): Selenocysteine
  MOD_RES (54)..(54): Selenocysteine
  MOD_RES (63)..(63): Selenocysteine
MSPAFRAMDVEPRAKGVLLEPFVHQVGGHSCVLRFNEXXLCKPLVPREHQFYEXLPAEMRKFXPQYKGVVSVRFEEDEDRNLCLIAYPLKGDHGIVDIVD

SEQ ID NO: 13710 - protein, 104 aa, Homo sapiens
  MOD_RES (38)..(39): Selenocysteine
  MOD_RES (54)..(54): Selenocysteine
  MOD_RES (63)..(63): Selenocysteine
MSPAFRAMDVEPRAKGVLLEPFVHQVGGHSCVLRFNEXXLCKPLVPREHQFYEXLPAEMRKFXPQYKGVVSVRFEEDEDRNLCLIAYPLKGDHGIVDIVDNSDC

SEQ ID NO: 13711 - protein, 426 aa, Homo sapiens
  MOD_RES (38)..(39): Selenocysteine
  MOD_RES (54)..(54): Selenocysteine
  MOD_RES (63)..(63): Selenocysteine
  MOD_RES (114)..(115): Selenocysteine
  MOD_RES (124)..(124): Selenocysteine
  MOD_RES (127)..(127): Selenocysteine
  MOD_RES (162)..(162): Selenocysteine
  MOD_RES (210)..(210): Selenocysteine
  MOD_RES (225)..(225): Selenocysteine
  MOD_RES (248)..(248): Selenocysteine
  MOD_RES (312)..(312): Selenocysteine
  MOD_RES (387)..(388): Selenocysteine
  MOD_RES (396)..(396): Selenocysteine
  MOD_RES (418)..(418): Selenocysteine
MSPAFRAMDVEPRAKGVLLEPFVHQVGGHSCVLRFNEXXLCKPLVPREHQFYEXLPAEMRKFXPQYKGVVSVRFEEDEDRNLCLIAYPLKGDHGIVDIVDNSDCEPKSKLLRWXXNKKHHVLEXEKXPKDWVRQHRKEEKMKSHKLEEEFEWLKKSEVLYYXVEKKGNISSQLKHYNPWSMKCHQQQLQRMKENAKHRNQYKFILLENLXSRYEVPCVLDLKMGXRQHGDDASEEKAANQIRKCQQSXSAVIGVRVCGMQVYQAGSGQLMFMNKYHGRKLSVQGFKEALFQFFHNGRYLRRELLGPVLKKLXELKAVLERQESYRFYSSSLLVIYDGKERPEVVLDSDAEDLEDLSEESADESAGAYAYKPIGASSVDVRMIDFAHXXCRLYGEDXVVHEGQDAGYIFGLQSLIDIVXEISEESGE

SEQ ID NO: 13712 - protein, 1038 aa, Homo sapiens
  MOD_RES (5)..(5): Selenocysteine
  MOD_RES (13)..(13): Selenocysteine
  MOD_RES (38)..(38): Selenocysteine
  MOD_RES (43)..(43): Selenocysteine
  MOD_RES (65)..(65): Selenocysteine
  MOD_RES (73)..(73): Selenocysteine
  MOD_RES (82)..(82): Selenocysteine
  MOD_RES (111)..(112): Selenocysteine
  MOD_RES (127)..(127): Selenocysteine
  MOD_RES (214)..(214): Selenocysteine
  MOD_RES (226)..(226): Selenocysteine
  MOD_RES (234)..(234): Selenocysteine
  MOD_RES (244)..(244): Selenocysteine
  MOD_RES (325)..(325): Selenocysteine
  MOD_RES (338)..(338): Selenocysteine
  MOD_RES (361)..(361): Selenocysteine
  MOD_RES (390)..(391): Selenocysteine
  MOD_RES (395)..(395): Selenocysteine
  MOD_RES (399)..(399): Selenocysteine
  MOD_RES (411)..(411): Selenocysteine
  MOD_RES (420)..(420): Selenocysteine
  MOD_RES (496)..(496): Selenocysteine
  MOD_RES (501)..(501): Selenocysteine
  MOD_RES (536)..(536): Selenocysteine
  MOD_RES (553)..(553): Selenocysteine
  MOD_RES (559)..(559): Selenocysteine
  MOD_RES (574)..(574): Selenocysteine
  MOD_RES (581)..(581): Selenocysteine
  MOD_RES (587)..(587): Selenocysteine
  MOD_RES (594)..(594): Selenocysteine
  MOD_RES (607)..(607): Selenocysteine
  MOD_RES (614)..(614): Selenocysteine
  MOD_RES (617)..(617): Selenocysteine
  MOD_RES (629)..(629): Selenocysteine
  MOD_RES (642)..(642): Selenocysteine
  MOD_RES (663)..(663): Selenocysteine
  MOD_RES (691)..(691): Selenocysteine
  MOD_RES (702)..(702): Selenocysteine
  MOD_RES (705)..(705): Selenocysteine
  MOD_RES (707)..(707): Selenocysteine
  MOD_RES (712)..(712): Selenocysteine
  MOD_RES (727)..(727): Selenocysteine
  MOD_RES (770)..(770): Selenocysteine
  MOD_RES (775)..(775): Selenocysteine
  MOD_RES (780)..(780): Selenocysteine
  MOD_RES (800)..(800): Selenocysteine
  MOD_RES (814)..(814): Selenocysteine
  MOD_RES (819)..(819): Selenocysteine
  MOD_RES (898)..(898): Selenocysteine
  MOD_RES (940)..(940): Selenocysteine
  MOD_RES (947)..(947): Selenocysteine
  MOD_RES (968)..(968): Selenocysteine
  MOD_RES (981)..(981): Selenocysteine
  MOD_RES (997)..(997): Selenocysteine
MDPNXIIEALRGXMDPALREAAERQLNEAHKSLNFVSXLLQIXMSEQLDLPVRQAGVIYLKNMIXQYWPDREXAPGDISPYXIPEEDRHCIRENIVEAIIHSPELIRVQLXXCIHHIIKHDYPSRWXAIVDKIGFYLQSDNSACWLGILLCLYQLVKNYEYKKPEERSPLVAAMQHFLPVLKDRFIQLLSDQSDQSVLIQKQIFKIFYALVQYXLPLELINQQNLXEWIEILKXVVNRDVPNEXLQVEEDDRPELPWWKCKKWALHILARLFERYGSPGNVSKEYNEFAEVFLKAFAVGVQQVLLKVLYQYKEKQYMAPRVLQQXLNYINQGVSHALXWKNLKPHIQGIIQDVIFPLMCYXDADEELWQEDPYEYIRMKFDVFEDFISPXXAAQXLLFXACSKRKEVLQKXMGFCYQILXEPNADPRKKDGALHMIGSLAEILLKKKIYKDQMEYMLQNHVFPLFSSELGYMRARACWVLHYFCEVKFKSDQNLQXALELXRRCLIDDREMPVKVEAAIALQVLISNQEKAKEYIXPFIRPVMQALLHIIREXENDDLXNVIQKMICEYSEEVXPIAVEMXQHLAMXFNQVIQXGPDEEGSDDKAVXAMGILNXIDXLLSVVEDHKEIXQQLEGICLQVIGXVLQQHVLEFYEEIFSLAHSLXCQQVSPQMWQLLPLVFEVFQQDGFDYFXDMMPLLHNYVXVDXDXLLSDXKYLEMIYSMCKKVLXGVAGEDAECHAAKLLEVIILQCKGRGIDQCIPLFVEAALERLXREVKXSELRXMCLQVAIAALYYNPHLLLNXLENLRFPNNVEPVXNHFIXQWLNDVDCFLGLHDRKMCVLGLCALIDMEQIPQVLNQVSGQILPAFILLFNGLKRAYACHAEHENDSDDDDEAEDDDEXEELGSDEDDIDEDGQEYLEILAKQAGEDGDDEDWEEDDAEEXALEGYSXIIDDEDNPVDEYQIFKAIFQXIQNRNPVWYQALXHGLNEEQRKQLQDIAXLADQRRAAHESKMIEKHGGYKFSAPVVPSSFNFGGPAPGMN

SEQ ID NO: 13713 - protein, 64 aa, Homo sapiens
  MOD_RES (5)..(5): Selenocysteine
  MOD_RES (13)..(13): Selenocysteine
  MOD_RES (29)..(29): Selenocysteine
  MOD_RES (48)..(49): Selenocysteine
MDPNXIIEALRGXMDPALREAAERQLNEXEFRSCCPDWSAMAQSRLAXXSASRIRAILLPQPLE

SEQ ID NO: 13714 - protein, 131 aa, Homo sapiens
  MOD_RES (3)..(3): Selenocysteine
  MOD_RES (11)..(11): Selenocysteine
  MOD_RES (20)..(20): Selenocysteine
  MOD_RES (49)..(50): Selenocysteine
  MOD_RES (65)..(65): Selenocysteine
MIXQYWPDREXAPGDISPYXIPEEDRHCIRENIVEAIIHSPELIRVQLXXCIHHIIKHDYPSRWXAIVDKIGFYLQSDNSACWLGILLCLYQLVKNYEYKKPEERSPLVAAMQHFLPVLKDRFIQLLSDQS

SEQ ID NO: 13715 - protein, 35 aa, Homo sapiens
  MOD_RES (13)..(13): Selenocysteine
  MOD_RES (30)..(30): Selenocysteine
MDLNRIIQALKGXIDPKLRIAAENELNQFXSDYSL

SEQ ID NO: 13716 - protein, 1037 aa, Homo sapiens
  MOD_RES (13)..(13): Selenocysteine
  MOD_RES (65)..(65): Selenocysteine
  MOD_RES (112)..(112): Selenocysteine
  MOD_RES (159)..(159): Selenocysteine
  MOD_RES (225)..(225): Selenocysteine
  MOD_RES (227)..(228): Selenocysteine
  MOD_RES (235)..(235): Selenocysteine
  MOD_RES (240)..(240): Selenocysteine
  MOD_RES (245)..(245): Selenocysteine
  MOD_RES (283)..(283): Selenocysteine
  MOD_RES (296)..(296): Selenocysteine
  MOD_RES (339)..(339): Selenocysteine
  MOD_RES (391)..(392): Selenocysteine
  MOD_RES (396)..(396): Selenocysteine
  MOD_RES (400)..(400): Selenocysteine
  MOD_RES (421)..(421): Selenocysteine
  MOD_RES (554)..(554): Selenocysteine
  MOD_RES (560)..(560): Selenocysteine
  MOD_RES (582)..(582): Selenocysteine
  MOD_RES (605)..(605): Selenocysteine
  MOD_RES (614)..(614): Selenocysteine
  MOD_RES (617)..(617): Selenocysteine
  MOD_RES (620)..(620): Selenocysteine
  MOD_RES (629)..(629): Selenocysteine
  MOD_RES (663)..(663): Selenocysteine
  MOD_RES (691)..(691): Selenocysteine
  MOD_RES (702)..(702): Selenocysteine
  MOD_RES (705)..(705): Selenocysteine
  MOD_RES (707)..(707): Selenocysteine
  MOD_RES (720)..(720): Selenocysteine
  MOD_RES (770)..(770): Selenocysteine
  MOD_RES (775)..(775): Selenocysteine
  MOD_RES (780)..(780): Selenocysteine
  MOD_RES (800)..(800): Selenocysteine
  MOD_RES (814)..(814): Selenocysteine
  MOD_RES (825)..(825): Selenocysteine
  MOD_RES (878)..(878): Selenocysteine
  MOD_RES (908)..(908): Selenocysteine
  MOD_RES (911)..(911): Selenocysteine
  MOD_RES (940)..(940): Selenocysteine
  MOD_RES (947)..(947): Selenocysteine
  MOD_RES (962)..(962): Selenocysteine
  MOD_RES (967)..(967): Selenocysteine
  MOD_RES (989)..(989): Selenocysteine
  MOD_RES (996)..(996): Selenocysteine
  MOD_RES (1003)..(1003): Selenocysteine
  MOD_RES (1018)..(1018): Selenocysteine
  MOD_RES (1032)..(1032): Selenocysteine
MDLNRIIQALKGXIDPKLRIAAENELNQSYKIINFAPSLLRIIVSDHVEFPVRQAAAIYLKNMVXQYWPDREPPPGEAIFPFNIHENDRQQIRDNIVEGIIRSPDLVRVQLXMCLRAIIKHDFPGHWPGVVDKIDYYLQSQSSASWLGSLLCLYQLVKXYEYKKAEEREPLIIAMQIFLPRIQQQIVQLLPDSSYYSVLLQKQILKIFYALVQYALPLQLVNNQXMXXWMEIFRXIIDRXVPPEXLHIDEDDRPELVWWKCKKWALHIVARLFERYGSPGNVXKEYFEFSEFFLKXYAVGIQQVLLKILDQYRQKEYVAPRVLQQAFNYLNQGVVHSIXWKQMKPHIQNISEDVIFSVMCYKDEDEELWQEDPYEYIRMKFDIFEDYASPXXAAQXLLYXAAKKRKEVLPKMMAFCYQILXDPNFDPRKKDGALHVIGSLAEILLKKSLFKDQMELFLQNHVFPLLLSNLGYLRARSCWVLHAFSSLKFHNELNLRNAVELAKKSLIEDKEMPVKVEAALALQSLISNQIQAKEYMKPHVRPIMQELLHIVREXENDDVXNVIQKMICEYSQEVASIAVDMXQHLAEIFGKVLQSDEYEEVEDKXVMAMGILHXIDXILXVVEDHKEIXQQLENICLRIIDLVLQKHVIEFYEEILSLAYSLXCHSISPQMWQLLGILYEVFQQDCFEYFXDMMPLLHNYVXIDXDXLLSNAKHLEILFXMCRKVLCGDAGEDAECHAAKLLEVIILQCKGRGIDQCIPLFVQLVLERLXRGVKXSELRXMCLQVAIAALYYNPDLLLHXLERIQLPHNPGPIXVQFINQWMNDXDCFLGHHDRKMCIIGLSILLELQNRPPAVDAVVGQIVPSILFLFLGLKQVCAXRQLVNREDRSKAEKADMEENEEISSDEEEXNVXAQAMQSNNGRGEDEEEEDDDWDEEVLEEXALEGFSXPLDLDNSVDEYQFFXQALIXVQSRDAAWYQLLMAPLSEDQRXALQEVYXLAEHRRXVAEAKKKIEQQGGFXFENKGVLSAFNFGXVPSNN

SEQ ID NO: 13717 - protein, 832 aa, Homo sapiens
  MOD_RES (5)..(5): Selenocysteine
  MOD_RES (20)..(20): Selenocysteine
  MOD_RES (22)..(23): Selenocysteine
  MOD_RES (30)..(30): Selenocysteine
  MOD_RES (35)..(35): Selenocysteine
  MOD_RES (40)..(40): Selenocysteine
  MOD_RES (78)..(78): Selenocysteine
  MOD_RES (91)..(91): Selenocysteine
  MOD_RES (134)..(134): Selenocysteine
  MOD_RES (186)..(187): Selenocysteine
  MOD_RES (191)..(191): Selenocysteine
  MOD_RES (195)..(195): Selenocysteine
  MOD_RES (216)..(216): Selenocysteine
  MOD_RES (349)..(349): Selenocysteine
  MOD_RES (355)..(355): Selenocysteine
  MOD_RES (377)..(377): Selenocysteine
  MOD_RES (400)..(400): Selenocysteine
  MOD_RES (409)..(409): Selenocysteine
  MOD_RES (412)..(412): Selenocysteine
  MOD_RES (415)..(415): Selenocysteine
  MOD_RES (424)..(424): Selenocysteine
  MOD_RES (458)..(458): Selenocysteine
  MOD_RES (486)..(486): Selenocysteine
  MOD_RES (497)..(497): Selenocysteine
  MOD_RES (500)..(500): Selenocysteine
  MOD_RES (502)..(502): Selenocysteine
  MOD_RES (515)..(515): Selenocysteine
  MOD_RES (565)..(565): Selenocysteine
  MOD_RES (570)..(570): Selenocysteine
  MOD_RES (575)..(575): Selenocysteine
  MOD_RES (595)..(595): Selenocysteine
  MOD_RES (609)..(609): Selenocysteine
  MOD_RES (620)..(620): Selenocysteine
  MOD_RES (673)..(673): Selenocysteine
  MOD_RES (703)..(703): Selenocysteine
  MOD_RES (706)..(706): Selenocysteine
  MOD_RES (735)..(735): Selenocysteine
  MOD_RES (742)..(742): Selenocysteine
  MOD_RES (757)..(757): Selenocysteine
  MOD_RES (762)..(762): Selenocysteine
  MOD_RES (784)..(784): Selenocysteine
  MOD_RES (791)..(791): Selenocysteine
  MOD_RES (798)..(798): Selenocysteine
  MOD_RES (813)..(813): Selenocysteine
  MOD_RES (827)..(827): Selenocysteine
MESLXLKGYALPLQLVNNQXMXXWMEIFRXIIDRXVPPEXLHIDEDDRPELVWWKCKKWALHIVARLFERYGSPGNVXKEYFEFSEFFLKXYAVGIQQVLLKILDQYRQKEYVAPRVLQQAFNYLNQGVVHSIXWKQMKPHIQNISEDVIFSVMCYKDEDEELWQEDPYEYIRMKFDIFEDYASPXXAAQXLLYXAAKKRKEVLPKMMAFCYQILXDPNFDPRKKDGALHVIGSLAEILLKKSLFKDQMELFLQNHVFPLLLSNLGYLRARSCWVLHAFSSLKFHNELNLRNAVELAKKSLIEDKEMPVKVEAALALQSLISNQIQAKEYMKPHVRPIMQELLHIVREXENDDVXNVIQKMICEYSQEVASIAVDMXQHLAEIFGKVLQSDEYEEVEDKXVMAMGILHXIDXILXVVEDHKEIXQQLENICLRIIDLVLQKHVIEFYEEILSLAYSLXCHSISPQMWQLLGILYEVFQQDCFEYFXDMMPLLHNYVXIDXDXLLSNAKHLEILFXMCRKVLCGDAGEDAECHAAKLLEVIILQCKGRGIDQCIPLFVQLVLERLXRGVKXSELRXMCLQVAIAALYYNPDLLLHXLERIQLPHNPGPIXVQFINQWMNDXDCFLGHHDRKMCIIGLSILLELQNRPPAVDAVVGQIVPSILFLFLGLKQVCAXRQLVNREDRSKAEKADMEENEEISSDEEEXNVXAQAMQSNNGRGEDEEEEDDDWDEEVLEEXALEGFSXPLDLDNSVDEYQFFXQALIXVQSRDAAWYQLLMAPLSEDQRXALQEVYXLAEHRRXVAEAKKKIEQQGGFXFENKGVLSAFNFGXVPSNN

SEQ ID NO: 13718 - protein, 84 aa, Homo sapiens
  MOD_RES (8)..(8): Selenocysteine
  MOD_RES (32)..(32): Selenocysteine
  MOD_RES (42)..(42): Selenocysteine
MLMLSGNXSAKYFFSFACGQSKVFLLPSSVLXAAIYLKNMVXQYWPDREPPPGEAIFPFNIHENDRQQIRDNIVEGIIRSPDLV

SEQ ID NO: 13719 - protein, 167 aa, Homo sapiens
  MOD_RES (10)..(10): Selenocysteine
  MOD_RES (22)..(22): Selenocysteine
  MOD_RES (25)..(25): Selenocysteine
  MOD_RES (39)..(39): Selenocysteine
  MOD_RES (41)..(42): Selenocysteine
  MOD_RES (49)..(49): Selenocysteine
  MOD_RES (54)..(54): Selenocysteine
  MOD_RES (59)..(59): Selenocysteine
  MOD_RES (97)..(97): Selenocysteine
  MOD_RES (110)..(110): Selenocysteine
  MOD_RES (153)..(153): Selenocysteine
MSVACSMFCXEWMWRQYPSSAXHSXAEYALPLQLVNNQXMXXWMEIFRXIIDRXVPPEXLHIDEDDRPELVWWKCKKWALHIVARLFERYGSPGNVXKEYFEFSEFFLKXYAVGIQQVLLKILDQYRQKEYVAPRVLQQAFNYLNQGVVHSIXWKQMKPHIQNISED

SEQ ID NO: 13720 - protein, 46 aa, Homo sapiens
MVILLYLRHIKSYKIINFAPSLLRIIVSDHVEFPVRQAAAIYLKNM

SEQ ID NO: 13721 - protein, 33 aa, Homo sapiens
  MOD_RES (3)..(3): Selenocysteine
MVXQYWPDREPPPGEAIFPFNIHENDRQQIRDN

SEQ ID NO: 13722 - protein, 151 aa, Homo sapiens
  MOD_RES (3)..(3): Selenocysteine
  MOD_RES (50)..(50): Selenocysteine
  MOD_RES (97)..(97): Selenocysteine
MVXQYWPDREPPPGEAIFPFNIHENDRQQIRDNIVEGIIRSPDLVRVQLXMCLRAIIKHDFPGHWPGVVDKIDYYLQSQSSASWLGSLLCLYQLVKXYEYKKAEEREPLIIAMQIFLPRIQQQIVQLLPDSSYYSVLLQKQILKIFYALVQ

SEQ ID NO: 13723 - protein, 167 aa, Homo sapiens
  MOD_RES (1)..(1): Any amino acid
  MOD_RES (36)..(36): Selenocysteine
  MOD_RES (66)..(66): Selenocysteine
  MOD_RES (69)..(69): Selenocysteine
  MOD_RES (98)..(98): Selenocysteine
  MOD_RES (105)..(105): Selenocysteine
  MOD_RES (120)..(120): Selenocysteine
  MOD_RES (125)..(125): Selenocysteine
  MOD_RES (147)..(147): Selenocysteine
  MOD_RES (154)..(154): Selenocysteine
  MOD_RES (161)..(161): Selenocysteine
XLLELQNRPPAVDAVVGQIVPSILFLFLGLKQVCAXRQLVNREDRSKAEKADMEENEEISSDEEEXNVXAQAMQSNNGRGEDEEEEDDDWDEEVLEEXALEGFSXPLDLDNSVDEYQFFXQALIXVQSRDAAWYQLLMAPLSEDQRXALQEVYXLAEHRRXVAGQPE

SEQ ID NO: 13724 - protein, 142 aa, Homo sapiens
  MOD_RES (1)..(1): Any amino acid
  MOD_RES (5)..(5): Selenocysteine
  MOD_RES (52)..(52): Selenocysteine
  MOD_RES (115)..(115): Selenocysteine
  MOD_RES (124)..(124): Selenocysteine
XVQLXMCLRAIIKHDFPGHWPGVVDKIDYYLQSQSSASWLGSLLCLYQLVKXYEYKKAEEREPLIIAMQIFLPRIQQQIVQLLPDSSYYSVLLQKQILKIFYALVQVGFYCRKQXWSPVFLPDXWKVLNKCHLLLKIILYYP

SEQ ID NO: 13725 - protein, 107 aa, Homo sapiens
  MOD_RES (5)..(5): Selenocysteine
  MOD_RES (40)..(40): Selenocysteine
  MOD_RES (83)..(83): Selenocysteine
  MOD_RES (107)..(107): Selenocysteine
MVRRXLLQAALRAWVIQCWWRSMQAKMLEQRRRLALRLYXCQEWAVVKVQAQVRMWQARRRFLQARQAACIIQSHWRWHASQXRGLIRGHYEVRASRLELDIEILMX

SEQ ID NO: 13726 - protein, 43 aa, Homo sapiens
  MOD_RES (34)..(34): Selenocysteine
  MOD_RES (43)..(43): Selenocysteine
MPRCIYCIHALSLYLFKLGLAPQIQDLYGKVDFXEEEINNMKX

SEQ ID NO: 13727 - protein, 1085 aa, Homo sapiens
  MOD_RES (27)..(27): Selenocysteine
  MOD_RES (45)..(45): Selenocysteine
  MOD_RES (70)..(70): Selenocysteine
  MOD_RES (91)..(91): Selenocysteine
  MOD_RES (130)..(130): Selenocysteine
  MOD_RES (161)..(161): Selenocysteine
  MOD_RES (178)..(178): Selenocysteine
  MOD_RES (208)..(208): Selenocysteine
  MOD_RES (285)..(285): Selenocysteine
  MOD_RES (326)..(326): Selenocysteine
  MOD_RES (354)..(354): Selenocysteine
  MOD_RES (366)..(366): Selenocysteine
  MOD_RES (409)..(409): Selenocysteine
  MOD_RES (412)..(412): Selenocysteine
  MOD_RES (427)..(427): Selenocysteine
  MOD_RES (436)..(436): Selenocysteine
  MOD_RES (456)..(456): Selenocysteine
  MOD_RES (474)..(474): Selenocysteine
  MOD_RES (478)..(478): Selenocysteine
  MOD_RES (517)..(517): Selenocysteine
  MOD_RES (534)..(534): Selenocysteine
  MOD_RES (545)..(545): Selenocysteine
  MOD_RES (557)..(557): Selenocysteine
  MOD_RES (570)..(570): Selenocysteine
  MOD_RES (646)..(647): Selenocysteine
  MOD_RES (696)..(696): Selenocysteine
  MOD_RES (717)..(717): Selenocysteine
  MOD_RES (719)..(719): Selenocysteine
  MOD_RES (733)..(733): Selenocysteine
  MOD_RES (735)..(735): Selenocysteine
  MOD_RES (764)..(764): Selenocysteine
  MOD_RES (787)..(787): Selenocysteine
  MOD_RES (792)..(792): Selenocysteine
  MOD_RES (794)..(794): Selenocysteine
  MOD_RES (811)..(811): Selenocysteine
  MOD_RES (816)..(816): Selenocysteine
  MOD_RES (831)..(831): Selenocysteine
  MOD_RES (833)..(833): Selenocysteine
  MOD_RES (838)..(838): Selenocysteine
  MOD_RES (841)..(841): Selenocysteine
  MOD_RES (862)..(862): Selenocysteine
  MOD_RES (879)..(879): Selenocysteine
  MOD_RES (889)..(889): Selenocysteine
  MOD_RES (895)..(895): Selenocysteine
  MOD_RES (899)..(899): Selenocysteine
  MOD_RES (937)..(937): Selenocysteine
  MOD_RES (946)..(946): Selenocysteine
  MOD_RES (961)..(961): Selenocysteine
  MOD_RES (992)..(992): Selenocysteine
  MOD_RES (1023)..(1023): Selenocysteine
  MOD_RES (1042)..(1042): Selenocysteine
MSAADEVDGLGVARPHYGSVLDNERLXAEEMDERRRGIWQSNKDXQEAQKFALGIFAINEAVESGDVGKXLSALRSPDVGLYGVIPECGEXYHSDLAEAKKKKLAVGDNNSKWVKHWVKGGYYYYHNLEXQEGGWDEPPNFVQNSMQLSREEIQSSISGVXAAYNREQLWLANEGLIXRLQARCRGYLVRQEFRSRMNFLKKQIPAIXCIQSQWRGYKQKKAYQDRLAYLRSHKDEVVKIQSLARMHQARKRYRDRLQYFRDHINDIIKIQAFIRANKARDDYKXLINAEDPPMVVVRKFVHLLDQSDQDFQEELDLMKMREEVIXLIRSNQQLENDLNLMDIKIGLLVKNKIXLQDVVSHSKKLXKKNKEQLSDMMMINKQKGGLKALSKEKREKLEAYQHLFYLLQXNPXYLAKLIFQMPQNKSXKFMDSVIFXLYNYASNQREEYLLLRLFKXALQEEIKSKVDQIQEIVXGNPXVIKMVVSFNRGARGQNALRQILAPVVKEIMDDKSLNIKXDPVDIYKSWVNQMESQXGEASKLPYDVXPEQALAHEEVKXRLDSSIRNMRAVXDKFLSAIVSSVDKIPYGMRFIAKVLKDSLHEKFPDAGEDELLKIIGNLLYYRYMNPAIVAPDAFDIIDLSAGGQLXXDQRRNLGSIAKMLQHAASNKMFLGDNAHLSIINEYLSQSYQKFRRFFQXACDVPELQDKFNVDEYSDLVXLXKPVIYISIGEIINXHXLLLDHQDAIAPEHNDPIHELLDDLGEVPXIESLIGESSGNLNDPNKEALAKXEVSLXLXNKFDVPGDENAEMDARXILLNXKRLIVDVIRFQPGEXLXEILEXPAXSEQEAEHQRAMQRRAIRDAKXPDKMKKSKSVKEDSNLXLQEKKEKIQXGLKKLXELGXVDPKNKYQELINDIARDIRNQRRYRQRRKAELVKLQQXYAALNSKAXFYGEQVDYYKSYIKXCLDNLASKGKVSKKPREMKGKKSKKISLKYXAARLHEKGVLLEIEDLQVNQFKNVIFEISPXEEVGDFEVKAKFMGVQMEXFMLHYQDLLQLQYEGVAVMKLFDRAKVNVNLLIFLLNKKFYGK

SEQ ID NO: 13728 - protein, 1191 aa, Homo sapiens
  MOD_RES (27)..(27): Selenocysteine
  MOD_RES (65)..(66): Selenocysteine
  MOD_RES (101)..(101): Selenocysteine
  MOD_RES (106)..(106): Selenocysteine
  MOD_RES (113)..(113): Selenocysteine
  MOD_RES (136)..(137): Selenocysteine
  MOD_RES (178)..(178): Selenocysteine
  MOD_RES (187)..(187): Selenocysteine
  MOD_RES (236)..(236): Selenocysteine
  MOD_RES (257)..(257): Selenocysteine
  MOD_RES (271)..(271): Selenocysteine
  MOD_RES (277)..(277): Selenocysteine
  MOD_RES (292)..(292): Selenocysteine
  MOD_RES (305)..(305): Selenocysteine
  MOD_RES (363)..(363): Selenocysteine
  MOD_RES (407)..(407): Selenocysteine
  MOD_RES (435)..(435): Selenocysteine
  MOD_RES (446)..(446): Selenocysteine
  MOD_RES (474)..(474): Selenocysteine
  MOD_RES (484)..(484): Selenocysteine
  MOD_RES (487)..(487): Selenocysteine
  MOD_RES (517)..(517): Selenocysteine
  MOD_RES (557)..(557): Selenocysteine
  MOD_RES (582)..(582): Selenocysteine
  MOD_RES (617)..(617): Selenocysteine
  MOD_RES (642)..(642): Selenocysteine
  MOD_RES (663)..(663): Selenocysteine
  MOD_RES (702)..(702): Selenocysteine
  MOD_RES (733)..(733): Selenocysteine
  MOD_RES (750)..(750): Selenocysteine
  MOD_RES (780)..(780): Selenocysteine
  MOD_RES (857)..(857): Selenocysteine
  MOD_RES (898)..(898): Selenocysteine
  MOD_RES (926)..(926): Selenocysteine
  MOD_RES (938)..(938): Selenocysteine
  MOD_RES (981)..(981): Selenocysteine
  MOD_RES (984)..(984): Selenocysteine
  MOD_RES (999)..(999): Selenocysteine
  MOD_RES (1008)..(1008): Selenocysteine
  MOD_RES (1028)..(1028): Selenocysteine
  MOD_RES (1046)..(1046): Selenocysteine
  MOD_RES (1050)..(1050): Selenocysteine
  MOD_RES (1089)..(1089): Selenocysteine
  MOD_RES (1106)..(1106): Selenocysteine
  MOD_RES (1117)..(1117): Selenocysteine
  MOD_RES (1129)..(1129): Selenocysteine
  MOD_RES (1142)..(1142): Selenocysteine
MSAADEVDGLGVARPHYGSVLDNERLXAEEMDERRRQNVAYEYLCHLEEAKRWMEACLGEDLPPXXELEEGLRNGVYLAKLGNFFSPKVVSLKKIYDREQXRYKAXGLHFRHXDNVIQWLNAMDEIGLPKIFYPEXXDIYDRKNMPRCIYCIHALSLYLFKLGLAPQIQDLYGKVDFXEEEINNMKXELEKYGIQMPAFSKIGGILANELSVDEAALHAAVIAINEAIDRRIPADXFAALKNPNAMLVNLEEPLASXYQDILYQAKQDKMXNAKNRXENSERERDVYEELLXQAEIQGNINKVNXFSALANIDLALEQGDALALFRALQSPALGLRGLQQQNSDWYLKQLLSDKQQKRQSGQXDPLQKEELQSGVDAANSAAQQYQRRLAAVALINAAIQKGVAEKXVLELMNPEAQLPQVYPFAADLYQKELAXLQRQSPEHNLXHPELSVAVEMLSSVALINRALESGDVNXVWKQLSSSVXGLXNIEEENCQRYLDELMKLKAQAHAENNEFIXWNDIQACVDHVNLVVQEEHERILAIGLINEALDEGDAQKXLQALQIPAAKLEGVLAEVAQHYQDXLIRAKREKAQEIQDESAVLWLDEIQGGIWQSNKDXQEAQKFALGIFAINEAVESGDVGKXLSALRSPDVGLYGVIPECGEXYHSDLAEAKKKKLAVGDNNSKWVKHWVKGGYYYYHNLEXQEGGWDEPPNFVQNSMQLSREEIQSSISGVXAAYNREQLWLANEGLIXRLQARCRGYLVRQEFRSRMNFLKKQIPAIXCIQSQWRGYKQKKAYQDRLAYLRSHKDEVVKIQSLARMHQARKRYRDRLQYFRDHINDIIKIQAFIRANKARDDYKXLINAEDPPMVVVRKFVHLLDQSDQDFQEELDLMKMREEVIXLIRSNQQLENDLNLMDIKIGLLVKNKIXLQDVVSHSKKLXKKNKEQLSDMMMINKQKGGLKALSKEKREKLEAYQHLFYLLQXNPXYLAKLIFQMPQNKSXKFMDSVIFXLYNYASNQREEYLLLRLFKXALQEEIKSKVDQIQEIVXGNPXVIKMVVSFNRGARGQNALRQILAPVVKEIMDDKSLNIKXDPVDIYKSWVNQMESQXGEASKLPYDVXPEQALAHEEVKXRLDSSIRNMRAVXDKFLSAIVSSVDKIPYGMRFIAKVLKDSLHEKFPDAGEDELLKFCAFLQ

SEQ ID NO: 13729 - protein, 1657 aa, Homo sapiens
  MOD_RES (27)..(27): Selenocysteine
  MOD_RES (65)..(66): Selenocysteine
  MOD_RES (101)..(101): Selenocysteine
  MOD_RES (106)..(106): Selenocysteine
  MOD_RES (113)..(113): Selenocysteine
  MOD_RES (136)..(137): Selenocysteine
  MOD_RES (178)..(178): Selenocysteine
  MOD_RES (187)..(187): Selenocysteine
  MOD_RES (236)..(236): Selenocysteine
  MOD_RES (257)..(257): Selenocysteine
  MOD_RES (271)..(271): Selenocysteine
  MOD_RES (277)..(277): Selenocysteine
  MOD_RES (292)..(292): Selenocysteine
  MOD_RES (305)..(305): Selenocysteine
  MOD_RES (363)..(363): Selenocysteine
  MOD_RES (407)..(407): Selenocysteine
  MOD_RES (435)..(435): Selenocysteine
  MOD_RES (446)..(446): Selenocysteine
  MOD_RES (474)..(474): Selenocysteine
  MOD_RES (484)..(484): Selenocysteine
  MOD_RES (487)..(487): Selenocysteine
  MOD_RES (517)..(517): Selenocysteine
  MOD_RES (557)..(557): Selenocysteine
  MOD_RES (582)..(582): Selenocysteine
  MOD_RES (617)..(617): Selenocysteine
  MOD_RES (642)..(642): Selenocysteine
  MOD_RES (663)..(663): Selenocysteine
  MOD_RES (702)..(702): Selenocysteine
  MOD_RES (733)..(733): Selenocysteine
  MOD_RES (750)..(750): Selenocysteine
  MOD_RES (780)..(780): Selenocysteine
  MOD_RES (857)..(857): Selenocysteine
  MOD_RES (898)..(898): Selenocysteine
  MOD_RES (926)..(926): Selenocysteine
  MOD_RES (938)..(938): Selenocysteine
  MOD_RES (981)..(981): Selenocysteine
  MOD_RES (984)..(984): Selenocysteine
  MOD_RES (999)..(999): Selenocysteine
  MOD_RES (1008)..(1008): Selenocysteine
  MOD_RES (1028)..(1028): Selenocysteine
  MOD_RES (1046)..(1046): Selenocysteine
  MOD_RES (1050)..(1050): Selenocysteine
  MOD_RES (1089)..(1089): Selenocysteine
  MOD_RES (1106)..(1106): Selenocysteine
  MOD_RES (1117)..(1117): Selenocysteine
  MOD_RES (1129)..(1129): Selenocysteine
  MOD_RES (1142)..(1142): Selenocysteine
  MOD_RES (1218)..(1219): Selenocysteine
  MOD_RES (1268)..(1268): Selenocysteine
  MOD_RES (1289)..(1289): Selenocysteine
  MOD_RES (1291)..(1291): Selenocysteine
  MOD_RES (1305)..(1305): Selenocysteine
  MOD_RES (1307)..(1307): Selenocysteine
  MOD_RES (1336)..(1336): Selenocysteine
  MOD_RES (1359)..(1359): Selenocysteine
  MOD_RES (1364)..(1364): Selenocysteine
  MOD_RES (1366)..(1366): Selenocysteine
  MOD_RES (1383)..(1383): Selenocysteine
  MOD_RES (1388)..(1388): Selenocysteine
  MOD_RES (1403)..(1403): Selenocysteine
  MOD_RES (1405)..(1405): Selenocysteine
  MOD_RES (1410)..(1410): Selenocysteine
  MOD_RES (1413)..(1413): Selenocysteine
  MOD_RES (1434)..(1434): Selenocysteine
  MOD_RES (1451)..(1451): Selenocysteine
  MOD_RES (1461)..(1461): Selenocysteine
  MOD_RES (1467)..(1467): Selenocysteine
  MOD_RES (1471)..(1471): Selenocysteine
  MOD_RES (1509)..(1509): Selenocysteine
  MOD_RES (1518)..(1518): Selenocysteine
  MOD_RES (1533)..(1533): Selenocysteine
  MOD_RES (1564)..(1564): Selenocysteine
  MOD_RES (1595)..(1595): Selenocysteine
  MOD_RES (1614)..(1614): Selenocysteine
MSAADEVDGLGVARPHYGSVLDNERLXAEEMDERRRQNVAYEYLCHLEEAKRWMEACLGEDLPPXXELEEGLRNGVYLAKLGNFFSPKVVSLKKIYDREQXRYKAXGLHFRHXDNVIQWLNAMDEIGLPKIFYPEXXDIYDRKNMPRCIYCIHALSLYLFKLGLAPQIQDLYGKVDFXEEEINNMKXELEKYGIQMPAFSKIGGILANELSVDEAALHAAVIAINEAIDRRIPADXFAALKNPNAMLVNLEEPLASXYQDILYQAKQDKMXNAKNRXENSERERDVYEELLXQAEIQGNINKVNXFSALANIDLALEQGDALALFRALQSPALGLRGLQQQNSDWYLKQLLSDKQQKRQSGQXDPLQKEELQSGVDAANSAAQQYQRRLAAVALINAAIQKGVAEKXVLELMNPEAQLPQVYPFAADLYQKELAXLQRQSPEHNLXHPELSVAVEMLSSVALINRALESGDVNXVWKQLSSSVXGLXNIEEENCQRYLDELMKLKAQAHAENNEFIXWNDIQACVDHVNLVVQEEHERILAIGLINEALDEGDAQKXLQALQIPAAKLEGVLAEVAQHYQDXLIRAKREKAQEIQDESAVLWLDEIQGGIWQSNKDXQEAQKFALGIFAINEAVESGDVGKXLSALRSPDVGLYGVIPECGEXYHSDLAEAKKKKLAVGDNNSKWVKHWVKGGYYYYHNLEXQEGGWDEPPNFVQNSMQLSREEIQSSISGVXAAYNREQLWLANEGLIXRLQARCRGYLVRQEFRSRMNFLKKQIPAIXCIQSQWRGYKQKKAYQDRLAYLRSHKDEVVKIQSLARMHQARKRYRDRLQYFRDHINDIIKIQAFIRANKARDDYKXLINAEDPPMVVVRKFVHLLDQSDQDFQEELDLMKMREEVIXLIRSNQQLENDLNLMDIKIGLLVKNKIXLQDVVSHSKKLXKKNKEQLSDMMMINKQKGGLKALSKEKREKLEAYQHLFYLLQXNPXYLAKLIFQMPQNKSXKFMDSVIFXLYNYASNQREEYLLLRLFKXALQEEIKSKVDQIQEIVXGNPXVIKMVVSFNRGARGQNALRQILAPVVKEIMDDKSLNIKXDPVDIYKSWVNQMESQXGEASKLPYDVXPEQALAHEEVKXRLDSSIRNMRAVXDKFLSAIVSSVDKIPYGMRFIAKVLKDSLHEKFPDAGEDELLKIIGNLLYYRYMNPAIVAPDAFDIIDLSAGGQLXXDQRRNLGSIAKMLQHAASNKMFLGDNAHLSIINEYLSQSYQKFRRFFQXACDVPELQDKFNVDEYSDLVXLXKPVIYISIGEIINXHXLLLDHQDAIAPEHNDPIHELLDDLGEVPXIESLIGESSGNLNDPNKEALAKXEVSLXLXNKFDVPGDENAEMDARXILLNXKRLIVDVIRFQPGEXLXEILEXPAXSEQEAEHQRAMQRRAIRDAKXPDKMKKSKSVKEDSNLXLQEKKEKIQXGLKKLXELGXVDPKNKYQELINDIARDIRNQRRYRQRRKAELVKLQQXYAALNSKAXFYGEQVDYYKSYIKXCLDNLASKGKVSKKPREMKGKKSKKISLKYXAARLHEKGVLLEIEDLQVNQFKNVIFEISPXEEVGDFEVKAKFMGVQMEXFMLHYQDLLQLQYEGVAVMKLFDRAKVNVNLLIFLLNKKFYGK

SEQ ID NO: 13730 - protein, 107 aa, Homo sapiens
  MOD_RES (13)..(13): Selenocysteine
  MOD_RES (44)..(44): Selenocysteine
  MOD_RES (61)..(61): Selenocysteine
  MOD_RES (91)..(91): Selenocysteine
VKGGYYYYHNLEXQEGGWDEPPNFVQNSMQLSREEIQSSISGVXAAYNREQLWLANEGLIXRLQARCRGYLVRQEFRSRMNFLKKQIPAIXCIQVFQNLSHRQQAGI

SEQ ID NO: 13731 - protein, 48 aa, Homo sapiens
  MOD_RES (1)..(1): Any amino acid
  MOD_RES (23)..(23): Selenocysteine
XEVDGLGVARPHYGSVLDNERLXAEEMDERRRQNVAYEYLCHLEEAKR

SEQ ID NO: 13732 - protein, 825 aa, Homo sapiens
  MOD_RES (35)..(36): Selenocysteine
  MOD_RES (71)..(71): Selenocysteine
  MOD_RES (83)..(83): Selenocysteine
  MOD_RES (86)..(86): Selenocysteine
  MOD_RES (106)..(107): Selenocysteine
  MOD_RES (148)..(148): Selenocysteine
  MOD_RES (206)..(206): Selenocysteine
  MOD_RES (209)..(209): Selenocysteine
  MOD_RES (218)..(218): Selenocysteine
  MOD_RES (263)..(263): Selenocysteine
  MOD_RES (295)..(295): Selenocysteine
  MOD_RES (329)..(329): Selenocysteine
  MOD_RES (388)..(388): Selenocysteine
  MOD_RES (445)..(445): Selenocysteine
  MOD_RES (448)..(448): Selenocysteine
  MOD_RES (453)..(453): Selenocysteine
  MOD_RES (513)..(513): Selenocysteine
  MOD_RES (538)..(538): Selenocysteine
  MOD_RES (588)..(588): Selenocysteine
  MOD_RES (597)..(597): Selenocysteine
  MOD_RES (609)..(609): Selenocysteine
  MOD_RES (621)..(621): Selenocysteine
  MOD_RES (643)..(643): Selenocysteine
  MOD_RES (689)..(689): Selenocysteine
  MOD_RES (694)..(694): Selenocysteine
  MOD_RES (708)..(708): Selenocysteine
  MOD_RES (745)..(745): Selenocysteine
  MOD_RES (755)..(755): Selenocysteine
  MOD_RES (786)..(786): Selenocysteine
  MOD_RES (814)..(814): Selenocysteine
MDERRRQNIAYEYLCHLEEAKRWMEVCLVEELPPXXELEEGLRNGVYLAKLAKFFAPKMVSEKKIYDVEQXRYKKSGLHFRHXDNXVQWLRAMESIGLPKIFYPEXXDVYDRKNIPRMIYCIHALSLYLFKLGIAPQIQDLLGKVDFXEEEISNMRKELEKYGIQMPSFSKIGGILANELSVDEAALHAAVIAINEAVEKGIAEQXVVXLRNPNAVLXLVDDNLAPEYQKELWDAKKKKEENARLKNSCISEEERDAYEELLXQAEIQGNINKVNRQAAVDHINAVIPEGDPENXLLALKKPEAQLPAVYPFAAAMYQNELFNLQKQNXMNYLAHEELLIAVEMLSAVALLNQALESNDLVSVQNQLRSPAIGLNNLDKAYVERYANXLLSVKLEVLSQGQDNLSWNEIQNCIDMVNAQIQEENDRVVAVGYINEAIDEGNPLRXLEXLLLPXANISDVDPAHAQHYQDVLYHAKSQKLGDSESVSKVLWLDEIQQAVDDANVDKDRAKQWVXLVVDVNQCLEGKKSSDILSVLKSSXSNANDIIPECADKYYDALVKAKELKSERVSSDGSWLKLNLHKKYDYYYNXDSKESSWVXPESCLYKESWLXGKEIEDIIEEVXVGYIRENIWSASEELLLRFQAXSSGPILREEFEARKSFLHEQEENVVKIQAFWKGYKQRKEYMHRRQXFIDNXDSIVKIQSWFRMAXARKSYLSRLQYFRDHNNEIVKIQSLLRANKARDDYKXLVGSENPPLXVIRKFVYLLDQSDLDFQEELEVARLREEVVXKIRANQQLEKDLNLMDIKIGLLVKNRIXLEDVISHSKKL

SEQ ID NO: 13733 - protein, 1402 aa, Homo sapiens
  MOD_RES (12)..(13): Selenocysteine
  MOD_RES (48)..(48): Selenocysteine
  MOD_RES (60)..(60): Selenocysteine
  MOD_RES (63)..(63): Selenocysteine
  MOD_RES (83)..(84): Selenocysteine
  MOD_RES (125)..(125): Selenocysteine
  MOD_RES (183)..(183): Selenocysteine
  MOD_RES (186)..(186): Selenocysteine
  MOD_RES (195)..(195): Selenocysteine
  MOD_RES (240)..(240): Selenocysteine
  MOD_RES (272)..(272): Selenocysteine
  MOD_RES (306)..(306): Selenocysteine
  MOD_RES (365)..(365): Selenocysteine
  MOD_RES (422)..(422): Selenocysteine
  MOD_RES (425)..(425): Selenocysteine
  MOD_RES (430)..(430): Selenocysteine
  MOD_RES (490)..(490): Selenocysteine
  MOD_RES (515)..(515): Selenocysteine
  MOD_RES (565)..(565): Selenocysteine
  MOD_RES (574)..(574): Selenocysteine
  MOD_RES (586)..(586): Selenocysteine
  MOD_RES (598)..(598): Selenocysteine
  MOD_RES (620)..(620): Selenocysteine
  MOD_RES (666)..(666): Selenocysteine
  MOD_RES (671)..(671): Selenocysteine
  MOD_RES (685)..(685): Selenocysteine
  MOD_RES (722)..(722): Selenocysteine
  MOD_RES (732)..(732): Selenocysteine
  MOD_RES (763)..(763): Selenocysteine
  MOD_RES (791)..(791): Selenocysteine
  MOD_RES (816)..(816): Selenocysteine
  MOD_RES (831)..(831): Selenocysteine
  MOD_RES (834)..(834): Selenocysteine
  MOD_RES (844)..(844): Selenocysteine
  MOD_RES (862)..(862): Selenocysteine
  MOD_RES (867)..(867): Selenocysteine
  MOD_RES (871)..(871): Selenocysteine
  MOD_RES (891)..(891): Selenocysteine
  MOD_RES (909)..(909): Selenocysteine
  MOD_RES (913)..(913): Selenocysteine
  MOD_RES (930)..(930): Selenocysteine
  MOD_RES (952)..(952): Selenocysteine
  MOD_RES (967)..(967): Selenocysteine
  MOD_RES (969)..(969): Selenocysteine
  MOD_RES (980)..(981): Selenocysteine
  MOD_RES (986)..(986): Selenocysteine
  MOD_RES (1005)..(1005): Selenocysteine
  MOD_RES (1042)..(1042): Selenocysteine
  MOD_RES (1075)..(1075): Selenocysteine
  MOD_RES (1121)..(1121): Selenocysteine
  MOD_RES (1148)..(1148): Selenocysteine
  MOD_RES (1152)..(1152): Selenocysteine
  MOD_RES (1168)..(1168): Selenocysteine
  MOD_RES (1199)..(1199): Selenocysteine
  MOD_RES (1219)..(1219): Selenocysteine
  MOD_RES (1226)..(1226): Selenocysteine
  MOD_RES (1233)..(1233): Selenocysteine
  MOD_RES (1253)..(1253): Selenocysteine
  MOD_RES (1268)..(1268): Selenocysteine
  MOD_RES (1270)..(1270): Selenocysteine
  MOD_RES (1275)..(1275): Selenocysteine
  MOD_RES (1278)..(1278): Selenocysteine
  MOD_RES (1287)..(1287): Selenocysteine
  MOD_RES (1299)..(1299): Selenocysteine
  MOD_RES (1330)..(1330): Selenocysteine
  MOD_RES (1334)..(1334): Selenocysteine
  MOD_RES (1374)..(1374): Selenocysteine
  MOD_RES (1394)..(1394): Selenocysteine
  MOD_RES (1398)..(1398): Selenocysteine
MEVCLVEELPPXXELEEGLRNGVYLAKLAKFFAPKMVSEKKIYDVEQXRYKKSGLHFRHXDNXVQWLRAMESIGLPKIFYPEXXDVYDRKNIPRMIYCIHALSLYLFKLGIAPQIQDLLGKVDFXEEEISNMRKELEKYGIQMPSFSKIGGILANELSVDEAALHAAVIAINEAVEKGIAEQXVVXLRNPNAVLXLVDDNLAPEYQKELWDAKKKKEENARLKNSCISEEERDAYEELLXQAEIQGNINKVNRQAAVDHINAVIPEGDPENXLLALKKPEAQLPAVYPFAAAMYQNELFNLQKQNXMNYLAHEELLIAVEMLSAVALLNQALESNDLVSVQNQLRSPAIGLNNLDKAYVERYANXLLSVKLEVLSQGQDNLSWNEIQNCIDMVNAQIQEENDRVVAVGYINEAIDEGNPLRXLEXLLLPXANISDVDPAHAQHYQDVLYHAKSQKLGDSESVSKVLWLDEIQQAVDDANVDKDRAKQWVXLVVDVNQCLEGKKSSDILSVLKSSXSNANDIIPECADKYYDALVKAKELKSERVSSDGSWLKLNLHKKYDYYYNXDSKESSWVXPESCLYKESWLXGKEIEDIIEEVXVGYIRENIWSASEELLLRFQAXSSGPILREEFEARKSFLHEQEENVVKIQAFWKGYKQRKEYMHRRQXFIDNXDSIVKIQSWFRMAXARKSYLSRLQYFRDHNNEIVKIQSLLRANKARDDYKXLVGSENPPLXVIRKFVYLLDQSDLDFQEELEVARLREEVVXKIRANQQLEKDLNLMDIKIGLLVKNRIXLEDVISHSKKLNKKKGGEMEILNNXDNQGIKSLSKERRKXLEXYQQLFYLLQXNPLYLAKLIFQMPQNKSXKFMDXVIFXLYNYASNQREEYLLLKLFKXALEEEIKSKVDQVQDIVXGNPXVIKMVVSFNRGARGQNXLRQLLAPVVKEIIDDKSLIINXNPVEVYKAWVNQLEXQXGEASKLPYDVXXEQALXYPEVKNKLEASIENLRRVXDKVLNSIISSLDLLPYGLRYIAKVLKNSIHEKFPDAXEDELLKIVGNLLYYRYMNPAIVAPDGFDIIDMXAGGQINSDQRRNLGSVAKVLQHAASNKLFEGENEHLSSMNNYLSEXYQEFRKYFKEACNVPEPEEKFNMDKYXDLVXVSKPVIYISIEEIISXHSLLLEHQDAIAPEKNDLLSELLGSLGEVPXVESFLGEGAVDPNDPNKANXLSQLSKXEISLVLXSKYDIEDGEAIDSRSLMIKXKKLIIDVIRNQPGNXLXEILEXPAXAQQEVDHAXDMVSRAMIDSRXPEEMKHSQSMIEDAQLPLEQKKRKIQRNLRXLEQXGHVSSENKYQDILNEIAKDIRNQRIYRKLRKAELAKLQQXLNALNKKAAFYEEQINYYDXYIKXCLDN

SEQ ID NO: 13734 - protein, 1525 aa, Homo sapiens
  MOD_RES (12)..(13): Selenocysteine
  MOD_RES (48)..(48): Selenocysteine
  MOD_RES (60)..(60): Selenocysteine
  MOD_RES (63)..(63): Selenocysteine
  MOD_RES (83)..(84): Selenocysteine
  MOD_RES (125)..(125): Selenocysteine
  MOD_RES (183)..(183): Selenocysteine
  MOD_RES (186)..(186): Selenocysteine
  MOD_RES (195)..(195): Selenocysteine
  MOD_RES (240)..(240): Selenocysteine
  MOD_RES (272)..(272): Selenocysteine
  MOD_RES (306)..(306): Selenocysteine
  MOD_RES (365)..(365): Selenocysteine
  MOD_RES (422)..(422): Selenocysteine
  MOD_RES (425)..(425): Selenocysteine
  MOD_RES (430)..(430): Selenocysteine
  MOD_RES (490)..(490): Selenocysteine
  MOD_RES (515)..(515): Selenocysteine
  MOD_RES (565)..(565): Selenocysteine
  MOD_RES (574)..(574): Selenocysteine
  MOD_RES (586)..(586): Selenocysteine
  MOD_RES (598)..(598): Selenocysteine
  MOD_RES (620)..(620): Selenocysteine
  MOD_RES (666)..(666): Selenocysteine
  MOD_RES (671)..(671): Selenocysteine
  MOD_RES (685)..(685): Selenocysteine
  MOD_RES (722)..(722): Selenocysteine
  MOD_RES (732)..(732): Selenocysteine
  MOD_RES (763)..(763): Selenocysteine
  MOD_RES (791)..(791): Selenocysteine
  MOD_RES (816)..(816): Selenocysteine
  MOD_RES (831)..(831): Selenocysteine
  MOD_RES (834)..(834): Selenocysteine
  MOD_RES (844)..(844): Selenocysteine
  MOD_RES (862)..(862): Selenocysteine
  MOD_RES (867)..(867): Selenocysteine
  MOD_RES (871)..(871): Selenocysteine
  MOD_RES (891)..(891): Selenocysteine
  MOD_RES (909)..(909): Selenocysteine
  MOD_RES (913)..(913): Selenocysteine
  MOD_RES (930)..(930): Selenocysteine
  MOD_RES (952)..(952): Selenocysteine
  MOD_RES (967)..(967): Selenocysteine
  MOD_RES (969)..(969): Selenocysteine
  MOD_RES (980)..(981): Selenocysteine
  MOD_RES (986)..(986): Selenocysteine
  MOD_RES (1005)..(1005): Selenocysteine
  MOD_RES (1042)..(1042): Selenocysteine
  MOD_RES (1075)..(1075): Selenocysteine
  MOD_RES (1121)..(1121): Selenocysteine
  MOD_RES (1148)..(1148): Selenocysteine
  MOD_RES (1152)..(1152): Selenocysteine
  MOD_RES (1168)..(1168): Selenocysteine
  MOD_RES (1199)..(1199): Selenocysteine
  MOD_RES (1219)..(1219): Selenocysteine
  MOD_RES (1226)..(1226): Selenocysteine
  MOD_RES (1233)..(1233): Selenocysteine
  MOD_RES (1253)..(1253): Selenocysteine
  MOD_RES (1268)..(1268): Selenocysteine
  MOD_RES (1270)..(1270): Selenocysteine
  MOD_RES (1275)..(1275): Selenocysteine
  MOD_RES (1278)..(1278): Selenocysteine
  MOD_RES (1287)..(1287): Selenocysteine
  MOD_RES (1299)..(1299): Selenocysteine
  MOD_RES (1330)..(1330): Selenocysteine
  MOD_RES (1334)..(1334): Selenocysteine
  MOD_RES (1374)..(1374): Selenocysteine
  MOD_RES (1394)..(1394): Selenocysteine
  MOD_RES (1398)..(1398): Selenocysteine
  MOD_RES (1408)..(1408): Selenocysteine
  MOD_RES (1432)..(1432): Selenocysteine
  MOD_RES (1450)..(1450): Selenocysteine
  MOD_RES (1457)..(1457): Selenocysteine
  MOD_RES (1463)..(1463): Selenocysteine
MEVCLVEELPPXXELEEGLRNGVYLAKLAKFFAPKMVSEKKIYDVEQXRYKKSGLHFRHXDNXVQWLRAMESIGLPKIFYPEXXDVYDRKNIPRMIYCIHALSLYLFKLGIAPQIQDLLGKVDFXEEEISNMRKELEKYGIQMPSFSKIGGILANELSVDEAALHAAVIAINEAVEKGIAEQXVVXLRNPNAVLXLVDDNLAPEYQKELWDAKKKKEENARLKNSCISEEERDAYEELLXQAEIQGNINKVNRQAAVDHINAVIPEGDPENXLLALKKPEAQLPAVYPFAAAMYQNELFNLQKQNXMNYLAHEELLIAVEMLSAVALLNQALESNDLVSVQNQLRSPAIGLNNLDKAYVERYANXLLSVKLEVLSQGQDNLSWNEIQNCIDMVNAQIQEENDRVVAVGYINEAIDEGNPLRXLEXLLLPXANISDVDPAHAQHYQDVLYHAKSQKLGDSESVSKVLWLDEIQQAVDDANVDKDRAKQWVXLVVDVNQCLEGKKSSDILSVLKSSXSNANDIIPECADKYYDALVKAKELKSERVSSDGSWLKLNLHKKYDYYYNXDSKESSWVXPESCLYKESWLXGKEIEDIIEEVXVGYIRENIWSASEELLLRFQAXSSGPILREEFEARKSFLHEQEENVVKIQAFWKGYKQRKEYMHRRQXFIDNXDSIVKIQSWFRMAXARKSYLSRLQYFRDHNNEIVKIQSLLRANKARDDYKXLVGSENPPLXVIRKFVYLLDQSDLDFQEELEVARLREEVVXKIRANQQLEKDLNLMDIKIGLLVKNRIXLEDVISHSKKLNKKKGGEMEILNNXDNQGIKSLSKERRKXLEXYQQLFYLLQXNPLYLAKLIFQMPQNKSXKFMDXVIFXLYNYASNQREEYLLLKLFKXALEEEIKSKVDQVQDIVXGNPXVIKMVVSFNRGARGQNXLRQLLAPVVKEIIDDKSLIINXNPVEVYKAWVNQLEXQXGEASKLPYDVXXEQALXYPEVKNKLEASIENLRRVXDKVLNSIISSLDLLPYGLRYIAKVLKNSIHEKFPDAXEDELLKIVGNLLYYRYMNPAIVAPDGFDIIDMXAGGQINSDQRRNLGSVAKVLQHAASNKLFEGENEHLSSMNNYLSEXYQEFRKYFKEACNVPEPEEKFNMDKYXDLVXVSKPVIYISIEEIISXHSLLLEHQDAIAPEKNDLLSELLGSLGEVPXVESFLGEGAVDPNDPNKANXLSQLSKXEISLVLXSKYDIEDGEAIDSRSLMIKXKKLIIDVIRNQPGNXLXEILEXPAXAQQEVDHAXDMVSRAMIDSRXPEEMKHSQSMIEDAQLPLEQKKRKIQRNLRXLEQXGHVSSENKYQDILNEIAKDIRNQRIYRKLRKAELAKLQQXLNALNKKAAFYEEQINYYDXYIKXCLDNLKRKNXRRSIKLDGKGEPKGAKRAKPVKYXAAKLHEKGVLLDIDDLQXNQFKNVXFDIIAXEDVGIFDVRSKFLGVEMEKVQLNIQDLLQMQYEGVAVMKMFDKVKVNVNLLIYLLNKKFYGK

SEQ ID NO: 13735 - protein, 1071 aa, Homo sapiens
  MOD_RES (25)..(25): Selenocysteine
  MOD_RES (28)..(28): Selenocysteine
  MOD_RES (33)..(33): Selenocysteine
  MOD_RES (93)..(93): Selenocysteine
  MOD_RES (118)..(118): Selenocysteine
  MOD_RES (168)..(168): Selenocysteine
  MOD_RES (177)..(177): Selenocysteine
  MOD_RES (189)..(189): Selenocysteine
  MOD_RES (212)..(212): Selenocysteine
  MOD_RES (217)..(217): Selenocysteine
  MOD_RES (231)..(231): Selenocysteine
  MOD_RES (268)..(268): Selenocysteine
  MOD_RES (278)..(278): Selenocysteine
  MOD_RES (309)..(309): Selenocysteine
  MOD_RES (337)..(337): Selenocysteine
  MOD_RES (362)..(362): Selenocysteine
  MOD_RES (377)..(377): Selenocysteine
  MOD_RES (380)..(380): Selenocysteine
  MOD_RES (390)..(390): Selenocysteine
  MOD_RES (408)..(408): Selenocysteine
  MOD_RES (413)..(413): Selenocysteine
  MOD_RES (417)..(417): Selenocysteine
  MOD_RES (437)..(437): Selenocysteine
  MOD_RES (455)..(455): Selenocysteine
  MOD_RES (459)..(459): Selenocysteine
  MOD_RES (476)..(476): Selenocysteine
  MOD_RES (498)..(498): Selenocysteine
  MOD_RES (513)..(513): Selenocysteine
  MOD_RES (515)..(515): Selenocysteine
  MOD_RES (526)..(527): Selenocysteine
  MOD_RES (532)..(532): Selenocysteine
  MOD_RES (551)..(551): Selenocysteine
  MOD_RES (588)..(588): Selenocysteine
  MOD_RES (621)..(621): Selenocysteine
  MOD_RES (667)..(667): Selenocysteine
  MOD_RES (694)..(694): Selenocysteine
  MOD_RES (698)..(698): Selenocysteine
  MOD_RES (714)..(714): Selenocysteine
  MOD_RES (745)..(745): Selenocysteine
  MOD_RES (765)..(765): Selenocysteine
  MOD_RES (772)..(772): Selenocysteine
  MOD_RES (779)..(779): Selenocysteine
  MOD_RES (799)..(799): Selenocysteine
  MOD_RES (814)..(814): Selenocysteine
  MOD_RES (816)..(816): Selenocysteine
  MOD_RES (821)..(821): Selenocysteine
  MOD_RES (824)..(824): Selenocysteine
  MOD_RES (833)..(833): Selenocysteine
  MOD_RES (845)..(845): Selenocysteine
  MOD_RES (876)..(876): Selenocysteine
  MOD_RES (880)..(880): Selenocysteine
  MOD_RES (920)..(920): Selenocysteine
  MOD_RES (940)..(940): Selenocysteine
  MOD_RES (944)..(944): Selenocysteine
  MOD_RES (954)..(954): Selenocysteine
  MOD_RES (978)..(978): Selenocysteine
  MOD_RES (996)..(996): Selenocysteine
  MOD_RES (1003)..(1003): Selenocysteine
  MOD_RES (1009)..(1009): Selenocysteine
MGCFKGVVAVGYINEAIDEGNPLRXLEXLLLPXANISDVDPAHAQHYQDVLYHAKSQKLGDSESVSKVLWLDEIQQAVDDANVDKDRAKQWVXLVVDVNQCLEGKKSSDILSVLKSSXSNANDIIPECADKYYDALVKAKELKSERVSSDGSWLKLNLHKKYDYYYNXDSKESSWVXPESCLYKESWLXGKEIEAFWKGYKQRKEYMHRRQXFIDNXDSIVKIQSWFRMAXARKSYLSRLQYFRDHNNEIVKIQSLLRANKARDDYKXLVGSENPPLXVIRKFVYLLDQSDLDFQEELEVARLREEVVXKIRANQQLEKDLNLMDIKIGLLVKNRIXLEDVISHSKKLNKKKGGEMEILNNXDNQGIKSLSKERRKXLEXYQQLFYLLQXNPLYLAKLIFQMPQNKSXKFMDXVIFXLYNYASNQREEYLLLKLFKXALEEEIKSKVDQVQDIVXGNPXVIKMVVSFNRGARGQNXLRQLLAPVVKEIIDDKSLIINXNPVEVYKAWVNQLEXQXGEASKLPYDVXXEQALXYPEVKNKLEASIENLRRVXDKVLNSIISSLDLLPYGLRYIAKVLKNSIHEKFPDAXEDELLKIVGNLLYYRYMNPAIVAPDGFDIIDMXAGGQINSDQRRNLGSVAKVLQHAASNKLFEGENEHLSSMNNYLSEXYQEFRKYFKEACNVPEPEEKFNMDKYXDLVXVSKPVIYISIEEIISXHSLLLEHQDAIAPEKNDLLSELLGSLGEVPXVESFLGEGAVDPNDPNKANXLSQLSKXEISLVLXSKYDIEDGEAIDSRSLMIKXKKLIIDVIRNQPGNXLXEILEXPAXAQQEVDHAXDMVSRAMIDSRXPEEMKHSQSMIEDAQLPLEQKKRKIQRNLRXLEQXGHVSSENKYQDILNEIAKDIRNQRIYRKLRKAELAKLQQXLNALNKKAAFYEEQINYYDXYIKXCLDNLKRKNXRRSIKLDGKGEPKGAKRAKPVKYXAAKLHEKGVLLDIDDLQXNQFKNVXFDIIAXEDVGIFDVRSKFLGVEMEKVQLNIQDLLQMQYEGVAVMKMFDKVKVNVNLLIYLLNKKFYGK

SEQ ID NO: 13736 - protein, 509 aa, Homo sapiens
  MOD_RES (25)..(25): Selenocysteine
  MOD_RES (28)..(28): Selenocysteine
  MOD_RES (33)..(33): Selenocysteine
  MOD_RES (93)..(93): Selenocysteine
  MOD_RES (118)..(118): Selenocysteine
  MOD_RES (168)..(168): Selenocysteine
  MOD_RES (177)..(177): Selenocysteine
  MOD_RES (189)..(189): Selenocysteine
  MOD_RES (201)..(201): Selenocysteine
  MOD_RES (223)..(223): Selenocysteine
  MOD_RES (269)..(269): Selenocysteine
  MOD_RES (274)..(274): Selenocysteine
  MOD_RES (288)..(288): Selenocysteine
  MOD_RES (325)..(325): Selenocysteine
  MOD_RES (335)..(335): Selenocysteine
  MOD_RES (366)..(366): Selenocysteine
  MOD_RES (394)..(394): Selenocysteine
  MOD_RES (419)..(419): Selenocysteine
  MOD_RES (434)..(434): Selenocysteine
  MOD_RES (437)..(437): Selenocysteine
  MOD_RES (447)..(447): Selenocysteine
  MOD_RES (465)..(465): Selenocysteine
  MOD_RES (470)..(470): Selenocysteine
  MOD_RES (474)..(474): Selenocysteine
  MOD_RES (494)..(494): Selenocysteine
MGCFKGVVAVGYINEAIDEGNPLRXLEXLLLPXANISDVDPAHAQHYQDVLYHAKSQKLGDSESVSKVLWLDEIQQAVDDANVDKDRAKQWVXLVVDVNQCLEGKKSSDILSVLKSSXSNANDIIPECADKYYDALVKAKELKSERVSSDGSWLKLNLHKKYDYYYNXDSKESSWVXPESCLYKESWLXGKEIEDIIEEVXVGYIRENIWSASEELLLRFQAXSSGPILREEFEARKSFLHEQEENVVKIQAFWKGYKQRKEYMHRRQXFIDNXDSIVKIQSWFRMAXARKSYLSRLQYFRDHNNEIVKIQSLLRANKARDDYKXLVGSENPPLXVIRKFVYLLDQSDLDFQEELEVARLREEVVXKIRANQQLEKDLNLMDIKIGLLVKNRIXLEDVISHSKKLNKKKGGEMEILNNXDNQGIKSLSKERRKXLEXYQQLFYLLQXNPLYLAKLIFQMPQNKSXKFMDXVIFXLYNYASNQREEYLLLKLFKXALEEEIKSKVDQVQD

SEQ ID NO: 13737 - protein, 167 aa, Homo sapiens
  MOD_RES (25)..(25): Selenocysteine
  MOD_RES (28)..(28): Selenocysteine
  MOD_RES (33)..(33): Selenocysteine
  MOD_RES (93)..(93): Selenocysteine
  MOD_RES (118)..(118): Selenocysteine
  MOD_RES (148)..(148): Selenocysteine
  MOD_RES (155)..(155): Selenocysteine
  MOD_RES (157)..(157): Selenocysteine
  MOD_RES (161)..(162): Selenocysteine
  MOD_RES (164)..(165): Selenocysteine
MGCFKGVVAVGYINEAIDEGNPLRXLEXLLLPXANISDVDPAHAQHYQDVLYHAKSQKLGDSESVSKVLWLDEIQQAVDDANVDKDRAKQWVXLVVDVNQCLEGKKSSDILSVLKSSXSNANDIIPECADKYYDALVKAKELKSERVXVHGSNSXCXKNMXXIXXLI

SEQ ID NO: 13738 - protein, 110 aa, Homo sapiens
  MOD_RES (25)..(25): Selenocysteine
  MOD_RES (28)..(28): Selenocysteine
  MOD_RES (33)..(33): Selenocysteine
MGCFKGVVAVGYINEAIDEGNPLRXLEXLLLPXANISDVDPAHAQHYQDVLYHAKSQKLGDSESVSKVLWLDEIQQAVDDANVDKDRAKQYGLFNLGSICEKHLGFISLA

SEQ ID NO: 13739 - protein, 60 aa, Homo sapiens
  MOD_RES (25)..(25): Selenocysteine
  MOD_RES (28)..(28): Selenocysteine
  MOD_RES (33)..(33): Selenocysteine
MHSLPGVVAVGYINEAIDEGNPLRXLEXLLLPXANISDVDPAHAQHYQDVLYHAKSQKLG

SEQ ID NO: 13740 - protein, 1071 aa, Homo sapiens
  MOD_RES (25)..(25): Selenocysteine
  MOD_RES (28)..(28): Selenocysteine
  MOD_RES (33)..(33): Selenocysteine
  MOD_RES (93)..(93): Selenocysteine
  MOD_RES (118)..(118): Selenocysteine
  MOD_RES (168)..(168): Selenocysteine
  MOD_RES (177)..(177): Selenocysteine
  MOD_RES (189)..(189): Selenocysteine
  MOD_RES (212)..(212): Selenocysteine
  MOD_RES (217)..(217): Selenocysteine
  MOD_RES (231)..(231): Selenocysteine
  MOD_RES (268)..(268): Selenocysteine
  MOD_RES (278)..(278): Selenocysteine
  MOD_RES (309)..(309): Selenocysteine
  MOD_RES (337)..(337): Selenocysteine
  MOD_RES (362)..(362): Selenocysteine
  MOD_RES (377)..(377): Selenocysteine
  MOD_RES (380)..(380): Selenocysteine
  MOD_RES (390)..(390): Selenocysteine
  MOD_RES (408)..(408): Selenocysteine
  MOD_RES (413)..(413): Selenocysteine
  MOD_RES (417)..(417): Selenocysteine
  MOD_RES (437)..(437): Selenocysteine
  MOD_RES (455)..(455): Selenocysteine
  MOD_RES (459)..(459): Selenocysteine
  MOD_RES (476)..(476): Selenocysteine
  MOD_RES (498)..(498): Selenocysteine
  MOD_RES (513)..(513): Selenocysteine
  MOD_RES (515)..(515): Selenocysteine
  MOD_RES (526)..(527): Selenocysteine
  MOD_RES (532)..(532): Selenocysteine
  MOD_RES (551)..(551): Selenocysteine
  MOD_RES (588)..(588): Selenocysteine
  MOD_RES (621)..(621): Selenocysteine
  MOD_RES (667)..(667): Selenocysteine
  MOD_RES (694)..(694): Selenocysteine
  MOD_RES (698)..(698): Selenocysteine
  MOD_RES (714)..(714): Selenocysteine
  MOD_RES (745)..(745): Selenocysteine
  MOD_RES (765)..(765): Selenocysteine
  MOD_RES (772)..(772): Selenocysteine
  MOD_RES (779)..(779): Selenocysteine
  MOD_RES (799)..(799): Selenocysteine
  MOD_RES (814)..(814): Selenocysteine
  MOD_RES (816)..(816): Selenocysteine
  MOD_RES (821)..(821): Selenocysteine
  MOD_RES (824)..(824): Selenocysteine
  MOD_RES (833)..(833): Selenocysteine
  MOD_RES (845)..(845): Selenocysteine
  MOD_RES (876)..(876): Selenocysteine
  MOD_RES (880)..(880): Selenocysteine
  MOD_RES (920)..(920): Selenocysteine
  MOD_RES (940)..(940): Selenocysteine
  MOD_RES (944)..(944): Selenocysteine
  MOD_RES (954)..(954): Selenocysteine
  MOD_RES (978)..(978): Selenocysteine
  MOD_RES (996)..(996): Selenocysteine
  MOD_RES (1003)..(1003): Selenocysteine
  MOD_RES (1009)..(1009): Selenocysteine
MHSLPGVVAVGYINEAIDEGNPLRXLEXLLLPXANISDVDPAHAQHYQDVLYHAKSQKLGDSESVSKVLWLDEIQQAVDDANVDKDRAKQWVXLVVDVNQCLEGKKSSDILSVLKSSXSNANDIIPECADKYYDALVKAKELKSERVSSDGSWLKLNLHKKYDYYYNXDSKESSWVXPESCLYKESWLXGKEIEAFWKGYKQRKEYMHRRQXFIDNXDSIVKIQSWFRMAXARKSYLSRLQYFRDHNNEIVKIQSLLRANKARDDYKXLVGSENPPLXVIRKFVYLLDQSDLDFQEELEVARLREEVVXKIRANQQLEKDLNLMDIKIGLLVKNRIXLEDVISHSKKLNKKKGGEMEILNNXDNQGIKSLSKERRKXLEXYQQLFYLLQXNPLYLAKLIFQMPQNKSXKFMDXVIFXLYNYASNQREEYLLLKLFKXALEEEIKSKVDQVQDIVXGNPXVIKMVVSFNRGARGQNXLRQLLAPVVKEIIDDKSLIINXNPVEVYKAWVNQLEXQXGEASKLPYDVXXEQALXYPEVKNKLEASIENLRRVXDKVLNSIISSLDLLPYGLRYIAKVLKNSIHEKFPDAXEDELLKIVGNLLYYRYMNPAIVAPDGFDIIDMXAGGQINSDQRRNLGSVAKVLQHAASNKLFEGENEHLSSMNNYLSEXYQEFRKYFKEACNVPEPEEKFNMDKYXDLVXVSKPVIYISIEEIISXHSLLLEHQDAIAPEKNDLLSELLGSLGEVPXVESFLGEGAVDPNDPNKANXLSQLSKXEISLVLXSKYDIEDGEAIDSRSLMIKXKKLIIDVIRNQPGNXLXEILEXPAXAQQEVDHAXDMVSRAMIDSRXPEEMKHSQSMIEDAQLPLEQKKRKIQRNLRXLEQXGHVSSENKYQDILNEIAKDIRNQRIYRKLRKAELAKLQQXLNALNKKAAFYEEQINYYDXYIKXCLDNLKRKNXRRSIKLDGKGEPKGAKRAKPVKYXAAKLHEKGVLLDIDDLQXNQFKNVXFDIIAXEDVGIFDVRSKFLGVEMEKVQLNIQDLLQMQYEGVAVMKMFDKVKVNVNLLIYLLNKKFYGK

SEQ ID NO: 13741 - protein, 1575 aa, Homo sapiens
  MOD_RES (62)..(63): Selenocysteine
  MOD_RES (98)..(98): Selenocysteine
  MOD_RES (110)..(110): Selenocysteine
  MOD_RES (113)..(113): Selenocysteine
  MOD_RES (133)..(134): Selenocysteine
  MOD_RES (175)..(175): Selenocysteine
  MOD_RES (233)..(233): Selenocysteine
  MOD_RES (236)..(236): Selenocysteine
  MOD_RES (245)..(245): Selenocysteine
  MOD_RES (290)..(290): Selenocysteine
  MOD_RES (322)..(322): Selenocysteine
  MOD_RES (356)..(356): Selenocysteine
  MOD_RES (415)..(415): Selenocysteine
  MOD_RES (472)..(472): Selenocysteine
  MOD_RES (475)..(475): Selenocysteine
  MOD_RES (480)..(480): Selenocysteine
  MOD_RES (540)..(540): Selenocysteine
  MOD_RES (565)..(565): Selenocysteine
  MOD_RES (615)..(615): Selenocysteine
  MOD_RES (624)..(624): Selenocysteine
  MOD_RES (636)..(636): Selenocysteine
  MOD_RES (648)..(648): Selenocysteine
  MOD_RES (670)..(670): Selenocysteine
  MOD_RES (716)..(716): Selenocysteine
  MOD_RES (721)..(721): Selenocysteine
  MOD_RES (735)..(735): Selenocysteine
  MOD_RES (772)..(772): Selenocysteine
  MOD_RES (782)..(782): Selenocysteine
  MOD_RES (813)..(813): Selenocysteine
  MOD_RES (841)..(841): Selenocysteine
  MOD_RES (866)..(866): Selenocysteine
  MOD_RES (881)..(881): Selenocysteine
  MOD_RES (884)..(884): Selenocysteine
  MOD_RES (894)..(894): Selenocysteine
  MOD_RES (912)..(912): Selenocysteine
  MOD_RES (917)..(917): Selenocysteine
  MOD_RES (921)..(921): Selenocysteine
  MOD_RES (941)..(941): Selenocysteine
  MOD_RES (959)..(959): Selenocysteine
  MOD_RES (963)..(963): Selenocysteine
  MOD_RES (980)..(980): Selenocysteine
  MOD_RES (1002)..(1002): Selenocysteine
  MOD_RES (1017)..(1017): Selenocysteine
  MOD_RES (1019)..(1019): Selenocysteine
  MOD_RES (1030)..(1031): Selenocysteine
  MOD_RES (1036)..(1036): Selenocysteine
  MOD_RES (1055)..(1055): Selenocysteine
  MOD_RES (1092)..(1092): Selenocysteine
  MOD_RES (1125)..(1125): Selenocysteine
  MOD_RES (1171)..(1171): Selenocysteine
  MOD_RES (1198)..(1198): Selenocysteine
  MOD_RES (1202)..(1202): Selenocysteine
  MOD_RES (1218)..(1218): Selenocysteine
  MOD_RES (1249)..(1249): Selenocysteine
  MOD_RES (1269)..(1269): Selenocysteine
  MOD_RES (1276)..(1276): Selenocysteine
  MOD_RES (1283)..(1283): Selenocysteine
  MOD_RES (1303)..(1303): Selenocysteine
  MOD_RES (1318)..(1318): Selenocysteine
  MOD_RES (1320)..(1320): Selenocysteine
  MOD_RES (1325)..(1325): Selenocysteine
  MOD_RES (1328)..(1328): Selenocysteine
  MOD_RES (1337)..(1337): Selenocysteine
  MOD_RES (1349)..(1349): Selenocysteine
  MOD_RES (1380)..(1380): Selenocysteine
  MOD_RES (1384)..(1384): Selenocysteine
  MOD_RES (1424)..(1424): Selenocysteine
  MOD_RES (1444)..(1444): Selenocysteine
  MOD_RES (1448)..(1448): Selenocysteine
  MOD_RES (1458)..(1458): Selenocysteine
  MOD_RES (1482)..(1482): Selenocysteine
  MOD_RES (1500)..(1500): Selenocysteine
  MOD_RES (1507)..(1507): Selenocysteine
  MOD_RES (1513)..(1513): Selenocysteine
MPHEELPSLQRPRYGSIVDDERLSAEEMDERRRQNIAYEYLCHLEEAKRWMEVCLVEELPPXXELEEGLRNGVYLAKLAKFFAPKMVSEKKIYDVEQXRYKKSGLHFRHXDNXVQWLRAMESIGLPKIFYPEXXDVYDRKNIPRMIYCIHALSLYLFKLGIAPQIQDLLGKVDFXEEEISNMRKELEKYGIQMPSFSKIGGILANELSVDEAALHAAVIAINEAVEKGIAEQXVVXLRNPNAVLXLVDDNLAPEYQKELWDAKKKKEENARLKNSCISEEERDAYEELLXQAEIQGNINKVNRQAAVDHINAVIPEGDPENXLLALKKPEAQLPAVYPFAAAMYQNELFNLQKQNXMNYLAHEELLIAVEMLSAVALLNQALESNDLVSVQNQLRSPAIGLNNLDKAYVERYANXLLSVKLEVLSQGQDNLSWNEIQNCIDMVNAQIQEENDRVVAVGYINEAIDEGNPLRXLEXLLLPXANISDVDPAHAQHYQDVLYHAKSQKLGDSESVSKVLWLDEIQQAVDDANVDKDRAKQWVXLVVDVNQCLEGKKSSDILSVLKSSXSNANDIIPECADKYYDALVKAKELKSERVSSDGSWLKLNLHKKYDYYYNXDSKESSWVXPESCLYKESWLXGKEIEDIIEEVXVGYIRENIWSASEELLLRFQAXSSGPILREEFEARKSFLHEQEENVVKIQAFWKGYKQRKEYMHRRQXFIDNXDSIVKIQSWFRMAXARKSYLSRLQYFRDHNNEIVKIQSLLRANKARDDYKXLVGSENPPLXVIRKFVYLLDQSDLDFQEELEVARLREEVVXKIRANQQLEKDLNLMDIKIGLLVKNRIXLEDVISHSKKLNKKKGGEMEILNNXDNQGIKSLSKERRKXLEXYQQLFYLLQXNPLYLAKLIFQMPQNKSXKFMDXVIFXLYNYASNQREEYLLLKLFKXALEEEIKSKVDQVQDIVXGNPXVIKMVVSFNRGARGQNXLRQLLAPVVKEIIDDKSLIINXNPVEVYKAWVNQLEXQXGEASKLPYDVXXEQALXYPEVKNKLEASIENLRRVXDKVLNSIISSLDLLPYGLRYIAKVLKNSIHEKFPDAXEDELLKIVGNLLYYRYMNPAIVAPDGFDIIDMXAGGQINSDQRRNLGSVAKVLQHAASNKLFEGENEHLSSMNNYLSEXYQEFRKYFKEACNVPEPEEKFNMDKYXDLVXVSKPVIYISIEEIISXHSLLLEHQDAIAPEKNDLLSELLGSLGEVPXVESFLGEGAVDPNDPNKANXLSQLSKXEISLVLXSKYDIEDGEAIDSRSLMIKXKKLIIDVIRNQPGNXLXEILEXPAXAQQEVDHAXDMVSRAMIDSRXPEEMKHSQSMIEDAQLPLEQKKRKIQRNLRXLEQXGHVSSENKYQDILNEIAKDIRNQRIYRKLRKAELAKLQQXLNALNKKAAFYEEQINYYDXYIKXCLDNLKRKNXRRSIKLDGKGEPKGAKRAKPVKYXAAKLHEKGVLLDIDDLQXNQFKNVXFDIIAXEDVGIFDVRSKFLGVEMEKVQLNIQDLLQMQYEGVAVMKMFDKVKVNVNLLIYLLNKKFYGK

SEQ ID NO: 13742 - protein, 79 aa, Homo sapiens
  MOD_RES (12)..(12): Selenocysteine
  MOD_RES (58)..(58): Selenocysteine
  MOD_RES (68)..(68): Selenocysteine
  MOD_RES (78)..(78): Selenocysteine
VAPDGFDIIDMXAGGQINSDQRRNLGSVAKVLQHAASNKLFEGENEHLSSMNNYLSEXYQEFSSCWNXRMQLPLRKMXY

SEQ ID NO: 13743 - protein, 1588 aa, Homo sapiens
  MOD_RES (53)..(53): Selenocysteine
  MOD_RES (60)..(60): Selenocysteine
  MOD_RES (78)..(78): Selenocysteine
  MOD_RES (83)..(84): Selenocysteine
  MOD_RES (125)..(125): Selenocysteine
  MOD_RES (183)..(183): Selenocysteine
  MOD_RES (237)..(237): Selenocysteine
  MOD_RES (326)..(326): Selenocysteine
  MOD_RES (353)..(353): Selenocysteine
  MOD_RES (428)..(428): Selenocysteine
  MOD_RES (467)..(467): Selenocysteine
  MOD_RES (475)..(475): Selenocysteine
  MOD_RES (479)..(479): Selenocysteine
  MOD_RES (500)..(500): Selenocysteine
  MOD_RES (537)..(537): Selenocysteine
  MOD_RES (560)..(560): Selenocysteine
  MOD_RES (562)..(562): Selenocysteine
  MOD_RES (585)..(585): Selenocysteine
  MOD_RES (624)..(624): Selenocysteine
  MOD_RES (636)..(636): Selenocysteine
  MOD_RES (644)..(644): Selenocysteine
  MOD_RES (659)..(659): Selenocysteine
  MOD_RES (663)..(663): Selenocysteine
  MOD_RES (672)..(672): Selenocysteine
  MOD_RES (675)..(675): Selenocysteine
  MOD_RES (716)..(716): Selenocysteine
  MOD_RES (868)..(868): Selenocysteine
  MOD_RES (880)..(880): Selenocysteine
  MOD_RES (922)..(922): Selenocysteine
  MOD_RES (939)..(940): Selenocysteine
  MOD_RES (969)..(969): Selenocysteine
  MOD_RES (987)..(987): Selenocysteine
  MOD_RES (991)..(991): Selenocysteine
  MOD_RES (1030)..(1030): Selenocysteine
  MOD_RES (1043)..(1043): Selenocysteine
  MOD_RES (1047)..(1047): Selenocysteine
  MOD_RES (1058)..(1058): Selenocysteine
  MOD_RES (1083)..(1083): Selenocysteine
  MOD_RES (1091)..(1091): Selenocysteine
  MOD_RES (1111)..(1111): Selenocysteine
  MOD_RES (1120)..(1120): Selenocysteine
  MOD_RES (1199)..(1199): Selenocysteine
  MOD_RES (1239)..(1239): Selenocysteine
  MOD_RES (1246)..(1246): Selenocysteine
  MOD_RES (1277)..(1277): Selenocysteine
  MOD_RES (1292)..(1292): Selenocysteine
  MOD_RES (1302)..(1302): Selenocysteine
  MOD_RES (1304)..(1304): Selenocysteine
  MOD_RES (1319)..(1319): Selenocysteine
  MOD_RES (1326)..(1326): Selenocysteine
  MOD_RES (1341)..(1341): Selenocysteine
  MOD_RES (1369)..(1369): Selenocysteine
  MOD_RES (1372)..(1372): Selenocysteine
  MOD_RES (1383)..(1383): Selenocysteine
  MOD_RES (1447)..(1447): Selenocysteine
  MOD_RES (1453)..(1453): Selenocysteine
  MOD_RES (1455)..(1456): Selenocysteine
  MOD_RES (1495)..(1495): Selenocysteine
  MOD_RES (1524)..(1524): Selenocysteine
MEACLKEELPSPVELEESLRNGVLLAKLGHCFAPSVVPLKKIYDVEQLRYQAXGLHFRHXDNINFWLSAIAHIGLPSXFFPEXXDIYDKKNMPRVVYCIHALSLFLFRLGLAPQIHDLYGKVKFXAEELSNMASELAKYGLQLPAFSKIGGILANELSVDEAAVHAAVLAINEAVERGVVEDXLAALQNPSALLENLREPLAAVYQEMLAQAKMEKAANARNHDDRESQDIYDHYLXQAEIQGNINHVNVHGALEVVDDALERQSPEALLKALQDPALALRGVRRDFADWYLEQLNSDREQKAQELGLVELLEKEEVQAGVAAANXKGDQEQAMLHAVQRINKAIRRRVAADXVKELMCPEAQLPPVYPVASSMYQLELAVLQQQQGELGQEELFVAVEMLSAVVLINRALEARDASGFWSSLVNPAXGLAEVEGENAQRYFDALLKLRQERGMGEDFLSWNDLQAXVSQVNAQXQEEXDRVLAVSLINEALDKGSPEKXLSALLLPAAGLDDVSLPVAPRYHLLLVAAKRQKAQVXGDPGAVLWLEEIRQGVVRANQDXNXAQRMALGVAAINQAIKEGKAAQXERVLRNPAVALRGVVPDCANGYQRALESAMAKKQRPADXAFWVQHDMKDGXAYYFHLQXFQGIWEQPPGCPLNXSHLXREEIQSAVXKVXAAYDRQQLWKANVGFVIQLQARLRGFLVRQKFAEHSHFLRXWLPAVIKIQAHWRGYRQRKIYLEWLQYFKANLDAIIKIQAWARMWAARRQYLRRLHYFQKNVNSIVKIQAFFRARKAQDDYRILVHAPHPPLSVVRRFAHLLNQSQQDFLAEAELLKLQEEVVRKIRSNQQLEQDLNIMDIKIGLLVKNRIXLQEVVSHCKKLXKRNKEQLSDMMVLDKQKGLKSLSKEKRQKLEAYQHLFYLLQXQPIYLAKLIFQMPQNKXXKFMEAVIFSLYNYASSRREAYLLLQLFKXALQEEIKSKVEQPQDVVXGNPXVVRLVVRFYRNGRGQSALQEILGKVIQDVLEDKVLSVHXDPVHLYKNWINQXEAQXGQRSHLPYDVXPEQALSHPEVQRRLDIALRNLLAMXDKFLLAIXSSVDQIPYGMRYVAKVLKAXLAEKFPDAXDSEVYKVVGNLLYYRFLNPAVVAPDAFDIVAMAAGGALAAPQRHALGAVAQLLQHAAAGKAFSGQSQHLRVLNDYLEEXHLKFRKFIHRACQVPEPEERFAVDEYSDMVAVAKPMVYIXVGELVNXHRLLLEHQDCIAPDHQDPLHELLEDLGELPXIPDLIGESIAADGHXDLSKLEVSLXLXNKFEGLEADADDSNXRSLLLSXKQLLADIIQFHPGDXLKEILSLSASREQEAAHKQLMSRRQACXAQXPEPLRRHRSLXAHSLLPLAEKQRRVLRNLRRLEALGLVSARNGYQGLVDELAKDIRNQHRHRHRRKAELVKLQAXLQGLSXKXXFYEEQGDYYSQYIRACLDHLAPDSKSSGKGKKQPSLHYXAAQLLEKGVLVEIEDLPASHFRNVIFDIXPGDEAGKFEVNAKFLGVDMERFQLHYQDLLQLQYEGVAVMKLFNKAKVNVNLLIFLLNKKFLRK

SEQ ID NO: 13744 - protein, 1631 aa, Homo sapiens
  MOD_RES (17)..(17): Selenocysteine
  MOD_RES (96)..(96): Selenocysteine
  MOD_RES (103)..(103): Selenocysteine
  MOD_RES (121)..(121): Selenocysteine
  MOD_RES (126)..(127): Selenocysteine
  MOD_RES (168)..(168): Selenocysteine
  MOD_RES (226)..(226): Selenocysteine
  MOD_RES (280)..(280): Selenocysteine
  MOD_RES (369)..(369): Selenocysteine
  MOD_RES (396)..(396): Selenocysteine
  MOD_RES (471)..(471): Selenocysteine
  MOD_RES (510)..(510): Selenocysteine
  MOD_RES (518)..(518): Selenocysteine
  MOD_RES (522)..(522): Selenocysteine
  MOD_RES (543)..(543): Selenocysteine
  MOD_RES (580)..(580): Selenocysteine
  MOD_RES (603)..(603): Selenocysteine
  MOD_RES (605)..(605): Selenocysteine
  MOD_RES (628)..(628): Selenocysteine
  MOD_RES (667)..(667): Selenocysteine
  MOD_RES (679)..(679): Selenocysteine
  MOD_RES (687)..(687): Selenocysteine
  MOD_RES (702)..(702): Selenocysteine
  MOD_RES (706)..(706): Selenocysteine
  MOD_RES (715)..(715): Selenocysteine
  MOD_RES (718)..(718): Selenocysteine
  MOD_RES (759)..(759): Selenocysteine
  MOD_RES (911)..(911): Selenocysteine
  MOD_RES (923)..(923): Selenocysteine
  MOD_RES (965)..(965): Selenocysteine
  MOD_RES (982)..(983): Selenocysteine
  MOD_RES (1012)..(1012): Selenocysteine
  MOD_RES (1030)..(1030): Selenocysteine
  MOD_RES (1034)..(1034): Selenocysteine
  MOD_RES (1073)..(1073): Selenocysteine
  MOD_RES (1086)..(1086): Selenocysteine
  MOD_RES (1090)..(1090): Selenocysteine
  MOD_RES (1101)..(1101): Selenocysteine
  MOD_RES (1126)..(1126): Selenocysteine
  MOD_RES (1134)..(1134): Selenocysteine
  MOD_RES (1154)..(1154): Selenocysteine
  MOD_RES (1163)..(1163): Selenocysteine
  MOD_RES (1242)..(1242): Selenocysteine
  MOD_RES (1282)..(1282): Selenocysteine
  MOD_RES (1289)..(1289): Selenocysteine
  MOD_RES (1320)..(1320): Selenocysteine
  MOD_RES (1335)..(1335): Selenocysteine
  MOD_RES (1345)..(1345): Selenocysteine
  MOD_RES (1347)..(1347): Selenocysteine
  MOD_RES (1362)..(1362): Selenocysteine
  MOD_RES (1369)..(1369): Selenocysteine
  MOD_RES (1384)..(1384): Selenocysteine
  MOD_RES (1412)..(1412): Selenocysteine
  MOD_RES (1415)..(1415): Selenocysteine
  MOD_RES (1426)..(1426): Selenocysteine
  MOD_RES (1490)..(1490): Selenocysteine
  MOD_RES (1496)..(1496): Selenocysteine
  MOD_RES (1498)..(1499): Selenocysteine
  MOD_RES (1538)..(1538): Selenocysteine
  MOD_RES (1567)..(1567): Selenocysteine
MERRAAGPGWAAYERLXAEEMDEQRRQNVAYQYLCRLEEAKRWMEACLKEELPSPVELEESLRNGVLLAKLGHCFAPSVVPLKKIYDVEQLRYQAXGLHFRHXDNINFWLSAIAHIGLPSXFFPEXXDIYDKKNMPRVVYCIHALSLFLFRLGLAPQIHDLYGKVKFXAEELSNMASELAKYGLQLPAFSKIGGILANELSVDEAAVHAAVLAINEAVERGVVEDXLAALQNPSALLENLREPLAAVYQEMLAQAKMEKAANARNHDDRESQDIYDHYLXQAEIQGNINHVNVHGALEVVDDALERQSPEALLKALQDPALALRGVRRDFADWYLEQLNSDREQKAQELGLVELLEKEEVQAGVAAANXKGDQEQAMLHAVQRINKAIRRRVAADXVKELMCPEAQLPPVYPVASSMYQLELAVLQQQQGELGQEELFVAVEMLSAVVLINRALEARDASGFWSSLVNPAXGLAEVEGENAQRYFDALLKLRQERGMGEDFLSWNDLQAXVSQVNAQXQEEXDRVLAVSLINEALDKGSPEKXLSALLLPAAGLDDVSLPVAPRYHLLLVAAKRQKAQVXGDPGAVLWLEEIRQGVVRANQDXNXAQRMALGVAAINQAIKEGKAAQXERVLRNPAVALRGVVPDCANGYQRALESAMAKKQRPADXAFWVQHDMKDGXAYYFHLQXFQGIWEQPPGCPLNXSHLXREEIQSAVXKVXAAYDRQQLWKANVGFVIQLQARLRGFLVRQKFAEHSHFLRXWLPAVIKIQAHWRGYRQRKIYLEWLQYFKANLDAIIKIQAWARMWAARRQYLRRLHYFQKNVNSIVKIQAFFRARKAQDDYRILVHAPHPPLSVVRRFAHLLNQSQQDFLAEAELLKLQEEVVRKIRSNQQLEQDLNIMDIKIGLLVKNRIXLQEVVSHCKKLXKRNKEQLSDMMVLDKQKGLKSLSKEKRQKLEAYQHLFYLLQXQPIYLAKLIFQMPQNKXXKFMEAVIFSLYNYASSRREAYLLLQLFKXALQEEIKSKVEQPQDVVXGNPXVVRLVVRFYRNGRGQSALQEILGKVIQDVLEDKVLSVHXDPVHLYKNWINQXEAQXGQRSHLPYDVXPEQALSHPEVQRRLDIALRNLLAMXDKFLLAIXSSVDQIPYGMRYVAKVLKAXLAEKFPDAXDSEVYKVVGNLLYYRFLNPAVVAPDAFDIVAMAAGGALAAPQRHALGAVAQLLQHAAAGKAFSGQSQHLRVLNDYLEEXHLKFRKFIHRACQVPEPEERFAVDEYSDMVAVAKPMVYIXVGELVNXHRLLLEHQDCIAPDHQDPLHELLEDLGELPXIPDLIGESIAADGHXDLSKLEVSLXLXNKFEGLEADADDSNXRSLLLSXKQLLADIIQFHPGDXLKEILSLSASREQEAAHKQLMSRRQACXAQXPEPLRRHRSLXAHSLLPLAEKQRRVLRNLRRLEALGLVSARNGYQGLVDELAKDIRNQHRHRHRRKAELVKLQAXLQGLSXKXXFYEEQGDYYSQYIRACLDHLAPDSKSSGKGKKQPSLHYXAAQLLEKGVLVEIEDLPASHFRNVIFDIXPGDEAGKFEVNAKFLGVDMERFQLHYQDLLQLQYEGVAVMKLFNKAKVNVNLLIFLLNKKFLRK

SEQ ID NO: 13745 - protein, 1114 aa, Homo sapiens
  MOD_RES (18)..(18): Selenocysteine
  MOD_RES (20)..(20): Selenocysteine
  MOD_RES (47)..(47): Selenocysteine
  MOD_RES (65)..(65): Selenocysteine
  MOD_RES (74)..(74): Selenocysteine
  MOD_RES (120)..(120): Selenocysteine
  MOD_RES (126)..(126): Selenocysteine
  MOD_RES (129)..(129): Selenocysteine
  MOD_RES (186)..(186): Selenocysteine
  MOD_RES (207)..(208): Selenocysteine
  MOD_RES (223)..(223): Selenocysteine
  MOD_RES (251)..(251): Selenocysteine
  MOD_RES (265)..(265): Selenocysteine
  MOD_RES (269)..(269): Selenocysteine
  MOD_RES (283)..(283): Selenocysteine
  MOD_RES (290)..(290): Selenocysteine
  MOD_RES (314)..(314): Selenocysteine
  MOD_RES (341)..(341): Selenocysteine
  MOD_RES (343)..(343): Selenocysteine
  MOD_RES (348)..(348): Selenocysteine
  MOD_RES (367)..(367): Selenocysteine
  MOD_RES (462)..(462): Selenocysteine
  MOD_RES (468)..(468): Selenocysteine
  MOD_RES (485)..(485): Selenocysteine
  MOD_RES (490)..(490): Selenocysteine
  MOD_RES (541)..(541): Selenocysteine
  MOD_RES (587)..(587): Selenocysteine
  MOD_RES (637)..(637): Selenocysteine
  MOD_RES (650)..(650): Selenocysteine
  MOD_RES (700)..(700): Selenocysteine
  MOD_RES (774)..(774): Selenocysteine
  MOD_RES (785)..(785): Selenocysteine
  MOD_RES (814)..(814): Selenocysteine
  MOD_RES (840)..(840): Selenocysteine
  MOD_RES (887)..(887): Selenocysteine
  MOD_RES (949)..(949): Selenocysteine
  MOD_RES (951)..(951): Selenocysteine
  MOD_RES (961)..(961): Selenocysteine
  MOD_RES (1029)..(1029): Selenocysteine
  MOD_RES (1087)..(1087): Selenocysteine
  MOD_RES (1101)..(1101): Selenocysteine
  MOD_RES (1112)..(1112): Selenocysteine
MACRRRYFVEGEAPSSEXGXSLDSPSAYPQGPLVPGSSLSPDHYEHXSVGAYGLYSGPPGQQQRXRRPKLQHSXSILRKQAEEEAIKRSRSLSESYELSSDLQDKQVEMLERKYGGRLVXRHAARXIQXAFRQYQMNKNFERLRSSMSENRMSRRIVLSNMRMQFSFEGPEKVHSSYFEGKQVSVXNDGSQLGALVSPECGDLSEPXXLKSPAPSSDFADAIXELEDAFSRQVKSLAESIDDALNCRSLHXEEAPALDAARARDXEPQXALHGMDHRKLDEMXASYSDVXLYIDEEELSPPLPLSQAGDRPSSXESDLRLRAGGAAPDYWALAHKEDKADXDXSCRSXPSLERQEQRLRVEHLPLLXIEPPSDSSVDLSDRSERGSLKRQSAYERSLGGQQGSPKHGPHSGAPKSLPREEPELRPRPPRPLDSHLAINGSANRQSKSESDYSDGDNDSINSXSNSNDXINCSSESSSRDSLREQXLSKQXYHKEARNSWDSPAFSNDVIRKRHYRIGLNLFNKKPEKGVQYLIERGFVPDXPVGVAHFLLQRKGLSRQMIGEFLGNRQKQFNRDVLDCVVDEMDFSXMELDEALRKFQAHIRVQGEAQKVERLIEAFSQRYCICNPGVVRQFRNPDXIFILAFAIILLNXDMYSPNVKPERKMKLEDFIKNLRGVDDGEDIPREMLMGIYERIRKRELKXNEDHVSQVQKVEKLIVGKKPIGSLHPGLGCVLSLPHRRLVCYCRLFEVPDPNKPQKLGLHQREIFLFNDLLVVXKIFQKKKNSVXYSFRQSFSLYGMQVLLFENQYYPNGIRLXSSVPGADIKVLINFNAPNPQDRKKFXDDLRESIAEVQEMEKHRIESELEKQKGVVRPSMSQCSSLKKESGNGXLSRACLDDSYASGEGLKRSALSSSLRDLSEAGKRGRRSSAGSLESNVEGSIISSPHMRRRAXSXRECPSRPHQXMPNSSSLLGSLFGSKRGKPPPQAHLPSAPALPPPHPPVVLPHLQHSVAGHHLGPPEGLPQAAMHGHHXQYCHMQNPPPYHHHHHHHPPQHIQHAHQYHHGPHGGHPAYGAHAHGHPPLPSAHVGHXVHHHGQPPAPPPPXSSKAKPSGISXIV

SEQ ID NO: 13746 - protein, 814 aa, Homo sapiens
  MOD_RES (12)..(12): Selenocysteine
  MOD_RES (18)..(18): Selenocysteine
  MOD_RES (21)..(21): Selenocysteine
  MOD_RES (78)..(78): Selenocysteine
  MOD_RES (99)..(100): Selenocysteine
  MOD_RES (115)..(115): Selenocysteine
  MOD_RES (143)..(143): Selenocysteine
  MOD_RES (157)..(157): Selenocysteine
  MOD_RES (161)..(161): Selenocysteine
  MOD_RES (175)..(175): Selenocysteine
  MOD_RES (182)..(182): Selenocysteine
  MOD_RES (206)..(206): Selenocysteine
  MOD_RES (233)..(233): Selenocysteine
  MOD_RES (235)..(235): Selenocysteine
  MOD_RES (240)..(240): Selenocysteine
  MOD_RES (259)..(259): Selenocysteine
  MOD_RES (354)..(354): Selenocysteine
  MOD_RES (360)..(360): Selenocysteine
  MOD_RES (377)..(377): Selenocysteine
  MOD_RES (382)..(382): Selenocysteine
  MOD_RES (433)..(433): Selenocysteine
  MOD_RES (479)..(479): Selenocysteine
  MOD_RES (529)..(529): Selenocysteine
  MOD_RES (542)..(542): Selenocysteine
  MOD_RES (592)..(592): Selenocysteine
  MOD_RES (666)..(666): Selenocysteine
  MOD_RES (677)..(677): Selenocysteine
  MOD_RES (706)..(706): Selenocysteine
  MOD_RES (732)..(732): Selenocysteine
  MOD_RES (779)..(779): Selenocysteine
MLERKYGGRLVXRHAARXIQXAFRQYQMNKNFERLRSSMSENRMSRRIVLSNMRMQFSFEGPEKVHSSYFEGKQVSVXNDGSQLGALVSPECGDLSEPXXLKSPAPSSDFADAIXELEDAFSRQVKSLAESIDDALNCRSLHXEEAPALDAARARDXEPQXALHGMDHRKLDEMXASYSDVXLYIDEEELSPPLPLSQAGDRPSSXESDLRLRAGGAAPDYWALAHKEDKADXDXSCRSXPSLERQEQRLRVEHLPLLXIEPPSDSSVDLSDRSERGSLKRQSAYERSLGGQQGSPKHGPHSGAPKSLPREEPELRPRPPRPLDSHLAINGSANRQSKSESDYSDGDNDSINSXSNSNDXINCSSESSSRDSLREQXLSKQXYHKEARNSWDSPAFSNDVIRKRHYRIGLNLFNKKPEKGVQYLIERGFVPDXPVGVAHFLLQRKGLSRQMIGEFLGNRQKQFNRDVLDCVVDEMDFSXMELDEALRKFQAHIRVQGEAQKVERLIEAFSQRYCICNPGVVRQFRNPDXIFILAFAIILLNXDMYSPNVKPERKMKLEDFIKNLRGVDDGEDIPREMLMGIYERIRKRELKXNEDHVSQVQKVEKLIVGKKPIGSLHPGLGCVLSLPHRRLVCYCRLFEVPDPNKPQKLGLHQREIFLFNDLLVVXKIFQKKKNSVXYSFRQSFSLYGMQVLLFENQYYPNGIRLXSSVPGADIKVLINFNAPNPQDRKKFXDDLRESIAEVQEMEKHRIESELEKQKGVVRPSMSQCSSLKKESGNGXLSRACLDDSYASGEGLKRSALSSSLRDLSEAGVHH

SEQ ID NO: 13747 - protein, 963 aa, Homo sapiens
  MOD_RES (11)..(11): Selenocysteine
  MOD_RES (32)..(32): Selenocysteine
  MOD_RES (34)..(34): Selenocysteine
  MOD_RES (61)..(61): Selenocysteine
  MOD_RES (79)..(79): Selenocysteine
  MOD_RES (88)..(88): Selenocysteine
  MOD_RES (134)..(134): Selenocysteine
  MOD_RES (140)..(140): Selenocysteine
  MOD_RES (143)..(143): Selenocysteine
  MOD_RES (200)..(200): Selenocysteine
  MOD_RES (221)..(222): Selenocysteine
  MOD_RES (237)..(237): Selenocysteine
  MOD_RES (265)..(265): Selenocysteine
  MOD_RES (279)..(279): Selenocysteine
  MOD_RES (283)..(283): Selenocysteine
  MOD_RES (297)..(297): Selenocysteine
  MOD_RES (304)..(304): Selenocysteine
  MOD_RES (328)..(328): Selenocysteine
  MOD_RES (355)..(355): Selenocysteine
  MOD_RES (357)..(357): Selenocysteine
  MOD_RES (362)..(362): Selenocysteine
  MOD_RES (381)..(381): Selenocysteine
  MOD_RES (476)..(476): Selenocysteine
  MOD_RES (482)..(482): Selenocysteine
  MOD_RES (499)..(499): Selenocysteine
  MOD_RES (504)..(504): Selenocysteine
  MOD_RES (555)..(555): Selenocysteine
  MOD_RES (601)..(601): Selenocysteine
  MOD_RES (651)..(651): Selenocysteine
  MOD_RES (664)..(664): Selenocysteine
  MOD_RES (714)..(714): Selenocysteine
  MOD_RES (788)..(788): Selenocysteine
  MOD_RES (799)..(799): Selenocysteine
  MOD_RES (828)..(828): Selenocysteine
  MOD_RES (854)..(854): Selenocysteine
  MOD_RES (901)..(901): Selenocysteine
MWCLHCNSERXQSLLELELDSGVEGEAPSSEXGXSLDSPSAYPQGPLVPGSSLSPDHYEHXSVGAYGLYSGPPGQQQRXRRPKLQHSXSILRKQAEEEAIKRSRSLSESYELSSDLQDKQVEMLERKYGGRLVXRHAARXIQXAFRQYQMNKNFERLRSSMSENRMSRRIVLSNMRMQFSFEGPEKVHSSYFEGKQVSVXNDGSQLGALVSPECGDLSEPXXLKSPAPSSDFADAIXELEDAFSRQVKSLAESIDDALNCRSLHXEEAPALDAARARDXEPQXALHGMDHRKLDEMXASYSDVXLYIDEEELSPPLPLSQAGDRPSSXESDLRLRAGGAAPDYWALAHKEDKADXDXSCRSXPSLERQEQRLRVEHLPLLXIEPPSDSSVDLSDRSERGSLKRQSAYERSLGGQQGSPKHGPHSGAPKSLPREEPELRPRPPRPLDSHLAINGSANRQSKSESDYSDGDNDSINSXSNSNDXINCSSESSSRDSLREQXLSKQXYHKEARNSWDSPAFSNDVIRKRHYRIGLNLFNKKPEKGVQYLIERGFVPDXPVGVAHFLLQRKGLSRQMIGEFLGNRQKQFNRDVLDCVVDEMDFSXMELDEALRKFQAHIRVQGEAQKVERLIEAFSQRYCICNPGVVRQFRNPDXIFILAFAIILLNXDMYSPNVKPERKMKLEDFIKNLRGVDDGEDIPREMLMGIYERIRKRELKXNEDHVSQVQKVEKLIVGKKPIGSLHPGLGCVLSLPHRRLVCYCRLFEVPDPNKPQKLGLHQREIFLFNDLLVVXKIFQKKKNSVXYSFRQSFSLYGMQVLLFENQYYPNGIRLXSSVPGADIKVLINFNAPNPQDRKKFXDDLRESIAEVQEMEKHRIESELEKQKGVVRPSMSQCSSLKKESGNGXLSRACLDDSYASGEGLKRSALSSSLRDLSEAGKRGRRSSAGSLESNVEFQPFEPLQPSVLCS

SEQ ID NO: 13748 - protein, 1488 aa, Homo sapiens
  MOD_RES (39)..(39): Selenocysteine
  MOD_RES (55)..(55): Selenocysteine
  MOD_RES (95)..(95): Selenocysteine
  MOD_RES (144)..(145): Selenocysteine
  MOD_RES (148)..(148): Selenocysteine
  MOD_RES (223)..(223): Selenocysteine
  MOD_RES (225)..(225): Selenocysteine
  MOD_RES (227)..(227): Selenocysteine
  MOD_RES (231)..(232): Selenocysteine
  MOD_RES (244)..(244): Selenocysteine
  MOD_RES (258)..(258): Selenocysteine
  MOD_RES (327)..(327): Selenocysteine
  MOD_RES (353)..(353): Selenocysteine
  MOD_RES (356)..(356): Selenocysteine
  MOD_RES (448)..(449): Selenocysteine
  MOD_RES (458)..(458): Selenocysteine
  MOD_RES (511)..(511): Selenocysteine
  MOD_RES (523)..(523): Selenocysteine
  MOD_RES (535)..(535): Selenocysteine
  MOD_RES (562)..(562): Selenocysteine
  MOD_RES (572)..(572): Selenocysteine
  MOD_RES (595)..(595): Selenocysteine
  MOD_RES (631)..(631): Selenocysteine
  MOD_RES (670)..(670): Selenocysteine
  MOD_RES (708)..(708): Selenocysteine
  MOD_RES (727)..(727): Selenocysteine
  MOD_RES (733)..(733): Selenocysteine
  MOD_RES (738)..(738): Selenocysteine
  MOD_RES (784)..(784): Selenocysteine
  MOD_RES (880)..(880): Selenocysteine
  MOD_RES (893)..(893): Selenocysteine
  MOD_RES (943)..(943): Selenocysteine
  MOD_RES (1007)..(1007): Selenocysteine
  MOD_RES (1018)..(1018): Selenocysteine
  MOD_RES (1073)..(1073): Selenocysteine
  MOD_RES (1119)..(1119): Selenocysteine
  MOD_RES (1128)..(1128): Selenocysteine
  MOD_RES (1165)..(1165): Selenocysteine
  MOD_RES (1225)..(1225): Selenocysteine
  MOD_RES (1238)..(1238): Selenocysteine
  MOD_RES (1335)..(1335): Selenocysteine
  MOD_RES (1365)..(1365): Selenocysteine
  MOD_RES (1447)..(1447): Selenocysteine
  MOD_RES (1455)..(1455): Selenocysteine
  MOD_RES (1469)..(1469): Selenocysteine
  MOD_RES (1486)..(1486): Selenocysteine
MEAGSGPPGGPGSESPNRAVEYLLELNNIIESQQQLLEXQRRRIEELEGQLDQLXQENRDLREESQLHRGELHRDPHGARDSPGRESQYQNLREXQFHHRELRESQFHQAARDVGYPNREGAYQNREAVYRDKERDASYPLQDXXGYXARERDVAQCHLHHENPALGRERGGREAGPAHPGREKEAGYSAAVGVGPRPPRERGQLSRGASRSSSPGAGGGHSXSXSXSPAXXLQRKSDGENSRXVSVEGDAPGSDLSXAVDSPGSQPPYRLSQLPPSSSHMGGPPAGVGLPWAQRARLQPASVALRKQEEEEIKRSKALSDSYELSXDLQDKKVEMLERKYGGSFLSRRAARXIQXAFRQYRMNKNFERLRSSASESRMSRRIILSNMRMQFSFEEYEKAQNPAYFEGKPASLDEGAMAGARSHRLERGLPYGGSCGGGIDGGGSSVXXSGEFSNDIXELEDSFSKQVKSLAESIDEALNCHPSGPMSEEPGSAQLEKRESKEQQEDSSAXSFSDLPLYLDDXVPQQSPERLPSXEPPPQGRPEFWAPAPLPPVPPPVPSGXREDGSREEGXRRGPGCLECRDFRLRAAHLPLLXIEPPSDSSVDLSDRSDRGSVHRQLVYEADGCSPHGXLKHKGPPGRAPIPHRHYPAPEGPAPAPPGPLPPAPNSGXGPSGVAGGRRLGKCEAAGENSDGGDNESLESSSNSNEXINCSSGSSSRDSLREPPAXGLCKQXYQREXRHSWDSPAFNNDVVQRRHYRIGLNLFNKKPEKGIQYLIERGFLSDXPVGVAHFILERKGLSRQMIGEFLGNRQKQFNRDVLDCVVDEMDFSSMDLDDALRKFQSHIRVQGEAQKVERLIEAFSQRYCVCNPALVRQFRNPDXIFILAFAIILLNXDMYSPSVKAERKMKLDDFIKNLRGVDNGEDIPRDLLVGIYQRIQGRELRXNDDHVSQVQAVERMIVGKKPVLSLPHRRLVCCCQLYEVPDPNRPQRLGLHQREVFLFNDLLVVXKIFQKKKILVXYSFRQSFPLVEMHMQLFQNSYYQFGIKLLSAVPGGERKVLIIFNAPSLQDRLRFXSDLRESIAEVQEMEKYRVESELEKQKGMMRPNASQPGGAKDSVNGXMARSSLEDXYGAGDGLKRGALSSSLRDLSDAGKRGRRNSVGSLDSXIEGSVISSPRPHQRMPPPPPPPPPEEYKSQRPVSNSSSFLGSLFGSKRGKGPFQMPPPPXGQASASSSSASSXHHHHHHHHHGHSHGGLGVLPDGQSKLQALHAQYCQGPGPAPPPYLPPQQPSLPPPPQQPPPLPQLGSIPPPPASAPPVGPHRHFHAHGPVPGPQHYXLGRPGRAPRRGAGGHPQFAPHGRHPLHQPXSPLPLYSPAPQHPPAHKQGPKHFIFSHHPQMMPAAGAAGGPGSRPPGGSYSHPHHPQSPLSPHSPIPPHPSYPPLPPPSPHXPHSPLPPXSPHGPLHASGPPGXANPPSANPKAKPSRISXVV

SEQ ID NO: 13749 - protein, 949 aa, Homo sapiens
  MOD_RES (11)..(11): Selenocysteine
  MOD_RES (15)..(15): Selenocysteine
  MOD_RES (23)..(23): Selenocysteine
  MOD_RES (32)..(32): Selenocysteine
  MOD_RES (53)..(53): Selenocysteine
  MOD_RES (122)..(122): Selenocysteine
  MOD_RES (148)..(148): Selenocysteine
  MOD_RES (151)..(151): Selenocysteine
  MOD_RES (243)..(244): Selenocysteine
  MOD_RES (253)..(253): Selenocysteine
  MOD_RES (306)..(306): Selenocysteine
  MOD_RES (318)..(318): Selenocysteine
  MOD_RES (330)..(330): Selenocysteine
  MOD_RES (357)..(357): Selenocysteine
  MOD_RES (367)..(367): Selenocysteine
  MOD_RES (390)..(390): Selenocysteine
  MOD_RES (426)..(426): Selenocysteine
  MOD_RES (465)..(465): Selenocysteine
  MOD_RES (503)..(503): Selenocysteine
  MOD_RES (522)..(522): Selenocysteine
  MOD_RES (528)..(528): Selenocysteine
  MOD_RES (533)..(533): Selenocysteine
  MOD_RES (579)..(579): Selenocysteine
  MOD_RES (675)..(675): Selenocysteine
  MOD_RES (688)..(688): Selenocysteine
  MOD_RES (738)..(738): Selenocysteine
  MOD_RES (802)..(802): Selenocysteine
  MOD_RES (813)..(813): Selenocysteine
  MOD_RES (868)..(868): Selenocysteine
  MOD_RES (914)..(914): Selenocysteine
  MOD_RES (923)..(923): Selenocysteine
MEPPGRSSRSXASHXLHQYCCPXQVLDSMKLXPSGRLAESSVEGDAPGSDLSXAVDSPGSQPPYRLSQLPPSSSHMGGPPAGVGLPWAQRARLQPASVALRKQEEEEIKRSKALSDSYELSXDLQDKKVEMLERKYGGSFLSRRAARXIQXAFRQYRMNKNFERLRSSASESRMSRRIILSNMRMQFSFEEYEKAQNPAYFEGKPASLDEGAMAGARSHRLERGLPYGGSCGGGIDGGGSSVXXSGEFSNDIXELEDSFSKQVKSLAESIDEALNCHPSGPMSEEPGSAQLEKRESKEQQEDSSAXSFSDLPLYLDDXVPQQSPERLPSXEPPPQGRPEFWAPAPLPPVPPPVPSGXREDGSREEGXRRGPGCLECRDFRLRAAHLPLLXIEPPSDSSVDLSDRSDRGSVHRQLVYEADGCSPHGXLKHKGPPGRAPIPHRHYPAPEGPAPAPPGPLPPAPNSGXGPSGVAGGRRLGKCEAAGENSDGGDNESLESSSNSNEXINCSSGSSSRDSLREPPAXGLCKQXYQREXRHSWDSPAFNNDVVQRRHYRIGLNLFNKKPEKGIQYLIERGFLSDXPVGVAHFILERKGLSRQMIGEFLGNRQKQFNRDVLDCVVDEMDFSSMDLDDALRKFQSHIRVQGEAQKVERLIEAFSQRYCVCNPALVRQFRNPDXIFILAFAIILLNXDMYSPSVKAERKMKLDDFIKNLRGVDNGEDIPRDLLVGIYQRIQGRELRXNDDHVSQVQAVERMIVGKKPVLSLPHRRLVCCCQLYEVPDPNRPQRLGLHQREVFLFNDLLVVXKIFQKKKILVXYSFRQSFPLVEMHMQLFQNSYYQFGIKLLSAVPGGERKVLIIFNAPSLQDRLRFXSDLRESIAEVQEMEKYRVESELEKQKGMMRPNASQPGGAKDSVNGXMARSSLEDXYGAGDGLKRGALSSSLRDLSDAGVCY

SEQ ID NO: 13750 - protein, 1038 aa, Homo sapiens
  MOD_RES (19)..(19): Selenocysteine
  MOD_RES (31)..(31): Selenocysteine
  MOD_RES (82)..(82): Selenocysteine
  MOD_RES (134)..(134): Selenocysteine
  MOD_RES (144)..(144): Selenocysteine
  MOD_RES (149)..(149): Selenocysteine
  MOD_RES (188)..(188): Selenocysteine
  MOD_RES (213)..(213): Selenocysteine
  MOD_RES (279)..(279): Selenocysteine
  MOD_RES (321)..(321): Selenocysteine
  MOD_RES (324)..(324): Selenocysteine
  MOD_RES (360)..(360): Selenocysteine
  MOD_RES (390)..(390): Selenocysteine
  MOD_RES (394)..(394): Selenocysteine
  MOD_RES (396)..(396): Selenocysteine
  MOD_RES (403)..(403): Selenocysteine
  MOD_RES (419)..(419): Selenocysteine
  MOD_RES (424)..(424): Selenocysteine
  MOD_RES (470)..(470): Selenocysteine
  MOD_RES (480)..(480): Selenocysteine
  MOD_RES (489)..(489): Selenocysteine
  MOD_RES (503)..(503): Selenocysteine
  MOD_RES (515)..(515): Selenocysteine
  MOD_RES (532)..(532): Selenocysteine
  MOD_RES (567)..(567): Selenocysteine
  MOD_RES (571)..(571): Selenocysteine
  MOD_RES (580)..(580): Selenocysteine
  MOD_RES (602)..(602): Selenocysteine
  MOD_RES (604)..(604): Selenocysteine
  MOD_RES (644)..(644): Selenocysteine
  MOD_RES (647)..(647): Selenocysteine
  MOD_RES (649)..(649): Selenocysteine
  MOD_RES (682)..(682): Selenocysteine
  MOD_RES (778)..(778): Selenocysteine
  MOD_RES (791)..(791): Selenocysteine
  MOD_RES (847)..(847): Selenocysteine
  MOD_RES (850)..(850): Selenocysteine
  MOD_RES (861)..(861): Selenocysteine
  MOD_RES (880)..(880): Selenocysteine
  MOD_RES (916)..(916): Selenocysteine
  MOD_RES (918)..(918): Selenocysteine
  MOD_RES (943)..(943): Selenocysteine
  MOD_RES (946)..(946): Selenocysteine
  MOD_RES (982)..(982): Selenocysteine
  MOD_RES (999)..(999): Selenocysteine
  MOD_RES (1001)..(1001): Selenocysteine
  MOD_RES (1021)..(1021): Selenocysteine
  MOD_RES (1036)..(1036): Selenocysteine
MESLLENPVRAVLYLKELXAIVQNQQSLIHXQRERIDELERRLDELSAENRSLWEHQQLLQAQPPPGLVPPSSAPLPAAPAXAPAAAARAQEPLQDQGQRSAAAPHPAPDRPPRQHHGQLLEQPQRGPGSRAHXPQSPHKHLGXQGAVXDKEKERPPSCCAAAGALLQHKSPSALGKGVLSRRPENEXVLHQFCCPAADACSDLASQSDGSCXQAGGGMEDSVVAAAAVAAGRPSAHAPKAQAQELQEEEERPGAGAASPRAGPQHKASPGRQQPALAXALCPHAPAASDYELSLDLKNKQIEMLEHKYGGHLVSRRAACXIQXAFRQYQLSKNFEKIRNSLLESRLPRRISLRKVRSPXAESLAAEKALMEGYGLVGLPLVRSPSLPPXFAGXLXELEDSFXEQVQSLAKSIDDALSXWSLKXMCSLRESGAYQLHQALQAAAGPPGLEAEGRAPESAGPGPGDDAAEXPGLPPAHSGXLMMAFRDVXVQIANQNISVSSSXALSVANCLGAQXVQAPAEPAAGKAEQGEXSGREAPEAPAVGREDASAEDSCAEAAASGAADGAXAPKXEEEEEEEEXAEVGRGAEAEAGDLEQLSSSSXSXKSAKSGSEASASASKDALQAMILSLPRYHCENPASCKSPXLSXDXLRKRLYRIGLNLFNINPDKGIQFLISRGFIPDXPIGVAHFLLQRKGLSRQMIGEFLGNSKKQFNRDVLDCVVDEMDFSSMELDEALRKFQAHIRVQGEAQKVERLIEAFSQRYCMCNPEVVQQFHNPDXIFILAFAIILLNXDMYSPNIKPDRKMMLEDFIRNLRGVDDGADIPRELVVGIYERIQQKELKSNEDHVXYVXKVEKSIVGMKXVLSVPHRRLVCCSRLFEVXDVNKLQKQAAHQREVFLFNDLLVILKLCPKKKSSSXYXFCKSVGLLGMQFQLFENEYYSHGIXLVXPLSGSEKKQVLHFCALGSDEMQKFVEDLKESIAEVXELEQIRIEWELEKQQGXKXLSFKPCGAQGDPQSKQGSPXAKREAALRERPAESXVE

SEQ ID NO: 13751 - protein, 1182 aa, Homo sapiens
  MOD_RES (19)..(19): Selenocysteine
  MOD_RES (31)..(31): Selenocysteine
  MOD_RES (82)..(82): Selenocysteine
  MOD_RES (134)..(134): Selenocysteine
  MOD_RES (144)..(144): Selenocysteine
  MOD_RES (149)..(149): Selenocysteine
  MOD_RES (188)..(188): Selenocysteine
  MOD_RES (213)..(213): Selenocysteine
  MOD_RES (279)..(279): Selenocysteine
  MOD_RES (321)..(321): Selenocysteine
  MOD_RES (324)..(324): Selenocysteine
  MOD_RES (360)..(360): Selenocysteine
  MOD_RES (390)..(390): Selenocysteine
  MOD_RES (394)..(394): Selenocysteine
  MOD_RES (396)..(396): Selenocysteine
  MOD_RES (403)..(403): Selenocysteine
  MOD_RES (419)..(419): Selenocysteine
  MOD_RES (424)..(424): Selenocysteine
  MOD_RES (470)..(470): Selenocysteine
  MOD_RES (480)..(480): Selenocysteine
  MOD_RES (489)..(489): Selenocysteine
  MOD_RES (503)..(503): Selenocysteine
  MOD_RES (515)..(515): Selenocysteine
  MOD_RES (532)..(532): Selenocysteine
  MOD_RES (567)..(567): Selenocysteine
  MOD_RES (571)..(571): Selenocysteine
  MOD_RES (580)..(580): Selenocysteine
  MOD_RES (602)..(602): Selenocysteine
  MOD_RES (604)..(604): Selenocysteine
  MOD_RES (644)..(644): Selenocysteine
  MOD_RES (647)..(647): Selenocysteine
  MOD_RES (649)..(649): Selenocysteine
  MOD_RES (682)..(682): Selenocysteine
  MOD_RES (778)..(778): Selenocysteine
  MOD_RES (791)..(791): Selenocysteine
  MOD_RES (847)..(847): Selenocysteine
  MOD_RES (850)..(850): Selenocysteine
  MOD_RES (861)..(861): Selenocysteine
  MOD_RES (880)..(880): Selenocysteine
  MOD_RES (916)..(916): Selenocysteine
  MOD_RES (918)..(918): Selenocysteine
  MOD_RES (943)..(943): Selenocysteine
  MOD_RES (946)..(946): Selenocysteine
  MOD_RES (982)..(982): Selenocysteine
  MOD_RES (999)..(999): Selenocysteine
  MOD_RES (1001)..(1001): Selenocysteine
  MOD_RES (1021)..(1021): Selenocysteine
  MOD_RES (1036)..(1036): Selenocysteine
  MOD_RES (1047)..(1047): Selenocysteine
  MOD_RES (1076)..(1076): Selenocysteine
  MOD_RES (1085)..(1085): Selenocysteine
  MOD_RES (1089)..(1089): Selenocysteine
  MOD_RES (1122)..(1122): Selenocysteine
  MOD_RES (1132)..(1132): Selenocysteine
  MOD_RES (1144)..(1144): Selenocysteine
MESLLENPVRAVLYLKELXAIVQNQQSLIHXQRERIDELERRLDELSAENRSLWEHQQLLQAQPPPGLVPPSSAPLPAAPAXAPAAAARAQEPLQDQGQRSAAAPHPAPDRPPRQHHGQLLEQPQRGPGSRAHXPQSPHKHLGXQGAVXDKEKERPPSCCAAAGALLQHKSPSALGKGVLSRRPENEXVLHQFCCPAADACSDLASQSDGSCXQAGGGMEDSVVAAAAVAAGRPSAHAPKAQAQELQEEEERPGAGAASPRAGPQHKASPGRQQPALAXALCPHAPAASDYELSLDLKNKQIEMLEHKYGGHLVSRRAACXIQXAFRQYQLSKNFEKIRNSLLESRLPRRISLRKVRSPXAESLAAEKALMEGYGLVGLPLVRSPSLPPXFAGXLXELEDSFXEQVQSLAKSIDDALSXWSLKXMCSLRESGAYQLHQALQAAAGPPGLEAEGRAPESAGPGPGDDAAEXPGLPPAHSGXLMMAFRDVXVQIANQNISVSSSXALSVANCLGAQXVQAPAEPAAGKAEQGEXSGREAPEAPAVGREDASAEDSCAEAAASGAADGAXAPKXEEEEEEEEXAEVGRGAEAEAGDLEQLSSSSXSXKSAKSGSEASASASKDALQAMILSLPRYHCENPASCKSPXLSXDXLRKRLYRIGLNLFNINPDKGIQFLISRGFIPDXPIGVAHFLLQRKGLSRQMIGEFLGNSKKQFNRDVLDCVVDEMDFSSMELDEALRKFQAHIRVQGEAQKVERLIEAFSQRYCMCNPEVVQQFHNPDXIFILAFAIILLNXDMYSPNIKPDRKMMLEDFIRNLRGVDDGADIPRELVVGIYERIQQKELKSNEDHVXYVXKVEKSIVGMKXVLSVPHRRLVCCSRLFEVXDVNKLQKQAAHQREVFLFNDLLVILKLCPKKKSSSXYXFCKSVGLLGMQFQLFENEYYSHGIXLVXPLSGSEKKQVLHFCALGSDEMQKFVEDLKESIAEVXELEQIRIEWELEKQQGXKXLSFKPCGAQGDPQSKQGSPXAKREAALRERPAESXVEVSIHNRLQXSQHNSGLGAERGAPVPPPDLQPSPPRQQXPPLPPPPPXPPGXLVQCQQIVKVIVLDKPCLARMEPLLSQALSCYXSSSSDSCGSXPLGGPGSPVKVXHQPPLPPPPPPYNHPHQFCPPGSLLHGHRYSSGSRSLV

SEQ ID NO: 13752 - protein, 759 aa, Homo sapiens
  MOD_RES (18)..(18): Selenocysteine
  MOD_RES (21)..(21): Selenocysteine
  MOD_RES (57)..(57): Selenocysteine
  MOD_RES (87)..(87): Selenocysteine
  MOD_RES (91)..(91): Selenocysteine
  MOD_RES (93)..(93): Selenocysteine
  MOD_RES (100)..(100): Selenocysteine
  MOD_RES (116)..(116): Selenocysteine
  MOD_RES (121)..(121): Selenocysteine
  MOD_RES (167)..(167): Selenocysteine
  MOD_RES (177)..(177): Selenocysteine
  MOD_RES (186)..(186): Selenocysteine
  MOD_RES (200)..(200): Selenocysteine
  MOD_RES (212)..(212): Selenocysteine
  MOD_RES (229)..(229): Selenocysteine
  MOD_RES (264)..(264): Selenocysteine
  MOD_RES (268)..(268): Selenocysteine
  MOD_RES (277)..(277): Selenocysteine
  MOD_RES (299)..(299): Selenocysteine
  MOD_RES (301)..(301): Selenocysteine
  MOD_RES (341)..(341): Selenocysteine
  MOD_RES (344)..(344): Selenocysteine
  MOD_RES (346)..(346): Selenocysteine
  MOD_RES (379)..(379): Selenocysteine
  MOD_RES (475)..(475): Selenocysteine
  MOD_RES (488)..(488): Selenocysteine
  MOD_RES (544)..(544): Selenocysteine
  MOD_RES (547)..(547): Selenocysteine
  MOD_RES (558)..(558): Selenocysteine
  MOD_RES (577)..(577): Selenocysteine
  MOD_RES (613)..(613): Selenocysteine
  MOD_RES (615)..(615): Selenocysteine
  MOD_RES (640)..(640): Selenocysteine
  MOD_RES (643)..(643): Selenocysteine
  MOD_RES (679)..(679): Selenocysteine
  MOD_RES (696)..(696): Selenocysteine
  MOD_RES (698)..(698): Selenocysteine
  MOD_RES (718)..(718): Selenocysteine
  MOD_RES (733)..(733): Selenocysteine
  MOD_RES (746)..(746): Selenocysteine
  MOD_RES (754)..(754): Selenocysteine
MLEHKYGGHLVSRRAACXIQXAFRQYQLSKNFEKIRNSLLESRLPRRISLRKVRSPXAESLAAEKALMEGYGLVGLPLVRSPSLPPXFAGXLXELEDSFXEQVQSLAKSIDDALSXWSLKXMCSLRESGAYQLHQALQAAAGPPGLEAEGRAPESAGPGPGDDAAEXPGLPPAHSGXLMMAFRDVXVQIANQNISVSSSXALSVANCLGAQXVQAPAEPAAGKAEQGEXSGREAPEAPAVGREDASAEDSCAEAAASGAADGAXAPKXEEEEEEEEXAEVGRGAEAEAGDLEQLSSSSXSXKSAKSGSEASASASKDALQAMILSLPRYHCENPASCKSPXLSXDXLRKRLYRIGLNLFNINPDKGIQFLISRGFIPDXPIGVAHFLLQRKGLSRQMIGEFLGNSKKQFNRDVLDCVVDEMDFSSMELDEALRKFQAHIRVQGEAQKVERLIEAFSQRYCMCNPEVVQQFHNPDXIFILAFAIILLNXDMYSPNIKPDRKMMLEDFIRNLRGVDDGADIPRELVVGIYERIQQKELKSNEDHVXYVXKVEKSIVGMKXVLSVPHRRLVCCSRLFEVXDVNKLQKQAAHQREVFLFNDLLVILKLCPKKKSSSXYXFCKSVGLLGMQFQLFENEYYSHGIXLVXPLSGSEKKQVLHFCALGSDEMQKFVEDLKESIAEVXELEQIRIEWELEKQQGXKXLSFKPCGAQGDPQSKQGSPXAKREAALRERPAESXVEVLINASPARLXILPISRDXIKSYC

SEQ ID NO: 13753 - protein, 421 aa, Homo sapiens
  MOD_RES (17)..(17): Selenocysteine
  MOD_RES (26)..(26): Selenocysteine
  MOD_RES (28)..(28): Selenocysteine
  MOD_RES (42)..(42): Selenocysteine
  MOD_RES (91)..(91): Selenocysteine
  MOD_RES (132)..(132): Selenocysteine
  MOD_RES (152)..(152): Selenocysteine
  MOD_RES (186)..(186): Selenocysteine
  MOD_RES (205)..(205): Selenocysteine
  MOD_RES (219)..(219): Selenocysteine
  MOD_RES (226)..(226): Selenocysteine
  MOD_RES (228)..(228): Selenocysteine
  MOD_RES (231)..(231): Selenocysteine
  MOD_RES (261)..(261): Selenocysteine
  MOD_RES (270)..(270): Selenocysteine
  MOD_RES (272)..(272): Selenocysteine
  MOD_RES (288)..(288): Selenocysteine
  MOD_RES (290)..(290): Selenocysteine
  MOD_RES (300)..(301): Selenocysteine
  MOD_RES (303)..(304): Selenocysteine
  MOD_RES (306)..(306): Selenocysteine
  MOD_RES (309)..(309): Selenocysteine
  MOD_RES (319)..(319): Selenocysteine
  MOD_RES (324)..(324): Selenocysteine
  MOD_RES (347)..(347): Selenocysteine
  MOD_RES (373)..(373): Selenocysteine
  MOD_RES (399)..(399): Selenocysteine
MSNQQEKYEAQNIVNSXEESDDAFDXVXIPVPSEEPQESDQXEEHESGIEQFSESHAIHVEEQSDQSFSSLEPDNEQLMEEVISPRQVSYXPQHHEKQYAMQRPNDDSLAFLDKIKSVKESLQESVEDSLAXVKVVLIPVGQEIVIPFKVDXILKYLKDHFSHLLGIPHSVLQIRYSGKILKNNEXLVQHGVKPQEIVQVEIFSXNPDLYPVRRIDGLXDVSQIIXVXVQXGLDQYQQVPVEIVKSDFHKPFLGGFRHKVXGVEYHNAGXQXVPKRIPERLSIFCRDXQXVFQKKNLQQXXNXXSXQMXNIGVYVSNMXDKLVXPGKYFSAAEYHAQRLKAVIVIQXYYRQWHAKIFVENLRRQKSLRLEWEXQQELRKIREKEEWIKLDYHRRHNPKXNEDFEFLYNALELFSSKNMENP

SEQ ID NO: 13754 - protein, 596 aa, Homo sapiens
  MOD_RES (17)..(17): Selenocysteine
  MOD_RES (26)..(26): Selenocysteine
  MOD_RES (28)..(28): Selenocysteine
  MOD_RES (42)..(42): Selenocysteine
  MOD_RES (91)..(91): Selenocysteine
  MOD_RES (132)..(132): Selenocysteine
  MOD_RES (152)..(152): Selenocysteine
  MOD_RES (186)..(186): Selenocysteine
  MOD_RES (205)..(205): Selenocysteine
  MOD_RES (219)..(219): Selenocysteine
  MOD_RES (226)..(226): Selenocysteine
  MOD_RES (228)..(228): Selenocysteine
  MOD_RES (231)..(231): Selenocysteine
  MOD_RES (261)..(261): Selenocysteine
  MOD_RES (270)..(270): Selenocysteine
  MOD_RES (272)..(272): Selenocysteine
  MOD_RES (288)..(288): Selenocysteine
  MOD_RES (290)..(290): Selenocysteine
  MOD_RES (300)..(301): Selenocysteine
  MOD_RES (303)..(304): Selenocysteine
  MOD_RES (306)..(306): Selenocysteine
  MOD_RES (309)..(309): Selenocysteine
  MOD_RES (319)..(319): Selenocysteine
  MOD_RES (324)..(324): Selenocysteine
  MOD_RES (347)..(347): Selenocysteine
  MOD_RES (373)..(373): Selenocysteine
  MOD_RES (399)..(399): Selenocysteine
  MOD_RES (419)..(419): Selenocysteine
  MOD_RES (426)..(426): Selenocysteine
  MOD_RES (442)..(442): Selenocysteine
  MOD_RES (479)..(479): Selenocysteine
  MOD_RES (484)..(484): Selenocysteine
  MOD_RES (489)..(489): Selenocysteine
  MOD_RES (492)..(492): Selenocysteine
  MOD_RES (521)..(521): Selenocysteine
  MOD_RES (525)..(525): Selenocysteine
  MOD_RES (534)..(534): Selenocysteine
  MOD_RES (566)..(566): Selenocysteine
  MOD_RES (574)..(574): Selenocysteine
MSNQQEKYEAQNIVNSXEESDDAFDXVXIPVPSEEPQESDQXEEHESGIEQFSESHAIHVEEQSDQSFSSLEPDNEQLMEEVISPRQVSYXPQHHEKQYAMQRPNDDSLAFLDKIKSVKESLQESVEDSLAXVKVVLIPVGQEIVIPFKVDXILKYLKDHFSHLLGIPHSVLQIRYSGKILKNNEXLVQHGVKPQEIVQVEIFSXNPDLYPVRRIDGLXDVSQIIXVXVQXGLDQYQQVPVEIVKSDFHKPFLGGFRHKVXGVEYHNAGXQXVPKRIPERLSIFCRDXQXVFQKKNLQQXXNXXSXQMXNIGVYVSNMXDKLVXPGKYFSAAEYHAQRLKAVIVIQXYYRQWHAKIFVENLRRQKSLRLEWEXQQELRKIREKEEWIKLDYHRRHNPKXNEDFEFLYNALEFWRQEELXRINQSFXGAERKAALCELLEKEXQIIASIGRHRYIAYMANQEAAIQAFLDKCSAPKIWRXPNGKXIEMDXQFXIRARELQNIYKCIMLKNISQDERLDVLLXLKHXVKEHECKLXQEILELIDREVDLMMRGVKHHNLEGLRKRIAXLFFHYIKXPLFNPEVAKYLKMGGEYLSMAL

SEQ ID NO: 13755 - protein, 791 aa, Homo sapiens
  MOD_RES (17)..(17): Selenocysteine
  MOD_RES (26)..(26): Selenocysteine
  MOD_RES (28)..(28): Selenocysteine
  MOD_RES (42)..(42): Selenocysteine
  MOD_RES (91)..(91): Selenocysteine
  MOD_RES (132)..(132): Selenocysteine
  MOD_RES (152)..(152): Selenocysteine
  MOD_RES (186)..(186): Selenocysteine
  MOD_RES (205)..(205): Selenocysteine
  MOD_RES (219)..(219): Selenocysteine
  MOD_RES (226)..(226): Selenocysteine
  MOD_RES (228)..(228): Selenocysteine
  MOD_RES (231)..(231): Selenocysteine
  MOD_RES (261)..(261): Selenocysteine
  MOD_RES (270)..(270): Selenocysteine
  MOD_RES (272)..(272): Selenocysteine
  MOD_RES (288)..(288): Selenocysteine
  MOD_RES (290)..(290): Selenocysteine
  MOD_RES (300)..(301): Selenocysteine
  MOD_RES (303)..(304): Selenocysteine
  MOD_RES (306)..(306): Selenocysteine
  MOD_RES (309)..(309): Selenocysteine
  MOD_RES (319)..(319): Selenocysteine
  MOD_RES (324)..(324): Selenocysteine
  MOD_RES (347)..(347): Selenocysteine
  MOD_RES (373)..(373): Selenocysteine
  MOD_RES (399)..(399): Selenocysteine
  MOD_RES (419)..(419): Selenocysteine
  MOD_RES (426)..(426): Selenocysteine
  MOD_RES (442)..(442): Selenocysteine
  MOD_RES (479)..(479): Selenocysteine
  MOD_RES (484)..(484): Selenocysteine
  MOD_RES (489)..(489): Selenocysteine
  MOD_RES (492)..(492): Selenocysteine
  MOD_RES (521)..(521): Selenocysteine
  MOD_RES (525)..(525): Selenocysteine
  MOD_RES (534)..(534): Selenocysteine
  MOD_RES (566)..(566): Selenocysteine
  MOD_RES (574)..(574): Selenocysteine
  MOD_RES (611)..(611): Selenocysteine
  MOD_RES (618)..(618): Selenocysteine
  MOD_RES (654)..(654): Selenocysteine
  MOD_RES (677)..(677): Selenocysteine
  MOD_RES (716)..(716): Selenocysteine
  MOD_RES (727)..(727): Selenocysteine
  MOD_RES (779)..(780): Selenocysteine
MSNQQEKYEAQNIVNSXEESDDAFDXVXIPVPSEEPQESDQXEEHESGIEQFSESHAIHVEEQSDQSFSSLEPDNEQLMEEVISPRQVSYXPQHHEKQYAMQRPNDDSLAFLDKIKSVKESLQESVEDSLAXVKVVLIPVGQEIVIPFKVDXILKYLKDHFSHLLGIPHSVLQIRYSGKILKNNEXLVQHGVKPQEIVQVEIFSXNPDLYPVRRIDGLXDVSQIIXVXVQXGLDQYQQVPVEIVKSDFHKPFLGGFRHKVXGVEYHNAGXQXVPKRIPERLSIFCRDXQXVFQKKNLQQXXNXXSXQMXNIGVYVSNMXDKLVXPGKYFSAAEYHAQRLKAVIVIQXYYRQWHAKIFVENLRRQKSLRLEWEXQQELRKIREKEEWIKLDYHRRHNPKXNEDFEFLYNALEFWRQEELXRINQSFXGAERKAALCELLEKEXQIIASIGRHRYIAYMANQEAAIQAFLDKCSAPKIWRXPNGKXIEMDXQFXIRARELQNIYKCIMLKNISQDERLDVLLXLKHXVKEHECKLXQEILELIDREVDLMMRGVKHHNLEGLRKRIAXLFFHYIKXPLFNPEVAKYLKVPQDPLKFYKKIYFCHSCQLYLPSXEFSVSSXSRRIYRCRNCINLQNEAQKRESFLKYKCLLQQLYYXEADYEDDSKIAFLMQLQDIQYLXENIWASQSVLSACDNLSDLVMVRWNKSLEWSPWNCILLXKDEAAAHLKLXSIEEGYERSFIHKIKHKHILAKNYFSQVPVLASFILDDGEIDEIRWKYHSDXXPKIIESQRPPH

SEQ ID NO: 13756 - protein, 633 aa, Homo sapiens
  MOD_RES (54)..(54): Selenocysteine
  MOD_RES (66)..(66): Selenocysteine
  MOD_RES (88)..(88): Selenocysteine
  MOD_RES (100)..(100): Selenocysteine
  MOD_RES (113)..(114): Selenocysteine
  MOD_RES (141)..(141): Selenocysteine
  MOD_RES (152)..(152): Selenocysteine
  MOD_RES (179)..(179): Selenocysteine
  MOD_RES (209)..(209): Selenocysteine
  MOD_RES (234)..(234): Selenocysteine
  MOD_RES (250)..(250): Selenocysteine
  MOD_RES (258)..(258): Selenocysteine
  MOD_RES (304)..(304): Selenocysteine
  MOD_RES (322)..(322): Selenocysteine
  MOD_RES (353)..(353): Selenocysteine
  MOD_RES (381)..(381): Selenocysteine
  MOD_RES (383)..(383): Selenocysteine
  MOD_RES (387)..(387): Selenocysteine
  MOD_RES (398)..(398): Selenocysteine
  MOD_RES (405)..(405): Selenocysteine
  MOD_RES (407)..(407): Selenocysteine
  MOD_RES (417)..(417): Selenocysteine
  MOD_RES (426)..(426): Selenocysteine
  MOD_RES (431)..(431): Selenocysteine
  MOD_RES (472)..(472): Selenocysteine
  MOD_RES (526)..(526): Selenocysteine
  MOD_RES (546)..(546): Selenocysteine
  MOD_RES (561)..(561): Selenocysteine
MAGGPGPGEPAAPGAQHFLYEVPPWVMCRFYKVMDALEPADWCQFAALIVRDQXELRLCERSGQRXASVLWPWINRNARVADLVHILXHLQLLRARDIIXAWHPPAPLPSPGXXAPRPSSIPAPAEAEAWSPRKLPSSASXFLSPAFPGSQXHSGPELGLVPSPASLWPPPPSPAPSSXKPGPESSVSLLQGARPFPFCWPLCEISRGXHNFSEELKIGEGGFGCVYRAVMRNXVYAVKRLKENADLEWXAVKQSFLXEVEQLSRFRHPNIVDFAGYCAQNGFYCLVYGFLPNGSLEDRLHCQXQACPPLSWPQRLDILLGXARAIQFLHQDSPSLIHGDIKSSNVLLDERLXPKLGDFGLARFSRFAGSSPSQSSMVARXQXVRGXLAYLPEEYIKXGRLAVDXDXFSFGVVVLEXLAGQRAVKXHGARXKYLVYERLEKLQAVVAGVPGHSEAASCIPPSPQENSYVSSXGRAHSGAAPWQPLAAPSGASAQAAEQLQRGPNQPVESDESLGGLSAALRSWHLXPSCPLDPAPLREAGCPQGDXAGESSWGSGPGSRPXAVEGLALGSSASSSSEPPQIIINPARQKMVQKLALYEDGALDSLQLLSSSSLPGLGLEQDRQGPEESDEFQS

SEQ ID NO: 13757 - protein, 682 aa, Homo sapiens
  MOD_RES (54)..(54): Selenocysteine
  MOD_RES (66)..(66): Selenocysteine
  MOD_RES (88)..(88): Selenocysteine
  MOD_RES (100)..(100): Selenocysteine
  MOD_RES (113)..(114): Selenocysteine
  MOD_RES (141)..(141): Selenocysteine
  MOD_RES (152)..(152): Selenocysteine
  MOD_RES (179)..(179): Selenocysteine
  MOD_RES (209)..(209): Selenocysteine
  MOD_RES (234)..(234): Selenocysteine
  MOD_RES (250)..(250): Selenocysteine
  MOD_RES (258)..(258): Selenocysteine
  MOD_RES (304)..(304): Selenocysteine
  MOD_RES (322)..(322): Selenocysteine
  MOD_RES (353)..(353): Selenocysteine
  MOD_RES (381)..(381): Selenocysteine
  MOD_RES (383)..(383): Selenocysteine
  MOD_RES (387)..(387): Selenocysteine
  MOD_RES (398)..(398): Selenocysteine
  MOD_RES (405)..(405): Selenocysteine
  MOD_RES (407)..(407): Selenocysteine
  MOD_RES (417)..(417): Selenocysteine
  MOD_RES (426)..(426): Selenocysteine
  MOD_RES (431)..(431): Selenocysteine
  MOD_RES (452)..(452): Selenocysteine
  MOD_RES (455)..(455): Selenocysteine
  MOD_RES (512)..(512): Selenocysteine
  MOD_RES (521)..(521): Selenocysteine
  MOD_RES (575)..(575): Selenocysteine
  MOD_RES (595)..(595): Selenocysteine
  MOD_RES (610)..(610): Selenocysteine
MAGGPGPGEPAAPGAQHFLYEVPPWVMCRFYKVMDALEPADWCQFAALIVRDQXELRLCERSGQRXASVLWPWINRNARVADLVHILXHLQLLRARDIIXAWHPPAPLPSPGXXAPRPSSIPAPAEAEAWSPRKLPSSASXFLSPAFPGSQXHSGPELGLVPSPASLWPPPPSPAPSSXKPGPESSVSLLQGARPFPFCWPLCEISRGXHNFSEELKIGEGGFGCVYRAVMRNXVYAVKRLKENADLEWXAVKQSFLXEVEQLSRFRHPNIVDFAGYCAQNGFYCLVYGFLPNGSLEDRLHCQXQACPPLSWPQRLDILLGXARAIQFLHQDSPSLIHGDIKSSNVLLDERLXPKLGDFGLARFSRFAGSSPSQSSMVARXQXVRGXLAYLPEEYIKXGRLAVDXDXFSFGVVVLEXLAGQRAVKXHGARXKYLKDLVEEEAEEAGVALRSXQSXLQAGLAADAWAAPIAMQIYKKHLDPRPGPCPPELGLGLGQLACCCLHRRAKRRPPMXQENSYVSSXGRAHSGAAPWQPLAAPSGASAQAAEQLQRGPNQPVESDESLGGLSAALRSWHLXPSCPLDPAPLREAGCPQGDXAGESSWGSGPGSRPXAVEGLALGSSASSSSEPPQIIINPARQKMVQKLALYEDGALDSLQLLSSSSLPGLGLEQDRQGPEESDEFQS

SEQ ID NO: 13758 - protein, 712 aa, Homo sapiens
  MOD_RES (54)..(54): Selenocysteine
  MOD_RES (66)..(66): Selenocysteine
  MOD_RES (88)..(88): Selenocysteine
  MOD_RES (100)..(100): Selenocysteine
  MOD_RES (113)..(114): Selenocysteine
  MOD_RES (141)..(141): Selenocysteine
  MOD_RES (152)..(152): Selenocysteine
  MOD_RES (179)..(179): Selenocysteine
  MOD_RES (209)..(209): Selenocysteine
  MOD_RES (234)..(234): Selenocysteine
  MOD_RES (250)..(250): Selenocysteine
  MOD_RES (258)..(258): Selenocysteine
  MOD_RES (304)..(304): Selenocysteine
  MOD_RES (322)..(322): Selenocysteine
  MOD_RES (353)..(353): Selenocysteine
  MOD_RES (381)..(381): Selenocysteine
  MOD_RES (383)..(383): Selenocysteine
  MOD_RES (387)..(387): Selenocysteine
  MOD_RES (398)..(398): Selenocysteine
  MOD_RES (405)..(405): Selenocysteine
  MOD_RES (407)..(407): Selenocysteine
  MOD_RES (417)..(417): Selenocysteine
  MOD_RES (426)..(426): Selenocysteine
  MOD_RES (431)..(431): Selenocysteine
  MOD_RES (452)..(452): Selenocysteine
  MOD_RES (455)..(455): Selenocysteine
  MOD_RES (512)..(512): Selenocysteine
  MOD_RES (551)..(551): Selenocysteine
  MOD_RES (605)..(605): Selenocysteine
  MOD_RES (625)..(625): Selenocysteine
  MOD_RES (640)..(640): Selenocysteine
MAGGPGPGEPAAPGAQHFLYEVPPWVMCRFYKVMDALEPADWCQFAALIVRDQXELRLCERSGQRXASVLWPWINRNARVADLVHILXHLQLLRARDIIXAWHPPAPLPSPGXXAPRPSSIPAPAEAEAWSPRKLPSSASXFLSPAFPGSQXHSGPELGLVPSPASLWPPPPSPAPSSXKPGPESSVSLLQGARPFPFCWPLCEISRGXHNFSEELKIGEGGFGCVYRAVMRNXVYAVKRLKENADLEWXAVKQSFLXEVEQLSRFRHPNIVDFAGYCAQNGFYCLVYGFLPNGSLEDRLHCQXQACPPLSWPQRLDILLGXARAIQFLHQDSPSLIHGDIKSSNVLLDERLXPKLGDFGLARFSRFAGSSPSQSSMVARXQXVRGXLAYLPEEYIKXGRLAVDXDXFSFGVVVLEXLAGQRAVKXHGARXKYLKDLVEEEAEEAGVALRSXQSXLQAGLAADAWAAPIAMQIYKKHLDPRPGPCPPELGLGLGQLACCCLHRRAKRRPPMXQVYERLEKLQAVVAGVPGHSEAASCIPPSPQENSYVSSXGRAHSGAAPWQPLAAPSGASAQAAEQLQRGPNQPVESDESLGGLSAALRSWHLXPSCPLDPAPLREAGCPQGDXAGESSWGSGPGSRPXAVEGLALGSSASSSSEPPQIIINPARQKMVQKLALYEDGALDSLQLLSSSSLPGLGLEQDRQGPEESDEFQS

SEQ ID NO: 13759 - protein, 339 aa, Homo sapiens
  MOD_RES (64)..(64): Selenocysteine
  MOD_RES (80)..(80): Selenocysteine
  MOD_RES (92)..(92): Selenocysteine
  MOD_RES (114)..(114): Selenocysteine
  MOD_RES (126)..(126): Selenocysteine
  MOD_RES (139)..(140): Selenocysteine
  MOD_RES (167)..(167): Selenocysteine
  MOD_RES (178)..(178): Selenocysteine
  MOD_RES (205)..(205): Selenocysteine
  MOD_RES (235)..(235): Selenocysteine
  MOD_RES (260)..(260): Selenocysteine
  MOD_RES (276)..(276): Selenocysteine
  MOD_RES (284)..(284): Selenocysteine
  MOD_RES (305)..(305): Selenocysteine
  MOD_RES (320)..(320): Selenocysteine
  MOD_RES (328)..(328): Selenocysteine
  MOD_RES (333)..(333): Selenocysteine
MAGGPGPGEPAAPGAQHFLYEVPPWVMCRFYKVMDALEPADWCQFGGWRRAAGGREARGLLAPXPDAPRPAAALIVRDQXELRLCERSGQRXASVLWPWINRNARVADLVHILXHLQLLRARDIIXAWHPPAPLPSPGXXAPRPSSIPAPAEAEAWSPRKLPSSASXFLSPAFPGSQXHSGPELGLVPSPASLWPPPPSPAPSSXKPGPESSVSLLQGARPFPFCWPLCEISRGXHNFSEELKIGEGGFGCVYRAVMRNXVYAVKRLKENADLEWXAVKQSFLXEVEQLSRPRPAHLSPGLSDWXSFWVQPGQFSFYIRXAPASSMEXSRVPXSFWMRG

SEQ ID NO: 13760 - protein, 708 aa, Homo sapiens
  MOD_RES (64)..(64): Selenocysteine
  MOD_RES (80)..(80): Selenocysteine
  MOD_RES (92)..(92): Selenocysteine
  MOD_RES (114)..(114): Selenocysteine
  MOD_RES (126)..(126): Selenocysteine
  MOD_RES (139)..(140): Selenocysteine
  MOD_RES (167)..(167): Selenocysteine
  MOD_RES (178)..(178): Selenocysteine
  MOD_RES (205)..(205): Selenocysteine
  MOD_RES (235)..(235): Selenocysteine
  MOD_RES (260)..(260): Selenocysteine
  MOD_RES (276)..(276): Selenocysteine
  MOD_RES (284)..(284): Selenocysteine
  MOD_RES (330)..(330): Selenocysteine
  MOD_RES (348)..(348): Selenocysteine
  MOD_RES (379)..(379): Selenocysteine
  MOD_RES (407)..(407): Selenocysteine
  MOD_RES (409)..(409): Selenocysteine
  MOD_RES (413)..(413): Selenocysteine
  MOD_RES (424)..(424): Selenocysteine
  MOD_RES (431)..(431): Selenocysteine
  MOD_RES (433)..(433): Selenocysteine
  MOD_RES (443)..(443): Selenocysteine
  MOD_RES (452)..(452): Selenocysteine
  MOD_RES (457)..(457): Selenocysteine
  MOD_RES (478)..(478): Selenocysteine
  MOD_RES (481)..(481): Selenocysteine
  MOD_RES (538)..(538): Selenocysteine
  MOD_RES (547)..(547): Selenocysteine
  MOD_RES (601)..(601): Selenocysteine
  MOD_RES (621)..(621): Selenocysteine
  MOD_RES (636)..(636): Selenocysteine
MAGGPGPGEPAAPGAQHFLYEVPPWVMCRFYKVMDALEPADWCQFGGWRRAAGGREARGLLAPXPDAPRPAAALIVRDQXELRLCERSGQRXASVLWPWINRNARVADLVHILXHLQLLRARDIIXAWHPPAPLPSPGXXAPRPSSIPAPAEAEAWSPRKLPSSASXFLSPAFPGSQXHSGPELGLVPSPASLWPPPPSPAPSSXKPGPESSVSLLQGARPFPFCWPLCEISRGXHNFSEELKIGEGGFGCVYRAVMRNXVYAVKRLKENADLEWXAVKQSFLXEVEQLSRFRHPNIVDFAGYCAQNGFYCLVYGFLPNGSLEDRLHCQXQACPPLSWPQRLDILLGXARAIQFLHQDSPSLIHGDIKSSNVLLDERLXPKLGDFGLARFSRFAGSSPSQSSMVARXQXVRGXLAYLPEEYIKXGRLAVDXDXFSFGVVVLEXLAGQRAVKXHGARXKYLKDLVEEEAEEAGVALRSXQSXLQAGLAADAWAAPIAMQIYKKHLDPRPGPCPPELGLGLGQLACCCLHRRAKRRPPMXQENSYVSSXGRAHSGAAPWQPLAAPSGASAQAAEQLQRGPNQPVESDESLGGLSAALRSWHLXPSCPLDPAPLREAGCPQGDXAGESSWGSGPGSRPXAVEGLALGSSASSSSEPPQIIINPARQKMVQKLALYEDGALDSLQLLSSSSLPGLGLEQDRQGPEESDEFQS

SEQ ID NO: 13761 - protein, 234 aa, Homo sapiens
  MOD_RES (50)..(50): Selenocysteine
  MOD_RES (62)..(62): Selenocysteine
  MOD_RES (84)..(84): Selenocysteine
  MOD_RES (96)..(96): Selenocysteine
  MOD_RES (109)..(110): Selenocysteine
  MOD_RES (137)..(137): Selenocysteine
  MOD_RES (148)..(148): Selenocysteine
  MOD_RES (175)..(175): Selenocysteine
  MOD_RES (185)..(185): Selenocysteine
  MOD_RES (219)..(219): Selenocysteine
  MOD_RES (230)..(230): Selenocysteine
PGPGEPAAPGAQHFLYEVPPWVMCRFYKVMDALEPADWCQFAALIVRDQXELRLCERSGQRXASVLWPWINRNARVADLVHILXHLQLLRARDIIXAWHPPAPLPSPGXXAPRPSSIPAPAEAEAWSPRKLPSSASXFLSPAFPGSQXHSGPELGLVPSPASLWPPPPSPAPSSXKQDPVSKRKXLGKVKYGCKSHGSVLARSENSEILQKVEQHPPPXSGQCLQALLGXCELA

SEQ ID NO: 13762 - protein, 212 aa, Homo sapiens
  MOD_RES (6)..(6): Selenocysteine
  MOD_RES (11)..(11): Selenocysteine
  MOD_RES (32)..(32): Selenocysteine
  MOD_RES (35)..(35): Selenocysteine
  MOD_RES (92)..(92): Selenocysteine
  MOD_RES (113)..(113): Selenocysteine
  MOD_RES (126)..(126): Selenocysteine
  MOD_RES (132)..(132): Selenocysteine
  MOD_RES (150)..(150): Selenocysteine
  MOD_RES (166)..(166): Selenocysteine
  MOD_RES (191)..(191): Selenocysteine
QRAVKXHGARXKYLKDLVEEEAEEAGVALRSXQSXLQAGLAADAWAAPIAMQIYKKHLDPRPGPCPPELGLGLGQLACCCLHRRAKRRPPMXQDWPLAALHHRRQSHRRLSSXLPDRRWSRSWPCXRMGPWXACSCCRPAPSQAWAWNRXGRGPKKVMNFRADVFXWADPPNPEVKVLMVRSSHGARVLSXLPAVGVGAHARGGEKEVALLF

SEQ ID NO: 13763 - protein, 218 aa, Homo sapiens
  MOD_RES (1)..(1): Any amino acid
  MOD_RES (8)..(8): Selenocysteine
  MOD_RES (11)..(11): Selenocysteine
  MOD_RES (68)..(68): Selenocysteine
  MOD_RES (107)..(107): Selenocysteine
  MOD_RES (161)..(161): Selenocysteine
  MOD_RES (181)..(181): Selenocysteine
  MOD_RES (196)..(196): Selenocysteine
XGVALRSXQSXLQAGLAADAWAAPIAMQIYKKHLDPRPGPCPPELGLGLGQLACCCLHRRAKRRPPMXQVYERLEKLQAVVAGVPGHSEAASCIPPSPQENSYVSSXGRAHSGAAPWQPLAAPSGASAQAAEQLQRGPNQPVESDESLGGLSAALRSWHLXPSCPLDPAPLREAGCPQGDXAGESSWGSGPGSRPXAVEGLGLEQDRQGPEESDEFQS

SEQ ID NO: 13764 - protein, 276 aa, Homo sapiens
  MOD_RES (1)..(1): Any amino acid
  MOD_RES (26)..(26): Selenocysteine
  MOD_RES (54)..(54): Selenocysteine
  MOD_RES (56)..(56): Selenocysteine
  MOD_RES (60)..(60): Selenocysteine
  MOD_RES (71)..(71): Selenocysteine
  MOD_RES (78)..(78): Selenocysteine
  MOD_RES (80)..(80): Selenocysteine
  MOD_RES (90)..(90): Selenocysteine
  MOD_RES (99)..(99): Selenocysteine
  MOD_RES (104)..(104): Selenocysteine
  MOD_RES (115)..(115): Selenocysteine
  MOD_RES (169)..(169): Selenocysteine
  MOD_RES (189)..(189): Selenocysteine
  MOD_RES (204)..(204): Selenocysteine
XLHQDSPSLIHGDIKSSNVLLDERLXPKLGDFGLARFSRFAGSSPSQSSMVARXQXVRGXLAYLPEEYIKXGRLAVDXDXFSFGVVVLEXLAGQRAVKXHGARXKYLENSYVSSXGRAHSGAAPWQPLAAPSGASAQAAEQLQRGPNQPVESDESLGGLSAALRSWHLXPSCPLDPAPLREAGCPQGDXAGESSWGSGPGSRPXAVEGLALGSSASSSSEPPQIIINPARQKMVQKLALYEDGALDSLQLLSSSSLPGLGLEQDRQGPEESDEFQS

SEQ ID NO: 13765 - protein, 392 aa, Homo sapiens
  MOD_RES (1)..(1): Any amino acid
  MOD_RES (5)..(5): Selenocysteine
  MOD_RES (21)..(21): Selenocysteine
  MOD_RES (29)..(29): Selenocysteine
  MOD_RES (75)..(75): Selenocysteine
  MOD_RES (93)..(93): Selenocysteine
  MOD_RES (124)..(124): Selenocysteine
  MOD_RES (152)..(152): Selenocysteine
  MOD_RES (154)..(154): Selenocysteine
  MOD_RES (158)..(158): Selenocysteine
  MOD_RES (169)..(169): Selenocysteine
  MOD_RES (176)..(176): Selenocysteine
  MOD_RES (178)..(178): Selenocysteine
  MOD_RES (201)..(201): Selenocysteine
  MOD_RES (204)..(204): Selenocysteine
  MOD_RES (261)..(261): Selenocysteine
  MOD_RES (300)..(300): Selenocysteine
  MOD_RES (354)..(354): Selenocysteine
  MOD_RES (374)..(374): Selenocysteine
  MOD_RES (389)..(389): Selenocysteine
XMRNXVYAVKRLKENADLEWXAVKQSFLXEVEQLSRFRHPNIVDFAGYCAQNGFYCLVYGFLPNGSLEDRLHCQXQACPPLSWPQRLDILLGXARAIQFLHQDSPSLIHGDIKSSNVLLDERLXPKLGDFGLARFSRFAGSSPSQSSMVARXQXVRGXLAYLPEEYIKXGRLAVDXDXFSFGVKDLVEEEAEEAGVALRSXQSXLQAGLAADAWAAPIAMQIYKKHLDPRPGPCPPELGLGLGQLACCCLHRRAKRRPPMXQVYERLEKLQAVVAGVPGHSEAASCIPPSPQENSYVSSXGRAHSGAAPWQPLAAPSGASAQAAEQLQRGPNQPVESDESLGGLSAALRSWHLXPSCPLDPAPLREAGCPQGDXAGESSWGSGPGSRPXAVE

SEQ ID NO: 13766 - protein, 192 aa, Homo sapiens
  MOD_RES (23)..(23): Selenocysteine
  MOD_RES (25)..(25): Selenocysteine
  MOD_RES (44)..(44): Selenocysteine
  MOD_RES (46)..(46): Selenocysteine
  MOD_RES (76)..(76): Selenocysteine
  MOD_RES (109)..(109): Selenocysteine
  MOD_RES (121)..(121): Selenocysteine
  MOD_RES (141)..(141): Selenocysteine
  MOD_RES (150)..(150): Selenocysteine
  MOD_RES (160)..(160): Selenocysteine
  MOD_RES (173)..(173): Selenocysteine
MNGKRPQHLHPLGSDNSEAENIXVXKDFRRVENAYHMEAEVCIXFXEFGKMQNICNFLVEKLDSSVVISPPQFYHXPGSVENLRRQACLVAVENAWRKAQEVCNLVGQXLGKPLLIKEEEXKEWEGQIDDHQSSRLSSSLXVQQKIKSAXIHAASKVFIXFEQLLESFFNIPXNNYSQIAMSPVNYHESHIK

SEQ ID NO: 13767 - protein, 260 aa, Homo sapiens
  MOD_RES (6)..(6): Selenocysteine
  MOD_RES (9)..(9): Selenocysteine
  MOD_RES (33)..(33): Selenocysteine
  MOD_RES (44)..(44): Selenocysteine
  MOD_RES (48)..(48): Selenocysteine
  MOD_RES (50)..(50): Selenocysteine
  MOD_RES (58)..(58): Selenocysteine
  MOD_RES (77)..(77): Selenocysteine
  MOD_RES (96)..(96): Selenocysteine
  MOD_RES (110)..(110): Selenocysteine
  MOD_RES (112)..(112): Selenocysteine
  MOD_RES (131)..(131): Selenocysteine
  MOD_RES (133)..(133): Selenocysteine
  MOD_RES (163)..(163): Selenocysteine
  MOD_RES (196)..(196): Selenocysteine
  MOD_RES (208)..(208): Selenocysteine
  MOD_RES (228)..(228): Selenocysteine
  MOD_RES (237)..(237): Selenocysteine
  MOD_RES (247)..(247): Selenocysteine
MSLQKXPPXRVFVELVPWADRSRENNLASGREXLPGLRHPLSSXQAQXAXREVQVSGXSEVSAGPDRAQVVVRVSSXKEAAAEAKKSVCRRLDYIXQSLQQQGVQAENIXVXKDFRRVENAYHMEAEVCIXFXEFGKMQNICNFLVEKLDSSVVISPPQFYHXPGSVENLRRQACLVAVENAWRKAQEVCNLVGQXLGKPLLIKEEEXKEWEGQIDDHQSSRLSSSLXVQQKIKSAXIHAASKVFIXFEVKGKEKRKKHL

SEQ ID NO: 13768 - protein, 177 aa, Homo sapiens
  MOD_RES (23)..(23): Selenocysteine
  MOD_RES (34)..(34): Selenocysteine
  MOD_RES (38)..(38): Selenocysteine
  MOD_RES (40)..(40): Selenocysteine
  MOD_RES (48)..(48): Selenocysteine
  MOD_RES (67)..(67): Selenocysteine
  MOD_RES (86)..(86): Selenocysteine
  MOD_RES (100)..(100): Selenocysteine
  MOD_RES (102)..(102): Selenocysteine
  MOD_RES (121)..(121): Selenocysteine
  MOD_RES (123)..(123): Selenocysteine
  MOD_RES (153)..(153): Selenocysteine
  MOD_RES (169)..(169): Selenocysteine
  MOD_RES (173)..(173): Selenocysteine
  MOD_RES (175)..(175): Selenocysteine
VFVELVPWADRSRENNLASGREXLPGLRHPLSSXQAQXAXREVQVSGXSEVSAGPDRAQVVVRVSSXKEAAAEAKKSVCRRLDYIXQSLQQQGVQAENIXVXKDFRRVENAYHMEAEVCIXFXEFGKMQNICNFLVEKLDSSVVISPPQFYHXPGSVENLRNSWNPSSXSQPXIXPR

SEQ ID NO: 13769 - protein, 44 aa, Homo sapiens
  MOD_RES (1)..(1): Any amino acid
  MOD_RES (15)..(15): Selenocysteine
  MOD_RES (24)..(24): Selenocysteine
  MOD_RES (34)..(34): Selenocysteine
XIDDHQSSRLSSSLXVQQKIKSAXIHAASKVFIXFEKLLRRGGV

SEQ ID NO: 13770 - protein, 625 aa, Homo sapiens
  MOD_RES (37)..(37): Selenocysteine
  MOD_RES (40)..(40): Selenocysteine
  MOD_RES (57)..(57): Selenocysteine
  MOD_RES (70)..(70): Selenocysteine
  MOD_RES (137)..(137): Selenocysteine
  MOD_RES (171)..(171): Selenocysteine
  MOD_RES (180)..(180): Selenocysteine
  MOD_RES (207)..(207): Selenocysteine
  MOD_RES (220)..(220): Selenocysteine
  MOD_RES (242)..(242): Selenocysteine
  MOD_RES (348)..(348): Selenocysteine
  MOD_RES (368)..(368): Selenocysteine
  MOD_RES (372)..(372): Selenocysteine
  MOD_RES (377)..(377): Selenocysteine
  MOD_RES (393)..(393): Selenocysteine
  MOD_RES (410)..(410): Selenocysteine
  MOD_RES (436)..(436): Selenocysteine
  MOD_RES (444)..(444): Selenocysteine
  MOD_RES (476)..(476): Selenocysteine
  MOD_RES (487)..(487): Selenocysteine
  MOD_RES (508)..(508): Selenocysteine
  MOD_RES (519)..(519): Selenocysteine
  MOD_RES (525)..(525): Selenocysteine
  MOD_RES (529)..(529): Selenocysteine
  MOD_RES (553)..(553): Selenocysteine
  MOD_RES (558)..(558): Selenocysteine
  MOD_RES (590)..(590): Selenocysteine
  MOD_RES (592)..(592): Selenocysteine
MACYIYQLPSWVLDDLCRNMDALSEWDWMEFASYVIXDLXQLRKIKSMERVQGVSIXRELLWWWGMRQAXVQQLVDLLCRLELYRAAQIILNWKPAPEIRCPIPAFPDSVKPEKPLAASVRKAEDEQEEGQPVRMAXFPGPGSSPARAHQPAFLQPPEEDAPHSLRSDLPXSSDSKDFSXSIPKQEKLLSLAGDSLFWSEADVVQAXDDFNQNRKISQGXFADVYRGHRHGKPFVFKKLREXACSSPGSIERFFQAELQICLRCCHPNVLPVLGFCAARQFHSFIYPYMANGSLQDRLQGQGGSDPLPWPQRVSICSGLLCAVEYLHGLEIIHSNVKSSNVLLDQNLXPKLAHPMAHLCPVNKRSKYXMMKXHLLRXSAAYLPEDFIRVGQLXKRVDIFSCGIVLAEVLXGIPAMDNNRSPVYLKDLLLSDIPSSXASLCSRKXGVENVMAKEICQKYLEKGAGRLPEDCAEALAXAACLCLRRRNXSLQEVCGSVAAVEERLRGREXLLPWSGLSEGXGSSSNXPEEXDDVDNSSLDASSSMSVAPWAGAAXPLLPXENGEGRLRVIVGREADSSSEACVGLEPPQDVXEXSWQIEINEAKRKLMENILLYKEEKVDSIELFGP

SEQ ID NO: 13771 - protein, 596 aa, Homo sapiens
  MOD_RES (15)..(15): Selenocysteine
  MOD_RES (69)..(69): Selenocysteine
  MOD_RES (82)..(82): Selenocysteine
  MOD_RES (103)..(103): Selenocysteine
  MOD_RES (129)..(129): Selenocysteine
  MOD_RES (133)..(133): Selenocysteine
  MOD_RES (162)..(162): Selenocysteine
  MOD_RES (188)..(188): Selenocysteine
  MOD_RES (232)..(232): Selenocysteine
  MOD_RES (234)..(234): Selenocysteine
  MOD_RES (248)..(248): Selenocysteine
  MOD_RES (259)..(259): Selenocysteine
  MOD_RES (310)..(310): Selenocysteine
  MOD_RES (327)..(327): Selenocysteine
  MOD_RES (331)..(331): Selenocysteine
  MOD_RES (355)..(355): Selenocysteine
  MOD_RES (369)..(369): Selenocysteine
  MOD_RES (428)..(428): Selenocysteine
  MOD_RES (442)..(442): Selenocysteine
  MOD_RES (446)..(446): Selenocysteine
  MOD_RES (458)..(458): Selenocysteine
  MOD_RES (502)..(502): Selenocysteine
  MOD_RES (505)..(505): Selenocysteine
MAGNCGARGALSAHXLLFDLPPALLGELCAVLDSCDGALGWRGLAERLSSSWLDVRHIEKYVDQGKSGXRELLWSWAQKNKXIGDLLQVLQEMGHRRAIHLIXNYGAVLSPSEKSYQEGGFPNILFKEXANVXVDNVLIPEHNEKGILLKSSISFQNIIEGXRNFHKDFLIGEGEIFEVYRVEIQNLXYAVKLFKQEKKMQCKKHWKRFLSELEVLLLFHHPNILELAAYFXEXEKFCLIYPYMRNGXLFDRLQCVGDXAPLPWHIRIGILIGISKAIHYLHNVQPCSVICGSISSANILLDDQFQPKLXDFAMAHFRSHLEHQSCXINMXSSSSKHLWYMPEEYIRQGKLSIKXDVYSFGIVIMEVLXGCRVVLDDPKHIQLRDLLRELMEKRGLDSCLSFLDKKVPPCPRNFSAKLFCLAGRCAAXRAKLRPSMDEVLNXLESXQASLYFAEDPPXSLKSFRCPSPLFLENVPSIPVEDDESQNNNLLPSDEGLRIDRMXQKXPFECSQSEVMFLSLDKKPESKRNEEACNMPSSSCEESWFPKYIVPSQDLRPYKVNIDPSSEAPGHSCRSRPVESSCSSKFSWDEYEQYKKE

SEQ ID NO: 13772 - protein, 535 aa, Homo sapiens
  MOD_RES (15)..(15): Selenocysteine
  MOD_RES (68)..(68): Selenocysteine
  MOD_RES (72)..(72): Selenocysteine
  MOD_RES (101)..(101): Selenocysteine
  MOD_RES (127)..(127): Selenocysteine
  MOD_RES (171)..(171): Selenocysteine
  MOD_RES (173)..(173): Selenocysteine
  MOD_RES (187)..(187): Selenocysteine
  MOD_RES (198)..(198): Selenocysteine
  MOD_RES (249)..(249): Selenocysteine
  MOD_RES (266)..(266): Selenocysteine
  MOD_RES (270)..(270): Selenocysteine
  MOD_RES (294)..(294): Selenocysteine
  MOD_RES (308)..(308): Selenocysteine
  MOD_RES (367)..(367): Selenocysteine
  MOD_RES (381)..(381): Selenocysteine
  MOD_RES (385)..(385): Selenocysteine
  MOD_RES (397)..(397): Selenocysteine
  MOD_RES (441)..(441): Selenocysteine
  MOD_RES (444)..(444): Selenocysteine
MAGNCGARGALSAHXLLFDLPPALLGELCAVLDSCDGALGWRGLGAVLSPSEKSYQEGGFPNILFKEXANVXVDNVLIPEHNEKGILLKSSISFQNIIEGXRNFHKDFLIGEGEIFEVYRVEIQNLXYAVKLFKQEKKMQCKKHWKRFLSELEVLLLFHHPNILELAAYFXEXEKFCLIYPYMRNGXLFDRLQCVGDXAPLPWHIRIGILIGISKAIHYLHNVQPCSVICGSISSANILLDDQFQPKLXDFAMAHFRSHLEHQSCXINMXSSSSKHLWYMPEEYIRQGKLSIKXDVYSFGIVIMEVLXGCRVVLDDPKHIQLRDLLRELMEKRGLDSCLSFLDKKVPPCPRNFSAKLFCLAGRCAAXRAKLRPSMDEVLNXLESXQASLYFAEDPPXSLKSFRCPSPLFLENVPSIPVEDDESQNNNLLPSDEGLRIDRMXQKXPFECSQSEVMFLSLDKKPESKRNEEACNMPSSSCEESWFPKYIVPSQDLRPYKVNIDPSSEAPGHSCRSRPVESSCSSKFSWDEYEQYKKE

SEQ ID NO: 13773 - protein, 93 aa, Homo sapiens
  MOD_RES (15)..(15): Selenocysteine
  MOD_RES (83)..(83): Selenocysteine
  MOD_RES (87)..(87): Selenocysteine
  MOD_RES (93)..(93): Selenocysteine
MAGNCGARGALSAHXLLFDLPPALLGELCAVLDSCDGALGWRGLVSKNKLCENGVLILQGFWHVVVCKYKDSKYGCVALFEKXPSEXYLHMEX

SEQ ID NO: 13774 - protein, 54 aa, Homo sapiens
  MOD_RES (6)..(6): Selenocysteine
  MOD_RES (9)..(9): Selenocysteine
MNKPIXPSXYVRCLNVGLIRKLSDFIDPQEGWKKLAVAIKKPSGDDRYNQFHIR

SEQ ID NO: 13775 - protein, 60 aa, Homo sapiens
  MOD_RES (6)..(6): Selenocysteine
  MOD_RES (9)..(9): Selenocysteine
MNKPIXPSXYVRCLNVGLIRKLSDFIDPQEGWKKLAVAIKKPSGDDRYNQFHIRCCSQNC

SEQ ID NO: 13776 - protein, 89 aa, Homo sapiens
  MOD_RES (6)..(6): Selenocysteine
  MOD_RES (9)..(9): Selenocysteine
  MOD_RES (62)..(62): Selenocysteine
  MOD_RES (67)..(67): Selenocysteine
  MOD_RES (76)..(77): Selenocysteine
  MOD_RES (80)..(80): Selenocysteine
MNKPIXPSXYVRCLNVGLIRKLSDFIDPQEGWKKLAVAIKKPSGDDRYNQFHIRRFEALLQXGKSPXSELLFDWGXXNCXVGDLVDLLI

SEQ ID NO: 13777 - protein, 218 aa, Homo sapiens
  MOD_RES (6)..(6): Selenocysteine
  MOD_RES (9)..(9): Selenocysteine
  MOD_RES (62)..(62): Selenocysteine
  MOD_RES (67)..(67): Selenocysteine
  MOD_RES (76)..(77): Selenocysteine
  MOD_RES (80)..(80): Selenocysteine
  MOD_RES (108)..(108): Selenocysteine
  MOD_RES (111)..(111): Selenocysteine
  MOD_RES (119)..(119): Selenocysteine
  MOD_RES (133)..(133): Selenocysteine
  MOD_RES (136)..(136): Selenocysteine
  MOD_RES (163)..(163): Selenocysteine
  MOD_RES (177)..(177): Selenocysteine
MNKPIXPSXYVRCLNVGLIRKLSDFIDPQEGWKKLAVAIKKPSGDDRYNQFHIRRFEALLQXGKSPXSELLFDWGXXNCXVGDLVDLLIQNEFFAPASLLLPDAVPKXANXLPSKEAIXVQQKQMPFCDKDRXLMXPVQNLEQSYMPPDSSSPENKSLEVSDXRFHSFSFYELKNVXNNFDERPISVGGNKMGEGGFGVVYKGYVNNNCGSEEACSNG

SEQ ID NO: 13778 - protein, 460 aa, Homo sapiens
  MOD_RES (6)..(6): Selenocysteine
  MOD_RES (9)..(9): Selenocysteine
  MOD_RES (62)..(62): Selenocysteine
  MOD_RES (67)..(67): Selenocysteine
  MOD_RES (76)..(77): Selenocysteine
  MOD_RES (80)..(80): Selenocysteine
  MOD_RES (108)..(108): Selenocysteine
  MOD_RES (111)..(111): Selenocysteine
  MOD_RES (119)..(119): Selenocysteine
  MOD_RES (133)..(133): Selenocysteine
  MOD_RES (136)..(136): Selenocysteine
  MOD_RES (163)..(163): Selenocysteine
  MOD_RES (177)..(177): Selenocysteine
  MOD_RES (208)..(209): Selenocysteine
  MOD_RES (222)..(223): Selenocysteine
  MOD_RES (280)..(280): Selenocysteine
  MOD_RES (324)..(324): Selenocysteine
  MOD_RES (342)..(342): Selenocysteine
  MOD_RES (345)..(345): Selenocysteine
  MOD_RES (351)..(352): Selenocysteine
  MOD_RES (365)..(365): Selenocysteine
  MOD_RES (382)..(382): Selenocysteine
  MOD_RES (409)..(409): Selenocysteine
  MOD_RES (424)..(424): Selenocysteine
  MOD_RES (458)..(458): Selenocysteine
MNKPIXPSXYVRCLNVGLIRKLSDFIDPQEGWKKLAVAIKKPSGDDRYNQFHIRRFEALLQXGKSPXSELLFDWGXXNCXVGDLVDLLIQNEFFAPASLLLPDAVPKXANXLPSKEAIXVQQKQMPFCDKDRXLMXPVQNLEQSYMPPDSSSPENKSLEVSDXRFHSFSFYELKNVXNNFDERPISVGGNKMGEGGFGVVYKGYVNNXXVAVKKLAAMVDIXXEELKQQFDQEIKVMAKCQHENLVELLGFSSDGDDLCLVYVYMPNGSLLDRLSCLDGXPPLSWHMRCKIAQGAANGINFLHENHHIHRDIKSANILLDEAFXAKISDFGLARASEKFAQXVMXSRIVGXXAYMAPEALRGEIXPKSDIYSFGVVLLEIIXGLPAVDEHREPQLLLDIKEEIEDEEKXIEDYIDKKMNDADSXSVEAMYSVASQCLHEKKNKRPDIKKVQQLLQEMXAS

SEQ ID NO: 13779 - protein, 336 aa, Homo sapiens
  MOD_RES (9)..(9): Selenocysteine
  MOD_RES (12)..(12): Selenocysteine
  MOD_RES (39)..(39): Selenocysteine
  MOD_RES (53)..(53): Selenocysteine
  MOD_RES (84)..(85): Selenocysteine
  MOD_RES (98)..(99): Selenocysteine
  MOD_RES (156)..(156): Selenocysteine
  MOD_RES (200)..(200): Selenocysteine
  MOD_RES (218)..(218): Selenocysteine
  MOD_RES (221)..(221): Selenocysteine
  MOD_RES (227)..(228): Selenocysteine
  MOD_RES (241)..(241): Selenocysteine
  MOD_RES (258)..(258): Selenocysteine
  MOD_RES (285)..(285): Selenocysteine
  MOD_RES (300)..(300): Selenocysteine
  MOD_RES (334)..(334): Selenocysteine
MPFCDKDRXLMXPVQNLEQSYMPPDSSSPENKSLEVSDXRFHSFSFYELKNVXNNFDERPISVGGNKMGEGGFGVVYKGYVNNXXVAVKKLAAMVDIXXEELKQQFDQEIKVMAKCQHENLVELLGFSSDGDDLCLVYVYMPNGSLLDRLSCLDGXPPLSWHMRCKIAQGAANGINFLHENHHIHRDIKSANILLDEAFXAKISDFGLARASEKFAQXVMXSRIVGXXAYMAPEALRGEIXPKSDIYSFGVVLLEIIXGLPAVDEHREPQLLLDIKEEIEDEEKXIEDYIDKKMNDADSXSVEAMYSVASQCLHEKKNKRPDIKKVQQLLQEMXAS

SEQ ID NO: 13780 - protein, 51 aa, Homo sapiens
  MOD_RES (4)..(4): Selenocysteine
  MOD_RES (32)..(32): Selenocysteine
  MOD_RES (47)..(47): Selenocysteine
MPIXRMRMRPWLEMQINSNQIPGLIWINKADXKQGKRSQIPRRGRPXFAVP

SEQ ID NO: 13781 - protein, 118 aa, Homo sapiens
  MOD_RES (4)..(4): Selenocysteine
  MOD_RES (62)..(62): Selenocysteine
  MOD_RES (76)..(76): Selenocysteine
  MOD_RES (116)..(116): Selenocysteine
MPIXRMRMRPWLEMQINSNQIPGLIWINKEEMIFQIPWKHAAKHGWDINKDACLFRSWAIHXGRYKAGEKEPDPKXWKANFRCAMNSLPDIEEVKDQSRNKGSSAVRVYRMLPPLXKN

SEQ ID NO: 13782 - protein, 201 aa, Homo sapiens
  MOD_RES (4)..(4): Selenocysteine
  MOD_RES (62)..(62): Selenocysteine
  MOD_RES (76)..(76): Selenocysteine
  MOD_RES (116)..(116): Selenocysteine
  MOD_RES (147)..(147): Selenocysteine
  MOD_RES (156)..(156): Selenocysteine
  MOD_RES (165)..(165): Selenocysteine
  MOD_RES (180)..(180): Selenocysteine
  MOD_RES (200)..(200): Selenocysteine
MPIXRMRMRPWLEMQINSNQIPGLIWINKEEMIFQIPWKHAAKHGWDINKDACLFRSWAIHXGRYKAGEKEPDPKXWKANFRCAMNSLPDIEEVKDQSRNKGSSAVRVYRMLPPLXKNQRKERKSKSSRDAKSKAKRKSCGDSSPDXFSDGLSSSXLPDDHSSYXVPGYMQDLEVEQALXPALGAVGVAANKRGWEGVPXQ

SEQ ID NO: 13783 - protein, 192 aa, Homo sapiens
  MOD_RES (4)..(4): Selenocysteine
  MOD_RES (62)..(62): Selenocysteine
  MOD_RES (76)..(76): Selenocysteine
  MOD_RES (116)..(116): Selenocysteine
  MOD_RES (147)..(147): Selenocysteine
  MOD_RES (156)..(156): Selenocysteine
  MOD_RES (165)..(165): Selenocysteine
  MOD_RES (180)..(180): Selenocysteine
  MOD_RES (191)..(191): Selenocysteine
MPIXRMRMRPWLEMQINSNQIPGLIWINKEEMIFQIPWKHAAKHGWDINKDACLFRSWAIHXGRYKAGEKEPDPKXWKANFRCAMNSLPDIEEVKDQSRNKGSSAVRVYRMLPPLXKNQRKERKSKSSRDAKSKAKRKSCGDSSPDXFSDGLSSSXLPDDHSSYXVPGYMQDLEVEQALXPALSPCAVSSXL

SEQ ID NO: 13784 - protein, 325 aa, Homo sapiens
  MOD_RES (4)..(4): Selenocysteine
  MOD_RES (62)..(62): Selenocysteine
  MOD_RES (76)..(76): Selenocysteine
  MOD_RES (116)..(116): Selenocysteine
  MOD_RES (147)..(147): Selenocysteine
  MOD_RES (156)..(156): Selenocysteine
  MOD_RES (165)..(165): Selenocysteine
  MOD_RES (180)..(180): Selenocysteine
  MOD_RES (191)..(191): Selenocysteine
  MOD_RES (206)..(206): Selenocysteine
  MOD_RES (220)..(220): Selenocysteine
  MOD_RES (224)..(225): Selenocysteine
  MOD_RES (249)..(249): Selenocysteine
  MOD_RES (266)..(266): Selenocysteine
  MOD_RES (296)..(296): Selenocysteine
  MOD_RES (304)..(304): Selenocysteine
  MOD_RES (311)..(311): Selenocysteine
MPIXRMRMRPWLEMQINSNQIPGLIWINKEEMIFQIPWKHAAKHGWDINKDACLFRSWAIHXGRYKAGEKEPDPKXWKANFRCAMNSLPDIEEVKDQSRNKGSSAVRVYRMLPPLXKNQRKERKSKSSRDAKSKAKRKSCGDSSPDXFSDGLSSSXLPDDHSSYXVPGYMQDLEVEQALXPALSPCAVSSXLPDWHIPVEVVPDSXSDLYNFQVSPMPSXSEAXXDEDEEGKLPEDIMKLLEQSEWQPXNVDGKGYLLNEPGVQPXSVYGDFSCKEEPEIDSPGGDIGLSLQRVFXDLKNMDAXWLDSLLXPVRLPSIQAIPCAP

SEQ ID NO: 13785 - protein, 198 aa, Homo sapiens
  MOD_RES (4)..(4): Selenocysteine
  MOD_RES (62)..(62): Selenocysteine
  MOD_RES (76)..(76): Selenocysteine
  MOD_RES (116)..(116): Selenocysteine
  MOD_RES (147)..(147): Selenocysteine
  MOD_RES (156)..(156): Selenocysteine
  MOD_RES (165)..(165): Selenocysteine
  MOD_RES (180)..(180): Selenocysteine
  MOD_RES (183)..(184): Selenocysteine
MPIXRMRMRPWLEMQINSNQIPGLIWINKEEMIFQIPWKHAAKHGWDINKDACLFRSWAIHXGRYKAGEKEPDPKXWKANFRCAMNSLPDIEEVKDQSRNKGSSAVRVYRMLPPLXKNQRKERKSKSSRDAKSKAKRKSCGDSSPDXFSDGLSSSXLPDDHSSYXVPGYMQDLEVEQALXPAXXDEDEEGKLPEDIMK

SEQ ID NO: 13786 - protein, 137 aa, Homo sapiens
  MOD_RES (20)..(20): Selenocysteine
  MOD_RES (62)..(62): Selenocysteine
  MOD_RES (76)..(76): Selenocysteine
  MOD_RES (127)..(127): Selenocysteine
MPVERMRMRPWLEEQINSNXIPGLKWLNKEKKIFQIPWMHAARHGWDVEKDAPLFRNWAIHXGKHQPGVDKPDPKXWKANFRCAMNSLPDIEEVKDKSIKKGNNAFRVYRMLPLSERPSKKGKKPKXEKEDKVKHIK

SEQ ID NO: 13787 - protein, 161 aa, Homo sapiens
  MOD_RES (20)..(20): Selenocysteine
  MOD_RES (62)..(62): Selenocysteine
  MOD_RES (76)..(76): Selenocysteine
  MOD_RES (127)..(127): Selenocysteine
MPVERMRMRPWLEEQINSNXIPGLKWLNKEKKIFQIPWMHAARHGWDVEKDAPLFRNWAIHXGKHQPGVDKPDPKXWKANFRCAMNSLPDIEEVKDKSIKKGNNAFRVYRMLPLSERPSKKGKKPKXEKEDKVKHIKQEPVESSLGLSNGVSDLSPEYAVL

SEQ ID NO: 13788 - protein, 176 aa, Homo sapiens
  MOD_RES (20)..(20): Selenocysteine
  MOD_RES (62)..(62): Selenocysteine
  MOD_RES (76)..(76): Selenocysteine
  MOD_RES (127)..(127): Selenocysteine
  MOD_RES (162)..(162): Selenocysteine
  MOD_RES (164)..(164): Selenocysteine
  MOD_RES (172)..(172): Selenocysteine
MPVERMRMRPWLEEQINSNXIPGLKWLNKEKKIFQIPWMHAARHGWDVEKDAPLFRNWAIHXGKHQPGVDKPDPKXWKANFRCAMNSLPDIEEVKDKSIKKGNNAFRVYRMLPLSERPSKKGKKPKXEKEDKVKHIKQEPVESSLGLSNGVSDLSPEYAVLXSXIKNEVDSXVNII

SEQ ID NO: 13789 - protein, 349 aa, Homo sapiens
  MOD_RES (20)..(20): Selenocysteine
  MOD_RES (62)..(62): Selenocysteine
  MOD_RES (76)..(76): Selenocysteine
  MOD_RES (127)..(127): Selenocysteine
  MOD_RES (162)..(162): Selenocysteine
  MOD_RES (164)..(164): Selenocysteine
  MOD_RES (172)..(172): Selenocysteine
  MOD_RES (194)..(194): Selenocysteine
  MOD_RES (206)..(207): Selenocysteine
  MOD_RES (235)..(236): Selenocysteine
  MOD_RES (268)..(268): Selenocysteine
  MOD_RES (282)..(282): Selenocysteine
  MOD_RES (291)..(291): Selenocysteine
  MOD_RES (318)..(318): Selenocysteine
  MOD_RES (330)..(330): Selenocysteine
  MOD_RES (338)..(338): Selenocysteine
  MOD_RES (342)..(342): Selenocysteine
MPVERMRMRPWLEEQINSNXIPGLKWLNKEKKIFQIPWMHAARHGWDVEKDAPLFRNWAIHXGKHQPGVDKPDPKXWKANFRCAMNSLPDIEEVKDKSIKKGNNAFRVYRMLPLSERPSKKGKKPKXEKEDKVKHIKQEPVESSLGLSNGVSDLSPEYAVLXSXIKNEVDSXVNIIVVGQSHLDSNIENQEIVXNPPDICQVVEVXXESDEQPVSMSELYPLQISPVSSYAESEXXDSVPSDEESAEGRPHWRKRNIEGKQYLSNMGXRGSYLLPGMASFVXSNKPDLQVXIKEESNPVPYNSSWPPFQDLPLSSSMXPASSSSRPDREXRASVIKKXSDIXQARVKSC

SEQ ID NO: 13790 - protein, 83 aa, Homo sapiens
  MOD_RES (20)..(20): Selenocysteine
  MOD_RES (34)..(34): Selenocysteine
  MOD_RES (38)..(38): Selenocysteine
  MOD_RES (47)..(47): Selenocysteine
  MOD_RES (61)..(61): Selenocysteine
  MOD_RES (69)..(70): Selenocysteine
MPVERMRMRPWLEEQINSNXIPGLKWLNKRQGLXIWPXLECSGAVIXHCSLDLLGSSDPPXSASRVAGXXGKEDFSDPLDACG

SEQ ID NO: 13791 - protein, 113 aa, Homo sapiens
  MOD_RES (51)..(51): Selenocysteine
  MOD_RES (63)..(64): Selenocysteine
  MOD_RES (92)..(93): Selenocysteine
PDIEEVKDKSIKKGNNAFRVYRMLPLSERPSKKVVGQSHLDSNIENQEIVXNPPDICQVVEVXXESDEQPVSMSELYPLQISPVSSYAESEXXDSVPSDEESAEGRPHWRKRN

SEQ ID NO: 13792 - protein, 196 aa, Homo sapiens
  MOD_RES (1)..(1): Any amino acid
  MOD_RES (26)..(26): Selenocysteine
  MOD_RES (61)..(61): Selenocysteine
  MOD_RES (63)..(63): Selenocysteine
  MOD_RES (71)..(71): Selenocysteine
  MOD_RES (91)..(91): Selenocysteine
  MOD_RES (128)..(128): Selenocysteine
  MOD_RES (140)..(141): Selenocysteine
  MOD_RES (169)..(170): Selenocysteine
XNNAFRVYRMLPLSERPSKKGKKPKXEKEDKVKHIKQEPVESSLGLSNGVSDLSPEYAVLXSXIKNEVDSXVNIIALNFCCVYGDFCFWEXEEASSMLNCPDRPPLASCRVVGQSHLDSNIENQEIVXNPPDICQVVEVXXESDEQPVSMSELYPLQISPVSSYAESEXXDSVPSDEESAEGRPHWRKRNIEGKQY

SEQ ID NO: 13793 - protein, 102 aa, Homo sapiens
  MOD_RES (3)..(3): Selenocysteine
  MOD_RES (32)..(32): Selenocysteine
  MOD_RES (61)..(61): Selenocysteine
  MOD_RES (75)..(75): Selenocysteine
MGXPKPRILPWLVSQLDLGQLEGVAWVNKSRXRFRIPWKHGLRQDAQQEDFGIFQAWAEAXGAYVPGRDKPDLPXWKRNFRSALNRKEGLRLAEDRSKDPHD

SEQ ID NO: 13794 - protein, 153 aa, Homo sapiens
  MOD_RES (3)..(3): Selenocysteine
  MOD_RES (32)..(32): Selenocysteine
  MOD_RES (61)..(61): Selenocysteine
  MOD_RES (75)..(75): Selenocysteine
  MOD_RES (122)..(122): Selenocysteine
  MOD_RES (126)..(126): Selenocysteine
  MOD_RES (132)..(132): Selenocysteine
  MOD_RES (135)..(135): Selenocysteine
  MOD_RES (151)..(151): Selenocysteine
MGXPKPRILPWLVSQLDLGQLEGVAWVNKSRXRFRIPWKHGLRQDAQQEDFGIFQAWAEAXGAYVPGRDKPDLPXWKRNFRSALNRKEGLRLAEDRSKDPHDPHKIYEFVNSGVGDFSQPDXSPDXNGGGSXSDXQEDILDELLEWEFEVXAF

SEQ ID NO: 13795 - protein, 191 aa, Homo sapiens
  MOD_RES (3)..(3): Selenocysteine
  MOD_RES (32)..(32): Selenocysteine
  MOD_RES (61)..(61): Selenocysteine
  MOD_RES (75)..(75): Selenocysteine
  MOD_RES (122)..(122): Selenocysteine
  MOD_RES (126)..(126): Selenocysteine
  MOD_RES (132)..(132): Selenocysteine
  MOD_RES (135)..(135): Selenocysteine
  MOD_RES (180)..(180): Selenocysteine
MGXPKPRILPWLVSQLDLGQLEGVAWVNKSRXRFRIPWKHGLRQDAQQEDFGIFQAWAEAXGAYVPGRDKPDLPXWKRNFRSALNRKEGLRLAEDRSKDPHDPHKIYEFVNSGVGDFSQPDXSPDXNGGGSXSDXQEDILDELLGNMVLAPLPDPGPPSLAVAPEPCPQPLRSPSLDNPXPFPNLGPSENP

SEQ ID NO: 13796 - protein, 264 aa, Homo sapiens
  MOD_RES (3)..(3): Selenocysteine
  MOD_RES (32)..(32): Selenocysteine
  MOD_RES (61)..(61): Selenocysteine
  MOD_RES (75)..(75): Selenocysteine
  MOD_RES (122)..(122): Selenocysteine
  MOD_RES (126)..(126): Selenocysteine
  MOD_RES (132)..(132): Selenocysteine
  MOD_RES (135)..(135): Selenocysteine
  MOD_RES (180)..(180): Selenocysteine
  MOD_RES (204)..(204): Selenocysteine
  MOD_RES (206)..(206): Selenocysteine
  MOD_RES (232)..(232): Selenocysteine
  MOD_RES (243)..(243): Selenocysteine
  MOD_RES (263)..(263): Selenocysteine
MGXPKPRILPWLVSQLDLGQLEGVAWVNKSRXRFRIPWKHGLRQDAQQEDFGIFQAWAEAXGAYVPGRDKPDLPXWKRNFRSALNRKEGLRLAEDRSKDPHDPHKIYEFVNSGVGDFSQPDXSPDXNGGGSXSDXQEDILDELLGNMVLAPLPDPGPPSLAVAPEPCPQPLRSPSLDNPXPFPNLGPSENPLKRLLVPGEDLIXFXEGSGRSPRYALWFCVGESWPQDQPWXKRLVMVKVVPXCLRALVEMARVGGASSLENXV

SEQ ID NO: 13797 - protein, 300 aa, Homo sapiens
  MOD_RES (3)..(3): Selenocysteine
  MOD_RES (32)..(32): Selenocysteine
  MOD_RES (61)..(61): Selenocysteine
  MOD_RES (75)..(75): Selenocysteine
  MOD_RES (122)..(122): Selenocysteine
  MOD_RES (126)..(126): Selenocysteine
  MOD_RES (132)..(132): Selenocysteine
  MOD_RES (135)..(135): Selenocysteine
  MOD_RES (180)..(180): Selenocysteine
  MOD_RES (204)..(204): Selenocysteine
  MOD_RES (206)..(206): Selenocysteine
  MOD_RES (232)..(232): Selenocysteine
  MOD_RES (243)..(243): Selenocysteine
  MOD_RES (263)..(263): Selenocysteine
  MOD_RES (277)..(277): Selenocysteine
MGXPKPRILPWLVSQLDLGQLEGVAWVNKSRXRFRIPWKHGLRQDAQQEDFGIFQAWAEAXGAYVPGRDKPDLPXWKRNFRSALNRKEGLRLAEDRSKDPHDPHKIYEFVNSGVGDFSQPDXSPDXNGGGSXSDXQEDILDELLGNMVLAPLPDPGPPSLAVAPEPCPQPLRSPSLDNPXPFPNLGPSENPLKRLLVPGEDLIXFXEGSGRSPRYALWFCVGESWPQDQPWXKRLVMVKVVPXCLRALVEMARVGGASSLENXVDLHISNSHPLSLXSDQYKAYLQDLVEGMDFQGPGES

SEQ ID NO: 13798 - protein, 287 aa, Homo sapiens
  MOD_RES (3)..(3): Selenocysteine
  MOD_RES (32)..(32): Selenocysteine
  MOD_RES (61)..(61): Selenocysteine
  MOD_RES (75)..(75): Selenocysteine
  MOD_RES (122)..(122): Selenocysteine
  MOD_RES (126)..(126): Selenocysteine
  MOD_RES (132)..(132): Selenocysteine
  MOD_RES (135)..(135): Selenocysteine
  MOD_RES (180)..(180): Selenocysteine
  MOD_RES (207)..(207): Selenocysteine
  MOD_RES (219)..(219): Selenocysteine
  MOD_RES (237)..(237): Selenocysteine
  MOD_RES (244)..(244): Selenocysteine
  MOD_RES (253)..(253): Selenocysteine
MGXPKPRILPWLVSQLDLGQLEGVAWVNKSRXRFRIPWKHGLRQDAQQEDFGIFQAWAEAXGAYVPGRDKPDLPXWKRNFRSALNRKEGLRLAEDRSKDPHDPHKIYEFVNSGVGDFSQPDXSPDXNGGGSXSDXQEDILDELLGNMVLAPLPDPGPPSLAVAPEPCPQPLRSPSLDNPXPFPNLGPSENPLKRLLVPGEEWEFEVXAFYRGRQVFQQXISCPEGLRLVGSEVGDRXLPGWPVXLPDPGMSLXDRGVMSYVRHVLSCLGGGLALWRAGQWLWAQRLG

SEQ ID NO: 13799 - protein, 329 aa, Homo sapiens
  MOD_RES (3)..(3): Selenocysteine
  MOD_RES (32)..(32): Selenocysteine
  MOD_RES (61)..(61): Selenocysteine
  MOD_RES (75)..(75): Selenocysteine
  MOD_RES (122)..(122): Selenocysteine
  MOD_RES (126)..(126): Selenocysteine
  MOD_RES (132)..(132): Selenocysteine
  MOD_RES (135)..(135): Selenocysteine
  MOD_RES (180)..(180): Selenocysteine
  MOD_RES (207)..(207): Selenocysteine
  MOD_RES (219)..(219): Selenocysteine
  MOD_RES (237)..(237): Selenocysteine
  MOD_RES (244)..(244): Selenocysteine
  MOD_RES (253)..(253): Selenocysteine
  MOD_RES (291)..(291): Selenocysteine
MGXPKPRILPWLVSQLDLGQLEGVAWVNKSRXRFRIPWKHGLRQDAQQEDFGIFQAWAEAXGAYVPGRDKPDLPXWKRNFRSALNRKEGLRLAEDRSKDPHDPHKIYEFVNSGVGDFSQPDXSPDXNGGGSXSDXQEDILDELLGNMVLAPLPDPGPPSLAVAPEPCPQPLRSPSLDNPXPFPNLGPSENPLKRLLVPGEEWEFEVXAFYRGRQVFQQXISCPEGLRLVGSEVGDRXLPGWPVXLPDPGMSLXDRGVMSYVRHVLSCLGGGLALWRAGQWLWAQRLGHCHXYWAVSEELLPNSGHGPDGEVPKDKEGGVFDLGPFIVGE

SEQ ID NO: 13800 - protein, 408 aa, Homo sapiens
  MOD_RES (3)..(3): Selenocysteine
  MOD_RES (32)..(32): Selenocysteine
  MOD_RES (61)..(61): Selenocysteine
  MOD_RES (75)..(75): Selenocysteine
  MOD_RES (122)..(122): Selenocysteine
  MOD_RES (126)..(126): Selenocysteine
  MOD_RES (132)..(132): Selenocysteine
  MOD_RES (135)..(135): Selenocysteine
  MOD_RES (180)..(180): Selenocysteine
  MOD_RES (207)..(207): Selenocysteine
  MOD_RES (219)..(219): Selenocysteine
  MOD_RES (237)..(237): Selenocysteine
  MOD_RES (244)..(244): Selenocysteine
  MOD_RES (253)..(253): Selenocysteine
  MOD_RES (291)..(291): Selenocysteine
  MOD_RES (362)..(362): Selenocysteine
MGXPKPRILPWLVSQLDLGQLEGVAWVNKSRXRFRIPWKHGLRQDAQQEDFGIFQAWAEAXGAYVPGRDKPDLPXWKRNFRSALNRKEGLRLAEDRSKDPHDPHKIYEFVNSGVGDFSQPDXSPDXNGGGSXSDXQEDILDELLGNMVLAPLPDPGPPSLAVAPEPCPQPLRSPSLDNPXPFPNLGPSENPLKRLLVPGEEWEFEVXAFYRGRQVFQQXISCPEGLRLVGSEVGDRXLPGWPVXLPDPGMSLXDRGVMSYVRHVLSCLGGGLALWRAGQWLWAQRLGHCHXYWAVSEELLPNSGHGPDGEVPKDKEGGVFDLGPFIVGCAHVPQGLGRNGPGRGCLLPGEYCGPAHFQQPPXLPHLRPVQGLPAGLGGGHGFPGPWGELSPRSSWCASNPPVPHHLNQ

SEQ ID NO: 13801 - protein, 427 aa, Homo sapiens
  MOD_RES (3)..(3): Selenocysteine
  MOD_RES (32)..(32): Selenocysteine
  MOD_RES (61)..(61): Selenocysteine
  MOD_RES (75)..(75): Selenocysteine
  MOD_RES (122)..(122): Selenocysteine
  MOD_RES (126)..(126): Selenocysteine
  MOD_RES (132)..(132): Selenocysteine
  MOD_RES (135)..(135): Selenocysteine
  MOD_RES (180)..(180): Selenocysteine
  MOD_RES (207)..(207): Selenocysteine
  MOD_RES (219)..(219): Selenocysteine
  MOD_RES (237)..(237): Selenocysteine
  MOD_RES (244)..(244): Selenocysteine
  MOD_RES (253)..(253): Selenocysteine
  MOD_RES (291)..(291): Selenocysteine
  MOD_RES (331)..(331): Selenocysteine
  MOD_RES (333)..(333): Selenocysteine
  MOD_RES (359)..(359): Selenocysteine
  MOD_RES (370)..(370): Selenocysteine
  MOD_RES (390)..(390): Selenocysteine
  MOD_RES (404)..(404): Selenocysteine
MGXPKPRILPWLVSQLDLGQLEGVAWVNKSRXRFRIPWKHGLRQDAQQEDFGIFQAWAEAXGAYVPGRDKPDLPXWKRNFRSALNRKEGLRLAEDRSKDPHDPHKIYEFVNSGVGDFSQPDXSPDXNGGGSXSDXQEDILDELLGNMVLAPLPDPGPPSLAVAPEPCPQPLRSPSLDNPXPFPNLGPSENPLKRLLVPGEEWEFEVXAFYRGRQVFQQXISCPEGLRLVGSEVGDRXLPGWPVXLPDPGMSLXDRGVMSYVRHVLSCLGGGLALWRAGQWLWAQRLGHCHXYWAVSEELLPNSGHGPDGEVPKDKEGGVFDLGPFIVDLIXFXEGSGRSPRYALWFCVGESWPQDQPWXKRLVMVKVVPXCLRALVEMARVGGASSLENXVDLHISNSHPLSLXSDQYKAYLQDLVEGMDFQGPGES

SEQ ID NO: 13802 - protein, 452 aa, Homo sapiens
  MOD_RES (3)..(3): Selenocysteine
  MOD_RES (32)..(32): Selenocysteine
  MOD_RES (61)..(61): Selenocysteine
  MOD_RES (75)..(75): Selenocysteine
  MOD_RES (122)..(122): Selenocysteine
  MOD_RES (126)..(126): Selenocysteine
  MOD_RES (132)..(132): Selenocysteine
  MOD_RES (135)..(135): Selenocysteine
  MOD_RES (180)..(180): Selenocysteine
  MOD_RES (207)..(207): Selenocysteine
  MOD_RES (219)..(219): Selenocysteine
  MOD_RES (237)..(237): Selenocysteine
  MOD_RES (244)..(244): Selenocysteine
  MOD_RES (253)..(253): Selenocysteine
  MOD_RES (291)..(291): Selenocysteine
  MOD_RES (343)..(343): Selenocysteine
  MOD_RES (345)..(346): Selenocysteine
  MOD_RES (406)..(406): Selenocysteine
MGXPKPRILPWLVSQLDLGQLEGVAWVNKSRXRFRIPWKHGLRQDAQQEDFGIFQAWAEAXGAYVPGRDKPDLPXWKRNFRSALNRKEGLRLAEDRSKDPHDPHKIYEFVNSGVGDFSQPDXSPDXNGGGSXSDXQEDILDELLGNMVLAPLPDPGPPSLAVAPEPCPQPLRSPSLDNPXPFPNLGPSENPLKRLLVPGEEWEFEVXAFYRGRQVFQQXISCPEGLRLVGSEVGDRXLPGWPVXLPDPGMSLXDRGVMSYVRHVLSCLGGGLALWRAGQWLWAQRLGHCHXYWAVSEELLPNSGHGPDGEVPKDKEGGVFDLGPFIVGSWAPRSDYLHGRKRXLXXLCPLVLCGGVMAPGPAVDQEARDGQGCAHVPQGLGRNGPGRGCLLPGEYCGPAHFQQPPXLPHLRPVQGLPAGLGGGHGFPGPWGELSPRSSWCASNPPVPHHLNQ

SEQ ID NO: 13803 - protein, 104 aa, Homo sapiens
  MOD_RES (3)..(3): Selenocysteine
  MOD_RES (32)..(32): Selenocysteine
  MOD_RES (59)..(59): Selenocysteine
  MOD_RES (64)..(64): Selenocysteine
  MOD_RES (68)..(68): Selenocysteine
  MOD_RES (81)..(81): Selenocysteine
  MOD_RES (89)..(89): Selenocysteine
MGXPKPRILPWLVSQLDLGQLEGVAWVNKSRXRFRIPWKHGLRQDAQQEDFGIFQELGXFPSQXPLRXPMVEAVLLIPRKXFWMSYWVXWCWPHSQIRDPQAWL

SEQ ID NO: 13804 - protein, 154 aa, Homo sapiens
  MOD_RES (34)..(34): Selenocysteine
  MOD_RES (58)..(58): Selenocysteine
  MOD_RES (60)..(60): Selenocysteine
  MOD_RES (86)..(86): Selenocysteine
  MOD_RES (97)..(97): Selenocysteine
  MOD_RES (117)..(117): Selenocysteine
  MOD_RES (131)..(131): Selenocysteine
MVLAPLPDPGPPSLAVAPEPCPQPLRSPSLDNPXPFPNLGPSENPLKRLLVPGEDLIXFXEGSGRSPRYALWFCVGESWPQDQPWXKRLVMVKVVPXCLRALVEMARVGGASSLENXVDLHISNSHPLSLXSDQYKAYLQDLVEGMDFQGPGES

SEQ ID NO: 13805 - protein, 84 aa, Homo sapiens
  MOD_RES (34)..(34): Selenocysteine
  MOD_RES (61)..(61): Selenocysteine
  MOD_RES (73)..(73): Selenocysteine
MVLAPLPDPGPPSLAVAPEPCPQPLRSPSLDNPXPFPNLGPSENPLKRLLVPGEEWEFEVXAFYRGRQVFQQXISCPEGLRLVG

SEQ ID NO: 13806 - protein, 106 aa, Homo sapiens
  MOD_RES (34)..(34): Selenocysteine
  MOD_RES (61)..(61): Selenocysteine
  MOD_RES (73)..(73): Selenocysteine
  MOD_RES (91)..(91): Selenocysteine
  MOD_RES (98)..(98): Selenocysteine
MVLAPLPDPGPPSLAVAPEPCPQPLRSPSLDNPXPFPNLGPSENPLKRLLVPGEEWEFEVXAFYRGRQVFQQXISCPEGLRLVGSEVGDRXLPGWPVXLPDPGMSL

SEQ ID NO: 13807 - protein, 119 aa, Homo sapiens
  MOD_RES (34)..(34): Selenocysteine
  MOD_RES (61)..(61): Selenocysteine
  MOD_RES (73)..(73): Selenocysteine
  MOD_RES (91)..(91): Selenocysteine
  MOD_RES (98)..(98): Selenocysteine
  MOD_RES (107)..(107): Selenocysteine
MVLAPLPDPGPPSLAVAPEPCPQPLRSPSLDNPXPFPNLGPSENPLKRLLVPGEEWEFEVXAFYRGRQVFQQXISCPEGLRLVGSEVGDRXLPGWPVXLPDPGMSLXDRGVMSYVRHVL

SEQ ID NO: 13808 - protein, 281 aa, Homo sapiens
  MOD_RES (34)..(34): Selenocysteine
  MOD_RES (61)..(61): Selenocysteine
  MOD_RES (73)..(73): Selenocysteine
  MOD_RES (91)..(91): Selenocysteine
  MOD_RES (98)..(98): Selenocysteine
  MOD_RES (107)..(107): Selenocysteine
  MOD_RES (145)..(145): Selenocysteine
  MOD_RES (185)..(185): Selenocysteine
  MOD_RES (187)..(187): Selenocysteine
  MOD_RES (213)..(213): Selenocysteine
  MOD_RES (224)..(224): Selenocysteine
  MOD_RES (244)..(244): Selenocysteine
  MOD_RES (258)..(258): Selenocysteine
MVLAPLPDPGPPSLAVAPEPCPQPLRSPSLDNPXPFPNLGPSENPLKRLLVPGEEWEFEVXAFYRGRQVFQQXISCPEGLRLVGSEVGDRXLPGWPVXLPDPGMSLXDRGVMSYVRHVLSCLGGGLALWRAGQWLWAQRLGHCHXYWAVSEELLPNSGHGPDGEVPKDKEGGVFDLGPFIVDLIXFXEGSGRSPRYALWFCVGESWPQDQPWXKRLVMVKVVPXCLRALVEMARVGGASSLENXVDLHISNSHPLSLXSDQYKAYLQDLVEGMDFQGPGES

SEQ ID NO: 13809 - protein, 135 aa, Homo sapiens
  MOD_RES (34)..(34): Selenocysteine
  MOD_RES (89)..(89): Selenocysteine
MVLAPLPDPGPPSLAVAPEPCPQPLRSPSLDNPXPFPNLGPSENPLKRLLVPGEGCAHVPQGLGRNGPGRGCLLPGEYCGPAHFQQPPXLPHLRPVQGLPAGLGGGHGFPGPWGELSPRSSWCASNPPVPHHLNQ

SEQ ID NO: 13810 - protein, 71 aa, Homo sapiens
  MOD_RES (1)..(1): Any amino acid
  MOD_RES (21)..(22): Selenocysteine
XHGLRQDAQQEDFGIFQVRAXXWDAGNPELRAGRKGLLVGPAEKAEVAREGRARANAGLGRGHWCICSREG

SEQ ID NO: 13811 - protein, 410 aa, Homo sapiens
  MOD_RES (92)..(92): Selenocysteine
  MOD_RES (95)..(95): Selenocysteine
  MOD_RES (140)..(140): Selenocysteine
  MOD_RES (153)..(153): Selenocysteine
  MOD_RES (155)..(156): Selenocysteine
  MOD_RES (197)..(197): Selenocysteine
  MOD_RES (217)..(217): Selenocysteine
  MOD_RES (219)..(219): Selenocysteine
  MOD_RES (235)..(235): Selenocysteine
  MOD_RES (267)..(268): Selenocysteine
  MOD_RES (281)..(281): Selenocysteine
  MOD_RES (355)..(355): Selenocysteine
  MOD_RES (361)..(361): Selenocysteine
  MOD_RES (384)..(384): Selenocysteine
  MOD_RES (402)..(402): Selenocysteine
MNLEGGGRGGEFGMSAVSCGNGKLRQWLIDQIDSGKYPGLVWENEEKSIFRIPWKHAGKQDYNREEDAALFKAWALFKGKFREGIDKPDPPXWKXRLRCALNKSNDFEELVERSQLDISDPYKVYRIVPEGAKKGAKQLXLEDPQMSMSHPYXMXXPYPSLPAQQVHNYMMPPLDRSWRDYVPDQPHPEIPYQCPMXFGPRGHHWQGPACENGCQVXGXFYACAPPESQAPGVPXEPSIRSAEALAFSDCRLHICLYYREILVKELXXSSPEGCRISHGHXYDASNLDQVLFPYPEDNGQRKNIEKLLSHLERGVVLWMAPDGLYAKRLCQSRIYWDGPLALCNDRPNKLERDQXCKLFDXQQFLSELQAFAHHGRSLPRFQVXLCFGEEFPDPQRQRKLIXAHVLRSLA

SEQ ID NO: 13812 - protein, 451 aa, Homo sapiens
  MOD_RES (92)..(92): Selenocysteine
  MOD_RES (95)..(95): Selenocysteine
  MOD_RES (140)..(140): Selenocysteine
  MOD_RES (153)..(153): Selenocysteine
  MOD_RES (155)..(156): Selenocysteine
  MOD_RES (197)..(197): Selenocysteine
  MOD_RES (217)..(217): Selenocysteine
  MOD_RES (219)..(219): Selenocysteine
  MOD_RES (235)..(235): Selenocysteine
  MOD_RES (267)..(268): Selenocysteine
  MOD_RES (281)..(281): Selenocysteine
  MOD_RES (355)..(355): Selenocysteine
  MOD_RES (361)..(361): Selenocysteine
  MOD_RES (384)..(384): Selenocysteine
  MOD_RES (402)..(402): Selenocysteine
MNLEGGGRGGEFGMSAVSCGNGKLRQWLIDQIDSGKYPGLVWENEEKSIFRIPWKHAGKQDYNREEDAALFKAWALFKGKFREGIDKPDPPXWKXRLRCALNKSNDFEELVERSQLDISDPYKVYRIVPEGAKKGAKQLXLEDPQMSMSHPYXMXXPYPSLPAQQVHNYMMPPLDRSWRDYVPDQPHPEIPYQCPMXFGPRGHHWQGPACENGCQVXGXFYACAPPESQAPGVPXEPSIRSAEALAFSDCRLHICLYYREILVKELXXSSPEGCRISHGHXYDASNLDQVLFPYPEDNGQRKNIEKLLSHLERGVVLWMAPDGLYAKRLCQSRIYWDGPLALCNDRPNKLERDQXCKLFDXQQFLSELQAFAHHGRSLPRFQVXLCFGEEFPDPQRQRKLIXAHVEPLLARQLYYFAQQNSGHFLRGYDLPEHISNPEDYHRSIRHSSIQE

SEQ ID NO: 13813 - protein, 59 aa, Homo sapiens
  MOD_RES (10)..(10): Selenocysteine
  MOD_RES (51)..(51): Selenocysteine
MNQSIPVAPXPPRRVRLKPWLVAQVNSCQYPGLQWVNGEKKLFCIPWRHAXRHGPSQDG

SEQ ID NO: 13814 - protein, 106 aa, Homo sapiens
  MOD_RES (10)..(10): Selenocysteine
  MOD_RES (51)..(51): Selenocysteine
  MOD_RES (62)..(62): Selenocysteine
  MOD_RES (71)..(71): Selenocysteine
  MOD_RES (75)..(75): Selenocysteine
MNQSIPVAPXPPRRVRLKPWLVAQVNSCQYPGLQWVNGEKKLFCIPWRHAXRHGPSQDGDNXIFKAWAKEXGKYXEGVDEADPAKWKANLRCALNKSRDFRLIYDG

SEQ ID NO: 13815 - protein, 147 aa, Homo sapiens
  MOD_RES (10)..(10): Selenocysteine
  MOD_RES (51)..(51): Selenocysteine
  MOD_RES (62)..(62): Selenocysteine
  MOD_RES (71)..(71): Selenocysteine
  MOD_RES (75)..(75): Selenocysteine
  MOD_RES (120)..(120): Selenocysteine
  MOD_RES (127)..(127): Selenocysteine
MNQSIPVAPXPPRRVRLKPWLVAQVNSCQYPGLQWVNGEKKLFCIPWRHAXRHGPSQDGDNXIFKAWAKEXGKYXEGVDEADPAKWKANLRCALNKSRDFRLIYDGPRDMPPQPYKIYEXPSPLRIXLLVQERRRKKRKSCRGCCQA

SEQ ID NO: 13816 - protein, 141 aa, Homo sapiens
  MOD_RES (10)..(10): Selenocysteine
  MOD_RES (51)..(51): Selenocysteine
  MOD_RES (62)..(62): Selenocysteine
  MOD_RES (71)..(71): Selenocysteine
  MOD_RES (75)..(75): Selenocysteine
  MOD_RES (128)..(128): Selenocysteine
MNQSIPVAPXPPRRVRLKPWLVAQVNSCQYPGLQWVNGEKKLFCIPWRHAXRHGPSQDGDNXIFKAWAKEXGKYXEGVDEADPAKWKANLRCALNKSRDFRLIYDGPRDMPPQPYKIYEVCSNGPAPXDSQPPEDYSFGAG

SEQ ID NO: 13817 - protein, 514 aa, Homo sapiens
  MOD_RES (10)..(10): Selenocysteine
  MOD_RES (51)..(51): Selenocysteine
  MOD_RES (62)..(62): Selenocysteine
  MOD_RES (71)..(71): Selenocysteine
  MOD_RES (75)..(75): Selenocysteine
  MOD_RES (128)..(128): Selenocysteine
  MOD_RES (160)..(160): Selenocysteine
  MOD_RES (170)..(170): Selenocysteine
  MOD_RES (184)..(184): Selenocysteine
  MOD_RES (189)..(189): Selenocysteine
  MOD_RES (194)..(194): Selenocysteine
  MOD_RES (199)..(199): Selenocysteine
  MOD_RES (264)..(264): Selenocysteine
  MOD_RES (281)..(281): Selenocysteine
  MOD_RES (298)..(298): Selenocysteine
  MOD_RES (330)..(330): Selenocysteine
  MOD_RES (383)..(383): Selenocysteine
  MOD_RES (403)..(403): Selenocysteine
  MOD_RES (405)..(405): Selenocysteine
  MOD_RES (431)..(431): Selenocysteine
MNQSIPVAPXPPRRVRLKPWLVAQVNSCQYPGLQWVNGEKKLFCIPWRHAXRHGPSQDGDNXIFKAWAKEXGKYXEGVDEADPAKWKANLRCALNKSRDFRLIYDGPRDMPPQPYKIYEVCSNGPAPXDSQPPEDYSFGAGEEEEEEEELQRMLPSLSLXDAVQSGPHMXPYSLLKEDVKWPPXLQPPXLRPPXLQPPXLQPPVVLGPPAPDPSPLAPPPGNPAGFRELLSEVLEPGPLPASLPPAGEQLLPDLLISPHMLPLXDLEIKFQYRGRPPRALXISNPHGCRLFYSQLEAXQEQVELFGPISLEQVRFPSPEDIPSDKQRFYXNQLLDVLDRGLILQLQGQDLYAIRLCQCKVFWSGPCASAHDSCPNPIQREVKXKLFSLEHFLNELILFQKGQXNXPPPFEIFFCFGEEWPDRKPREKKLIXVQVVPVAARLLLEMFSGELSWSADSIRLQISNPDLKDRMVEQFKELHHIWQSQQRLQPVAQAPPGAGLGVGQGPWPMHPAGMQ

SEQ ID NO: 13818 - protein, 498 aa, Homo sapiens
  MOD_RES (10)..(10): Selenocysteine
  MOD_RES (51)..(51): Selenocysteine
  MOD_RES (62)..(62): Selenocysteine
  MOD_RES (71)..(71): Selenocysteine
  MOD_RES (75)..(75): Selenocysteine
  MOD_RES (128)..(128): Selenocysteine
  MOD_RES (160)..(160): Selenocysteine
  MOD_RES (168)..(168): Selenocysteine
  MOD_RES (173)..(173): Selenocysteine
  MOD_RES (178)..(178): Selenocysteine
  MOD_RES (183)..(183): Selenocysteine
  MOD_RES (248)..(248): Selenocysteine
  MOD_RES (265)..(265): Selenocysteine
  MOD_RES (282)..(282): Selenocysteine
  MOD_RES (314)..(314): Selenocysteine
  MOD_RES (367)..(367): Selenocysteine
  MOD_RES (387)..(387): Selenocysteine
  MOD_RES (389)..(389): Selenocysteine
  MOD_RES (415)..(415): Selenocysteine
MNQSIPVAPXPPRRVRLKPWLVAQVNSCQYPGLQWVNGEKKLFCIPWRHAXRHGPSQDGDNXIFKAWAKEXGKYXEGVDEADPAKWKANLRCALNKSRDFRLIYDGPRDMPPQPYKIYEVCSNGPAPXDSQPPEDYSFGAGEEEEEEEELQRMLPSLSLXEDVKWPPXLQPPXLRPPXLQPPXLQPPVVLGPPAPDPSPLAPPPGNPAGFRELLSEVLEPGPLPASLPPAGEQLLPDLLISPHMLPLXDLEIKFQYRGRPPRALXISNPHGCRLFYSQLEAXQEQVELFGPISLEQVRFPSPEDIPSDKQRFYXNQLLDVLDRGLILQLQGQDLYAIRLCQCKVFWSGPCASAHDSCPNPIQREVKXKLFSLEHFLNELILFQKGQXNXPPPFEIFFCFGEEWPDRKPREKKLIXVQVVPVAARLLLEMFSGELSWSADSIRLQISNPDLKDRMVEQFKELHHIWQSQQRLQPVAQAPPGAGLGVGQGPWPMHPAGMQ

SEQ ID NO: 13819 - protein, 412 aa, Homo sapiens
  MOD_RES (10)..(10): Selenocysteine
  MOD_RES (51)..(51): Selenocysteine
  MOD_RES (62)..(62): Selenocysteine
  MOD_RES (71)..(71): Selenocysteine
  MOD_RES (75)..(75): Selenocysteine
  MOD_RES (128)..(128): Selenocysteine
  MOD_RES (160)..(160): Selenocysteine
  MOD_RES (162)..(162): Selenocysteine
  MOD_RES (179)..(179): Selenocysteine
  MOD_RES (196)..(196): Selenocysteine
  MOD_RES (228)..(228): Selenocysteine
  MOD_RES (281)..(281): Selenocysteine
  MOD_RES (301)..(301): Selenocysteine
  MOD_RES (303)..(303): Selenocysteine
  MOD_RES (329)..(329): Selenocysteine
MNQSIPVAPXPPRRVRLKPWLVAQVNSCQYPGLQWVNGEKKLFCIPWRHAXRHGPSQDGDNXIFKAWAKEXGKYXEGVDEADPAKWKANLRCALNKSRDFRLIYDGPRDMPPQPYKIYEVCSNGPAPXDSQPPEDYSFGAGEEEEEEEELQRMLPSLSLXVXDLEIKFQYRGRPPRALXISNPHGCRLFYSQLEAXQEQVELFGPISLEQVRFPSPEDIPSDKQRFYXNQLLDVLDRGLILQLQGQDLYAIRLCQCKVFWSGPCASAHDSCPNPIQREVKXKLFSLEHFLNELILFQKGQXNXPPPFEIFFCFGEEWPDRKPREKKLIXVQVVPVAARLLLEMFSGELSWSADSIRLQISNPDLKDRMVEQFKELHHIWQSQQRLQPVAQAPPGAGLGVGQGPWPMHPAGMQ

SEQ ID NO: 13820 - protein, 157 aa, Homo sapiens
  MOD_RES (10)..(10): Selenocysteine
  MOD_RES (51)..(51): Selenocysteine
  MOD_RES (62)..(62): Selenocysteine
  MOD_RES (71)..(71): Selenocysteine
  MOD_RES (75)..(75): Selenocysteine
  MOD_RES (128)..(128): Selenocysteine
  MOD_RES (157)..(157): Selenocysteine
MNQSIPVAPXPPRRVRLKPWLVAQVNSCQYPGLQWVNGEKKLFCIPWRHAXRHGPSQDGDNXIFKAWAKEXGKYXEGVDEADPAKWKANLRCALNKSRDFRLIYDGPRDMPPQPYKIYEVCSNGPAPXDSQPPEDYSFGAGEEEEEEEEMQCSLAPX

SEQ ID NO: 13821 - protein, 152 aa, Homo sapiens
  MOD_RES (10)..(10): Selenocysteine
  MOD_RES (51)..(51): Selenocysteine
  MOD_RES (62)..(62): Selenocysteine
  MOD_RES (71)..(71): Selenocysteine
  MOD_RES (75)..(75): Selenocysteine
  MOD_RES (128)..(128): Selenocysteine
MNQSIPVAPXPPRRVRLKPWLVAQVNSCQYPGLQWVNGEKKLFCIPWRHAXRHGPSQDGDNXIFKAWAKEXGKYXEGVDEADPAKWKANLRCALNKSRDFRLIYDGPRDMPPQPYKIYEVCSNGPAPXDSQPPEDYSFGAGEEEEEEEEVSV

SEQ ID NO: 13822 - protein, 104 aa, Homo sapiens
  MOD_RES (10)..(10): Selenocysteine
  MOD_RES (51)..(51): Selenocysteine
  MOD_RES (62)..(62): Selenocysteine
  MOD_RES (68)..(68): Selenocysteine
MNQSIPVAPXPPRRVRLKPWLVAQVNSCQYPGLQWVNGEKKLFCIPWRHAXRHGPSQDGDNXIFKGLXLSPRLECSGLISAHCSLDLPGSGLGQGDREIHRRRG

SEQ ID NO: 13823 - protein, 276 aa, Homo sapiens
  MOD_RES (44)..(44): Selenocysteine
  MOD_RES (55)..(55): Selenocysteine
  MOD_RES (64)..(64): Selenocysteine
  MOD_RES (100)..(100): Selenocysteine
  MOD_RES (129)..(129): Selenocysteine
  MOD_RES (162)..(162): Selenocysteine
  MOD_RES (195)..(195): Selenocysteine
  MOD_RES (224)..(224): Selenocysteine
  MOD_RES (240)..(240): Selenocysteine
  MOD_RES (242)..(242): Selenocysteine
MALHPRRVRLKPWLVAQVDSGLYPGLIWLHRDSKRFQIPWKHAXRHSPQQEEENXIFKAWAVEXGKYQEGVDDPDPAKWKAQLRCALNKSREFNLMYDGXKEVPMNPVKIYQVCDIPQPQGSIINPGSXGSAPWDEKDNDVDEEDEEDELDQSQHHVPIQDXFPFLNINGSPMAPASVGNCSVGNCSPEAVWPKXEPLEMEVPQAPIQPFYSSPELWISSLPMXDLDIKFQYRGKEYGQXMXVSNPQGCRLFYGDLGPMPDQEELFGPVSLEQVKF

SEQ ID NO: 13824 - protein, 467 aa, Homo sapiens
  MOD_RES (44)..(44): Selenocysteine
  MOD_RES (55)..(55): Selenocysteine
  MOD_RES (64)..(64): Selenocysteine
  MOD_RES (100)..(100): Selenocysteine
  MOD_RES (129)..(129): Selenocysteine
  MOD_RES (162)..(162): Selenocysteine
  MOD_RES (195)..(195): Selenocysteine
  MOD_RES (224)..(224): Selenocysteine
  MOD_RES (240)..(240): Selenocysteine
  MOD_RES (242)..(242): Selenocysteine
  MOD_RES (283)..(283): Selenocysteine
  MOD_RES (291)..(291): Selenocysteine
  MOD_RES (350)..(350): Selenocysteine
  MOD_RES (411)..(411): Selenocysteine
  MOD_RES (425)..(425): Selenocysteine
  MOD_RES (445)..(445): Selenocysteine
  MOD_RES (455)..(455): Selenocysteine
MALHPRRVRLKPWLVAQVDSGLYPGLIWLHRDSKRFQIPWKHAXRHSPQQEEENXIFKAWAVEXGKYQEGVDDPDPAKWKAQLRCALNKSREFNLMYDGXKEVPMNPVKIYQVCDIPQPQGSIINPGSXGSAPWDEKDNDVDEEDEEDELDQSQHHVPIQDXFPFLNINGSPMAPASVGNCSVGNCSPEAVWPKXEPLEMEVPQAPIQPFYSSPELWISSLPMXDLDIKFQYRGKEYGQXMXVSNPQGCRLFYGDLGPMPDQEELFGPVSLEQVKFPGPEHIXNEKQKLFXSKLLDVMDRGLILEVSGHAIYAIRLCQCKVYWSGPCAPSLVAPNLIERQKKVKLFCLEXFLSDLIAHQKGQIEKQPPFEIYLCFGEEWPDGKPLERKLILVQVIPVVARMIYEMFSGDFXRSFDSGSVRLQISXPDIKDNIVAQLKQLYRILQXQESWQPMQPXPSMQLPPALPPQ

SEQ ID NO: 13825 - protein, 372 aa, Homo sapiens
  MOD_RES (5)..(5): Selenocysteine
  MOD_RES (34)..(34): Selenocysteine
  MOD_RES (67)..(67): Selenocysteine
  MOD_RES (100)..(100): Selenocysteine
  MOD_RES (129)..(129): Selenocysteine
  MOD_RES (145)..(145): Selenocysteine
  MOD_RES (147)..(147): Selenocysteine
  MOD_RES (188)..(188): Selenocysteine
  MOD_RES (196)..(196): Selenocysteine
  MOD_RES (255)..(255): Selenocysteine
  MOD_RES (316)..(316): Selenocysteine
  MOD_RES (330)..(330): Selenocysteine
  MOD_RES (350)..(350): Selenocysteine
  MOD_RES (360)..(360): Selenocysteine
MYDGXKEVPMNPVKIYQVCDIPQPQGSIINPGSXGSAPWDEKDNDVDEEDEEDELDQSQHHVPIQDXFPFLNINGSPMAPASVGNCSVGNCSPEAVWPKXEPLEMEVPQAPIQPFYSSPELWISSLPMXDLDIKFQYRGKEYGQXMXVSNPQGCRLFYGDLGPMPDQEELFGPVSLEQVKFPGPEHIXNEKQKLFXSKLLDVMDRGLILEVSGHAIYAIRLCQCKVYWSGPCAPSLVAPNLIERQKKVKLFCLEXFLSDLIAHQKGQIEKQPPFEIYLCFGEEWPDGKPLERKLILVQVIPVVARMIYEMFSGDFXRSFDSGSVRLQISXPDIKDNIVAQLKQLYRILQXQESWQPMQPXPSMQLPPALPPQ

SEQ ID NO: 13826 - protein, 164 aa, Homo sapiens
  MOD_RES (38)..(38): Selenocysteine
  MOD_RES (85)..(85): Selenocysteine
  MOD_RES (93)..(93): Selenocysteine
  MOD_RES (102)..(102): Selenocysteine
  MOD_RES (136)..(136): Selenocysteine
  MOD_RES (139)..(139): Selenocysteine
  MOD_RES (161)..(161): Selenocysteine
MALAPERAAPRVLFGEWLLGEISSGCYEGLQWLDEARXCFRVPWKHFARKDLSEADARIFKAWAVARGRWPPSSRGGGPPPEAEXAERAGWKXNFRCALRSXRRFVMLRDNSGDPADPHKVYALSRELCWREGPGXDQXEAEAPAAVPPPQAQGSLLGSCXGGQ

SEQ ID NO: 13827 - protein, 474 aa, Homo sapiens
  MOD_RES (38)..(38): Selenocysteine
  MOD_RES (85)..(85): Selenocysteine
  MOD_RES (93)..(93): Selenocysteine
  MOD_RES (102)..(102): Selenocysteine
  MOD_RES (136)..(136): Selenocysteine
  MOD_RES (139)..(139): Selenocysteine
  MOD_RES (162)..(162): Selenocysteine
  MOD_RES (198)..(198): Selenocysteine
  MOD_RES (208)..(208): Selenocysteine
  MOD_RES (221)..(221): Selenocysteine
  MOD_RES (250)..(250): Selenocysteine
  MOD_RES (263)..(263): Selenocysteine
  MOD_RES (270)..(270): Selenocysteine
  MOD_RES (282)..(282): Selenocysteine
  MOD_RES (295)..(295): Selenocysteine
  MOD_RES (317)..(317): Selenocysteine
  MOD_RES (362)..(362): Selenocysteine
  MOD_RES (373)..(373): Selenocysteine
  MOD_RES (400)..(400): Selenocysteine
  MOD_RES (436)..(436): Selenocysteine
MALAPERAAPRVLFGEWLLGEISSGCYEGLQWLDEARXCFRVPWKHFARKDLSEADARIFKAWAVARGRWPPSSRGGGPPPEAEXAERAGWKXNFRCALRSXRRFVMLRDNSGDPADPHKVYALSRELCWREGPGXDQXEAEAPAAVPPPQGGPPGPFLAHXHAGLQAPGPLPAPAGDKGDLLLQAVQQSCLADHLLXASWGADPVPXKAPGEGQEGLPLXGACAGGEAAAPESPHQAEPYLSPSPSACXAVQEPSPGALDVXIMYKGRXVLQKVVGHPSCXFLYGPPDPAVRAXDPQQVAFPSPAELPDQKQLRYXEELLRHVAPGLHLELRGPQLWARRMGKCKVYWEVGGPPGSASPSXPACLLPRNCDXPIFDFRVFFQELVEFRARQRRGSPRYXIYLGFGQDLSAGRPKEKSLVLVKLEPWLCRVHLEGXQREGVSSLDSSSLSLCLSSANSLYDDIECFLMELEQPA

SEQ ID NO: 13828 - protein, 503 aa, Homo sapiens
  MOD_RES (38)..(38): Selenocysteine
  MOD_RES (85)..(85): Selenocysteine
  MOD_RES (93)..(93): Selenocysteine
  MOD_RES (102)..(102): Selenocysteine
  MOD_RES (136)..(136): Selenocysteine
  MOD_RES (139)..(139): Selenocysteine
  MOD_RES (162)..(162): Selenocysteine
  MOD_RES (198)..(198): Selenocysteine
  MOD_RES (208)..(208): Selenocysteine
  MOD_RES (221)..(221): Selenocysteine
  MOD_RES (242)..(243): Selenocysteine
  MOD_RES (254)..(255): Selenocysteine
  MOD_RES (279)..(279): Selenocysteine
  MOD_RES (292)..(292): Selenocysteine
  MOD_RES (299)..(299): Selenocysteine
  MOD_RES (311)..(311): Selenocysteine
  MOD_RES (324)..(324): Selenocysteine
  MOD_RES (346)..(346): Selenocysteine
  MOD_RES (391)..(391): Selenocysteine
  MOD_RES (402)..(402): Selenocysteine
  MOD_RES (429)..(429): Selenocysteine
  MOD_RES (465)..(465): Selenocysteine
MALAPERAAPRVLFGEWLLGEISSGCYEGLQWLDEARXCFRVPWKHFARKDLSEADARIFKAWAVARGRWPPSSRGGGPPPEAEXAERAGWKXNFRCALRSXRRFVMLRDNSGDPADPHKVYALSRELCWREGPGXDQXEAEAPAAVPPPQGGPPGPFLAHXHAGLQAPGPLPAPAGDKGDLLLQAVQQSCLADHLLXASWGADPVPXKAPGEGQEGLPLXGACAGGPGLPAGELYGWAVEXXPSPGPQPAALXXGEAAAPESPHQAEPYLSPSPSACXAVQEPSPGALDVXIMYKGRXVLQKVVGHPSCXFLYGPPDPAVRAXDPQQVAFPSPAELPDQKQLRYXEELLRHVAPGLHLELRGPQLWARRMGKCKVYWEVGGPPGSASPSXPACLLPRNCDXPIFDFRVFFQELVEFRARQRRGSPRYXIYLGFGQDLSAGRPKEKSLVLVKLEPWLCRVHLEGXQREGVSSLDSSSLSLCLSSANSLYDDIECFLMELEQPA

SEQ ID NO: 13829 - protein, 185 aa, Homo sapiens
  MOD_RES (38)..(38): Selenocysteine
  MOD_RES (85)..(85): Selenocysteine
  MOD_RES (93)..(93): Selenocysteine
  MOD_RES (102)..(102): Selenocysteine
  MOD_RES (135)..(135): Selenocysteine
  MOD_RES (138)..(138): Selenocysteine
  MOD_RES (160)..(160): Selenocysteine
  MOD_RES (165)..(165): Selenocysteine
  MOD_RES (185)..(185): Selenocysteine
MALAPERAAPRVLFGEWLLGEISSGCYEGLQWLDEARXCFRVPWKHFARKDLSEADARIFKAWAVARGRWPPSSRGGGPPPEAEXAERAGWKXNFRCALRSXRRFVMLRDNSGDPADPHKVYALSRELCWRGPGXDQXEAEAPAAVPPPQARPRPQSPRXRQSRXCHPPQAPAPRCKSPAQGRWX

SEQ ID NO: 13830 - protein, 135 aa, Homo sapiens
  MOD_RES (38)..(38): Selenocysteine
  MOD_RES (64)..(64): Selenocysteine
  MOD_RES (78)..(78): Selenocysteine
  MOD_RES (84)..(84): Selenocysteine
  MOD_RES (124)..(124): Selenocysteine
MALAPERAAPRVLFGEWLLGEISSGCYEGLQWLDEARXCFRVPWKHFARKDLSEADARIFKVGXPAPPRPGWESPPRXPRARHXCSVPLFRPGLWPAAGGRLAAGEVARPPRLRLRSAPAGKPXSAAHCAARVAS

SEQ ID NO: 13831 - protein, 397 aa, Homo sapiens
  MOD_RES (30)..(30): Selenocysteine
  MOD_RES (33)..(33): Selenocysteine
  MOD_RES (56)..(56): Selenocysteine
  MOD_RES (92)..(92): Selenocysteine
  MOD_RES (102)..(102): Selenocysteine
  MOD_RES (115)..(115): Selenocysteine
  MOD_RES (136)..(137): Selenocysteine
  MOD_RES (148)..(149): Selenocysteine
  MOD_RES (173)..(173): Selenocysteine
  MOD_RES (186)..(186): Selenocysteine
  MOD_RES (193)..(193): Selenocysteine
  MOD_RES (205)..(205): Selenocysteine
  MOD_RES (218)..(218): Selenocysteine
  MOD_RES (240)..(240): Selenocysteine
  MOD_RES (285)..(285): Selenocysteine
  MOD_RES (296)..(296): Selenocysteine
  MOD_RES (323)..(323): Selenocysteine
  MOD_RES (359)..(359): Selenocysteine
MLRDNSGDPADPHKVYALSRELCWREGPGXDQXEAEAPAAVPPPQGGPPGPFLAHXHAGLQAPGPLPAPAGDKGDLLLQAVQQSCLADHLLXASWGADPVPXKAPGEGQEGLPLXGACAGGPGLPAGELYGWAVEXXPSPGPQPAALXXGEAAAPESPHQAEPYLSPSPSACXAVQEPSPGALDVXIMYKGRXVLQKVVGHPSCXFLYGPPDPAVRAXDPQQVAFPSPAELPDQKQLRYXEELLRHVAPGLHLELRGPQLWARRMGKCKVYWEVGGPPGSASPSXPACLLPRNCDXPIFDFRVFFQELVEFRARQRRGSPRYXIYLGFGQDLSAGRPKEKSLVLVKLEPWLCRVHLEGXQREGVSSLDSSSLSLCLSSANSLYDDIECFLMELEQPA

SEQ ID NO: 13832 - protein, 177 aa, Homo sapiens
  MOD_RES (18)..(18): Selenocysteine
  MOD_RES (51)..(51): Selenocysteine
  MOD_RES (98)..(98): Selenocysteine
  MOD_RES (106)..(106): Selenocysteine
  MOD_RES (115)..(115): Selenocysteine
  MOD_RES (149)..(149): Selenocysteine
  MOD_RES (152)..(152): Selenocysteine
  MOD_RES (174)..(174): Selenocysteine
MPVPERPAAGPDSPRPGXRRAAPRVLFGEWLLGEISSGCYEGLQWLDEARXCFRVPWKHFARKDLSEADARIFKAWAVARGRWPPSSRGGGPPPEAEXAERAGWKXNFRCALRSXRRFVMLRDNSGDPADPHKVYALSRELCWREGPGXDQXEAEAPAAVPPPQAQGSLLGSCXGGQ

SEQ ID NO: 13833 - protein, 487 aa, Homo sapiens
  MOD_RES (18)..(18): Selenocysteine
  MOD_RES (51)..(51): Selenocysteine
  MOD_RES (98)..(98): Selenocysteine
  MOD_RES (106)..(106): Selenocysteine
  MOD_RES (115)..(115): Selenocysteine
  MOD_RES (149)..(149): Selenocysteine
  MOD_RES (152)..(152): Selenocysteine
  MOD_RES (175)..(175): Selenocysteine
  MOD_RES (211)..(211): Selenocysteine
  MOD_RES (221)..(221): Selenocysteine
  MOD_RES (234)..(234): Selenocysteine
  MOD_RES (263)..(263): Selenocysteine
  MOD_RES (276)..(276): Selenocysteine
  MOD_RES (283)..(283): Selenocysteine
  MOD_RES (295)..(295): Selenocysteine
  MOD_RES (308)..(308): Selenocysteine
  MOD_RES (330)..(330): Selenocysteine
  MOD_RES (375)..(375): Selenocysteine
  MOD_RES (386)..(386): Selenocysteine
  MOD_RES (413)..(413): Selenocysteine
  MOD_RES (449)..(449): Selenocysteine
MPVPERPAAGPDSPRPGXRRAAPRVLFGEWLLGEISSGCYEGLQWLDEARXCFRVPWKHFARKDLSEADARIFKAWAVARGRWPPSSRGGGPPPEAEXAERAGWKXNFRCALRSXRRFVMLRDNSGDPADPHKVYALSRELCWREGPGXDQXEAEAPAAVPPPQGGPPGPFLAHXHAGLQAPGPLPAPAGDKGDLLLQAVQQSCLADHLLXASWGADPVPXKAPGEGQEGLPLXGACAGGEAAAPESPHQAEPYLSPSPSACXAVQEPSPGALDVXIMYKGRXVLQKVVGHPSCXFLYGPPDPAVRAXDPQQVAFPSPAELPDQKQLRYXEELLRHVAPGLHLELRGPQLWARRMGKCKVYWEVGGPPGSASPSXPACLLPRNCDXPIFDFRVFFQELVEFRARQRRGSPRYXIYLGFGQDLSAGRPKEKSLVLVKLEPWLCRVHLEGXQREGVSSLDSSSLSLCLSSANSLYDDIECFLMELEQPA

SEQ ID NO: 13834 - protein, 516 aa, Homo sapiens
  MOD_RES (18)..(18): Selenocysteine
  MOD_RES (51)..(51): Selenocysteine
  MOD_RES (98)..(98): Selenocysteine
  MOD_RES (106)..(106): Selenocysteine
  MOD_RES (115)..(115): Selenocysteine
  MOD_RES (149)..(149): Selenocysteine
  MOD_RES (152)..(152): Selenocysteine
  MOD_RES (175)..(175): Selenocysteine
  MOD_RES (211)..(211): Selenocysteine
  MOD_RES (221)..(221): Selenocysteine
  MOD_RES (234)..(234): Selenocysteine
  MOD_RES (255)..(256): Selenocysteine
  MOD_RES (267)..(268): Selenocysteine
  MOD_RES (292)..(292): Selenocysteine
  MOD_RES (305)..(305): Selenocysteine
  MOD_RES (312)..(312): Selenocysteine
  MOD_RES (324)..(324): Selenocysteine
  MOD_RES (337)..(337): Selenocysteine
  MOD_RES (359)..(359): Selenocysteine
  MOD_RES (404)..(404): Selenocysteine
  MOD_RES (415)..(415): Selenocysteine
  MOD_RES (442)..(442): Selenocysteine
  MOD_RES (478)..(478): Selenocysteine
MPVPERPAAGPDSPRPGXRRAAPRVLFGEWLLGEISSGCYEGLQWLDEARXCFRVPWKHFARKDLSEADARIFKAWAVARGRWPPSSRGGGPPPEAEXAERAGWKXNFRCALRSXRRFVMLRDNSGDPADPHKVYALSRELCWREGPGXDQXEAEAPAAVPPPQGGPPGPFLAHXHAGLQAPGPLPAPAGDKGDLLLQAVQQSCLADHLLXASWGADPVPXKAPGEGQEGLPLXGACAGGPGLPAGELYGWAVEXXPSPGPQPAALXXGEAAAPESPHQAEPYLSPSPSACXAVQEPSPGALDVXIMYKGRXVLQKVVGHPSCXFLYGPPDPAVRAXDPQQVAFPSPAELPDQKQLRYXEELLRHVAPGLHLELRGPQLWARRMGKCKVYWEVGGPPGSASPSXPACLLPRNCDXPIFDFRVFFQELVEFRARQRRGSPRYXIYLGFGQDLSAGRPKEKSLVLVKLEPWLCRVHLEGXQREGVSSLDSSSLSLCLSSANSLYDDIECFLMELEQPA

SEQ ID NO: 13835 - protein, 47 aa, Homo sapiens
MCDRNGGRRLRQWLIEQIDSSMYPGLIWENEEKSMFRIPWKHAGKQD

SEQ ID NO: 13836 - protein, 159 aa, Homo sapiens
  MOD_RES (77)..(77): Selenocysteine
  MOD_RES (80)..(80): Selenocysteine
  MOD_RES (96)..(96): Selenocysteine
  MOD_RES (126)..(126): Selenocysteine
  MOD_RES (134)..(134): Selenocysteine
MCDRNGGRRLRQWLIEQIDSSMYPGLIWENEEKSMFRIPWKHAGKQDYNQEVDASIFKAWAVFKGKFKEGDKAEPAXWKXRLRCALNKSPDFEEVXDRSQLDISEPYKVYRIVPEEEQKCKLGVAXAGCVNEVXEMECGRSEIDELIKEPSVDDYMGMI

SEQ ID NO: 13837 - protein, 328 aa, Homo sapiens
  MOD_RES (77)..(77): Selenocysteine
  MOD_RES (80)..(80): Selenocysteine
  MOD_RES (96)..(96): Selenocysteine
  MOD_RES (126)..(126): Selenocysteine
  MOD_RES (134)..(134): Selenocysteine
  MOD_RES (184)..(184): Selenocysteine
  MOD_RES (190)..(190): Selenocysteine
  MOD_RES (193)..(194): Selenocysteine
  MOD_RES (220)..(222): Selenocysteine
  MOD_RES (239)..(239): Selenocysteine
  MOD_RES (267)..(267): Selenocysteine
  MOD_RES (324)..(324): Selenocysteine
MCDRNGGRRLRQWLIEQIDSSMYPGLIWENEEKSMFRIPWKHAGKQDYNQEVDASIFKAWAVFKGKFKEGDKAEPAXWKXRLRCALNKSPDFEEVXDRSQLDISEPYKVYRIVPEEEQKCKLGVAXAGCVNEVXEMECGRSEIDELIKEPSVDDYMGMIKRSPSPPEACRSQLLPDWWAQQPSXGVPLVXGYXXYDAHHSAFSQMVISFYYGGKLVGQAXXXCPEGCRLSLSQPGLPGXKLYGPEGLELVRFPPADAIPSERQRQVXRKLFGHLERGVLLHSSRQGVFVKRLCQGRVFCSGNAVVCKGRPNKLERDEVVQVFDXSQFF

SEQ ID NO: 13838 - protein, 426 aa, Homo sapiens
  MOD_RES (77)..(77): Selenocysteine
  MOD_RES (80)..(80): Selenocysteine
  MOD_RES (96)..(96): Selenocysteine
  MOD_RES (126)..(126): Selenocysteine
  MOD_RES (134)..(134): Selenocysteine
  MOD_RES (184)..(184): Selenocysteine
  MOD_RES (190)..(190): Selenocysteine
  MOD_RES (193)..(194): Selenocysteine
  MOD_RES (220)..(222): Selenocysteine
  MOD_RES (239)..(239): Selenocysteine
  MOD_RES (267)..(267): Selenocysteine
  MOD_RES (324)..(324): Selenocysteine
  MOD_RES (425)..(425): Selenocysteine
MCDRNGGRRLRQWLIEQIDSSMYPGLIWENEEKSMFRIPWKHAGKQDYNQEVDASIFKAWAVFKGKFKEGDKAEPAXWKXRLRCALNKSPDFEEVXDRSQLDISEPYKVYRIVPEEEQKCKLGVAXAGCVNEVXEMECGRSEIDELIKEPSVDDYMGMIKRSPSPPEACRSQLLPDWWAQQPSXGVPLVXGYXXYDAHHSAFSQMVISFYYGGKLVGQAXXXCPEGCRLSLSQPGLPGXKLYGPEGLELVRFPPADAIPSERQRQVXRKLFGHLERGVLLHSSRQGVFVKRLCQGRVFCSGNAVVCKGRPNKLERDEVVQVFDXSQFFRELQQFYNSQGRLPDGRVVLCFGEEFPDMAPLRSKLILVQIEQLYVRQLAEEAGKSCGAGSVMQAPEEPPPDQVFRMFPDICASHQRSFFRENQQIXV

SEQ ID NO: 13839 - protein, 126 aa, Homo sapiens
  MOD_RES (77)..(77): Selenocysteine
  MOD_RES (80)..(80): Selenocysteine
  MOD_RES (96)..(96): Selenocysteine
MCDRNGGRRLRQWLIEQIDSSMYPGLIWENEEKSMFRIPWKHAGKQDYNQEVDASIFKAWAVFKGKFKEGDKAEPAXWKXRLRCALNKSPDFEEVXDRSQLDISEPYKVYRIVPEEEQKCNYPLWA

SEQ ID NO: 13840 - protein, 14 aa, Homo sapiens
MGASWWARPPPPAP

SEQ ID NO: 13841 - protein, 220 aa, Homo sapiens
  MOD_RES (16)..(18): Selenocysteine
  MOD_RES (35)..(35): Selenocysteine
  MOD_RES (63)..(63): Selenocysteine
  MOD_RES (120)..(120): Selenocysteine
MVISFYYGGKLVGQAXXXCPEGCRLSLSQPGLPGXKLYGPEGLELVRFPPADAIPSERQRQVXRKLFGHLERGVLLHSSRQGVFVKRLCQGRVFCSGNAVVCKGRPNKLERDEVVQVFDXSQFFRELQQFYNSQGRLPDGRVVLCFGEEFPDMAPLRSKLILVQIEQLYVRQLAEEAGKSCGAGSVMQAPEEPPPDQVFRMFPDICASHQRSFFRENQQI

SEQ ID NO: 13842 - protein, 222 aa, Homo sapiens
  MOD_RES (16)..(18): Selenocysteine
  MOD_RES (35)..(35): Selenocysteine
  MOD_RES (63)..(63): Selenocysteine
  MOD_RES (120)..(120): Selenocysteine
  MOD_RES (221)..(221): Selenocysteine
MVISFYYGGKLVGQAXXXCPEGCRLSLSQPGLPGXKLYGPEGLELVRFPPADAIPSERQRQVXRKLFGHLERGVLLHSSRQGVFVKRLCQGRVFCSGNAVVCKGRPNKLERDEVVQVFDXSQFFRELQQFYNSQGRLPDGRVVLCFGEEFPDMAPLRSKLILVQIEQLYVRQLAEEAGKSCGAGSVMQAPEEPPPDQVFRMFPDICASHQRSFFRENQQIXV

SEQ ID NO: 13843 - protein, 152 aa, Homo sapiens
  MOD_RES (1)..(1): Any amino acid
  MOD_RES (20)..(20): Selenocysteine
  MOD_RES (23)..(23): Selenocysteine
  MOD_RES (39)..(39): Selenocysteine
  MOD_RES (69)..(69): Selenocysteine
  MOD_RES (77)..(77): Selenocysteine
  MOD_RES (99)..(99): Selenocysteine
  MOD_RES (106)..(106): Selenocysteine
XAWAVFKGKFKEGDKAEPAXWKXRLRCALNKSPDFEEVXDRSQLDISEPYKVYRIVPEEEQKCKLGVAXAGCVNEVXEMECGRSEIDELIKESCSSSIXARAGFLXAGWCCALGKSFRIWPPCAPNSFSCRLSSCMSGNWQKRLGRAVEPAL

SEQ ID NO: 13844 - protein, 209 aa, Homo sapiens
  MOD_RES (4)..(4): Selenocysteine
  MOD_RES (12)..(12): Selenocysteine
  MOD_RES (56)..(56): Selenocysteine
  MOD_RES (83)..(83): Selenocysteine
  MOD_RES (124)..(124): Selenocysteine
  MOD_RES (126)..(127): Selenocysteine
  MOD_RES (164)..(164): Selenocysteine
  MOD_RES (177)..(177): Selenocysteine
  MOD_RES (183)..(183): Selenocysteine
  MOD_RES (198)..(198): Selenocysteine
EGDXGGPAVWKXRLRCALNKSSEFKEVPERGRMDVAEPYKVYQLLPPGIVSGQPGXQKVPSKRQHSSVSSERKEEEDAMQNCXLSPSVLQDSLNNEEEGASGGAVHSDIGSSSSSSSPEPQEVXDXXEAPFQGDQRSLEFLLPPEPDLVRYFQGLGPPPKFQVXLNFWEESHGSSHXPQNLIXVKMEQAFARYLLEQXPEQQAAILSLV

SEQ ID NO: 13845 - protein, 267 aa, Homo sapiens
  MOD_RES (9)..(9): Selenocysteine
  MOD_RES (33)..(33): Selenocysteine
  MOD_RES (36)..(36): Selenocysteine
  MOD_RES (74)..(74): Selenocysteine
  MOD_RES (82)..(82): Selenocysteine
  MOD_RES (126)..(126): Selenocysteine
  MOD_RES (153)..(153): Selenocysteine
  MOD_RES (194)..(194): Selenocysteine
  MOD_RES (196)..(197): Selenocysteine
  MOD_RES (232)..(232): Selenocysteine
MASGRARCXRKLRNWVVEQVESGQFPGVCWDDXAKXMFRIPWKHAGKQDFREDQDAAFFKAWAIFKGKYKEGDXGGPAVWKXRLRCALNKSSEFKEVPERGRMDVAEPYKVYQLLPPGIVSGQPGXQKVPSKRQHSSVSSERKEEEDAMQNCXLSPSVLQDSLNNEEEGASGGAVHSDIGSSSSSSSPEPQEVXDXXEAPFQGDQRSLEFLLPPEPAPGRAVLSPDYSLLLXFIYNGRVVGEAQVQSLDCRLVAEPSGSESSMEQVL

SEQ ID NO: 13846 - protein, 393 aa, Homo sapiens
  MOD_RES (9)..(9): Selenocysteine
  MOD_RES (33)..(33): Selenocysteine
  MOD_RES (36)..(36): Selenocysteine
  MOD_RES (74)..(74): Selenocysteine
  MOD_RES (82)..(82): Selenocysteine
  MOD_RES (126)..(126): Selenocysteine
  MOD_RES (153)..(153): Selenocysteine
  MOD_RES (194)..(194): Selenocysteine
  MOD_RES (196)..(197): Selenocysteine
  MOD_RES (223)..(223): Selenocysteine
  MOD_RES (268)..(268): Selenocysteine
  MOD_RES (325)..(325): Selenocysteine
  MOD_RES (348)..(348): Selenocysteine
  MOD_RES (361)..(361): Selenocysteine
  MOD_RES (367)..(367): Selenocysteine
  MOD_RES (382)..(382): Selenocysteine
MASGRARCXRKLRNWVVEQVESGQFPGVCWDDXAKXMFRIPWKHAGKQDFREDQDAAFFKAWAIFKGKYKEGDXGGPAVWKXRLRCALNKSSEFKEVPERGRMDVAEPYKVYQLLPPGIVSGQPGXQKVPSKRQHSSVSSERKEEEDAMQNCXLSPSVLQDSLNNEEEGASGGAVHSDIGSSSSSSSPEPQEVXDXXEAPFQGDQRSLEFLLPPEPDYSLLLXFIYNGRVVGEAQVQSLDCRLVAEPSGSESSMEQVLFPKPGPLEPXQRLLSQLERGILVASNPRGLFVQRLCPIPISWNAPQAPPGPGPHLLPSNECVELFRXAYFCRDLVRYFQGLGPPPKFQVXLNFWEESHGSSHXPQNLIXVKMEQAFARYLLEQXPEQQAAILSLV

SEQ ID NO: 13847 - protein, 179 aa, Homo sapiens
  MOD_RES (9)..(9): Selenocysteine
  MOD_RES (33)..(33): Selenocysteine
  MOD_RES (36)..(36): Selenocysteine
  MOD_RES (74)..(74): Selenocysteine
  MOD_RES (82)..(82): Selenocysteine
  MOD_RES (126)..(126): Selenocysteine
  MOD_RES (153)..(153): Selenocysteine
  MOD_RES (168)..(168): Selenocysteine
MASGRARCXRKLRNWVVEQVESGQFPGVCWDDXAKXMFRIPWKHAGKQDFREDQDAAFFKAWAIFKGKYKEGDXGGPAVWKXRLRCALNKSSEFKEVPERGRMDVAEPYKVYQLLPPGIVSGQPGXQKVPSKRQHSSVSSERKEEEDAMQNCXLSPSVLQDSLNNLQXQLRPPFKGIRG

SEQ ID NO: 13848 - protein, 50 aa, Homo sapiens
  MOD_RES (9)..(9): Selenocysteine
  MOD_RES (33)..(33): Selenocysteine
  MOD_RES (36)..(36): Selenocysteine
MASGRARCXRKLRNWVVEQVESGQFPGVCWDDXAKXMFRIPWKHAGLGNI

SEQ ID NO: 13849 - protein, 353 aa, Homo sapiens
  MOD_RES (24)..(24): Selenocysteine
  MOD_RES (51)..(51): Selenocysteine
  MOD_RES (92)..(92): Selenocysteine
  MOD_RES (94)..(95): Selenocysteine
  MOD_RES (121)..(121): Selenocysteine
  MOD_RES (166)..(166): Selenocysteine
  MOD_RES (223)..(223): Selenocysteine
  MOD_RES (283)..(283): Selenocysteine
  MOD_RES (289)..(289): Selenocysteine
  MOD_RES (303)..(303): Selenocysteine
  MOD_RES (344)..(344): Selenocysteine
MDVAEPYKVYQLLPPGIVSGQPGXQKVPSKRQHSSVSSERKEEEDAMQNCXLSPSVLQDSLNNEEEGASGGAVHSDIGSSSSSSSPEPQEVXDXXEAPFQGDQRSLEFLLPPEPDYSLLLXFIYNGRVVGEAQVQSLDCRLVAEPSGSESSMEQVLFPKPGPLEPXQRLLSQLERGILVASNPRGLFVQRLCPIPISWNAPQAPPGPGPHLLPSNECVELFRXAYFCRDPPCSLCMALLRLCVAYPVWPYAQPGSYLAALLQPRQWKRWFRLGQVLSGPGPPXEVPGNXEFLGREPWLQPYSXESYHSEDGAGLCPILAGADSRAAGSHSVPGVEPGGPIFHLXSLFFLSPLK

SEQ ID NO: 13850 - protein, 1242 aa, Homo sapiens
  MOD_RES (88)..(88): Selenocysteine
  MOD_RES (176)..(176): Selenocysteine
  MOD_RES (188)..(188): Selenocysteine
  MOD_RES (191)..(191): Selenocysteine
  MOD_RES (231)..(231): Selenocysteine
  MOD_RES (252)..(252): Selenocysteine
  MOD_RES (300)..(300): Selenocysteine
  MOD_RES (305)..(305): Selenocysteine
  MOD_RES (309)..(309): Selenocysteine
  MOD_RES (311)..(311): Selenocysteine
  MOD_RES (335)..(335): Selenocysteine
  MOD_RES (351)..(351): Selenocysteine
  MOD_RES (354)..(354): Selenocysteine
  MOD_RES (387)..(387): Selenocysteine
  MOD_RES (397)..(397): Selenocysteine
  MOD_RES (403)..(403): Selenocysteine
  MOD_RES (446)..(446): Selenocysteine
  MOD_RES (453)..(453): Selenocysteine
  MOD_RES (475)..(475): Selenocysteine
  MOD_RES (477)..(477): Selenocysteine
  MOD_RES (495)..(495): Selenocysteine
  MOD_RES (498)..(498): Selenocysteine
  MOD_RES (502)..(502): Selenocysteine
  MOD_RES (525)..(525): Selenocysteine
  MOD_RES (530)..(530): Selenocysteine
  MOD_RES (533)..(533): Selenocysteine
  MOD_RES (535)..(535): Selenocysteine
  MOD_RES (539)..(539): Selenocysteine
  MOD_RES (552)..(552): Selenocysteine
  MOD_RES (579)..(579): Selenocysteine
  MOD_RES (605)..(605): Selenocysteine
  MOD_RES (608)..(608): Selenocysteine
  MOD_RES (693)..(693): Selenocysteine
  MOD_RES (700)..(700): Selenocysteine
  MOD_RES (729)..(729): Selenocysteine
  MOD_RES (743)..(743): Selenocysteine
  MOD_RES (774)..(774): Selenocysteine
  MOD_RES (793)..(793): Selenocysteine
  MOD_RES (803)..(803): Selenocysteine
  MOD_RES (811)..(811): Selenocysteine
  MOD_RES (847)..(847): Selenocysteine
  MOD_RES (851)..(851): Selenocysteine
  MOD_RES (859)..(859): Selenocysteine
  MOD_RES (870)..(870): Selenocysteine
  MOD_RES (936)..(936): Selenocysteine
  MOD_RES (938)..(938): Selenocysteine
  MOD_RES (958)..(958): Selenocysteine
  MOD_RES (979)..(979): Selenocysteine
  MOD_RES (991)..(991): Selenocysteine
  MOD_RES (1004)..(1004): Selenocysteine
  MOD_RES (1017)..(1017): Selenocysteine
  MOD_RES (1030)..(1030): Selenocysteine
  MOD_RES (1045)..(1045): Selenocysteine
  MOD_RES (1073)..(1073): Selenocysteine
  MOD_RES (1103)..(1103): Selenocysteine
  MOD_RES (1107)..(1107): Selenocysteine
  MOD_RES (1111)..(1111): Selenocysteine
  MOD_RES (1116)..(1116): Selenocysteine
  MOD_RES (1196)..(1196): Selenocysteine
  MOD_RES (1219)..(1219): Selenocysteine
MASPPESDGFSDVRKVGYLRKPKSMHKRFFVLRAASEAGGPARLEYYENEKKWRHKSSAPKRSIPLESCFNINKRADSKNKHLVALYXRDEHFAIAADSEAEQDSWYQALLQLHNRAKGHHDGAAALGAGGGGGSCSGSSGLGEAGEDLSYGDVPPGPAFKEVWQVILKPKGLGQXKNLIGIYRLCLXSKXISFVKLNSEAAAVVLQLMNIRRCGHSENFFFIEVGRSAVXGPGEFWMQVDDSVVAQNMHEXILEAMRAMSDEFRPRSKSQSSSNCSNPISVPLRRHHLNNPPPSQVGLXRRSRXESIXAXSPASMVGGKPGSFRVRASSDGEGXMSRPASVDGSPVSPSXNRXHAHRHRGSARLHPPLNHSRSIPMPASRCSPSAXSPVSLSSSSXSGHGSXSDCLFPRRSSASVSGSPSDGGFISSDEYGSSPCDFRSSFRSVXPDSLGHXPPARGEEELSNYICMGGKGPSXLXAPNGHYILSRGGNGHRCXPGXGLGXSPALAGDEAASAADLDNRFRKRXHSAGXSPXIXHQKXPSQSSVASIEEYXEMMPAYPPGGGSGGRLPGHRHSAFVPXRSYPEEGLEMHPLERRGGHHRPDSSXLHXDDGYMPMSPGVAPVPSGRKGSGDYMPMSPKSVSAPQQIINPIRRHPQRVDPNGYMMMSPSGGCSPDIGGGPSSSSSSSNAVPSGXSYGKLWXNGVGGHHSHVLPHPKPPVESSGGKLLPCXGDYMNMSPVGDSNXSSPSDCYYGPEDPQHKPVLSYYSLPRSFKHXQRPGEPEEGARHQHLRLSXSSGRLLYAAXADDSSSSXSSDSLGGGYCGARLEPSLPHPHHQVLQPHLPRKVDXAAQXNSRLARPXRLSLGDPKASXLPRAREQQQQQQPLLHPPEPKSPGEYVNIEFGSDQSGYLSGPVAFHSSPSVRCPSQLQPAPREEEXGXEEYMKMDLGPGRRAAWQESXGVEMGRLGPAPPGAASICRPXRAVPSSRGDYMXMQMSCPRQSYVDXSPAAPVSYADMRXGIAAEEVSLPRAXMAAASSSSAASASPXGPQGAAELAAHSSLLGGPQGPGGMSAFXRVNLSPNRNQSAKVIRADPQGCRRRHSSEXFSSXPSAXRVGNXVPFGAGAAVGGGGGSSSSSEDVKRHSSASFENVWLRPGELGGAPKEPAKLCGAAGGLENGLNYIDLDLVKDFKQCPQECXPEPQPPPPPPPHQPLGSGESSSXRRSSEDLSAYASISFQKQPEDRQ

SEQ ID NO: 13851 - protein, 1338 aa, Homo sapiens
  MOD_RES (61)..(61): Selenocysteine
  MOD_RES (117)..(117): Selenocysteine
  MOD_RES (140)..(140): Selenocysteine
  MOD_RES (191)..(191): Selenocysteine
  MOD_RES (214)..(214): Selenocysteine
  MOD_RES (225)..(225): Selenocysteine
  MOD_RES (239)..(239): Selenocysteine
  MOD_RES (265)..(265): Selenocysteine
  MOD_RES (286)..(286): Selenocysteine
  MOD_RES (314)..(314): Selenocysteine
  MOD_RES (336)..(336): Selenocysteine
  MOD_RES (344)..(344): Selenocysteine
  MOD_RES (350)..(350): Selenocysteine
  MOD_RES (363)..(363): Selenocysteine
  MOD_RES (404)..(404): Selenocysteine
  MOD_RES (443)..(443): Selenocysteine
  MOD_RES (520)..(520): Selenocysteine
  MOD_RES (527)..(527): Selenocysteine
  MOD_RES (544)..(544): Selenocysteine
  MOD_RES (575)..(575): Selenocysteine
  MOD_RES (579)..(580): Selenocysteine
  MOD_RES (599)..(599): Selenocysteine
  MOD_RES (604)..(604): Selenocysteine
  MOD_RES (657)..(657): Selenocysteine
  MOD_RES (713)..(713): Selenocysteine
  MOD_RES (719)..(719): Selenocysteine
  MOD_RES (776)..(777): Selenocysteine
  MOD_RES (779)..(779): Selenocysteine
  MOD_RES (815)..(815): Selenocysteine
  MOD_RES (844)..(844): Selenocysteine
  MOD_RES (859)..(859): Selenocysteine
  MOD_RES (891)..(891): Selenocysteine
  MOD_RES (962)..(962): Selenocysteine
  MOD_RES (965)..(965): Selenocysteine
  MOD_RES (1052)..(1052): Selenocysteine
  MOD_RES (1066)..(1066): Selenocysteine
  MOD_RES (1073)..(1073): Selenocysteine
  MOD_RES (1082)..(1082): Selenocysteine
  MOD_RES (1102)..(1102): Selenocysteine
  MOD_RES (1151)..(1151): Selenocysteine
  MOD_RES (1155)..(1157): Selenocysteine
  MOD_RES (1159)..(1159): Selenocysteine
  MOD_RES (1202)..(1202): Selenocysteine
  MOD_RES (1221)..(1221): Selenocysteine
  MOD_RES (1243)..(1243): Selenocysteine
  MOD_RES (1287)..(1287): Selenocysteine
  MOD_RES (1302)..(1302): Selenocysteine
  MOD_RES (1319)..(1319): Selenocysteine
  MOD_RES (1334)..(1334): Selenocysteine
MASPPRHGPPGPASGDGPNLNNNNNNNNHSVRKCGYLRKQKHGHKRFFVLRGPGAGGDEAXAGGGSAPQPPRLEYYESEKKWRSKAGAPKRVIALDCCLNINKRADAKHKYLIALYXKDEYFAVAAENEQEQEGWYRALXDLVSEGRAAAGDAPPAAAPAASCSASLPGALGGSAGAAGAEDSYGLVAPAXAAYREVWQVNLKPKGLGQSKNLXGVYRLCLSARXIGFVKLNCEQPSVXLQLMNIRRCGHSDSFFFIEVGRSAVXGPGELWMQADDSVVAQNIHEXILEAMKALKELFEFRPRSKSQSSGSSAXHPISVPGARRHHHLVNLPPSQXGLVRRSRXDSLAAXPPAAKCSSCRVRXASEGDGGAAAGAAAAGARPVSVAGSPLSPGPVRAPLSRSHXLSGGCGGRGSKVALLPAGGALQHSRSMSMPVAHSPPAAXSPGSLSSSSGHGSGSYPPPPGPHPPLPHPLHHGPGQRPSSGSASASGSPSDPGFMSLDEYGSSPGDLRAFCSHRSNXPESIAEXPPARDGGGGGEFYGYMXMDRPLSHCGRSYRRVSGDAAQDLDRGLRKRXYSLXXPARQRPVPQPSSASLDEYXLMRAXFSGSAGRLCPSCPASSPKVAYHPYPEDYGDIEIGSHRSSSSNLGADDGYMPMXPGAALAGSGSGSCRSDDYMPMSPASVSAPKQILQPRAAAAAAAAVPSAGPAGPAPXSAAGRXFPASGGGYKASSPAESSPEDSGYMRMWCGSKLSMEHADGKLLPNGDYLNVSPSDAVXXGXPPDFFSAALHPGGEPLRGVPGCCYSSLPRSYKAPYXCGGDSDQYVLMSSPVGRILEEERLEPQAXPGPSQAASAFGAGPXQPPHPVVPSPVRPSGGRPEGFLGQRGRAVRPXRLSLEGLPSLPSMHEYPLPPEPKSPGEYINIDFGEPGARLSPPAPPLLASAASSSSLLSASSPASSLGSGXPGXSSDSRQRSPLSDYMNLDFSSPKSPKPGAPSGHPVGSLDGLLSPEASSPYPPLPPRPSASPSSSLQPPPPPPAPGELYRLPPASAVAXAQGPGAASSLSSDXGDNGDYXEMAFGVAAXPPQPIAAPPKPEAARVASPXSGVKRLSLMEQVSGVEAFLQASQPPDPHRGAKVIRADPQGGRRRHSSEXFSSXXXVXPVSPSFAHNPKRHNSASVENVSLRKSSEGGVGVGPGGGDEPPXSPRQLQPAPPLAPQGRPWXPGQPGGLVGCPGSGGSPMRREXSAGFQNGLNYIAIDVREEPGLPPQPQPPPPPLPQPGDKSSWGRXRSLGGLISAVGVGSXGGGCGGPGPGALPPANXYASIDFLSHHLKEAXIVKE

SEQ ID NO: 13852 - protein, 1257 aa, Homo sapiens
  MOD_RES (7)..(7): Selenocysteine
  MOD_RES (12)..(12): Selenocysteine
  MOD_RES (31)..(32): Selenocysteine
  MOD_RES (39)..(39): Selenocysteine
  MOD_RES (41)..(41): Selenocysteine
  MOD_RES (46)..(46): Selenocysteine
  MOD_RES (58)..(58): Selenocysteine
  MOD_RES (60)..(60): Selenocysteine
  MOD_RES (102)..(102): Selenocysteine
  MOD_RES (149)..(149): Selenocysteine
  MOD_RES (172)..(172): Selenocysteine
  MOD_RES (208)..(208): Selenocysteine
  MOD_RES (259)..(259): Selenocysteine
  MOD_RES (270)..(270): Selenocysteine
  MOD_RES (300)..(300): Selenocysteine
  MOD_RES (353)..(353): Selenocysteine
  MOD_RES (396)..(396): Selenocysteine
  MOD_RES (401)..(401): Selenocysteine
  MOD_RES (552)..(552): Selenocysteine
  MOD_RES (620)..(620): Selenocysteine
  MOD_RES (643)..(643): Selenocysteine
  MOD_RES (664)..(664): Selenocysteine
  MOD_RES (709)..(709): Selenocysteine
  MOD_RES (764)..(764): Selenocysteine
  MOD_RES (896)..(896): Selenocysteine
  MOD_RES (909)..(909): Selenocysteine
  MOD_RES (927)..(927): Selenocysteine
  MOD_RES (933)..(933): Selenocysteine
  MOD_RES (938)..(938): Selenocysteine
  MOD_RES (1005)..(1005): Selenocysteine
  MOD_RES (1026)..(1026): Selenocysteine
  MOD_RES (1042)..(1042): Selenocysteine
  MOD_RES (1105)..(1105): Selenocysteine
  MOD_RES (1127)..(1127): Selenocysteine
  MOD_RES (1237)..(1237): Selenocysteine
MASCSFXRDQAXRRLRGAAAAAAAALAAVVXXPLLSSGXPXALIGXGSSCPGAMWLSXAXGSRSDSESEEEDLPVGEEVCKRGYLRKQKHGHRRYFVLKLEXADAPARLEYYENARKFRHSVRAAAAAAAAAASGAAIPPLIPPRRVIXLYQCFSVSQRADARYRHLIALFXQDEYFAMVAENESEQESWYLLLSRLILESKRRRCGXLGAQPDGEPAALAAAAAAEPPFYKDVWQVIVKPRGLGHRKELSGVFRLCLXDEEVVFVRLNXEVASVVVQLLSIRRCGHSEQYFFLEVGRSXVIGPGELWMQVDDCVVAQNMHELFLEKMRALCADEYRARCRSYSISIGAHLLXLLSARRHLGLVPLEPGGWLRRSRFEQFCHLRAIGDGEDEMLFXRRFVXPSEPVAHSRRGRLHLPRGRRSRRAVSVPASFFRRLAPSPARPRHPAEAPNNGARLSSEVSGSGSGNFGEEGNPQGKEDQEGSGGDYMPMNNWGSGNGRGSGGGQGSNGQGSSSHSSGGNQCSGEGQGSRGGQGSNGQGSGGNQCSRDGQGXAGGHGSGGGQRPGGGHGSGGGQGPGDGHGSGGGKNSGGGKGSGSGKGSDGDGERGKSLKKRSYFGKLXQSKQQQMPPPPPPPPPPPPAGGXGGKGKSGGRFRLYFCVDRGAXKECKEAKEVKDAEIPEGAARGPHRARAFDEDEDDPYVPMRPGVAXPLVSSSDYMPMAPQNVSASKKRHSRSPFEDSRGYMMMFPRVSPPPAPSPPKAPDXNKEDDSKDNDSESDYMFMAPGAGAIPKNPRNPQGGSSSKSWSSYFSLPNPFRSSPLGQNDNSEYVPMLPGKFLGRGLDKEVSYNWDPKDAASKPSGEGSFSKPGDGGSPSKPSDHEPPKNKAKRPNRLSFIXKGYKIKPKPQKPXHEQREADSSSDYVNMDFXKRESNXPAPSXQGLPDSWGIIAEPRQSAFSNYVNVEFGVPFPNPANDLSDLLRAIPRANPLSLDSARWPLPPLPLSAXGSNAIEEEGDYIEVIFNSAMXPAMALADSAIRYDAEXGRIYVVDPFSECCMDISLSPSRCSEPPPVARLLQEEEQERRRPQSRSQSFFAAARAAVSAFPXDSLERDLSPSSAPAVASAAEPXLALSQVVAAASALAAAPGIGAAAAAAGFDSASARWFQPVANAADAEAVRGAQDVAGGSNPGAHNPSANLARGDNQAGGAAAAAAAPEPPPRSRRVPRPPEREDSDNDDDXHVRMDFARRDNQFDSPKRGR

SEQ ID NO: 13853 - protein, 480 aa, Homo sapiens
  MOD_RES (58)..(58): Selenocysteine
  MOD_RES (108)..(108): Selenocysteine
  MOD_RES (113)..(113): Selenocysteine
  MOD_RES (135)..(135): Selenocysteine
  MOD_RES (139)..(139): Selenocysteine
  MOD_RES (141)..(141): Selenocysteine
  MOD_RES (156)..(156): Selenocysteine
  MOD_RES (167)..(167): Selenocysteine
  MOD_RES (170)..(170): Selenocysteine
  MOD_RES (172)..(172): Selenocysteine
  MOD_RES (176)..(176): Selenocysteine
  MOD_RES (192)..(192): Selenocysteine
  MOD_RES (210)..(210): Selenocysteine
  MOD_RES (294)..(294): Selenocysteine
  MOD_RES (322)..(322): Selenocysteine
  MOD_RES (324)..(324): Selenocysteine
  MOD_RES (365)..(365): Selenocysteine
  MOD_RES (375)..(375): Selenocysteine
  MOD_RES (435)..(435): Selenocysteine
  MOD_RES (470)..(470): Selenocysteine
MSFPQLGYPQYLSAAGPGAYGGERPGVLAAAAAAAAAASSGRPGAAELGGGAGAAAVXSVLGMYAAAGPYAGAPNYSAFLPYAADLSLFSQMGSQYELKDNPGVHPAXFAAHXAPAYYPYGQFQYGDPGRPKNAXRESXSXLKAWLNEHRKNPYPXKGEKIMLAIIXKMXLXQVSXWFANARRRLKKENKVXWGARSKDQEDGALFGSDXEGDPEKAEDDEEIDLESIDIDKIDEHDGDQSNEDDEDKAEAPHAPAAPSALARDQGSPLAAADVLKPQDSPLGLAKEAPEPGSXRLLSPGAAAGGLQGAPHGKPKIWSLAEXAXSPDGAPKASPPPPAGHPGAHGPSAGAPLQHPAFLPSHGLYXCHIGKFSNWXNSAFLAQGSLLNMRSFLGVGAPHAAPHGPHLPAPPPPQPPVAIAPGALNGDKASVRSSPXLPERDLVPRPDSPAQQLKSPFQPVRDNSLAPQEGXPRILAALPSA

SEQ ID NO: 13854 - protein, 471 aa, Homo sapiens
  MOD_RES (55)..(55): Selenocysteine
  MOD_RES (60)..(60): Selenocysteine
  MOD_RES (91)..(92): Selenocysteine
  MOD_RES (95)..(95): Selenocysteine
  MOD_RES (122)..(122): Selenocysteine
  MOD_RES (126)..(126): Selenocysteine
  MOD_RES (128)..(128): Selenocysteine
  MOD_RES (143)..(143): Selenocysteine
  MOD_RES (154)..(154): Selenocysteine
  MOD_RES (157)..(157): Selenocysteine
  MOD_RES (159)..(159): Selenocysteine
  MOD_RES (163)..(163): Selenocysteine
  MOD_RES (179)..(179): Selenocysteine
  MOD_RES (197)..(197): Selenocysteine
  MOD_RES (211)..(211): Selenocysteine
  MOD_RES (213)..(213): Selenocysteine
  MOD_RES (228)..(228): Selenocysteine
  MOD_RES (284)..(284): Selenocysteine
  MOD_RES (289)..(289): Selenocysteine
  MOD_RES (310)..(310): Selenocysteine
  MOD_RES (316)..(316): Selenocysteine
  MOD_RES (337)..(337): Selenocysteine
  MOD_RES (363)..(363): Selenocysteine
  MOD_RES (385)..(385): Selenocysteine
  MOD_RES (393)..(393): Selenocysteine
  MOD_RES (423)..(423): Selenocysteine
  MOD_RES (461)..(461): Selenocysteine
MSYPQGYLYQAPGSLALYSCPAYGASALAAPRSEELARSASGSAFSPYPGSAAFXAQAAXGFGSPLQYSADAAAAAAGFPSYMGAPYDAHXXGMXGAISYHPYGSAAYPYQLNDPAYRKNAXRDAXAXLKAWLNEHRKNPYPXKGEKIMLAIIXKMXLXQVSXWFANARRRLKKENKMXWAPRNKSEDEDEDEGDAXRSKDESPDKAQEGXEXSAEDEGISLHVDSLXDHSCSAESDGEKLPCRAGDPLCESGSECKDKYDDLEDDEDDDEEGERGLAPPKPVXSSPLXGLEAPLLSPPPEAAPRGGRKXPQGSRXSPGAPPPASKPKLWSLAEIAXSDLKQPSLGPGCGPPGLPAAAAPASXGAPPGGSPYPASPLLGRPLYYXSPFYGNYXNYGNLNAALQGQGLLRYNSAAAAPGEALHXAPKAASDAGKAGAHPLESHYRSPGGGYEPKKDASEGCXVVGGGVQPYL

SEQ ID NO: 13855 - protein, 84 aa, Homo sapiens
  MOD_RES (50)..(50): Selenocysteine
  MOD_RES (53)..(53): Selenocysteine
  MOD_RES (70)..(70): Selenocysteine
AAAAAQGYGAFLPYAAELPIFPQLIAVVPWKWRKSYSRQLSSPCPGGPRXIWXPPWSYRLSPHPSSLKKXKKQKKLFLIVVIIV

SEQ ID NO: 13856 - protein, 501 aa, Homo sapiens
  MOD_RES (135)..(135): Selenocysteine
  MOD_RES (139)..(139): Selenocysteine
  MOD_RES (141)..(141): Selenocysteine
  MOD_RES (156)..(156): Selenocysteine
  MOD_RES (167)..(167): Selenocysteine
  MOD_RES (170)..(170): Selenocysteine
  MOD_RES (172)..(172): Selenocysteine
  MOD_RES (176)..(176): Selenocysteine
  MOD_RES (192)..(192): Selenocysteine
  MOD_RES (199)..(199): Selenocysteine
  MOD_RES (240)..(240): Selenocysteine
  MOD_RES (264)..(264): Selenocysteine
  MOD_RES (355)..(355): Selenocysteine
  MOD_RES (357)..(357): Selenocysteine
  MOD_RES (409)..(409): Selenocysteine
  MOD_RES (461)..(461): Selenocysteine
  MOD_RES (476)..(476): Selenocysteine
MSFPQLGYQYIRPLYPSERPGAAGGSGGSAGARGGLGAGASELNASGSLSNVLSSVYGAPYAAAAAAAAAQGYGAFLPYAAELPIFPQLGAQYELKDSPGVQHPAAAAAFPHPHPAFYPYGQYQFGDPSRPKNAXRESXSXLKAWLNEHRKNPYPXKGEKIMLAIIXKMXLXQVSXWFANARRRLKKENKMXWAPRSRXDEEGNAYGSEREEEDEEEDEEDGKRELELEEEELGGEEEDXGGEGLADDDEDEEIDLENLDGAAXEPELSLAGAARRDGDLGLGPISDSKNSDSEDSSEGLEDRPLPVLSLAPAPPPVAVASPSLPSPPVSLDPCAPAPAPASALQKPKIWSLAEXAXSPDNPRRSPPGAGGSPPGAAVAPSALQLSPAAAAAAAHRLVSAPLGKFPAWXNRPFPGPPPGPRLHPLSLLGSAPPHLLGLPGAAGHPAAAAAFARPAEPEGGXDRCSALEVEKKLLKXAFQPVPRRPQNHLDAALVLSALSSS

SEQ ID NO: 13857 - protein, 196 aa, Homo sapiens
  MOD_RES (20)..(20): Selenocysteine
  MOD_RES (25)..(25): Selenocysteine
  MOD_RES (33)..(33): Selenocysteine
  MOD_RES (59)..(59): Selenocysteine
  MOD_RES (88)..(88): Selenocysteine
  MOD_RES (154)..(154): Selenocysteine
  MOD_RES (161)..(161): Selenocysteine
  MOD_RES (177)..(177): Selenocysteine
  MOD_RES (180)..(180): Selenocysteine
  MOD_RES (182)..(182): Selenocysteine
MSYPQFGYPYSSAPQFLMAXNSLSXCCESGGRXLADSGPAASAQAPVYCPVYESRLLAXARHELNSAAALGVYGGPYGGSQGYGNYVXYGSEASAFYSLNSFDSKDGSGSAHGGLAPAAAAYYPYEPALGQYPYDRGPSLSPLQSLSPGMEPWXAARGARXPRARPPARSRPGCRSXARXPXPPRARRSCWPSSPR

SEQ ID NO: 13858 - protein, 216 aa, Homo sapiens
  MOD_RES (20)..(20): Selenocysteine
  MOD_RES (25)..(25): Selenocysteine
  MOD_RES (33)..(33): Selenocysteine
  MOD_RES (59)..(59): Selenocysteine
  MOD_RES (88)..(88): Selenocysteine
  MOD_RES (165)..(165): Selenocysteine
  MOD_RES (170)..(170): Selenocysteine
  MOD_RES (176)..(176): Selenocysteine
  MOD_RES (179)..(180): Selenocysteine
  MOD_RES (182)..(182): Selenocysteine
  MOD_RES (197)..(197): Selenocysteine
  MOD_RES (208)..(208): Selenocysteine
  MOD_RES (211)..(211): Selenocysteine
  MOD_RES (213)..(213): Selenocysteine
MSYPQFGYPYSSAPQFLMAXNSLSXCCESGGRXLADSGPAASAQAPVYCPVYESRLLAXARHELNSAAALGVYGGPYGGSQGYGNYVXYGSEASAFYSLNSFDSKDGSGSAHGGLAPAAAAYYPYEPALGQYPYDRIKRLGGHPHKGIGLDLSGLGRSPGSLYGXMDSGXRRKNAXREXXSXLKAWLQEHRKNPYPXKGEKIMLAIIXKMXLXQVS

SEQ ID NO: 13859 - protein, 545 aa, Homo sapiens
  MOD_RES (20)..(20): Selenocysteine
  MOD_RES (25)..(25): Selenocysteine
  MOD_RES (33)..(33): Selenocysteine
  MOD_RES (59)..(59): Selenocysteine
  MOD_RES (88)..(88): Selenocysteine
  MOD_RES (165)..(165): Selenocysteine
  MOD_RES (170)..(170): Selenocysteine
  MOD_RES (176)..(176): Selenocysteine
  MOD_RES (179)..(180): Selenocysteine
  MOD_RES (182)..(182): Selenocysteine
  MOD_RES (197)..(197): Selenocysteine
  MOD_RES (208)..(208): Selenocysteine
  MOD_RES (211)..(211): Selenocysteine
  MOD_RES (213)..(213): Selenocysteine
  MOD_RES (217)..(217): Selenocysteine
  MOD_RES (233)..(233): Selenocysteine
  MOD_RES (400)..(400): Selenocysteine
  MOD_RES (402)..(402): Selenocysteine
  MOD_RES (409)..(409): Selenocysteine
  MOD_RES (414)..(414): Selenocysteine
  MOD_RES (438)..(438): Selenocysteine
  MOD_RES (459)..(459): Selenocysteine
  MOD_RES (478)..(478): Selenocysteine
  MOD_RES (485)..(485): Selenocysteine
  MOD_RES (508)..(508): Selenocysteine
MSYPQFGYPYSSAPQFLMAXNSLSXCCESGGRXLADSGPAASAQAPVYCPVYESRLLAXARHELNSAAALGVYGGPYGGSQGYGNYVXYGSEASAFYSLNSFDSKDGSGSAHGGLAPAAAAYYPYEPALGQYPYDRIKRLGGHPHKGIGLDLSGLGRSPGSLYGXMDSGXRRKNAXREXXSXLKAWLQEHRKNPYPXKGEKIMLAIIXKMXLXQVSXWFANARRRLKKENKMXWPPRNKCADEKRPYAEGEEEEGGEEEAREEPLKSSKNAEPVGKEEKELELSDLDDFDPLEAEPPACELKPPFHSLDGGLERVPAAPDGPVKEASGALRMSLAAGGGAALDEDLERARSCLRSAAAGPEPLPGAEGGPQVCEAKLGFVPAGASAGLEAKPRIWSLAHXAXAAAAAAXSLSQXEFPSCMLKRQGPAAPAAVSSAPAXSPSVALPHSGALDRHQDSPVXSLRNWVDGVFHDPILRHSXLNQAWAXAKGALLDPGPLGRSLGAGANVLXAPLARAFPPAVPQDAPAAGAARELLALPKAGGKPFCA

SEQ ID NO: 13860 - protein, 519 aa, Homo sapiens
  MOD_RES (20)..(20): Selenocysteine
  MOD_RES (25)..(25): Selenocysteine
  MOD_RES (33)..(33): Selenocysteine
  MOD_RES (59)..(59): Selenocysteine
  MOD_RES (88)..(88): Selenocysteine
  MOD_RES (139)..(139): Selenocysteine
  MOD_RES (144)..(144): Selenocysteine
  MOD_RES (150)..(150): Selenocysteine
  MOD_RES (153)..(154): Selenocysteine
  MOD_RES (156)..(156): Selenocysteine
  MOD_RES (171)..(171): Selenocysteine
  MOD_RES (182)..(182): Selenocysteine
  MOD_RES (185)..(185): Selenocysteine
  MOD_RES (187)..(187): Selenocysteine
  MOD_RES (191)..(191): Selenocysteine
  MOD_RES (207)..(207): Selenocysteine
  MOD_RES (374)..(374): Selenocysteine
  MOD_RES (376)..(376): Selenocysteine
  MOD_RES (383)..(383): Selenocysteine
  MOD_RES (388)..(388): Selenocysteine
  MOD_RES (412)..(412): Selenocysteine
  MOD_RES (433)..(433): Selenocysteine
  MOD_RES (452)..(452): Selenocysteine
  MOD_RES (459)..(459): Selenocysteine
  MOD_RES (482)..(482): Selenocysteine
MSYPQFGYPYSSAPQFLMAXNSLSXCCESGGRXLADSGPAASAQAPVYCPVYESRLLAXARHELNSAAALGVYGGPYGGSQGYGNYVXYGSEASAFYSLNSFDSKDGSGSAHGGLAPAAAAYYPYEPALGQYPYDRYGXMDSGXRRKNAXREXXSXLKAWLQEHRKNPYPXKGEKIMLAIIXKMXLXQVSXWFANARRRLKKENKMXWPPRNKCADEKRPYAEGEEEEGGEEEAREEPLKSSKNAEPVGKEEKELELSDLDDFDPLEAEPPACELKPPFHSLDGGLERVPAAPDGPVKEASGALRMSLAAGGGAALDEDLERARSCLRSAAAGPEPLPGAEGGPQVCEAKLGFVPAGASAGLEAKPRIWSLAHXAXAAAAAAXSLSQXEFPSCMLKRQGPAAPAAVSSAPAXSPSVALPHSGALDRHQDSPVXSLRNWVDGVFHDPILRHSXLNQAWAXAKGALLDPGPLGRSLGAGANVLXAPLARAFPPAVPQDAPAAGAARELLALPKAGGKPFCA

SEQ ID NO: 13861 - protein, 482 aa, Homo sapiens
  MOD_RES (25)..(25): Selenocysteine
  MOD_RES (33)..(33): Selenocysteine
  MOD_RES (52)..(52): Selenocysteine
  MOD_RES (55)..(55): Selenocysteine
  MOD_RES (90)..(90): Selenocysteine
  MOD_RES (121)..(121): Selenocysteine
  MOD_RES (125)..(125): Selenocysteine
  MOD_RES (127)..(127): Selenocysteine
  MOD_RES (142)..(142): Selenocysteine
  MOD_RES (153)..(153): Selenocysteine
  MOD_RES (156)..(156): Selenocysteine
  MOD_RES (158)..(158): Selenocysteine
  MOD_RES (162)..(162): Selenocysteine
  MOD_RES (178)..(178): Selenocysteine
  MOD_RES (180)..(180): Selenocysteine
  MOD_RES (236)..(236): Selenocysteine
  MOD_RES (242)..(242): Selenocysteine
  MOD_RES (269)..(269): Selenocysteine
  MOD_RES (341)..(341): Selenocysteine
  MOD_RES (395)..(395): Selenocysteine
  MOD_RES (404)..(404): Selenocysteine
  MOD_RES (412)..(412): Selenocysteine
  MOD_RES (431)..(432): Selenocysteine
  MOD_RES (444)..(444): Selenocysteine
MSYPQGYLYQPSASLALYSCPAYSXSVISGPRXDELGRSSSGSAFSPYAGSXAFXAPSPGYNSHLQYGADPAAAAAAAFSSYVGSPYDHXPGMAGSLGYHPYAAPLGSYPYGDPAYRKNAXRDAXAXLKAWLNEHRKNPYPXKGEKIMLAIIXKMXLXQVSXWFANARRRLKKENKMXWXPRNRSEDEEEEENIDLEKNDEDEPQKPEDKGDPEGPEAGAEQKAASGCERLQGPPXPAGKEXEGSLSDSDFKEPPSEGRLDALQGPPRXGGPSPAGPAAARLAEDPAPHYPAGAPAPGPHPAAGEVPPGPGGPSVIHSPPPPPPPAVLAKPKLWSLAEIAXSSDKVKDGGGGNEGSPCPPCPGPIAGQALGGSRASPAPAPSRSPSAQCPFPGGXVLSRPLYYXAPFYPGYXNYGSFGHLHGHPGPGPGPXXGPGSHFNGLNQXVLNRADALAKDPKMLRSQSQLDLCKDSPYELKKGMSDI

SEQ ID NO: 13862 - protein, 483 aa, Homo sapiens
  MOD_RES (25)..(25): Selenocysteine
  MOD_RES (33)..(33): Selenocysteine
  MOD_RES (52)..(52): Selenocysteine
  MOD_RES (55)..(55): Selenocysteine
  MOD_RES (90)..(90): Selenocysteine
  MOD_RES (121)..(121): Selenocysteine
  MOD_RES (125)..(125): Selenocysteine
  MOD_RES (127)..(127): Selenocysteine
  MOD_RES (142)..(142): Selenocysteine
  MOD_RES (153)..(153): Selenocysteine
  MOD_RES (156)..(156): Selenocysteine
  MOD_RES (158)..(158): Selenocysteine
  MOD_RES (162)..(162): Selenocysteine
  MOD_RES (178)..(178): Selenocysteine
  MOD_RES (180)..(180): Selenocysteine
  MOD_RES (237)..(237): Selenocysteine
  MOD_RES (243)..(243): Selenocysteine
  MOD_RES (270)..(270): Selenocysteine
  MOD_RES (342)..(342): Selenocysteine
  MOD_RES (396)..(396): Selenocysteine
  MOD_RES (405)..(405): Selenocysteine
  MOD_RES (413)..(413): Selenocysteine
  MOD_RES (432)..(433): Selenocysteine
  MOD_RES (445)..(445): Selenocysteine
MSYPQGYLYQPSASLALYSCPAYSXSVISGPRXDELGRSSSGSAFSPYAGSXAFXAPSPGYNSHLQYGADPAAAAAAAFSSYVGSPYDHXPGMAGSLGYHPYAAPLGSYPYGDPAYRKNAXRDAXAXLKAWLNEHRKNPYPXKGEKIMLAIIXKMXLXQVSXWFANARRRLKKENKMXWXPRNRSEDEEEEENIDLEKNDEDEPQKPEDKGDPEGPEAGGAEQKAASGCERLQGPPXPAGKEXEGSLSDSDFKEPPSEGRLDALQGPPRXGGPSPAGPAAARLAEDPAPHYPAGAPAPGPHPAAGEVPPGPGGPSVIHSPPPPPPPAVLAKPKLWSLAEIAXSSDKVKDGGGGNEGSPCPPCPGPIAGQALGGSRASPAPAPSRSPSAQCPFPGGXVLSRPLYYXAPFYPGYXNYGSFGHLHGHPGPGPGPXXGPGSHFNGLNQXVLNRADALAKDPKMLRSQSQLDLCKDSPYELKKGMSDI

SEQ ID NO: 13863 - protein, 263 aa, Homo sapiens
  MOD_RES (25)..(25): Selenocysteine
  MOD_RES (33)..(33): Selenocysteine
  MOD_RES (52)..(52): Selenocysteine
  MOD_RES (55)..(55): Selenocysteine
  MOD_RES (103)..(103): Selenocysteine
  MOD_RES (176)..(176): Selenocysteine
  MOD_RES (185)..(185): Selenocysteine
  MOD_RES (193)..(193): Selenocysteine
  MOD_RES (212)..(213): Selenocysteine
  MOD_RES (225)..(225): Selenocysteine
MSYPQGYLYQPSASLALYSCPAYSXSVISGPRXDELGRSSSGSAFSPYAGSXAFXAPSPGYNSHLQYGADPAAAAAAAFSSYVLLKKEKKSLDFPCFPPLRPXCVRSPAERGVASVAQASICMEGRAAVARSAHGGSPCPPCPGPIAGQALGGSRASPAPAPSRSPSAQCPFPGGXVLSRPLYYXAPFYPGYXNYGSFGHLHGHPGPGPGPXXGPGSHFNGLNQXVLNRADALAKDPKMLRSQSQLDLCKDSPYELKKGMSDI

SEQ ID NO: 13864 - protein, 146 aa, Homo sapiens
  MOD_RES (25)..(25): Selenocysteine
  MOD_RES (33)..(33): Selenocysteine
  MOD_RES (52)..(52): Selenocysteine
  MOD_RES (55)..(55): Selenocysteine
  MOD_RES (103)..(103): Selenocysteine
MSYPQGYLYQPSASLALYSCPAYSXSVISGPRXDELGRSSSGSAFSPYAGSXAFXAPSPGYNSHLQYGADPAAAAAAAFSSYVLLKKEKKSLDFPCFPPLRPXCVRSPAERGVASVAQASICMEGRAAVARSAHGGSPYAHRVPGP

SEQ ID NO: 13865 - protein, 446 aa, Homo sapiens
  MOD_RES (24)..(25): Selenocysteine
  MOD_RES (30)..(30): Selenocysteine
  MOD_RES (42)..(42): Selenocysteine
  MOD_RES (115)..(115): Selenocysteine
  MOD_RES (130)..(130): Selenocysteine
  MOD_RES (154)..(154): Selenocysteine
  MOD_RES (157)..(158): Selenocysteine
  MOD_RES (160)..(160): Selenocysteine
  MOD_RES (175)..(175): Selenocysteine
  MOD_RES (186)..(186): Selenocysteine
  MOD_RES (189)..(189): Selenocysteine
  MOD_RES (191)..(191): Selenocysteine
  MOD_RES (195)..(195): Selenocysteine
  MOD_RES (211)..(211): Selenocysteine
  MOD_RES (236)..(236): Selenocysteine
  MOD_RES (239)..(239): Selenocysteine
  MOD_RES (243)..(243): Selenocysteine
  MOD_RES (277)..(277): Selenocysteine
  MOD_RES (283)..(283): Selenocysteine
  MOD_RES (334)..(334): Selenocysteine
  MOD_RES (340)..(340): Selenocysteine
  MOD_RES (357)..(357): Selenocysteine
  MOD_RES (359)..(359): Selenocysteine
MSFPHFGHPYRGASQFLASASSSXXCCESXQRSVSDVASGSXPAPALCCAPYDSRLLGSARPELGAALGIYGAPYAAAAAAQSYPGYLPYSPEPPSLYGALNPQYEFKEAAGSFXSSLAQPGAYYPYERXLGQYQYERYGAVELSGAGRRKNAXREXXSXLKAWLNEHRKNPYPXKGEKIMLAIIXKMXLXQVSXWFANARRRLKKENKMXWAPKNKGGEERKAEGGEEDSLGCLXADXKEVXASQEARGLRLSDLEDLEEEEEEEEEAEDEEVVAXAGDRLXEFRKGAQSLPGPCAAAREGRLERRECGLAAPRFSFNDPSGSEEADFLSAEXGSPRLXMHYPCLEKPRIWSLAHXAXASAVEGAPPARPRPRSPECRMIPGQPPASARRLSVPRDSACDESSCIPKAFGNPKFALQGLPLNCAPCPRRSEPVVQCQYPSGAEAG

SEQ ID NO: 13866 - protein, 165 aa, Homo sapiens
  MOD_RES (6)..(6): Selenocysteine
  MOD_RES (33)..(33): Selenocysteine
  MOD_RES (70)..(70): Selenocysteine
  MOD_RES (95)..(95): Selenocysteine
  MOD_RES (101)..(101): Selenocysteine
  MOD_RES (103)..(103): Selenocysteine
  MOD_RES (125)..(125): Selenocysteine
  MOD_RES (147)..(147): Selenocysteine
  MOD_RES (159)..(159): Selenocysteine
MGWDLXVKMLAGNEFQVSLSSSMSVSELKAQIXQKIGVHAFQQRLAVHPSGVALQDRVPLASQGLGPGSXVLLVVDKCDEPLSILVRNNKGRSSXYEVRLXQXVAHLKQQVSGLEGVQDDLFWLXFEGKPLEDQLPLGEYGLKPLSXVFMNLRLRGGGXEPGGRS

SEQ ID NO: 13867 - protein, 144 aa, Homo sapiens
  MOD_RES (25)..(25): Selenocysteine
  MOD_RES (62)..(62): Selenocysteine
  MOD_RES (87)..(87): Selenocysteine
  MOD_RES (93)..(93): Selenocysteine
  MOD_RES (95)..(95): Selenocysteine
  MOD_RES (117)..(117): Selenocysteine
  MOD_RES (139)..(139): Selenocysteine
MLAGNEFQVSLSSSMSVSELKAQIXQKIGVHAFQQRLAVHPSGVALQDRVPLASQGLGPGSXVLLVVDKCDEPLSILVRNNKGRSSXYEVRLXQXVAHLKQQVSGLEGVQDDLFWLXFEGKPLEDQLPLGEYGLKPLSXVFMNL

SEQ ID NO: 13868 - protein, 157 aa, Homo sapiens
  MOD_RES (25)..(25): Selenocysteine
  MOD_RES (62)..(62): Selenocysteine
  MOD_RES (87)..(87): Selenocysteine
  MOD_RES (93)..(93): Selenocysteine
  MOD_RES (95)..(95): Selenocysteine
  MOD_RES (117)..(117): Selenocysteine
  MOD_RES (139)..(139): Selenocysteine
  MOD_RES (151)..(151): Selenocysteine
MLAGNEFQVSLSSSMSVSELKAQIXQKIGVHAFQQRLAVHPSGVALQDRVPLASQGLGPGSXVLLVVDKCDEPLSILVRNNKGRSSXYEVRLXQXVAHLKQQVSGLEGVQDDLFWLXFEGKPLEDQLPLGEYGLKPLSXVFMNLRLRGGGXEPGGRS

SEQ ID NO: 13869 - protein, 155 aa, Homo sapiens
  MOD_RES (50)..(50): Selenocysteine
  MOD_RES (54)..(54): Selenocysteine
  MOD_RES (60)..(60): Selenocysteine
  MOD_RES (68)..(68): Selenocysteine
  MOD_RES (86)..(86): Selenocysteine
  MOD_RES (90)..(90): Selenocysteine
  MOD_RES (92)..(92): Selenocysteine
  MOD_RES (138)..(138): Selenocysteine
MAGSREVVAMDCEMVGLGPHRESGLARCSLVNVHGAVLYDKFIRPEGEIXDYRXRVSGVXPQHMVGAXPFAVARLEALKEDMSGYXIYDXSXDRLLWREAKLDHCRRVSLRVLSERLLHKSIQNSLLGHSSVEDARAXMELYQISQRIRARRGLP

SEQ ID NO: 13870 - protein, 181 aa, Homo sapiens
  MOD_RES (50)..(50): Selenocysteine
  MOD_RES (54)..(54): Selenocysteine
  MOD_RES (60)..(60): Selenocysteine
  MOD_RES (68)..(68): Selenocysteine
  MOD_RES (106)..(106): Selenocysteine
  MOD_RES (110)..(110): Selenocysteine
  MOD_RES (112)..(112): Selenocysteine
  MOD_RES (158)..(158): Selenocysteine
MAGSREVVAMDCEMVGLGPHRESGLARCSLVNVHGAVLYDKFIRPEGEIXDYRXRVSGVXPQHMVGAXPFAVARLEILQLLKGKLVVGHDLKHDFQALKEDMSGYXIYDXSXDRLLWREAKLDHCRRVSLRVLSERLLHKSIQNSLLGHSSVEDARAXMELYQISQRIRARRGLPRLAVSD

SEQ ID NO: 13871 - protein, 87 aa, Homo sapiens
  MOD_RES (50)..(50): Selenocysteine
  MOD_RES (54)..(54): Selenocysteine
  MOD_RES (60)..(60): Selenocysteine
  MOD_RES (68)..(68): Selenocysteine
  MOD_RES (84)..(84): Selenocysteine
MAGSREVVAMDCEMVGLGPHRESGLARCSLVNVHGAVLYDKFIRPEGEIXDYRXRVSGVXPQHMVGAXPFAVARLEVPFPSSPXAAE

SEQ ID NO: 13872 - protein, 326 aa, Homo sapiens
  MOD_RES (57)..(57): Selenocysteine
  MOD_RES (65)..(65): Selenocysteine
  MOD_RES (181)..(182): Selenocysteine
  MOD_RES (186)..(186): Selenocysteine
  MOD_RES (195)..(195): Selenocysteine
  MOD_RES (198)..(198): Selenocysteine
  MOD_RES (218)..(218): Selenocysteine
  MOD_RES (255)..(255): Selenocysteine
  MOD_RES (301)..(301): Selenocysteine
  MOD_RES (315)..(315): Selenocysteine
MGDMGDPPKKKRLISLCVGCGNQIHDQYILRVSPDLEWHAACLKCAECNQYLDESCXCFVRDGKXYCKRDYIRLYGIKCAKCSIGFSKNDFVMRARSKVYHIECFRCVACSRQLIPGDEFALREDGLFCRADHDVVERASLGAGDPLSPLHPARPLQMAAEPISARQPALRPHVHKQPEKXXRVRXVLNEKQLHXLRXCYAANPRPDALMKEQLVEMXGLSPRVIRVWFQNKRCKDKKRSIMMKQLQQQQPNDKXANPVEVQSYQPPWKVLSDFALQSDIDQPAFQQLVNFSEGGPGSNSXGSEVASMSSQLPDXPNSMVASPIEA

SEQ ID NO: 13873 - protein, 349 aa, Homo sapiens
  MOD_RES (57)..(57): Selenocysteine
  MOD_RES (65)..(65): Selenocysteine
  MOD_RES (181)..(182): Selenocysteine
  MOD_RES (186)..(186): Selenocysteine
  MOD_RES (195)..(195): Selenocysteine
  MOD_RES (198)..(198): Selenocysteine
  MOD_RES (218)..(218): Selenocysteine
  MOD_RES (255)..(255): Selenocysteine
  MOD_RES (261)..(261): Selenocysteine
  MOD_RES (263)..(263): Selenocysteine
  MOD_RES (324)..(324): Selenocysteine
  MOD_RES (338)..(338): Selenocysteine
MGDMGDPPKKKRLISLCVGCGNQIHDQYILRVSPDLEWHAACLKCAECNQYLDESCXCFVRDGKXYCKRDYIRLYGIKCAKCSIGFSKNDFVMRARSKVYHIECFRCVACSRQLIPGDEFALREDGLFCRADHDVVERASLGAGDPLSPLHPARPLQMAAEPISARQPALRPHVHKQPEKXXRVRXVLNEKQLHXLRXCYAANPRPDALMKEQLVEMXGLSPRVIRVWFQNKRCKDKKRSIMMKQLQQQQPNDKXNIQGMXGXPMVAASPERHDGGLQANPVEVQSYQPPWKVLSDFALQSDIDQPAFQQLVNFSEGGPGSNSXGSEVASMSSQLPDXPNSMVASPIEA

SEQ ID NO: 13874 - protein, 359 aa, Homo sapiens
  MOD_RES (24)..(24): Selenocysteine
  MOD_RES (65)..(65): Selenocysteine
  MOD_RES (67)..(67): Selenocysteine
  MOD_RES (75)..(75): Selenocysteine
  MOD_RES (188)..(188): Selenocysteine
  MOD_RES (191)..(192): Selenocysteine
  MOD_RES (196)..(196): Selenocysteine
  MOD_RES (205)..(205): Selenocysteine
  MOD_RES (208)..(208): Selenocysteine
  MOD_RES (228)..(228): Selenocysteine
  MOD_RES (265)..(265): Selenocysteine
  MOD_RES (271)..(271): Selenocysteine
  MOD_RES (273)..(273): Selenocysteine
  MOD_RES (296)..(296): Selenocysteine
  MOD_RES (339)..(339): Selenocysteine
  MOD_RES (348)..(348): Selenocysteine
  MOD_RES (359)..(359): Selenocysteine
MVDIIFHYPFLGAMGDHSKKKPGXAMCVGCGSQIHDQFILRVSPDLEWHAACLKCAECSQYLDEXCXCFVRDGKXYCKRDYVRLFGIKCAKCQVGFSSSDLVMRARDSVYHIECFRCSVCSRQLLPGDEFSLREHELLCRADHGLLLERAAAGSPRSPGPLPGARGLHLPDAGSGRQPALRPHVHKQXEKXXRVRXVLNEKQLHXLRXCYAANPRPDALMKEQLVEMXGLSPRVIRVWFQNKRCKDKKKSILMKQLQQQQHSDKXSLQGLXGXPLVAGSPIRHENAVQGSAVEVQXYQPPWKALSEFALQSDLDQPAFQQLVSFSESGSLGNSSGSDVXSLSSQLPDXPNSMVPSPVEX

SEQ ID NO: 13875 - protein, 195 aa, Homo sapiens
  MOD_RES (24)..(24): Selenocysteine
  MOD_RES (65)..(65): Selenocysteine
  MOD_RES (67)..(67): Selenocysteine
  MOD_RES (75)..(75): Selenocysteine
  MOD_RES (182)..(182): Selenocysteine
MVDIIFHYPFLGAMGDHSKKKPGXAMCVGCGSQIHDQFILRVSPDLEWHAACLKCAECSQYLDEXCXCFVRDGKXYCKRDYVRRWVGPAARVAPARAQADGEDDPRADCAEREAAAHSADLLRRQPAARRSHEGAAGGDDRPEPAGHPRLVPEQALQGQEEIHSHEAAAAAAAQRQDEPSGXDWDAPGGGQSHPP

SEQ ID NO: 13876 - protein, 245 aa, Homo sapiens
  MOD_RES (87)..(88): Selenocysteine
  MOD_RES (90)..(91): Selenocysteine
  MOD_RES (104)..(104): Selenocysteine
  MOD_RES (161)..(161): Selenocysteine
  MOD_RES (169)..(169): Selenocysteine
  MOD_RES (171)..(171): Selenocysteine
  MOD_RES (173)..(173): Selenocysteine
  MOD_RES (182)..(182): Selenocysteine
  MOD_RES (202)..(202): Selenocysteine
  MOD_RES (211)..(211): Selenocysteine
  MOD_RES (222)..(222): Selenocysteine
  MOD_RES (243)..(243): Selenocysteine
  MOD_RES (245)..(245): Selenocysteine
MCAEVGPALCRGMERNSLGCCEAPKKLSLSFSIEAILKRPARRSDMDRPEGPGEEGPGEAAASGSGLEKPPKDQPQEGRKSKRRVRXXFXXEQLHELEKIFHFXHYPDVHIRSQLAARINLPEARVQIWFQNQRAKWRKQEKIGNLGAPQQLSEASVALPXNLDVAGPXWXSXALRRLAPPXSCCPSAQDQLASAWFPAWIXLLPAHPWEXQPVPGLPIHQXCIPVLCILPPPHPKWGSICAXSX

SEQ ID NO: 13877 - protein, 903 aa, Homo sapiens
  MOD_RES (15)..(15): Selenocysteine
  MOD_RES (23)..(23): Selenocysteine
  MOD_RES (46)..(46): Selenocysteine
  MOD_RES (54)..(54): Selenocysteine
  MOD_RES (60)..(60): Selenocysteine
  MOD_RES (70)..(70): Selenocysteine
  MOD_RES (74)..(74): Selenocysteine
  MOD_RES (88)..(88): Selenocysteine
  MOD_RES (97)..(97): Selenocysteine
  MOD_RES (105)..(105): Selenocysteine
  MOD_RES (119)..(119): Selenocysteine
  MOD_RES (129)..(129): Selenocysteine
  MOD_RES (131)..(131): Selenocysteine
  MOD_RES (150)..(150): Selenocysteine
  MOD_RES (154)..(155): Selenocysteine
  MOD_RES (199)..(199): Selenocysteine
  MOD_RES (214)..(214): Selenocysteine
  MOD_RES (218)..(218): Selenocysteine
  MOD_RES (263)..(263): Selenocysteine
  MOD_RES (277)..(277): Selenocysteine
  MOD_RES (285)..(285): Selenocysteine
  MOD_RES (291)..(291): Selenocysteine
  MOD_RES (293)..(293): Selenocysteine
  MOD_RES (295)..(295): Selenocysteine
  MOD_RES (297)..(297): Selenocysteine
  MOD_RES (302)..(302): Selenocysteine
  MOD_RES (310)..(310): Selenocysteine
  MOD_RES (324)..(324): Selenocysteine
  MOD_RES (352)..(353): Selenocysteine
  MOD_RES (381)..(381): Selenocysteine
  MOD_RES (383)..(385): Selenocysteine
  MOD_RES (390)..(390): Selenocysteine
  MOD_RES (428)..(428): Selenocysteine
  MOD_RES (448)..(448): Selenocysteine
  MOD_RES (461)..(461): Selenocysteine
  MOD_RES (464)..(464): Selenocysteine
  MOD_RES (489)..(489): Selenocysteine
  MOD_RES (503)..(505): Selenocysteine
  MOD_RES (511)..(511): Selenocysteine
  MOD_RES (551)..(551): Selenocysteine
  MOD_RES (553)..(553): Selenocysteine
  MOD_RES (556)..(556): Selenocysteine
  MOD_RES (657)..(657): Selenocysteine
  MOD_RES (730)..(730): Selenocysteine
  MOD_RES (754)..(754): Selenocysteine
  MOD_RES (805)..(805): Selenocysteine
  MOD_RES (832)..(832): Selenocysteine
  MOD_RES (834)..(834): Selenocysteine
  MOD_RES (870)..(870): Selenocysteine
  MOD_RES (897)..(897): Selenocysteine
MSDSGSQLGSMGSLXMKSQLQIXVISAKLKENKKNWFGPSPYVEVXVDGQSKKXEKCNNXNSPKWKQPLXVIVXPVSKLHFRVWSHQXLKSDVLLGXAALDIYEXLKSNNMKLEEVVVXLQLGGDKEPXEXIGDLSICLDGLQLESEVVXNGEXXCSENGVSLCLPRLECNSAISAHCNLCLPGLSDSPISASRVAGFXGASQNDDGSRSKDEXRVSXNGSDDPEDAGAGENRRVSGNNSPSLSNGGFKPSRPPRPSRPPPPXPRRPASVNGSPSAXSESDGSSXGSLPPXNXNXNXSEGAXSGLIIPLXISGGSGPRPLNPVXQAPLPPGWEQRVDQHGRVYYVDHVEKRXXWDRPEPLPPGWERRVDNMGRIYYVDHFXRXXXWQRPXLESVRNYEQWQLQRSQLQGAMQQFNQRFIYGNQDLFAXSQSKEFDPLGPLPPGWEKRXDSNGRVYFVNHNXRIXQWEDPRSQGQLNEKPLPEGWEMRFXVDGIPYFVDHNRRXXXYIDPRXGKSALDNGPQIAYVRDFKAKVQYFRFWCQQLAMPQHIKIXVXRKXLFEDSFQQIMSFSPQDLRRRLWVIFPGEEGLDYGGVAREWFFLLSHEVLNPMYCLFEYAGKDNYCLQINPASYINPDHLKYFRFIGRFIAMALFHGKFIDXGFSLPFYKRILNKPVGLKDLESIDPEFYNSLIWVKENNIEECDLEMYFSVDKEILGEIKSHDLKPNGGNILVXEENKEEYIRMVAEWRLSRGVEEQXQAFFEGFNEILPQQYLQYFDAKELEVLLCGMQEIDLNDWQRHAIYRHYARXSKQIMWFWQFVKEIDNEKRMRLLQFVXGXCRLPVGGFADLMGSNGPQKFCIEKVGKENWLPRSHXCFNRLDLPPYKSYEQLKEKLLFAIEEXEGFGQE

SEQ ID NO: 13878 - protein, 862 aa, Homo sapiens
  MOD_RES (15)..(15): Selenocysteine
  MOD_RES (23)..(23): Selenocysteine
  MOD_RES (46)..(46): Selenocysteine
  MOD_RES (54)..(54): Selenocysteine
  MOD_RES (60)..(60): Selenocysteine
  MOD_RES (70)..(70): Selenocysteine
  MOD_RES (74)..(74): Selenocysteine
  MOD_RES (88)..(88): Selenocysteine
  MOD_RES (97)..(97): Selenocysteine
  MOD_RES (105)..(105): Selenocysteine
  MOD_RES (119)..(119): Selenocysteine
  MOD_RES (129)..(129): Selenocysteine
  MOD_RES (131)..(131): Selenocysteine
  MOD_RES (150)..(150): Selenocysteine
  MOD_RES (154)..(155): Selenocysteine
  MOD_RES (173)..(173): Selenocysteine
  MOD_RES (177)..(177): Selenocysteine
  MOD_RES (222)..(222): Selenocysteine
  MOD_RES (236)..(236): Selenocysteine
  MOD_RES (244)..(244): Selenocysteine
  MOD_RES (250)..(250): Selenocysteine
  MOD_RES (252)..(252): Selenocysteine
  MOD_RES (254)..(254): Selenocysteine
  MOD_RES (256)..(256): Selenocysteine
  MOD_RES (261)..(261): Selenocysteine
  MOD_RES (269)..(269): Selenocysteine
  MOD_RES (283)..(283): Selenocysteine
  MOD_RES (311)..(312): Selenocysteine
  MOD_RES (340)..(340): Selenocysteine
  MOD_RES (342)..(344): Selenocysteine
  MOD_RES (349)..(349): Selenocysteine
  MOD_RES (387)..(387): Selenocysteine
  MOD_RES (407)..(407): Selenocysteine
  MOD_RES (420)..(420): Selenocysteine
  MOD_RES (423)..(423): Selenocysteine
  MOD_RES (448)..(448): Selenocysteine
  MOD_RES (462)..(464): Selenocysteine
  MOD_RES (470)..(470): Selenocysteine
  MOD_RES (510)..(510): Selenocysteine
  MOD_RES (512)..(512): Selenocysteine
  MOD_RES (515)..(515): Selenocysteine
  MOD_RES (616)..(616): Selenocysteine
  MOD_RES (689)..(689): Selenocysteine
  MOD_RES (713)..(713): Selenocysteine
  MOD_RES (764)..(764): Selenocysteine
  MOD_RES (791)..(791): Selenocysteine
  MOD_RES (793)..(793): Selenocysteine
  MOD_RES (829)..(829): Selenocysteine
  MOD_RES (856)..(856): Selenocysteine
MSDSGSQLGSMGSLXMKSQLQIXVISAKLKENKKNWFGPSPYVEVXVDGQSKKXEKCNNXNSPKWKQPLXVIVXPVSKLHFRVWSHQXLKSDVLLGXAALDIYEXLKSNNMKLEEVVVXLQLGGDKEPXEXIGDLSICLDGLQLESEVVXNGEXXCSESASQNDDGSRSKDEXRVSXNGSDDPEDAGAGENRRVSGNNSPSLSNGGFKPSRPPRPSRPPPPXPRRPASVNGSPSAXSESDGSSXGSLPPXNXNXNXSEGAXSGLIIPLXISGGSGPRPLNPVXQAPLPPGWEQRVDQHGRVYYVDHVEKRXXWDRPEPLPPGWERRVDNMGRIYYVDHFXRXXXWQRPXLESVRNYEQWQLQRSQLQGAMQQFNQRFIYGNQDLFAXSQSKEFDPLGPLPPGWEKRXDSNGRVYFVNHNXRIXQWEDPRSQGQLNEKPLPEGWEMRFXVDGIPYFVDHNRRXXXYIDPRXGKSALDNGPQIAYVRDFKAKVQYFRFWCQQLAMPQHIKIXVXRKXLFEDSFQQIMSFSPQDLRRRLWVIFPGEEGLDYGGVAREWFFLLSHEVLNPMYCLFEYAGKDNYCLQINPASYINPDHLKYFRFIGRFIAMALFHGKFIDXGFSLPFYKRILNKPVGLKDLESIDPEFYNSLIWVKENNIEECDLEMYFSVDKEILGEIKSHDLKPNGGNILVXEENKEEYIRMVAEWRLSRGVEEQXQAFFEGFNEILPQQYLQYFDAKELEVLLCGMQEIDLNDWQRHAIYRHYARXSKQIMWFWQFVKEIDNEKRMRLLQFVXGXCRLPVGGFADLMGSNGPQKFCIEKVGKENWLPRSHXCFNRLDLPPYKSYEQLKEKLLFAIEEXEGFGQE

SEQ ID NO: 13879 - protein, 131 aa, Homo sapiens
  MOD_RES (16)..(16): Selenocysteine
  MOD_RES (24)..(24): Selenocysteine
  MOD_RES (57)..(57): Selenocysteine
  MOD_RES (76)..(76): Selenocysteine
  MOD_RES (84)..(84): Selenocysteine
  MOD_RES (105)..(105): Selenocysteine
  MOD_RES (112)..(112): Selenocysteine
  MOD_RES (131)..(131): Selenocysteine
GNGHEEVVACAWDGQXYIIDHNRXVVRFQVDENIRAFCAGLYACKEGRNSPCLVYVXFNQKIYVYWEVQLERMESXNLVKLLEXKPEYHSLLQELGVDPDDLPVXRALLHQXLYHPDQPPQCAPSSLQDPX

SEQ ID NO: 13880 - protein, 447 aa, Homo sapiens
  MOD_RES (32)..(32): Selenocysteine
  MOD_RES (41)..(41): Selenocysteine
  MOD_RES (58)..(58): Selenocysteine
  MOD_RES (66)..(66): Selenocysteine
  MOD_RES (96)..(96): Selenocysteine
  MOD_RES (109)..(109): Selenocysteine
  MOD_RES (127)..(127): Selenocysteine
  MOD_RES (148)..(148): Selenocysteine
  MOD_RES (168)..(168): Selenocysteine
  MOD_RES (189)..(189): Selenocysteine
  MOD_RES (213)..(213): Selenocysteine
  MOD_RES (218)..(218): Selenocysteine
  MOD_RES (228)..(228): Selenocysteine
  MOD_RES (234)..(234): Selenocysteine
  MOD_RES (245)..(245): Selenocysteine
  MOD_RES (256)..(256): Selenocysteine
  MOD_RES (268)..(268): Selenocysteine
  MOD_RES (280)..(280): Selenocysteine
  MOD_RES (284)..(284): Selenocysteine
  MOD_RES (316)..(316): Selenocysteine
  MOD_RES (332)..(332): Selenocysteine
  MOD_RES (340)..(340): Selenocysteine
  MOD_RES (373)..(373): Selenocysteine
  MOD_RES (392)..(392): Selenocysteine
  MOD_RES (400)..(400): Selenocysteine
  MOD_RES (421)..(421): Selenocysteine
  MOD_RES (428)..(428): Selenocysteine
  MOD_RES (447)..(447): Selenocysteine
MRSVSYVQRVALEFSGSLFPHAICLGDVDNDXLNELVVGDXSGKVSVYKNDDSRPWLXCSCQGMLXCVGVGDVCNKGKNLLVAVSAEGWFHLFDLXPAKVLDASGHHEXLIGEEQRPVFKQHIPANXKVMLISDIDGDGCRELVVGYXDRVVRAFRWEELGEGPEHLXGQLVSLKKWMLEGQVDSLSVXLGPLGLPELMVSQPGCAYAILLCXWKKDXGSPPASEGPXDGSREXPAARDVVLHQXSGRIHNKNVSXHLIGNIKQGHGXESSGSGLFALCXLDGXLKLMEEMEEADKLLWSVQVDHQLFALEKLDVXGNGHEEVVACAWDGQXYIIDHNRXVVRFQVDENIRAFCAGLYACKEGRNSPCLVYVXFNQKIYVYWEVQLERMESXNLVKLLEXKPEYHSLLQELGVDPDDLPVXRALLHQXLYHPDQPPQCAPSSLQDPX

SEQ ID NO: 13881 - protein, 147 aa, Homo sapiens
  MOD_RES (32)..(32): Selenocysteine
  MOD_RES (41)..(41): Selenocysteine
  MOD_RES (58)..(58): Selenocysteine
  MOD_RES (66)..(66): Selenocysteine
  MOD_RES (96)..(96): Selenocysteine
  MOD_RES (109)..(109): Selenocysteine
  MOD_RES (127)..(127): Selenocysteine
MRSVSYVQRVALEFSGSLFPHAICLGDVDNDXLNELVVGDXSGKVSVYKNDDSRPWLXCSCQGMLXCVGVGDVCNKGKNLLVAVSAEGWFHLFDLXPAKVLDASGHHEXLIGEEQRPVFKQHIPANXKVMLISDIGGHAYLCRQPGE

SEQ ID NO: 13882 - protein, 56 aa, Homo sapiens
  MOD_RES (32)..(32): Selenocysteine
  MOD_RES (44)..(44): Selenocysteine
  MOD_RES (46)..(46): Selenocysteine
MRSVSYVQRVALEFSGSLFPHAICLGDVDNDXMEMGVVSWWWAXQXVWCELSAGRS

SEQ ID NO: 13883 - protein, 17 aa, Homo sapiens
  MOD_RES (1)..(1): Any amino acid
  MOD_RES (7)..(7): Selenocysteine
XLVVGDXSGKVSVVLAG

SEQ ID NO: 13884 - protein, 57 aa, Homo sapiens
  MOD_RES (1)..(1): Any amino acid
  MOD_RES (2)..(2): Selenocysteine
  MOD_RES (10)..(10): Selenocysteine
  MOD_RES (31)..(31): Selenocysteine
  MOD_RES (38)..(38): Selenocysteine
  MOD_RES (57)..(57): Selenocysteine
XXNLVKLLEXKPEYHSLLQELGVDPDDLPVXRALLHQXLYHPDQPPQCAPSSLQDPX

SEQ ID NO: 13885 - protein, 59 aa, Homo sapiens
  MOD_RES (1)..(1): Any amino acid
  MOD_RES (13)..(13): Selenocysteine
  MOD_RES (21)..(21): Selenocysteine
XYWEVQLERMESXNLVKLLEXKPEYHSLLQELGVGESQKSQWPECPGDPQHAAGAGRGS

SEQ ID NO: 13886 - protein, 1179 aa, Homo sapiens
  MOD_RES (20)..(20): Selenocysteine
  MOD_RES (38)..(38): Selenocysteine
  MOD_RES (50)..(50): Selenocysteine
  MOD_RES (76)..(76): Selenocysteine
  MOD_RES (101)..(101): Selenocysteine
  MOD_RES (107)..(107): Selenocysteine
  MOD_RES (114)..(114): Selenocysteine
  MOD_RES (118)..(118): Selenocysteine
  MOD_RES (121)..(121): Selenocysteine
  MOD_RES (144)..(145): Selenocysteine
  MOD_RES (154)..(154): Selenocysteine
  MOD_RES (169)..(169): Selenocysteine
  MOD_RES (190)..(190): Selenocysteine
  MOD_RES (207)..(207): Selenocysteine
  MOD_RES (219)..(219): Selenocysteine
  MOD_RES (230)..(230): Selenocysteine
  MOD_RES (248)..(248): Selenocysteine
  MOD_RES (250)..(250): Selenocysteine
  MOD_RES (256)..(256): Selenocysteine
  MOD_RES (263)..(263): Selenocysteine
  MOD_RES (280)..(280): Selenocysteine
  MOD_RES (320)..(320): Selenocysteine
  MOD_RES (335)..(335): Selenocysteine
  MOD_RES (350)..(350): Selenocysteine
  MOD_RES (354)..(354): Selenocysteine
  MOD_RES (365)..(365): Selenocysteine
  MOD_RES (380)..(380): Selenocysteine
  MOD_RES (404)..(404): Selenocysteine
  MOD_RES (419)..(420): Selenocysteine
  MOD_RES (426)..(426): Selenocysteine
  MOD_RES (439)..(439): Selenocysteine
  MOD_RES (444)..(444): Selenocysteine
  MOD_RES (462)..(462): Selenocysteine
  MOD_RES (480)..(480): Selenocysteine
  MOD_RES (495)..(497): Selenocysteine
  MOD_RES (505)..(505): Selenocysteine
  MOD_RES (518)..(518): Selenocysteine
  MOD_RES (534)..(534): Selenocysteine
  MOD_RES (548)..(548): Selenocysteine
  MOD_RES (559)..(560): Selenocysteine
  MOD_RES (573)..(573): Selenocysteine
  MOD_RES (612)..(612): Selenocysteine
  MOD_RES (629)..(629): Selenocysteine
  MOD_RES (649)..(649): Selenocysteine
  MOD_RES (652)..(652): Selenocysteine
  MOD_RES (673)..(673): Selenocysteine
  MOD_RES (695)..(695): Selenocysteine
  MOD_RES (701)..(701): Selenocysteine
  MOD_RES (714)..(714): Selenocysteine
  MOD_RES (725)..(725): Selenocysteine
  MOD_RES (740)..(740): Selenocysteine
  MOD_RES (750)..(750): Selenocysteine
  MOD_RES (757)..(757): Selenocysteine
  MOD_RES (776)..(776): Selenocysteine
  MOD_RES (782)..(782): Selenocysteine
  MOD_RES (824)..(825): Selenocysteine
  MOD_RES (844)..(844): Selenocysteine
  MOD_RES (848)..(848): Selenocysteine
  MOD_RES (855)..(855): Selenocysteine
  MOD_RES (857)..(857): Selenocysteine
  MOD_RES (885)..(885): Selenocysteine
  MOD_RES (900)..(900): Selenocysteine
  MOD_RES (909)..(909): Selenocysteine
  MOD_RES (917)..(917): Selenocysteine
  MOD_RES (923)..(923): Selenocysteine
  MOD_RES (932)..(932): Selenocysteine
  MOD_RES (968)..(968): Selenocysteine
  MOD_RES (976)..(976): Selenocysteine
  MOD_RES (1010)..(1010): Selenocysteine
  MOD_RES (1020)..(1020): Selenocysteine
  MOD_RES (1048)..(1049): Selenocysteine
  MOD_RES (1051)..(1051): Selenocysteine
  MOD_RES (1058)..(1058): Selenocysteine
  MOD_RES (1064)..(1064): Selenocysteine
  MOD_RES (1069)..(1069): Selenocysteine
  MOD_RES (1071)..(1071): Selenocysteine
  MOD_RES (1075)..(1075): Selenocysteine
  MOD_RES (1092)..(1092): Selenocysteine
  MOD_RES (1104)..(1104): Selenocysteine
MAPRPRARPGVAVACCWLLXVVLRCCVSFNVDVKNSMXFSGPVEDMFGYXVQQYENEEGKWVLIGSPLVGQPKNRXGDVYKCPVGRGESLPCVKLDLPVNXSIPNVXEVKENMXFGSXLVXNPNGGFLACGPLYAYRCGHLHYXXGICSDVSPXFQVVNSIAPVQECSXQLDIVIVLDGSNSIYPWDSVXAFLNDLLERMDIGPKQXQVGIVQYGENVXHEFNLNKYSSXEEVLVAAKKIVQRGGRQXMXALGIDXARKEAFXEARGARRGVKKVMVIVXDGESHDNHRLKKVIQDCEDENIQRFSIAILGSYNRGNLSXEKFVEEIKSIASEPXEKHFFNVSDELALVXIVKXLGERIFALEAXADQSAASFEMEMSQXGFSAHYSQDWVMLGAVGAYDWNGXVVMQKASQIIIPRNXXFNVESXKKNEPLASYLGYXVNSAXASSGDVLYIAGQPRYNHXGQVIIYRMEDGNIKILQXLSGEQIGSYFGSILXXXDIDKDSNXDILLVGAPMYMGXEKEEQGKVYVYALNQXRFEYQMSLEPIKQXCCSSRQHNSCXXENKNEPCGARFGXAIAAVKDLNLDGFNDIVIGAPLEDDHGGAVYIYHGSGKXIRKEYAQRIPSGGDGKXLKFFGQSIHGEMDLNGDGLXDVXIGGLGGAALFWSRDVAVVKVXMNFEPNKVNIQKKNCHMEGKEXVCINAXVCFDVKLKSKEDXIYEADLQYRVXLDSLRQISRSFFSGXQERKVQRNIXVRKSECXKHSFYMLDKHDFQDSVRIXLDFNLXDPENGPVLDDSLPNSVHEYIPFAKDCGNKEKCISDLSLHVAXXEKDLLIVRSQNDKFNVSLXVKNXKDSAYNXRXIVHYSPNLVFSGIEAIQKDSCESNHNIXCKVGYPFLRRGEMVXFKILFQFNXSYLMENVXIYLSAXSDSEEPPEXLSDNVVNISIPVKYEVGLQFYSSASEYHISIAANEXVPEVINSXEDIGNEINIFYLIRKSGSFPMPELKLSISFPNMXSNGYPVLYPXGLSSSENANCRPHIFEDPFSINSGKKMXXSXDHLKRGXILDCNXCKFAXIXCNLXSSDISQVNVSLILWKPXFIKSYFSSLNLXIRGELRSENASLVLSSSNQKRELAIQISKDGLPGRVPLWVILLSAFAGLLLLMLLILALWKIGFFKRPLKKKMEK

SEQ ID NO: 13887 - protein, 1024 aa, Homo sapiens
  MOD_RES (7)..(7): Selenocysteine
  MOD_RES (17)..(17): Selenocysteine
  MOD_RES (21)..(21): Selenocysteine
  MOD_RES (43)..(43): Selenocysteine
  MOD_RES (81)..(81): Selenocysteine
  MOD_RES (100)..(100): Selenocysteine
  MOD_RES (102)..(102): Selenocysteine
  MOD_RES (111)..(111): Selenocysteine
  MOD_RES (132)..(132): Selenocysteine
  MOD_RES (155)..(155): Selenocysteine
  MOD_RES (181)..(181): Selenocysteine
  MOD_RES (195)..(195): Selenocysteine
  MOD_RES (201)..(201): Selenocysteine
  MOD_RES (236)..(236): Selenocysteine
  MOD_RES (352)..(352): Selenocysteine
  MOD_RES (357)..(358): Selenocysteine
  MOD_RES (376)..(376): Selenocysteine
  MOD_RES (391)..(391): Selenocysteine
  MOD_RES (395)..(395): Selenocysteine
  MOD_RES (444)..(444): Selenocysteine
  MOD_RES (506)..(506): Selenocysteine
  MOD_RES (512)..(512): Selenocysteine
  MOD_RES (534)..(534): Selenocysteine
  MOD_RES (542)..(542): Selenocysteine
  MOD_RES (545)..(545): Selenocysteine
  MOD_RES (558)..(558): Selenocysteine
  MOD_RES (565)..(565): Selenocysteine
  MOD_RES (592)..(592): Selenocysteine
  MOD_RES (603)..(603): Selenocysteine
  MOD_RES (613)..(613): Selenocysteine
  MOD_RES (615)..(615): Selenocysteine
  MOD_RES (621)..(622): Selenocysteine
  MOD_RES (634)..(634): Selenocysteine
  MOD_RES (654)..(654): Selenocysteine
  MOD_RES (685)..(686): Selenocysteine
  MOD_RES (697)..(697): Selenocysteine
  MOD_RES (713)..(713): Selenocysteine
  MOD_RES (743)..(743): Selenocysteine
  MOD_RES (748)..(748): Selenocysteine
  MOD_RES (769)..(769): Selenocysteine
  MOD_RES (780)..(780): Selenocysteine
  MOD_RES (785)..(785): Selenocysteine
  MOD_RES (788)..(788): Selenocysteine
  MOD_RES (805)..(805): Selenocysteine
  MOD_RES (816)..(816): Selenocysteine
  MOD_RES (827)..(828): Selenocysteine
  MOD_RES (866)..(866): Selenocysteine
  MOD_RES (877)..(877): Selenocysteine
  MOD_RES (892)..(892): Selenocysteine
  MOD_RES (900)..(900): Selenocysteine
  MOD_RES (916)..(916): Selenocysteine
  MOD_RES (940)..(940): Selenocysteine
  MOD_RES (944)..(944): Selenocysteine
  MOD_RES (949)..(949): Selenocysteine
  MOD_RES (958)..(958): Selenocysteine
  MOD_RES (973)..(973): Selenocysteine
MELPFVXHLFLPLVFLXGCPXYMDVVIVLDGSNSIYPWSEVQXFLRRLVGKLFIDPEQIQVGLVQYGESPVHEWSLGDFRXKEEVVRAAKNLSRREGREXKXAQAIMVACXEGFSQSHGGRPEAARLLVVVXDGESHDGEELPAALKACEAGRVXRYGIAVLGHYLRRQRDPSSFLREIRXIASDPDERFFFNVXDEAALXDIVDALGDRIFGLEGSHAENESSFGLEMSQIGFSXHRLKDGILFGMVGAYDWGGSVLWLEGGHRLFPPRMALEDEFPPALQNHAAYLGYSVSSMLLRGGRRLFLSGAPRFRHRGKVIAFQLKKDGAVRVAQSLQGEQIGSYFGSELCPLDXDRDGXXDVLLVAAPMFLGPQNKEXGRVYVYLVGQQSLLXLQGXLQPEPPQDARFGFAMGALPDLNQDGFADVAVGAPLEDGHQGALYLYHGXQSGVRPHPAQRIAAASMPHALSYFGRSVDGRLDLDGDDLVDVAVGAQGAAILLSSRPIVHLXPSLEVXPQAISVVQRDCRRRGQEAVCLXAALCFQVXSRXPGRWDHQFYMRFXASLDEWXAGARAAFDGSGQRLSPRRLRLSVGNVXCEQLHFHVLDXSDYLRPVALXVXFALDNXXKPGPVLNEGSPXSIQKLVPFSKDCGPDNECVXDLVLQVNMDIRGSRKAPFVVRGGRRKVLVSXXLENRKENAYNXSLSLIFSRNLHLASLXPQRESPIKVECAAPSAHARLCSVGHPVFQXGAKVXFLLEFEFSCSSLLSQVFVKLXASSDSLERNGXLQDNXAQXSAYIQYEPHLLFSSESXLHRYEVHPYGXLPVGPGPEFKXXLRVQNLGCYVVSGLIISALLPAVAHGGNYFLSLSQVIXNNASCIVQNLXEPPGPPVHPEELQHXNRLNGSNXQCQVVRCHLGQLAKGXEVSVGLLRLVHNEFFRRAKFKSLXVVSXFELGXEEGSVLQLXEASRWSESLLEVVQXRPILISLWILIGSVLGGLLLLALLVFCLWKLGFFAHKKIPEEEKREEKLEQ

SEQ ID NO: 13888 - protein, 1167 aa, Homo sapiens
  MOD_RES (7)..(7): Selenocysteine
  MOD_RES (17)..(17): Selenocysteine
  MOD_RES (115)..(115): Selenocysteine
  MOD_RES (158)..(158): Selenocysteine
  MOD_RES (164)..(164): Selenocysteine
  MOD_RES (186)..(186): Selenocysteine
  MOD_RES (224)..(224): Selenocysteine
  MOD_RES (243)..(243): Selenocysteine
  MOD_RES (245)..(245): Selenocysteine
  MOD_RES (254)..(254): Selenocysteine
  MOD_RES (275)..(275): Selenocysteine
  MOD_RES (298)..(298): Selenocysteine
  MOD_RES (324)..(324): Selenocysteine
  MOD_RES (338)..(338): Selenocysteine
  MOD_RES (344)..(344): Selenocysteine
  MOD_RES (379)..(379): Selenocysteine
  MOD_RES (495)..(495): Selenocysteine
  MOD_RES (500)..(501): Selenocysteine
  MOD_RES (519)..(519): Selenocysteine
  MOD_RES (534)..(534): Selenocysteine
  MOD_RES (538)..(538): Selenocysteine
  MOD_RES (587)..(587): Selenocysteine
  MOD_RES (649)..(649): Selenocysteine
  MOD_RES (655)..(655): Selenocysteine
  MOD_RES (677)..(677): Selenocysteine
  MOD_RES (685)..(685): Selenocysteine
  MOD_RES (688)..(688): Selenocysteine
  MOD_RES (701)..(701): Selenocysteine
  MOD_RES (708)..(708): Selenocysteine
  MOD_RES (735)..(735): Selenocysteine
  MOD_RES (746)..(746): Selenocysteine
  MOD_RES (756)..(756): Selenocysteine
  MOD_RES (758)..(758): Selenocysteine
  MOD_RES (764)..(765): Selenocysteine
  MOD_RES (777)..(777): Selenocysteine
  MOD_RES (797)..(797): Selenocysteine
  MOD_RES (828)..(829): Selenocysteine
  MOD_RES (840)..(840): Selenocysteine
  MOD_RES (856)..(856): Selenocysteine
  MOD_RES (886)..(886): Selenocysteine
  MOD_RES (891)..(891): Selenocysteine
  MOD_RES (912)..(912): Selenocysteine
  MOD_RES (923)..(923): Selenocysteine
  MOD_RES (928)..(928): Selenocysteine
  MOD_RES (931)..(931): Selenocysteine
  MOD_RES (948)..(948): Selenocysteine
  MOD_RES (959)..(959): Selenocysteine
  MOD_RES (970)..(971): Selenocysteine
  MOD_RES (1009)..(1009): Selenocysteine
  MOD_RES (1020)..(1020): Selenocysteine
  MOD_RES (1035)..(1035): Selenocysteine
  MOD_RES (1043)..(1043): Selenocysteine
  MOD_RES (1059)..(1059): Selenocysteine
  MOD_RES (1083)..(1083): Selenocysteine
  MOD_RES (1087)..(1087): Selenocysteine
  MOD_RES (1092)..(1092): Selenocysteine
  MOD_RES (1101)..(1101): Selenocysteine
  MOD_RES (1116)..(1116): Selenocysteine
MELPFVXHLFLPLVFLXGLCSPFNLDEHHPRLFPGPPEAEFGYSVLQHVGGGQRWMLVGAPWDGPSGDRRGDVYRCPVGGAHNAPCAKGHLGDYQLGNSSHPAVNMHLGMSLLEXDGDGGFMACAPLWSRACGSSVFSSGICARVDASFQPQGSLAPXAQRCPXYMDVVIVLDGSNSIYPWSEVQXFLRRLVGKLFIDPEQIQVGLVQYGESPVHEWSLGDFRXKEEVVRAAKNLSRREGREXKXAQAIMVACXEGFSQSHGGRPEAARLLVVVXDGESHDGEELPAALKACEAGRVXRYGIAVLGHYLRRQRDPSSFLREIRXIASDPDERFFFNVXDEAALXDIVDALGDRIFGLEGSHAENESSFGLEMSQIGFSXHRLKDGILFGMVGAYDWGGSVLWLEGGHRLFPPRMALEDEFPPALQNHAAYLGYSVSSMLLRGGRRLFLSGAPRFRHRGKVIAFQLKKDGAVRVAQSLQGEQIGSYFGSELCPLDXDRDGXXDVLLVAAPMFLGPQNKEXGRVYVYLVGQQSLLXLQGXLQPEPPQDARFGFAMGALPDLNQDGFADVAVGAPLEDGHQGALYLYHGXQSGVRPHPAQRIAAASMPHALSYFGRSVDGRLDLDGDDLVDVAVGAQGAAILLSSRPIVHLXPSLEVXPQAISVVQRDCRRRGQEAVCLXAALCFQVXSRXPGRWDHQFYMRFXASLDEWXAGARAAFDGSGQRLSPRRLRLSVGNVXCEQLHFHVLDXSDYLRPVALXVXFALDNXXKPGPVLNEGSPXSIQKLVPFSKDCGPDNECVXDLVLQVNMDIRGSRKAPFVVRGGRRKVLVSXXLENRKENAYNXSLSLIFSRNLHLASLXPQRESPIKVECAAPSAHARLCSVGHPVFQXGAKVXFLLEFEFSCSSLLSQVFVKLXASSDSLERNGXLQDNXAQXSAYIQYEPHLLFSSESXLHRYEVHPYGXLPVGPGPEFKXXLRVQNLGCYVVSGLIISALLPAVAHGGNYFLSLSQVIXNNASCIVQNLXEPPGPPVHPEELQHXNRLNGSNXQCQVVRCHLGQLAKGXEVSVGLLRLVHNEFFRRAKFKSLXVVSXFELGXEEGSVLQLXEASRWSESLLEVVQXRPILISLWILIGSVLGGLLLLALLVFCLWKLGFFAHKKIPEEEKREEKLEQ

SEQ ID NO: 13889 - protein, 1188 aa, Homo sapiens
  MOD_RES (20)..(20): Selenocysteine
  MOD_RES (22)..(22): Selenocysteine
  MOD_RES (27)..(27): Selenocysteine
  MOD_RES (38)..(38): Selenocysteine
  MOD_RES (44)..(44): Selenocysteine
  MOD_RES (64)..(64): Selenocysteine
  MOD_RES (70)..(70): Selenocysteine
  MOD_RES (84)..(84): Selenocysteine
  MOD_RES (92)..(92): Selenocysteine
  MOD_RES (111)..(111): Selenocysteine
  MOD_RES (135)..(136): Selenocysteine
  MOD_RES (151)..(151): Selenocysteine
  MOD_RES (161)..(161): Selenocysteine
  MOD_RES (238)..(238): Selenocysteine
  MOD_RES (240)..(240): Selenocysteine
  MOD_RES (242)..(242): Selenocysteine
  MOD_RES (270)..(270): Selenocysteine
  MOD_RES (293)..(293): Selenocysteine
  MOD_RES (312)..(312): Selenocysteine
  MOD_RES (333)..(333): Selenocysteine
  MOD_RES (355)..(355): Selenocysteine
  MOD_RES (360)..(360): Selenocysteine
  MOD_RES (369)..(369): Selenocysteine
  MOD_RES (398)..(398): Selenocysteine
  MOD_RES (428)..(428): Selenocysteine
  MOD_RES (430)..(430): Selenocysteine
  MOD_RES (451)..(451): Selenocysteine
  MOD_RES (458)..(458): Selenocysteine
  MOD_RES (466)..(466): Selenocysteine
  MOD_RES (485)..(485): Selenocysteine
  MOD_RES (495)..(495): Selenocysteine
  MOD_RES (530)..(530): Selenocysteine
  MOD_RES (587)..(587): Selenocysteine
  MOD_RES (593)..(593): Selenocysteine
  MOD_RES (599)..(599): Selenocysteine
  MOD_RES (667)..(667): Selenocysteine
  MOD_RES (676)..(676): Selenocysteine
  MOD_RES (686)..(688): Selenocysteine
  MOD_RES (696)..(696): Selenocysteine
  MOD_RES (703)..(703): Selenocysteine
  MOD_RES (716)..(716): Selenocysteine
  MOD_RES (739)..(739): Selenocysteine
  MOD_RES (747)..(747): Selenocysteine
  MOD_RES (769)..(770): Selenocysteine
  MOD_RES (801)..(801): Selenocysteine
  MOD_RES (821)..(821): Selenocysteine
  MOD_RES (826)..(827): Selenocysteine
  MOD_RES (834)..(834): Selenocysteine
  MOD_RES (843)..(843): Selenocysteine
  MOD_RES (854)..(854): Selenocysteine
  MOD_RES (939)..(939): Selenocysteine
  MOD_RES (960)..(960): Selenocysteine
  MOD_RES (1008)..(1008): Selenocysteine
  MOD_RES (1013)..(1013): Selenocysteine
  MOD_RES (1027)..(1027): Selenocysteine
  MOD_RES (1032)..(1032): Selenocysteine
  MOD_RES (1041)..(1041): Selenocysteine
  MOD_RES (1046)..(1046): Selenocysteine
  MOD_RES (1149)..(1149): Selenocysteine
  MOD_RES (1183)..(1183): Selenocysteine
MDLPRGLVVAWALSLWPGFXDXFNMDXRKPRVIPGSRXAFFGYXVQQHDISGNKWLVVGAPLEXNGYQKXGDVYKCPVIHGNCXKLNLGRVXLSNVSERKDNMRLGLSLAXNPKDNSFLACSPLWSHECGSSYYXXGMCSRVNSNFRFSKXVAPALQRCQXYMDIVIVLDGSNSIYPWVEVQHFLINILKKFYIGPGQIQVGVVQYGEDVVHEFHLNDYRSVKDVVEAASHIEQRGGXEXRXAFGIEFARSEAFQKGGRKGAKKVMIVIXDGESHDSPDLEKVIQQSERDNVXRYAVAVLGYYNRRGINPEXFLNEIKYIASDPDDKHFFNVXDEAALKDIVDALGDRIFSLEGXNKNEXSFGLEMSQXGFSSHVVEDGVLLGAVGAYDWNGAVLKEXSAGKVIPLRESYLKEFPEELKNHGAYLGYXVXSVVSSRQGRVYVAGAPRFNHXGKVILFXMHNNRSLXIHQAMRGQQIGSYFGSEIXSVDIDGDGVXDVLLVGAPMYFNEGRERGKVYVYELRQNLFVYNGXLKDSHSYQNARFGSSIASVRDLNQDSYNDVVVGAPLEDNHAGAIYIFHGFRGSILKXPKQRIXASELAXGLQYFGCSIHGQLDLNEDGLIDLAVGALGNAVILWSRPVVQINASLHFEPSKINIFHRDCKRSGRDAXCLAAFLCFXPIFLAPHFQXXXVGIRYNAXMDERRYXPRAHLDEGGDRFXNRAVLLSSGQELCERINFHVLDXADYVKPVXFSVEYSLEDPDHGPMLDDGWPXXLRVSVPFWNGCNEDEHCVPDLVLDARSDLPXAMEYCQRVLRKPAQDCSAYXLSFDXXVFIIESXRQRVAVEAXLENRGENAYSXVLNISQSANLQFASLIQKEDSDGSIECVNEERRLQKQVCNVSYPFFRAKAKVAFRLDFEFSKSIFLHHLEIELAAGSDSNERDSXKEDNVAPLRFHLKYEADVLFXRSSSLSHYEVKPNSSLERYDGIGPPFSCIFRIQNLGLFPIHGMMMKIXIPIAXRSGNRLLKLRDFLXDEANXSCNIWGNSXEYRPXPVEEDLRRAPQLNHSNSDVVSINCNIRLVPNQEINFHLLGNLWLRSLKALKYKSMKIMVNAALQRQFHSPFIFREEDPSRQIVFEISKQEDWQVPIWIIVGSXLGGLLLLALLVLALWKLGFFRSARRRREPGLDPXPKVLE

SEQ ID NO: 13890 - protein, 1189 aa, Homo sapiens
  MOD_RES (20)..(20): Selenocysteine
  MOD_RES (22)..(22): Selenocysteine
  MOD_RES (27)..(27): Selenocysteine
  MOD_RES (38)..(38): Selenocysteine
  MOD_RES (44)..(44): Selenocysteine
  MOD_RES (64)..(64): Selenocysteine
  MOD_RES (70)..(70): Selenocysteine
  MOD_RES (84)..(84): Selenocysteine
  MOD_RES (92)..(92): Selenocysteine
  MOD_RES (111)..(111): Selenocysteine
  MOD_RES (135)..(136): Selenocysteine
  MOD_RES (151)..(151): Selenocysteine
  MOD_RES (161)..(161): Selenocysteine
  MOD_RES (238)..(238): Selenocysteine
  MOD_RES (240)..(240): Selenocysteine
  MOD_RES (242)..(242): Selenocysteine
  MOD_RES (270)..(270): Selenocysteine
  MOD_RES (293)..(293): Selenocysteine
  MOD_RES (312)..(312): Selenocysteine
  MOD_RES (333)..(333): Selenocysteine
  MOD_RES (355)..(355): Selenocysteine
  MOD_RES (360)..(360): Selenocysteine
  MOD_RES (369)..(369): Selenocysteine
  MOD_RES (398)..(398): Selenocysteine
  MOD_RES (428)..(428): Selenocysteine
  MOD_RES (430)..(430): Selenocysteine
  MOD_RES (451)..(451): Selenocysteine
  MOD_RES (458)..(458): Selenocysteine
  MOD_RES (466)..(466): Selenocysteine
  MOD_RES (485)..(485): Selenocysteine
  MOD_RES (495)..(495): Selenocysteine
  MOD_RES (530)..(530): Selenocysteine
  MOD_RES (587)..(587): Selenocysteine
  MOD_RES (593)..(593): Selenocysteine
  MOD_RES (599)..(599): Selenocysteine
  MOD_RES (667)..(667): Selenocysteine
  MOD_RES (676)..(676): Selenocysteine
  MOD_RES (686)..(688): Selenocysteine
  MOD_RES (696)..(696): Selenocysteine
  MOD_RES (703)..(703): Selenocysteine
  MOD_RES (716)..(716): Selenocysteine
  MOD_RES (739)..(739): Selenocysteine
  MOD_RES (747)..(747): Selenocysteine
  MOD_RES (769)..(770): Selenocysteine
  MOD_RES (801)..(801): Selenocysteine
  MOD_RES (821)..(821): Selenocysteine
  MOD_RES (826)..(827): Selenocysteine
  MOD_RES (834)..(834): Selenocysteine
  MOD_RES (843)..(843): Selenocysteine
  MOD_RES (854)..(854): Selenocysteine
  MOD_RES (939)..(939): Selenocysteine
  MOD_RES (960)..(960): Selenocysteine
  MOD_RES (1008)..(1008): Selenocysteine
  MOD_RES (1013)..(1013): Selenocysteine
  MOD_RES (1027)..(1027): Selenocysteine
  MOD_RES (1033)..(1033): Selenocysteine
  MOD_RES (1042)..(1042): Selenocysteine
  MOD_RES (1047)..(1047): Selenocysteine
  MOD_RES (1150)..(1150): Selenocysteine
  MOD_RES (1184)..(1184): Selenocysteine
MDLPRGLVVAWALSLWPGFXDXFNMDXRKPRVIPGSRXAFFGYXVQQHDISGNKWLVVGAPLEXNGYQKXGDVYKCPVIHGNCXKLNLGRVXLSNVSERKDNMRLGLSLAXNPKDNSFLACSPLWSHECGSSYYXXGMCSRVNSNFRFSKXVAPALQRCQXYMDIVIVLDGSNSIYPWVEVQHFLINILKKFYIGPGQIQVGVVQYGEDVVHEFHLNDYRSVKDVVEAASHIEQRGGXEXRXAFGIEFARSEAFQKGGRKGAKKVMIVIXDGESHDSPDLEKVIQQSERDNVXRYAVAVLGYYNRRGINPEXFLNEIKYIASDPDDKHFFNVXDEAALKDIVDALGDRIFSLEGXNKNEXSFGLEMSQXGFSSHVVEDGVLLGAVGAYDWNGAVLKEXSAGKVIPLRESYLKEFPEELKNHGAYLGYXVXSVVSSRQGRVYVAGAPRFNHXGKVILFXMHNNRSLXIHQAMRGQQIGSYFGSEIXSVDIDGDGVXDVLLVGAPMYFNEGRERGKVYVYELRQNLFVYNGXLKDSHSYQNARFGSSIASVRDLNQDSYNDVVVGAPLEDNHAGAIYIFHGFRGSILKXPKQRIXASELAXGLQYFGCSIHGQLDLNEDGLIDLAVGALGNAVILWSRPVVQINASLHFEPSKINIFHRDCKRSGRDAXCLAAFLCFXPIFLAPHFQXXXVGIRYNAXMDERRYXPRAHLDEGGDRFXNRAVLLSSGQELCERINFHVLDXADYVKPVXFSVEYSLEDPDHGPMLDDGWPXXLRVSVPFWNGCNEDEHCVPDLVLDARSDLPXAMEYCQRVLRKPAQDCSAYXLSFDXXVFIIESXRQRVAVEAXLENRGENAYSXVLNISQSANLQFASLIQKEDSDGSIECVNEERRLQKQVCNVSYPFFRAKAKVAFRLDFEFSKSIFLHHLEIELAAGSDSNERDSXKEDNVAPLRFHLKYEADVLFXRSSSLSHYEVKPNSSLERYDGIGPPFSCIFRIQNLGLFPIHGMMMKIXIPIAXRSGNRLLKLRDFLXDEVANXSCNIWGNSXEYRPXPVEEDLRRAPQLNHSNSDVVSINCNIRLVPNQEINFHLLGNLWLRSLKALKYKSMKIMVNAALQRQFHSPFIFREEDPSRQIVFEISKQEDWQVPIWIIVGSXLGGLLLLALLVLALWKLGFFRSARRRREPGLDPXPKVLE

SEQ ID NO: 13891 - protein, 641 aa, Homo sapiens
  MOD_RES (6)..(6): Selenocysteine
  MOD_RES (89)..(89): Selenocysteine
  MOD_RES (91)..(91): Selenocysteine
  MOD_RES (99)..(99): Selenocysteine
  MOD_RES (101)..(101): Selenocysteine
  MOD_RES (107)..(107): Selenocysteine
  MOD_RES (111)..(111): Selenocysteine
  MOD_RES (120)..(120): Selenocysteine
  MOD_RES (125)..(125): Selenocysteine
  MOD_RES (130)..(130): Selenocysteine
  MOD_RES (145)..(146): Selenocysteine
  MOD_RES (166)..(166): Selenocysteine
  MOD_RES (207)..(207): Selenocysteine
  MOD_RES (209)..(209): Selenocysteine
  MOD_RES (228)..(228): Selenocysteine
  MOD_RES (231)..(231): Selenocysteine
  MOD_RES (239)..(239): Selenocysteine
  MOD_RES (242)..(242): Selenocysteine
  MOD_RES (250)..(250): Selenocysteine
  MOD_RES (252)..(252): Selenocysteine
  MOD_RES (275)..(275): Selenocysteine
  MOD_RES (282)..(282): Selenocysteine
  MOD_RES (322)..(322): Selenocysteine
  MOD_RES (337)..(337): Selenocysteine
  MOD_RES (356)..(356): Selenocysteine
  MOD_RES (367)..(367): Selenocysteine
  MOD_RES (407)..(407): Selenocysteine
  MOD_RES (412)..(412): Selenocysteine
  MOD_RES (446)..(446): Selenocysteine
  MOD_RES (450)..(450): Selenocysteine
  MOD_RES (462)..(462): Selenocysteine
  MOD_RES (477)..(477): Selenocysteine
  MOD_RES (504)..(504): Selenocysteine
  MOD_RES (506)..(506): Selenocysteine
  MOD_RES (531)..(531): Selenocysteine
  MOD_RES (552)..(552): Selenocysteine
  MOD_RES (595)..(595): Selenocysteine
  MOD_RES (598)..(598): Selenocysteine
  MOD_RES (606)..(606): Selenocysteine
  MOD_RES (612)..(612): Selenocysteine
  MOD_RES (631)..(631): Selenocysteine
MGPERXGAAPLPLLLVLALSQGILNCCLAYNVGLPEAKIFSGPSSEQFGYAVQQFINPKGNWLLVGSPWSGFPENRMGDVYKCPVDLSXAXCEKLNLQXSXSIPNVXEMKXNMSLGLILXRNMGXGGFLXCGPLWAQQCGNQYYXXGVCSDISPDFQLSASFSPAXQPCPSLIDVVVVCDESNSIYPWDAVKNFLEKFVQGLDIGPXKXQVGLIQYANNPRVVFNLNXYKXKEEMIVAXSQXSQYGGDLXNXFGAIQYARKYAYSAASGGRRSAXKVMVVVXDGESHDGSMLKAVIDQCNHDNILRFGIAVLGYLNRNALDXKNLIKEIKAIASIPXERYFFNVSDEAALLEKAGXLGEQIFSIEGXVQGGDNFQMEMSQVGFSADYSSQNDILMLGAVGAFGWSGXIVQKXSHGHLIFPKQAFDQILQDRNHSSYLGYSVAAISXGESXHFVAGAPRANYXGQIVLYSVNENGNIXVIQAHRGDQIGSYFGSVLCSVDVDKDXIXDVLLVGAPMYMSDLKKEEGRVYLFXIKEGILGQHQFLEGPEGIENXRFGSAIAALSDINMDGFNDVIVGSPLENQNSGAVYIYNGHQGXIRXKYSQLLCXIISCQXCSFRKSWDPMEPLGAISSXLGGPWMAMEI

SEQ ID NO: 13892 - protein, 815 aa, Homo sapiens
  MOD_RES (6)..(6): Selenocysteine
  MOD_RES (89)..(89): Selenocysteine
  MOD_RES (91)..(91): Selenocysteine
  MOD_RES (99)..(99): Selenocysteine
  MOD_RES (101)..(101): Selenocysteine
  MOD_RES (107)..(107): Selenocysteine
  MOD_RES (111)..(111): Selenocysteine
  MOD_RES (120)..(120): Selenocysteine
  MOD_RES (125)..(125): Selenocysteine
  MOD_RES (130)..(130): Selenocysteine
  MOD_RES (145)..(146): Selenocysteine
  MOD_RES (166)..(166): Selenocysteine
  MOD_RES (207)..(207): Selenocysteine
  MOD_RES (209)..(209): Selenocysteine
  MOD_RES (228)..(228): Selenocysteine
  MOD_RES (231)..(231): Selenocysteine
  MOD_RES (239)..(239): Selenocysteine
  MOD_RES (242)..(242): Selenocysteine
  MOD_RES (250)..(250): Selenocysteine
  MOD_RES (252)..(252): Selenocysteine
  MOD_RES (275)..(275): Selenocysteine
  MOD_RES (282)..(282): Selenocysteine
  MOD_RES (322)..(322): Selenocysteine
  MOD_RES (337)..(337): Selenocysteine
  MOD_RES (356)..(356): Selenocysteine
  MOD_RES (367)..(367): Selenocysteine
  MOD_RES (407)..(407): Selenocysteine
  MOD_RES (412)..(412): Selenocysteine
  MOD_RES (446)..(446): Selenocysteine
  MOD_RES (450)..(450): Selenocysteine
  MOD_RES (462)..(462): Selenocysteine
  MOD_RES (477)..(477): Selenocysteine
  MOD_RES (504)..(504): Selenocysteine
  MOD_RES (506)..(506): Selenocysteine
  MOD_RES (531)..(531): Selenocysteine
  MOD_RES (552)..(552): Selenocysteine
  MOD_RES (595)..(595): Selenocysteine
  MOD_RES (598)..(598): Selenocysteine
  MOD_RES (634)..(634): Selenocysteine
  MOD_RES (662)..(662): Selenocysteine
  MOD_RES (667)..(667): Selenocysteine
  MOD_RES (688)..(688): Selenocysteine
  MOD_RES (701)..(701): Selenocysteine
  MOD_RES (712)..(712): Selenocysteine
  MOD_RES (767)..(767): Selenocysteine
  MOD_RES (777)..(777): Selenocysteine
MGPERXGAAPLPLLLVLALSQGILNCCLAYNVGLPEAKIFSGPSSEQFGYAVQQFINPKGNWLLVGSPWSGFPENRMGDVYKCPVDLSXAXCEKLNLQXSXSIPNVXEMKXNMSLGLILXRNMGXGGFLXCGPLWAQQCGNQYYXXGVCSDISPDFQLSASFSPAXQPCPSLIDVVVVCDESNSIYPWDAVKNFLEKFVQGLDIGPXKXQVGLIQYANNPRVVFNLNXYKXKEEMIVAXSQXSQYGGDLXNXFGAIQYARKYAYSAASGGRRSAXKVMVVVXDGESHDGSMLKAVIDQCNHDNILRFGIAVLGYLNRNALDXKNLIKEIKAIASIPXERYFFNVSDEAALLEKAGXLGEQIFSIEGXVQGGDNFQMEMSQVGFSADYSSQNDILMLGAVGAFGWSGXIVQKXSHGHLIFPKQAFDQILQDRNHSSYLGYSVAAISXGESXHFVAGAPRANYXGQIVLYSVNENGNIXVIQAHRGDQIGSYFGSVLCSVDVDKDXIXDVLLVGAPMYMSDLKKEEGRVYLFXIKEGILGQHQFLEGPEGIENXRFGSAIAALSDINMDGFNDVIVGSPLENQNSGAVYIYNGHQGXIRXKYSQKILGSDGAFRSHLQYFGRSLDGYGDLNGDSIXDVSIGAFGQVVQLWSQSIADVAIEASFXPEKIXLVNKNAQIILKLCFSAKFRPXKQNNQVAIVYNIXLDADGFSSRVXSRGLFKENNERCLQKNMVVNQAQSCPEHIIYIQEPSDVVNSLDLRVDISLENPGXSPALEAYSEXAKVFSIPFHKDCGEDGLCISDLVLDVRQIPAAQLMGQK

SEQ ID NO: 13893 - protein, 942 aa, Homo sapiens
  MOD_RES (6)..(6): Selenocysteine
  MOD_RES (89)..(89): Selenocysteine
  MOD_RES (91)..(91): Selenocysteine
  MOD_RES (99)..(99): Selenocysteine
  MOD_RES (101)..(101): Selenocysteine
  MOD_RES (107)..(107): Selenocysteine
  MOD_RES (111)..(111): Selenocysteine
  MOD_RES (120)..(120): Selenocysteine
  MOD_RES (125)..(125): Selenocysteine
  MOD_RES (130)..(130): Selenocysteine
  MOD_RES (145)..(146): Selenocysteine
  MOD_RES (166)..(166): Selenocysteine
  MOD_RES (207)..(207): Selenocysteine
  MOD_RES (209)..(209): Selenocysteine
  MOD_RES (228)..(228): Selenocysteine
  MOD_RES (231)..(231): Selenocysteine
  MOD_RES (239)..(239): Selenocysteine
  MOD_RES (242)..(242): Selenocysteine
  MOD_RES (250)..(250): Selenocysteine
  MOD_RES (252)..(252): Selenocysteine
  MOD_RES (275)..(275): Selenocysteine
  MOD_RES (282)..(282): Selenocysteine
  MOD_RES (322)..(322): Selenocysteine
  MOD_RES (337)..(337): Selenocysteine
  MOD_RES (356)..(356): Selenocysteine
  MOD_RES (367)..(367): Selenocysteine
  MOD_RES (407)..(407): Selenocysteine
  MOD_RES (412)..(412): Selenocysteine
  MOD_RES (446)..(446): Selenocysteine
  MOD_RES (450)..(450): Selenocysteine
  MOD_RES (462)..(462): Selenocysteine
  MOD_RES (477)..(477): Selenocysteine
  MOD_RES (504)..(504): Selenocysteine
  MOD_RES (506)..(506): Selenocysteine
  MOD_RES (531)..(531): Selenocysteine
  MOD_RES (552)..(552): Selenocysteine
  MOD_RES (595)..(595): Selenocysteine
  MOD_RES (598)..(598): Selenocysteine
  MOD_RES (634)..(634): Selenocysteine
  MOD_RES (662)..(662): Selenocysteine
  MOD_RES (667)..(667): Selenocysteine
  MOD_RES (688)..(688): Selenocysteine
  MOD_RES (701)..(701): Selenocysteine
  MOD_RES (712)..(712): Selenocysteine
  MOD_RES (767)..(767): Selenocysteine
  MOD_RES (777)..(777): Selenocysteine
  MOD_RES (824)..(824): Selenocysteine
  MOD_RES (828)..(828): Selenocysteine
  MOD_RES (839)..(839): Selenocysteine
  MOD_RES (861)..(861): Selenocysteine
  MOD_RES (864)..(864): Selenocysteine
  MOD_RES (890)..(890): Selenocysteine
  MOD_RES (892)..(892): Selenocysteine
  MOD_RES (941)..(941): Selenocysteine
MGPERXGAAPLPLLLVLALSQGILNCCLAYNVGLPEAKIFSGPSSEQFGYAVQQFINPKGNWLLVGSPWSGFPENRMGDVYKCPVDLSXAXCEKLNLQXSXSIPNVXEMKXNMSLGLILXRNMGXGGFLXCGPLWAQQCGNQYYXXGVCSDISPDFQLSASFSPAXQPCPSLIDVVVVCDESNSIYPWDAVKNFLEKFVQGLDIGPXKXQVGLIQYANNPRVVFNLNXYKXKEEMIVAXSQXSQYGGDLXNXFGAIQYARKYAYSAASGGRRSAXKVMVVVXDGESHDGSMLKAVIDQCNHDNILRFGIAVLGYLNRNALDXKNLIKEIKAIASIPXERYFFNVSDEAALLEKAGXLGEQIFSIEGXVQGGDNFQMEMSQVGFSADYSSQNDILMLGAVGAFGWSGXIVQKXSHGHLIFPKQAFDQILQDRNHSSYLGYSVAAISXGESXHFVAGAPRANYXGQIVLYSVNENGNIXVIQAHRGDQIGSYFGSVLCSVDVDKDXIXDVLLVGAPMYMSDLKKEEGRVYLFXIKEGILGQHQFLEGPEGIENXRFGSAIAALSDINMDGFNDVIVGSPLENQNSGAVYIYNGHQGXIRXKYSQKILGSDGAFRSHLQYFGRSLDGYGDLNGDSIXDVSIGAFGQVVQLWSQSIADVAIEASFXPEKIXLVNKNAQIILKLCFSAKFRPXKQNNQVAIVYNIXLDADGFSSRVXSRGLFKENNERCLQKNMVVNQAQSCPEHIIYIQEPSDVVNSLDLRVDISLENPGXSPALEAYSEXAKVFSIPFHKDCGEDGLCISDLVLDVRQIPAAQEQPFIVSNQNKRLXFSVXLKNKRESAYNXGIVVDFSENLFFASFSLPVDGXEVXCQVAASQKSVACDVGYPALKREQQVXFXINFDFNLQNLQNQASLSFQALSESQEENKADNLVNLKIPLLYDAEIHLXR

SEQ ID NO: 13894 - protein, 1181 aa, Homo sapiens
  MOD_RES (6)..(6): Selenocysteine
  MOD_RES (89)..(89): Selenocysteine
  MOD_RES (91)..(91): Selenocysteine
  MOD_RES (99)..(99): Selenocysteine
  MOD_RES (101)..(101): Selenocysteine
  MOD_RES (107)..(107): Selenocysteine
  MOD_RES (111)..(111): Selenocysteine
  MOD_RES (120)..(120): Selenocysteine
  MOD_RES (125)..(125): Selenocysteine
  MOD_RES (130)..(130): Selenocysteine
  MOD_RES (145)..(146): Selenocysteine
  MOD_RES (166)..(166): Selenocysteine
  MOD_RES (207)..(207): Selenocysteine
  MOD_RES (209)..(209): Selenocysteine
  MOD_RES (228)..(228): Selenocysteine
  MOD_RES (231)..(231): Selenocysteine
  MOD_RES (239)..(239): Selenocysteine
  MOD_RES (242)..(242): Selenocysteine
  MOD_RES (250)..(250): Selenocysteine
  MOD_RES (252)..(252): Selenocysteine
  MOD_RES (275)..(275): Selenocysteine
  MOD_RES (282)..(282): Selenocysteine
  MOD_RES (322)..(322): Selenocysteine
  MOD_RES (337)..(337): Selenocysteine
  MOD_RES (356)..(356): Selenocysteine
  MOD_RES (367)..(367): Selenocysteine
  MOD_RES (407)..(407): Selenocysteine
  MOD_RES (412)..(412): Selenocysteine
  MOD_RES (446)..(446): Selenocysteine
  MOD_RES (450)..(450): Selenocysteine
  MOD_RES (462)..(462): Selenocysteine
  MOD_RES (477)..(477): Selenocysteine
  MOD_RES (504)..(504): Selenocysteine
  MOD_RES (506)..(506): Selenocysteine
  MOD_RES (531)..(531): Selenocysteine
  MOD_RES (552)..(552): Selenocysteine
  MOD_RES (595)..(595): Selenocysteine
  MOD_RES (598)..(598): Selenocysteine
  MOD_RES (634)..(634): Selenocysteine
  MOD_RES (662)..(662): Selenocysteine
  MOD_RES (667)..(667): Selenocysteine
  MOD_RES (688)..(688): Selenocysteine
  MOD_RES (701)..(701): Selenocysteine
  MOD_RES (712)..(712): Selenocysteine
  MOD_RES (767)..(767): Selenocysteine
  MOD_RES (777)..(777): Selenocysteine
  MOD_RES (824)..(824): Selenocysteine
  MOD_RES (828)..(828): Selenocysteine
  MOD_RES (839)..(839): Selenocysteine
  MOD_RES (861)..(861): Selenocysteine
  MOD_RES (864)..(864): Selenocysteine
  MOD_RES (890)..(890): Selenocysteine
  MOD_RES (892)..(892): Selenocysteine
  MOD_RES (941)..(941): Selenocysteine
  MOD_RES (944)..(944): Selenocysteine
  MOD_RES (978)..(979): Selenocysteine
  MOD_RES (988)..(988): Selenocysteine
  MOD_RES (997)..(997): Selenocysteine
  MOD_RES (1007)..(1007): Selenocysteine
  MOD_RES (1011)..(1011): Selenocysteine
  MOD_RES (1031)..(1031): Selenocysteine
  MOD_RES (1045)..(1045): Selenocysteine
  MOD_RES (1052)..(1052): Selenocysteine
  MOD_RES (1059)..(1059): Selenocysteine
  MOD_RES (1076)..(1077): Selenocysteine
  MOD_RES (1083)..(1083): Selenocysteine
  MOD_RES (1088)..(1088): Selenocysteine
  MOD_RES (1091)..(1091): Selenocysteine
  MOD_RES (1095)..(1095): Selenocysteine
  MOD_RES (1102)..(1102): Selenocysteine
  MOD_RES (1114)..(1114): Selenocysteine
  MOD_RES (1116)..(1116): Selenocysteine
  MOD_RES (1132)..(1132): Selenocysteine
  MOD_RES (1167)..(1167): Selenocysteine
  MOD_RES (1176)..(1177): Selenocysteine
MGPERXGAAPLPLLLVLALSQGILNCCLAYNVGLPEAKIFSGPSSEQFGYAVQQFINPKGNWLLVGSPWSGFPENRMGDVYKCPVDLSXAXCEKLNLQXSXSIPNVXEMKXNMSLGLILXRNMGXGGFLXCGPLWAQQCGNQYYXXGVCSDISPDFQLSASFSPAXQPCPSLIDVVVVCDESNSIYPWDAVKNFLEKFVQGLDIGPXKXQVGLIQYANNPRVVFNLNXYKXKEEMIVAXSQXSQYGGDLXNXFGAIQYARKYAYSAASGGRRSAXKVMVVVXDGESHDGSMLKAVIDQCNHDNILRFGIAVLGYLNRNALDXKNLIKEIKAIASIPXERYFFNVSDEAALLEKAGXLGEQIFSIEGXVQGGDNFQMEMSQVGFSADYSSQNDILMLGAVGAFGWSGXIVQKXSHGHLIFPKQAFDQILQDRNHSSYLGYSVAAISXGESXHFVAGAPRANYXGQIVLYSVNENGNIXVIQAHRGDQIGSYFGSVLCSVDVDKDXIXDVLLVGAPMYMSDLKKEEGRVYLFXIKEGILGQHQFLEGPEGIENXRFGSAIAALSDINMDGFNDVIVGSPLENQNSGAVYIYNGHQGXIRXKYSQKILGSDGAFRSHLQYFGRSLDGYGDLNGDSIXDVSIGAFGQVVQLWSQSIADVAIEASFXPEKIXLVNKNAQIILKLCFSAKFRPXKQNNQVAIVYNIXLDADGFSSRVXSRGLFKENNERCLQKNMVVNQAQSCPEHIIYIQEPSDVVNSLDLRVDISLENPGXSPALEAYSEXAKVFSIPFHKDCGEDGLCISDLVLDVRQIPAAQEQPFIVSNQNKRLXFSVXLKNKRESAYNXGIVVDFSENLFFASFSLPVDGXEVXCQVAASQKSVACDVGYPALKREQQVXFXINFDFNLQNLQNQASLSFQALSESQEENKADNLVNLKIPLLYDAEIHLXRSXNINFYEISSDGNVPSIVHSFEDVGPKFIFSLKVXXGSVPVSMAXVIIHIPQYXKEKNPLMYLXGVQXDKAGDISCNADINPLKIGQXSSSVSFKSENFRHXKELNCRXASCSNVXCWLKDVHMKGEYFVNVXXRIWNGXFASSXFQXVQLXAAAEINXYNPEIYVIEDNXVXIPLMIMKPDEKAEVPXGVIIGSIIAGILLLLALVAILWKLGFFKRKYEKMXKNPDEIDEXXELSS

SEQ ID NO: 13895 - protein, 175 aa, Homo sapiens
  MOD_RES (6)..(6): Selenocysteine
  MOD_RES (89)..(89): Selenocysteine
  MOD_RES (91)..(91): Selenocysteine
  MOD_RES (99)..(99): Selenocysteine
  MOD_RES (101)..(101): Selenocysteine
  MOD_RES (107)..(107): Selenocysteine
  MOD_RES (111)..(111): Selenocysteine
  MOD_RES (120)..(120): Selenocysteine
  MOD_RES (125)..(125): Selenocysteine
  MOD_RES (130)..(130): Selenocysteine
  MOD_RES (145)..(146): Selenocysteine
  MOD_RES (166)..(166): Selenocysteine
MGPERXGAAPLPLLLVLALSQGILNCCLAYNVGLPEAKIFSGPSSEQFGYAVQQFINPKGNWLLVGSPWSGFPENRMGDVYKCPVDLSXAXCEKLNLQXSXSIPNVXEMKXNMSLGLILXRNMGXGGFLXCGPLWAQQCGNQYYXXGVCSDISPDFQLSASFSPAXQRGVNSVCQ

SEQ ID NO: 13896 - protein, 54 aa, Homo sapiens
  MOD_RES (6)..(6): Selenocysteine
  MOD_RES (35)..(35): Selenocysteine
  MOD_RES (46)..(46): Selenocysteine
MGPERXGAAPLPLLLVLALSQGYWLVHPGVAFLRXEWEMCINVLLXYPLPHVKN

SEQ ID NO: 13897 - protein, 1039 aa, Homo sapiens
  MOD_RES (40)..(40): Selenocysteine
  MOD_RES (73)..(73): Selenocysteine
  MOD_RES (81)..(81): Selenocysteine
  MOD_RES (107)..(107): Selenocysteine
  MOD_RES (114)..(114): Selenocysteine
  MOD_RES (117)..(117): Selenocysteine
  MOD_RES (150)..(150): Selenocysteine
  MOD_RES (156)..(156): Selenocysteine
  MOD_RES (181)..(181): Selenocysteine
  MOD_RES (207)..(207): Selenocysteine
  MOD_RES (281)..(282): Selenocysteine
  MOD_RES (290)..(290): Selenocysteine
  MOD_RES (294)..(294): Selenocysteine
  MOD_RES (327)..(327): Selenocysteine
  MOD_RES (379)..(379): Selenocysteine
  MOD_RES (381)..(381): Selenocysteine
  MOD_RES (444)..(444): Selenocysteine
  MOD_RES (509)..(509): Selenocysteine
  MOD_RES (511)..(511): Selenocysteine
  MOD_RES (525)..(525): Selenocysteine
  MOD_RES (562)..(563): Selenocysteine
  MOD_RES (578)..(579): Selenocysteine
  MOD_RES (607)..(607): Selenocysteine
  MOD_RES (621)..(621): Selenocysteine
  MOD_RES (627)..(627): Selenocysteine
  MOD_RES (646)..(646): Selenocysteine
  MOD_RES (650)..(650): Selenocysteine
  MOD_RES (713)..(713): Selenocysteine
  MOD_RES (814)..(814): Selenocysteine
  MOD_RES (824)..(824): Selenocysteine
  MOD_RES (917)..(917): Selenocysteine
  MOD_RES (935)..(935): Selenocysteine
  MOD_RES (984)..(984): Selenocysteine
  MOD_RES (1012)..(1012): Selenocysteine
MARALCPLQALWLLEWVLLLLGPCAAPPAWALNLDPVQLXFYAGPNGSQFGFSLDFHKDSHGRVAIVVGAPRXLGPSQEEXGGVFLCPWRAEGGQCPSLLFDLRDEXRNVGSQXLQXFKARQGLGASVVSWSDVIVACAPWQHWNVLEKXEEAEKXPVGSCFLAQPESGRRAEYSPCRGNXLSRIYVENDFSWDKRYCEAGFSSVVXQAGELVLGAPGGYYFLGLLAQAPVADIFSSYRPGILLWHVSSQSLSFDSSNPEYFDGYWGYSVAVGEFDGDLNXXEYVVGAPXWSWXLGAVEILDSYYQRLHRLRGEQMASYFGHSVAVXDVNGDGRHDLLVGAPLYMESRADRKLAEVGRVYLFLQPRGPHALGAPSLLLXGXQLYGRFGSAIAPLGDLDRDGYNDIAVAAPYGGPSGRGQVLVFLGQSEGLRSRPSQVLDSPFPXGSAFGFSLRGAVDIDDNGYPDLIVGAYGANQVAVYRAQPVVKASVQLLVQDSLNPAVKSCVLPQXKXPVSCFNIQMCVGAXGHNIPQKLSLNAELQLDRQKPRQGRRVLLLGSQQAGXXLNLDLGGKHSPICHXXMAFLRDEADFRDKLSPIVLSLNVSLPPXEAGMAPAVVLHGDXHVQEQXRIVLDCGEDDVCVPQLQLXASVXGSPLLVGADNVLELQMDAANEGEGAYEAELAVHLPQGAHYMRALSNVEGFERLICNQKKENEXRVVLCELGNPMKKNAQIGIAMLVSVGNLEEAGESVSFQLQIRSKNSQNPNSKIVLLDVPVRAEAQVELRGNSFPASLVVAAEEGEREQNSLDSWGPKVEHXYELHNNGPGXVNGLHLSIHLPGQSQPSDLLYILDIQPQGGLQCFPQPPVNPLKVDWGLPIPSPSPIHPAHHKRDRRQIFLPEPEQPSRLQDPVLVSCDSAPCXVVQCDLQEMARGQRAMVXVLAFLWLPSLYQRPLDQFVLQSHAWFNVSSLPYAVPPLSLPRGEAQVWXQLLRALEERAIPIWWVLVGVLGGLLLLXILVLAMWKVGFFKRNRPPLEEDDEEGE

SEQ ID NO: 13898 - protein, 104 aa, Homo sapiens
  MOD_RES (1)..(1): Any amino acid
  MOD_RES (32)..(32): Selenocysteine
  MOD_RES (42)..(42): Selenocysteine
XNSFPASLVVAAEEGEREQNSLDSWGPKVEHXYELHNNGPGXVNGLHLSIHLPGQSQPSDLLYILDIQPQGGLQCFPQPPVNPLKVGFFKRNRPPLEEDDEEGE

SEQ ID NO: 13899 - protein, 32 aa, Homo sapiens
  MOD_RES (1)..(1): Any amino acid
XVPPLSLPRGEAQVGFFKRNRPPLEEDDEEGE

SEQ ID NO: 13900 - protein, 142 aa, Homo sapiens
  MOD_RES (37)..(37): Selenocysteine
  MOD_RES (62)..(62): Selenocysteine
  MOD_RES (85)..(85): Selenocysteine
  MOD_RES (88)..(88): Selenocysteine
  MOD_RES (97)..(97): Selenocysteine
  MOD_RES (109)..(109): Selenocysteine
  MOD_RES (127)..(127): Selenocysteine
  MOD_RES (140)..(140): Selenocysteine
  MOD_RES (142)..(142): Selenocysteine
MGPGPSRAPRAPRLMLCALALMVAAGGCVVSAFNLDXRFLVVKEAGNPGSLFGYSVALHRQXERQQRYLLLAGAPRELAVPDGYXNRXGAVYLCPLXAHKDDCERMNIXVKNDPGHHIIEDMWLGVXVASQGPAGRVLEXAX

SEQ ID NO: 13901 - protein, 1051 aa, Homo sapiens
  MOD_RES (37)..(37): Selenocysteine
  MOD_RES (62)..(62): Selenocysteine
  MOD_RES (85)..(85): Selenocysteine
  MOD_RES (88)..(88): Selenocysteine
  MOD_RES (97)..(97): Selenocysteine
  MOD_RES (109)..(109): Selenocysteine
  MOD_RES (127)..(127): Selenocysteine
  MOD_RES (145)..(145): Selenocysteine
  MOD_RES (179)..(179): Selenocysteine
  MOD_RES (189)..(189): Selenocysteine
  MOD_RES (194)..(194): Selenocysteine
  MOD_RES (201)..(201): Selenocysteine
  MOD_RES (206)..(206): Selenocysteine
  MOD_RES (209)..(209): Selenocysteine
  MOD_RES (253)..(253): Selenocysteine
  MOD_RES (267)..(267): Selenocysteine
  MOD_RES (270)..(270): Selenocysteine
  MOD_RES (351)..(351): Selenocysteine
  MOD_RES (429)..(429): Selenocysteine
  MOD_RES (472)..(472): Selenocysteine
  MOD_RES (486)..(486): Selenocysteine
  MOD_RES (488)..(488): Selenocysteine
  MOD_RES (513)..(513): Selenocysteine
  MOD_RES (517)..(517): Selenocysteine
  MOD_RES (607)..(607): Selenocysteine
  MOD_RES (658)..(658): Selenocysteine
  MOD_RES (660)..(660): Selenocysteine
  MOD_RES (662)..(662): Selenocysteine
  MOD_RES (676)..(676): Selenocysteine
  MOD_RES (699)..(699): Selenocysteine
  MOD_RES (726)..(726): Selenocysteine
  MOD_RES (729)..(729): Selenocysteine
  MOD_RES (740)..(740): Selenocysteine
  MOD_RES (753)..(753): Selenocysteine
  MOD_RES (759)..(759): Selenocysteine
  MOD_RES (762)..(762): Selenocysteine
  MOD_RES (778)..(778): Selenocysteine
  MOD_RES (787)..(787): Selenocysteine
  MOD_RES (813)..(813): Selenocysteine
  MOD_RES (834)..(834): Selenocysteine
  MOD_RES (837)..(837): Selenocysteine
  MOD_RES (859)..(859): Selenocysteine
  MOD_RES (889)..(889): Selenocysteine
  MOD_RES (900)..(900): Selenocysteine
  MOD_RES (903)..(903): Selenocysteine
  MOD_RES (906)..(906): Selenocysteine
  MOD_RES (925)..(925): Selenocysteine
  MOD_RES (928)..(928): Selenocysteine
  MOD_RES (937)..(937): Selenocysteine
  MOD_RES (955)..(955): Selenocysteine
  MOD_RES (960)..(960): Selenocysteine
  MOD_RES (964)..(964): Selenocysteine
  MOD_RES (971)..(972): Selenocysteine
  MOD_RES (1024)..(1024): Selenocysteine
  MOD_RES (1044)..(1044): Selenocysteine
  MOD_RES (1048)..(1048): Selenocysteine
MGPGPSRAPRAPRLMLCALALMVAAGGCVVSAFNLDXRFLVVKEAGNPGSLFGYSVALHRQXERQQRYLLLAGAPRELAVPDGYXNRXGAVYLCPLXAHKDDCERMNIXVKNDPGHHIIEDMWLGVXVASQGPAGRVLVCAHRYXQVLWSGSEDQRRMVGKCYVRGNDLELDSSDDWQXYHNEMCNSNXDYLEXGMCQLGXSGGFXQNXVYFGAPGAYNWKGNSYMIQRKEWDLSEYSYKDPEDQGNLYIGYXMQVGSFILHPKNIXIVXGAPRHRHMGAVFLLSQEAGGDLRRRQVLEGSQVGAYFGSAIALADLNNDGWQDLLVGAPYYFERKEEVGGAIYVFMNQAGXSFPAHPSLLLHGPSGSAFGLSVASIGDINQDGFQDIAVGAPFEGLGKVYIYHSSSKGLLRQPQQVIHGEKLGLPGLAXFGYSLSGQMDVDENFYPDLLVGSLSDHIVLLRARPVINIVHKXLVPRPAVLDPALCXAXSCVQVELCFAYNQSAGNPNYRRNIXLAYXLEADRDRRPPRLRFAGSESAVFHGFFSMPEMRCQKLELLLMDNLRDKLRPIIISMNYSLPLRMPDRPRLGLRSLDAYPILNQAQALENHXEVQFQKECGPDNKCESNLQMRAAFVSEQQQKLSRLQYSRDVRKLLLSINVXNXRXSERSGEDAHEALLXLVVPPALLLSSVRPPGACQANEXIFCELGNPFKRNQRMELLIAFEVIGVXLHXRDLQVQLQLSXSSHQDNLWPMILXLLVDYXLQXSLSMVNHRLQSFFGGXVMGESGMKXVEDVGSPLKYEFQVGPMGEGLVGLGXLVLGLEWPYEVSNGKWLLYPXEIXVHGNGSWPCRPPGDLINPLNLXLSDPGDRPSSPQRRRRQLDPGGGQGPPPVXLAAAKKAKSEXVLXCAXGRAHCVWLECPIPDAPVVXNVXVKARVWNSXFIEDYRDFDRVRVNGWAXLFLRXSIPXINMENKXXWFSVDIDSELVEELPAEIELWLVLVAVGAGLLLLGLIILLLWKCGFFKRARXRALYEAKRQKAEMKSQPSEXERLXDDY

SEQ ID NO: 13902 - protein, 1066 aa, Homo sapiens
  MOD_RES (37)..(37): Selenocysteine
  MOD_RES (62)..(62): Selenocysteine
  MOD_RES (85)..(85): Selenocysteine
  MOD_RES (88)..(88): Selenocysteine
  MOD_RES (97)..(97): Selenocysteine
  MOD_RES (109)..(109): Selenocysteine
  MOD_RES (127)..(127): Selenocysteine
  MOD_RES (145)..(145): Selenocysteine
  MOD_RES (179)..(179): Selenocysteine
  MOD_RES (189)..(189): Selenocysteine
  MOD_RES (194)..(194): Selenocysteine
  MOD_RES (201)..(201): Selenocysteine
  MOD_RES (206)..(206): Selenocysteine
  MOD_RES (209)..(209): Selenocysteine
  MOD_RES (253)..(253): Selenocysteine
  MOD_RES (267)..(267): Selenocysteine
  MOD_RES (270)..(270): Selenocysteine
  MOD_RES (351)..(351): Selenocysteine
  MOD_RES (429)..(429): Selenocysteine
  MOD_RES (472)..(472): Selenocysteine
  MOD_RES (486)..(486): Selenocysteine
  MOD_RES (488)..(488): Selenocysteine
  MOD_RES (513)..(513): Selenocysteine
  MOD_RES (517)..(517): Selenocysteine
  MOD_RES (607)..(607): Selenocysteine
  MOD_RES (658)..(658): Selenocysteine
  MOD_RES (660)..(660): Selenocysteine
  MOD_RES (662)..(662): Selenocysteine
  MOD_RES (676)..(676): Selenocysteine
  MOD_RES (699)..(699): Selenocysteine
  MOD_RES (726)..(726): Selenocysteine
  MOD_RES (729)..(729): Selenocysteine
  MOD_RES (740)..(740): Selenocysteine
  MOD_RES (753)..(753): Selenocysteine
  MOD_RES (759)..(759): Selenocysteine
  MOD_RES (762)..(762): Selenocysteine
  MOD_RES (778)..(778): Selenocysteine
  MOD_RES (787)..(787): Selenocysteine
  MOD_RES (813)..(813): Selenocysteine
  MOD_RES (834)..(834): Selenocysteine
  MOD_RES (837)..(837): Selenocysteine
  MOD_RES (859)..(859): Selenocysteine
  MOD_RES (889)..(889): Selenocysteine
  MOD_RES (900)..(900): Selenocysteine
  MOD_RES (903)..(903): Selenocysteine
  MOD_RES (906)..(906): Selenocysteine
  MOD_RES (925)..(925): Selenocysteine
  MOD_RES (928)..(928): Selenocysteine
  MOD_RES (937)..(937): Selenocysteine
  MOD_RES (955)..(955): Selenocysteine
  MOD_RES (960)..(960): Selenocysteine
  MOD_RES (964)..(964): Selenocysteine
  MOD_RES (971)..(972): Selenocysteine
  MOD_RES (1022)..(1022): Selenocysteine
  MOD_RES (1048)..(1048): Selenocysteine
  MOD_RES (1051)..(1051): Selenocysteine
  MOD_RES (1057)..(1057): Selenocysteine
  MOD_RES (1061)..(1061): Selenocysteine
MGPGPSRAPRAPRLMLCALALMVAAGGCVVSAFNLDXRFLVVKEAGNPGSLFGYSVALHRQXERQQRYLLLAGAPRELAVPDGYXNRXGAVYLCPLXAHKDDCERMNIXVKNDPGHHIIEDMWLGVXVASQGPAGRVLVCAHRYXQVLWSGSEDQRRMVGKCYVRGNDLELDSSDDWQXYHNEMCNSNXDYLEXGMCQLGXSGGFXQNXVYFGAPGAYNWKGNSYMIQRKEWDLSEYSYKDPEDQGNLYIGYXMQVGSFILHPKNIXIVXGAPRHRHMGAVFLLSQEAGGDLRRRQVLEGSQVGAYFGSAIALADLNNDGWQDLLVGAPYYFERKEEVGGAIYVFMNQAGXSFPAHPSLLLHGPSGSAFGLSVASIGDINQDGFQDIAVGAPFEGLGKVYIYHSSSKGLLRQPQQVIHGEKLGLPGLAXFGYSLSGQMDVDENFYPDLLVGSLSDHIVLLRARPVINIVHKXLVPRPAVLDPALCXAXSCVQVELCFAYNQSAGNPNYRRNIXLAYXLEADRDRRPPRLRFAGSESAVFHGFFSMPEMRCQKLELLLMDNLRDKLRPIIISMNYSLPLRMPDRPRLGLRSLDAYPILNQAQALENHXEVQFQKECGPDNKCESNLQMRAAFVSEQQQKLSRLQYSRDVRKLLLSINVXNXRXSERSGEDAHEALLXLVVPPALLLSSVRPPGACQANEXIFCELGNPFKRNQRMELLIAFEVIGVXLHXRDLQVQLQLSXSSHQDNLWPMILXLLVDYXLQXSLSMVNHRLQSFFGGXVMGESGMKXVEDVGSPLKYEFQVGPMGEGLVGLGXLVLGLEWPYEVSNGKWLLYPXEIXVHGNGSWPCRPPGDLINPLNLXLSDPGDRPSSPQRRRRQLDPGGGQGPPPVXLAAAKKAKSEXVLXCAXGRAHCVWLECPIPDAPVVXNVXVKARVWNSXFIEDYRDFDRVRVNGWAXLFLRXSIPXINMENKXXWFSVDIDSELVEELPAEIELWLVLVAVGAGLLLLGLIILLLWKCDFFKRXRYYQIMPKYHAVRIREEERYPPPGSXLPXKKHWVXSWQXRDQYY

SEQ ID NO: 13903 - protein, 117 aa, Homo sapiens
  MOD_RES (63)..(63): Selenocysteine
  MOD_RES (106)..(106): Selenocysteine
WDLSEYSYKDPEDQGNLYIDIAVGAPFEGLGKVYIYHSSSKGLLRQPQQVIHGEKLGLPGLAXFGYSLSGQMDVDENFYPDLLVGSLSDHIVLLRARPVINIVHKXLVPRPAVLDPA

SEQ ID NO: 13904 - protein, 84 aa, Homo sapiens
  MOD_RES (1)..(1): Any amino acid
  MOD_RES (52)..(52): Selenocysteine
XINQDGFQDIAVGAPFEGLGKVYIYHSSSKGLLRQPQQVIHGEKLGLPGLAXFGYSLSGQMDVDENFYPDLLVGSLSDHIVLLR

SEQ ID NO: 13905 - protein, 29 aa, Homo sapiens
  MOD_RES (1)..(1): Any amino acid
  MOD_RES (5)..(5): Selenocysteine
  MOD_RES (8)..(8): Selenocysteine
  MOD_RES (17)..(17): Selenocysteine
  MOD_RES (27)..(27): Selenocysteine
XPVVXNVXVKARVWNSXFIEHPAQDLXQK

SEQ ID NO: 13906 - protein, 221 aa, Homo sapiens
  MOD_RES (1)..(1): Any amino acid
  MOD_RES (37)..(37): Selenocysteine
  MOD_RES (39)..(39): Selenocysteine
  MOD_RES (41)..(41): Selenocysteine
  MOD_RES (55)..(55): Selenocysteine
  MOD_RES (78)..(78): Selenocysteine
  MOD_RES (105)..(105): Selenocysteine
  MOD_RES (108)..(108): Selenocysteine
  MOD_RES (119)..(119): Selenocysteine
  MOD_RES (132)..(132): Selenocysteine
  MOD_RES (138)..(138): Selenocysteine
  MOD_RES (141)..(141): Selenocysteine
  MOD_RES (157)..(157): Selenocysteine
  MOD_RES (166)..(166): Selenocysteine
  MOD_RES (183)..(183): Selenocysteine
  MOD_RES (185)..(185): Selenocysteine
XSNLQMRAAFVSEQQQKLSRLQYSRDVRKLLLSINVXNXRXSERSGEDAHEALLXLVVPPALLLSSVRPPGACQANEXIFCELGNPFKRNQRMELLIAFEVIGVXLHXRDLQVQLQLSXSSHQDNLWPMILXLLVDYXLQXSLSMVNHRLQSFFGGXVMGESGMKXVEDVGSPLKYEFQPDPXLXMRQGPRGGVLSYPWLSEPAWLCPLPHGLCPKAHLRS

SEQ ID NO: 13907 - protein, 614 aa, Homo sapiens
  MOD_RES (19)..(19): Selenocysteine
  MOD_RES (30)..(30): Selenocysteine
  MOD_RES (38)..(38): Selenocysteine
  MOD_RES (50)..(50): Selenocysteine
  MOD_RES (73)..(73): Selenocysteine
  MOD_RES (100)..(100): Selenocysteine
  MOD_RES (117)..(117): Selenocysteine
  MOD_RES (130)..(130): Selenocysteine
  MOD_RES (143)..(143): Selenocysteine
  MOD_RES (162)..(162): Selenocysteine
  MOD_RES (174)..(174): Selenocysteine
  MOD_RES (207)..(207): Selenocysteine
  MOD_RES (222)..(222): Selenocysteine
  MOD_RES (231)..(232): Selenocysteine
  MOD_RES (265)..(266): Selenocysteine
  MOD_RES (332)..(332): Selenocysteine
  MOD_RES (356)..(356): Selenocysteine
  MOD_RES (413)..(413): Selenocysteine
  MOD_RES (463)..(463): Selenocysteine
  MOD_RES (482)..(482): Selenocysteine
  MOD_RES (499)..(499): Selenocysteine
  MOD_RES (540)..(540): Selenocysteine
  MOD_RES (545)..(545): Selenocysteine
  MOD_RES (559)..(559): Selenocysteine
  MOD_RES (573)..(573): Selenocysteine
  MOD_RES (593)..(593): Selenocysteine
MAWEARREPGPRRAAVREXVMLLLCLGVPXGRPYNVDXESALLYQGPHNXLFGYSVVLHSHGANRWLLVGAPXANWLANASVINPGAIYRCRIGKNPGQXCEQLQLGSPNGEPCGKXCLEERDNQWLGVXLSRQPGENGSIVXCGHRWKNIFYIKNENKLPXGGCYGVPPDLRXELSKRIAPCYQDYVKKFGENFASCQAGISSFYXKDLIVMGAPGSSYWXGSLFVYNIXXNKYKAFLDKQNQVKFGSYLGYSVGAGHFRSQHXXEVVGGAPQHEQIGKAYIFSIDEKELNILHEMKGKKLGSYFGASVCAVDLNADGFSDLLVGAPMQSXIREEGRVFVYINSGSGAVMNAMEXNLVGSDKYAARFGESIVNLGDIDNDGFEDVAIGAPQEDDLQGAIYIYNGRADGISSXFSQRIEGLQISKSLSMFGQSISGQIDADNNGYVDVAVGAFRSDSAVLLRXRPVVIVDASLSHPESVNRXKFDCVENGWPSVCIDLXLCFSYKGKEVPGYIVLFYNMSLDVNRKAESPPRFYFSSNGXSDVIXGSIQVSSREANCRXHQAFMRKDVRDILXPIQIEAAYHLGPHVISKRSXEEFPPLQPILQQKKEKDIMKK

SEQ ID NO: 13908 - protein, 1032 aa, Homo sapiens
  MOD_RES (19)..(19): Selenocysteine
  MOD_RES (30)..(30): Selenocysteine
  MOD_RES (38)..(38): Selenocysteine
  MOD_RES (50)..(50): Selenocysteine
  MOD_RES (73)..(73): Selenocysteine
  MOD_RES (100)..(100): Selenocysteine
  MOD_RES (117)..(117): Selenocysteine
  MOD_RES (130)..(130): Selenocysteine
  MOD_RES (143)..(143): Selenocysteine
  MOD_RES (162)..(162): Selenocysteine
  MOD_RES (174)..(174): Selenocysteine
  MOD_RES (207)..(207): Selenocysteine
  MOD_RES (222)..(222): Selenocysteine
  MOD_RES (231)..(232): Selenocysteine
  MOD_RES (265)..(266): Selenocysteine
  MOD_RES (332)..(332): Selenocysteine
  MOD_RES (356)..(356): Selenocysteine
  MOD_RES (413)..(413): Selenocysteine
  MOD_RES (463)..(463): Selenocysteine
  MOD_RES (482)..(482): Selenocysteine
  MOD_RES (499)..(499): Selenocysteine
  MOD_RES (540)..(540): Selenocysteine
  MOD_RES (545)..(545): Selenocysteine
  MOD_RES (559)..(559): Selenocysteine
  MOD_RES (573)..(573): Selenocysteine
  MOD_RES (593)..(593): Selenocysteine
  MOD_RES (615)..(615): Selenocysteine
  MOD_RES (647)..(647): Selenocysteine
  MOD_RES (656)..(656): Selenocysteine
  MOD_RES (673)..(674): Selenocysteine
  MOD_RES (701)..(701): Selenocysteine
  MOD_RES (745)..(745): Selenocysteine
  MOD_RES (749)..(749): Selenocysteine
  MOD_RES (765)..(765): Selenocysteine
  MOD_RES (777)..(777): Selenocysteine
  MOD_RES (785)..(785): Selenocysteine
  MOD_RES (799)..(799): Selenocysteine
  MOD_RES (808)..(808): Selenocysteine
  MOD_RES (814)..(814): Selenocysteine
  MOD_RES (836)..(836): Selenocysteine
  MOD_RES (847)..(849): Selenocysteine
  MOD_RES (872)..(872): Selenocysteine
  MOD_RES (883)..(883): Selenocysteine
  MOD_RES (931)..(931): Selenocysteine
  MOD_RES (941)..(941): Selenocysteine
  MOD_RES (977)..(977): Selenocysteine
MAWEARREPGPRRAAVREXVMLLLCLGVPXGRPYNVDXESALLYQGPHNXLFGYSVVLHSHGANRWLLVGAPXANWLANASVINPGAIYRCRIGKNPGQXCEQLQLGSPNGEPCGKXCLEERDNQWLGVXLSRQPGENGSIVXCGHRWKNIFYIKNENKLPXGGCYGVPPDLRXELSKRIAPCYQDYVKKFGENFASCQAGISSFYXKDLIVMGAPGSSYWXGSLFVYNIXXNKYKAFLDKQNQVKFGSYLGYSVGAGHFRSQHXXEVVGGAPQHEQIGKAYIFSIDEKELNILHEMKGKKLGSYFGASVCAVDLNADGFSDLLVGAPMQSXIREEGRVFVYINSGSGAVMNAMEXNLVGSDKYAARFGESIVNLGDIDNDGFEDVAIGAPQEDDLQGAIYIYNGRADGISSXFSQRIEGLQISKSLSMFGQSISGQIDADNNGYVDVAVGAFRSDSAVLLRXRPVVIVDASLSHPESVNRXKFDCVENGWPSVCIDLXLCFSYKGKEVPGYIVLFYNMSLDVNRKAESPPRFYFSSNGXSDVIXGSIQVSSREANCRXHQAFMRKDVRDILXPIQIEAAYHLGPHVISKRSXEEFPPLQPILQQKKEKDIMKKXINFARFCAHENCSADLQVSAKIGFLKPHENKXYLAVGSMKXLMLNVSLFNAGDDAYEXXLHVKLPVGLYFIKILELEEKQINCEVXDNSGVVQLDCSIGYIYVDHLSRIDISFLLDVSSLSRAEEDLSIXVHAXCENEEEMDNLKHSRVXVAIPLKYEVKLXVHGFVNPXSFVYGSNDENEPEXCMVEKMNLXFHVINXGNSMAPNVSVEIMVPNSFSPQXDKLFNILDVQXXXGECHFENYQRVCALEQQKSAMQXLKGIVRFLSKXDKRLLYCIKADPHCLNFLCNFGKMESGKEASVHIQLEGRPSILEMDEXSALKFEIRAXGFPEPNPRVIELNKDENVAHVLLEGLHHQRPKRYFXIVIISSSLLLGLIVLLLISYVMWKAGFFKRQYKSILQEENRRDSWSYINSKSNDD

SEQ ID NO: 13909 - protein, 195 aa, Homo sapiens
  MOD_RES (19)..(19): Selenocysteine
  MOD_RES (30)..(30): Selenocysteine
  MOD_RES (38)..(38): Selenocysteine
  MOD_RES (50)..(50): Selenocysteine
  MOD_RES (73)..(73): Selenocysteine
  MOD_RES (100)..(100): Selenocysteine
  MOD_RES (117)..(117): Selenocysteine
  MOD_RES (130)..(130): Selenocysteine
  MOD_RES (143)..(143): Selenocysteine
  MOD_RES (162)..(162): Selenocysteine
  MOD_RES (174)..(174): Selenocysteine
  MOD_RES (195)..(195): Selenocysteine
MAWEARREPGPRRAAVREXVMLLLCLGVPXGRPYNVDXESALLYQGPHNXLFGYSVVLHSHGANRWLLVGAPXANWLANASVINPGAIYRCRIGKNPGQXCEQLQLGSPNGEPCGKXCLEERDNQWLGVXLSRQPGENGSIVXCGHRWKNIFYIKNENKLPXGGCYGVPPDLRXELSKRIAPCYQGSISKYRARX

SEQ ID NO: 13910 - protein, 137 aa, Homo sapiens
  MOD_RES (5)..(5): Selenocysteine
  MOD_RES (71)..(71): Selenocysteine
  MOD_RES (81)..(81): Selenocysteine
  MOD_RES (115)..(115): Selenocysteine
  MOD_RES (125)..(125): Selenocysteine
MGSRXPESPLHAVQLRWGPRRRPPLLPLLLLLLPPPPRVGGFNLDAEAPAVLSGPPGSFFGFSVEFYRPGXDGLSAPGVLXVQLRGRGACGVQVLAVVRGNSSSPWLLHLGMRSXVQLAHREGAXERPRGHLLPLHR

SEQ ID NO: 13911 - protein, 1049 aa, Homo sapiens
  MOD_RES (5)..(5): Selenocysteine
  MOD_RES (71)..(71): Selenocysteine
  MOD_RES (85)..(85): Selenocysteine
  MOD_RES (106)..(106): Selenocysteine
  MOD_RES (109)..(109): Selenocysteine
  MOD_RES (145)..(145): Selenocysteine
  MOD_RES (164)..(164): Selenocysteine
  MOD_RES (175)..(175): Selenocysteine
  MOD_RES (180)..(180): Selenocysteine
  MOD_RES (184)..(184): Selenocysteine
  MOD_RES (214)..(214): Selenocysteine
  MOD_RES (216)..(216): Selenocysteine
  MOD_RES (237)..(237): Selenocysteine
  MOD_RES (260)..(260): Selenocysteine
  MOD_RES (286)..(286): Selenocysteine
  MOD_RES (299)..(299): Selenocysteine
  MOD_RES (304)..(304): Selenocysteine
  MOD_RES (333)..(333): Selenocysteine
  MOD_RES (354)..(354): Selenocysteine
  MOD_RES (378)..(378): Selenocysteine
  MOD_RES (380)..(380): Selenocysteine
  MOD_RES (382)..(382): Selenocysteine
  MOD_RES (384)..(384): Selenocysteine
  MOD_RES (397)..(397): Selenocysteine
  MOD_RES (420)..(420): Selenocysteine
  MOD_RES (452)..(452): Selenocysteine
  MOD_RES (500)..(500): Selenocysteine
  MOD_RES (543)..(543): Selenocysteine
  MOD_RES (569)..(569): Selenocysteine
  MOD_RES (571)..(571): Selenocysteine
  MOD_RES (573)..(573): Selenocysteine
  MOD_RES (677)..(677): Selenocysteine
  MOD_RES (696)..(696): Selenocysteine
  MOD_RES (750)..(750): Selenocysteine
  MOD_RES (757)..(757): Selenocysteine
  MOD_RES (760)..(760): Selenocysteine
  MOD_RES (793)..(793): Selenocysteine
  MOD_RES (862)..(862): Selenocysteine
  MOD_RES (865)..(865): Selenocysteine
  MOD_RES (870)..(871): Selenocysteine
  MOD_RES (944)..(944): Selenocysteine
  MOD_RES (984)..(984): Selenocysteine
  MOD_RES (989)..(989): Selenocysteine
  MOD_RES (1034)..(1034): Selenocysteine
  MOD_RES (1046)..(1046): Selenocysteine
MGSRXPESPLHAVQLRWGPRRRPPLLPLLLLLLPPPPRVGGFNLDAEAPAVLSGPPGSFFGFSVEFYRPGXDGVSVLVGAPKANXSQPGVLQGGAVYLCPWGASPXQCXPIEFDSKGSRLLESSLSSSEGEEPVEYKSLQWFGAXVRAHGSSILACAPLYSWRXEKEPLSDPVGXCYLSXDNFXRILEYAPCRSDFSWAAGQGYCQGGFSAEFXKXGRVVLGGPGSYFWQGQILSAXQEQIAESYYPEYLINLVQGQLQXRQASSIYDDSYLGYSVAVGEFSGDDXEDFVAGVPKGNLXYGYVXILNGSDIRSLYNFSGEQMASYFGYAVAAXDVNGDGLDDLLVGAPLLMDRXPDGRPQEVGRVYVYLQHPAGIEPXPXLXLXGHDEFGRFGSSLXPLGDLDQDGYNDVAIGAPFGGEXQQGVVFVFPGGPGGLGSKPSQVLQPLWAASHXPDFFGSALRGGRDLDGNGYPDLIVGSFGVDKAVVYRGRPIVSASASLXIFPAMFNPEERSCSLEGNPVACINLSFCLNASGKHVADSIGFXVELQLDWQKQKGGVRRALFLASRQAXLXQXLLIQNGAREDCREMKIYLRNESEFRDKLSPIHIALNFSLDPQAPVDSHGLRPALHYQSKSRIEDKAQILLDCGEDNICVPDLQLEVFGEQNHVYLGDKNALNLXFHAQNVGEGGAYEAELRVXAPPEAEYSGLVRHPGNFSSLSCDYFAVNQSRLLVCDLGNPMKAGASLWGGLRFXVPHLRDXKKXIQFDFQILSKNLNNSQSDVVSFRLSVEAQAQVXLNGVSKPEAVLFPVSDWHPRDQPQKEEDLGPAVHHVYELINQGPSSISQGVLELSCPQALEGQQLLYVXRVXGLNCXXNHPINPKGLELDPEGSLHHQQKREAPSRSSASSGPQILKCPEAECFRLRCELGPLHQQESQSLQLHFRVWAKXFLQREHQPFSLQCEAVYKALKMPYRILPRQLPQKERQVAXAVQWXKAEGSYGVPLWIIILAILFGLLLLGLLIYILYKLGFFKRSLPYGXAMEKAQLKPPAXSDA

SEQ ID NO: 13912 - protein, 120 aa, Homo sapiens
  MOD_RES (1)..(1): Any amino acid
  MOD_RES (48)..(48): Selenocysteine
  MOD_RES (62)..(62): Selenocysteine
  MOD_RES (83)..(83): Selenocysteine
  MOD_RES (86)..(86): Selenocysteine
  MOD_RES (98)..(98): Selenocysteine
  MOD_RES (108)..(108): Selenocysteine
XLLPLLLLLLPPPPRVGGFNLDAEAPAVLSGPPGSFFGFSVEFYRPGXDGVSVLVGAPKANXSQPGVLQGGAVYLCPWGASPXQCXPIEFDSKGMRSXVQLAHREGAXERPRGHLLPLHR

SEQ ID NO: 13913 - protein, 119 aa, Homo sapiens
  MOD_RES (1)..(1): Any amino acid
  MOD_RES (54)..(54): Selenocysteine
  MOD_RES (59)..(59): Selenocysteine
  MOD_RES (104)..(104): Selenocysteine
  MOD_RES (116)..(116): Selenocysteine
XREAPSRSSASSGPQILREHQPFSLQCEAVYKALKMPYRILPRQLPQKERQVAXAVQWXKAEGSYGVPLWIIILAILFGLLLLGLLIYILYKLGFFKRSLPYGXAMEKAQLKPPAXSDA

SEQ ID NO: 13914 - protein, 1073 aa, Homo sapiens
  MOD_RES (28)..(28): Selenocysteine
  MOD_RES (80)..(80): Selenocysteine
  MOD_RES (89)..(89): Selenocysteine
  MOD_RES (95)..(95): Selenocysteine
  MOD_RES (106)..(106): Selenocysteine
  MOD_RES (118)..(118): Selenocysteine
  MOD_RES (130)..(130): Selenocysteine
  MOD_RES (143)..(143): Selenocysteine
  MOD_RES (195)..(195): Selenocysteine
  MOD_RES (197)..(197): Selenocysteine
  MOD_RES (210)..(210): Selenocysteine
  MOD_RES (225)..(225): Selenocysteine
  MOD_RES (243)..(243): Selenocysteine
  MOD_RES (275)..(275): Selenocysteine
  MOD_RES (372)..(372): Selenocysteine
  MOD_RES (419)..(419): Selenocysteine
  MOD_RES (422)..(422): Selenocysteine
  MOD_RES (460)..(460): Selenocysteine
  MOD_RES (473)..(473): Selenocysteine
  MOD_RES (475)..(475): Selenocysteine
  MOD_RES (477)..(477): Selenocysteine
  MOD_RES (487)..(487): Selenocysteine
  MOD_RES (506)..(506): Selenocysteine
  MOD_RES (521)..(521): Selenocysteine
  MOD_RES (549)..(549): Selenocysteine
  MOD_RES (553)..(553): Selenocysteine
  MOD_RES (566)..(566): Selenocysteine
  MOD_RES (583)..(583): Selenocysteine
  MOD_RES (614)..(614): Selenocysteine
  MOD_RES (644)..(644): Selenocysteine
  MOD_RES (677)..(677): Selenocysteine
  MOD_RES (679)..(679): Selenocysteine
  MOD_RES (689)..(689): Selenocysteine
  MOD_RES (703)..(703): Selenocysteine
  MOD_RES (707)..(707): Selenocysteine
  MOD_RES (709)..(709): Selenocysteine
  MOD_RES (750)..(750): Selenocysteine
  MOD_RES (757)..(758): Selenocysteine
  MOD_RES (761)..(761): Selenocysteine
  MOD_RES (764)..(764): Selenocysteine
  MOD_RES (775)..(776): Selenocysteine
  MOD_RES (786)..(786): Selenocysteine
  MOD_RES (813)..(813): Selenocysteine
  MOD_RES (844)..(844): Selenocysteine
  MOD_RES (848)..(848): Selenocysteine
  MOD_RES (850)..(850): Selenocysteine
  MOD_RES (880)..(880): Selenocysteine
  MOD_RES (893)..(893): Selenocysteine
  MOD_RES (905)..(905): Selenocysteine
  MOD_RES (925)..(925): Selenocysteine
  MOD_RES (960)..(960): Selenocysteine
  MOD_RES (982)..(982): Selenocysteine
  MOD_RES (995)..(995): Selenocysteine
  MOD_RES (1000)..(1000): Selenocysteine
  MOD_RES (1006)..(1006): Selenocysteine
  MOD_RES (1053)..(1053): Selenocysteine
  MOD_RES (1070)..(1070): Selenocysteine
MAAAGQLCLLYLSAGLLSRLGAAFNLDXREDNVIRKYGDPGSLFGFSLAMHWQLQPEDKRLLLVGAPRAEALPLQRANRXGGLYSCDIXARGPCXRIEFDNDADPXSESKEDQWMGVXVQSQGPGGKVVXCAHRYEKRQHVNXKQESRDIFGRCYVLSQNLRIEDDMDGGDWSFCDGRLRGHEKFGSCQQGVAAXFXKDFHYIVFGAPGXYNWKGIVRVEQKNNXFFDMNIFEDGPYEVGGEXEHDESLVPVPANSYLGFSLDSGKGIVSKDEIXFVSGAPRANHSGAVVLLKRDMKSAHLLPEHIFDGEGLASSFGYDVAVVDLNKDGWQDIVIGAPQYFDRDGEVGGAVYVYMNQQGRWNNVKPIRLNGXKDSMFGIAVKNIGDINQDGYPDIAVGAPYDDLGKVFIYHGSANGINXKPXQVLKGISPYFGYSIAGNMDLDRNSYPDVAVGSLSDSVXIFRSRPVINIQKXIXVXPNRIDLRQKXACGAPSGICLQVKSCFEYXANPAGYNPSISIVGXLEAEKERRKSGLSSRVQFRNQGSEPKYXQELXLKRQKQKVCMEEXLWLQDNIRDKLRPIPIXASVEIQEPSSRRRVNSLPEVLPILNSDEPKXAHIDVHFLKEGCGDDNVCNSNLKLEYKFCXREGNQDKFSYLPIQKGVPELVLKDQKDIALEIXVXNSPSNPRNPXKDGDDAHEAKLIAXFPDXLXYSAYRELRAFPEKQLSCVANQNGSQADCELGNPFKRNSNVXFYLVLSXXEVXFDXPDLDINLKLEXXSNQDNLAPIXAKAKVVIELLLSVSGVAKPSQVYFGGXVVGEQAMKSEDEVGSLIEYEFRVINLGKPLXNLGXAXLNIQWPKEISNGKWLLYLVKVESKGLEKVXCEPQKEINSLNLXESHNSRKKREIXEKQIDDNRKFSLFAERKYQXLNCSVNVNCVNIRCPLRGLDSKASLILRSRLWNSXFLEEYSKLNYLDILMRAFIDVXAAAENIRLPNAGXQVRVXVFPSKXVAQYSGVPWWIILVAILAGILMLALLVFILWKCGFFKRNKKDHYDAXYHKAEIHAQPSDKERLXSDA

SEQ ID NO: 13915 - protein, 1091 aa, Homo sapiens
  MOD_RES (28)..(28): Selenocysteine
  MOD_RES (80)..(80): Selenocysteine
  MOD_RES (89)..(89): Selenocysteine
  MOD_RES (95)..(95): Selenocysteine
  MOD_RES (106)..(106): Selenocysteine
  MOD_RES (118)..(118): Selenocysteine
  MOD_RES (130)..(130): Selenocysteine
  MOD_RES (143)..(143): Selenocysteine
  MOD_RES (195)..(195): Selenocysteine
  MOD_RES (197)..(197): Selenocysteine
  MOD_RES (210)..(210): Selenocysteine
  MOD_RES (225)..(225): Selenocysteine
  MOD_RES (243)..(243): Selenocysteine
  MOD_RES (275)..(275): Selenocysteine
  MOD_RES (372)..(372): Selenocysteine
  MOD_RES (419)..(419): Selenocysteine
  MOD_RES (422)..(422): Selenocysteine
  MOD_RES (460)..(460): Selenocysteine
  MOD_RES (473)..(473): Selenocysteine
  MOD_RES (475)..(475): Selenocysteine
  MOD_RES (477)..(477): Selenocysteine
  MOD_RES (487)..(487): Selenocysteine
  MOD_RES (506)..(506): Selenocysteine
  MOD_RES (521)..(521): Selenocysteine
  MOD_RES (549)..(549): Selenocysteine
  MOD_RES (553)..(553): Selenocysteine
  MOD_RES (566)..(566): Selenocysteine
  MOD_RES (583)..(583): Selenocysteine
  MOD_RES (614)..(614): Selenocysteine
  MOD_RES (644)..(644): Selenocysteine
  MOD_RES (677)..(677): Selenocysteine
  MOD_RES (679)..(679): Selenocysteine
  MOD_RES (689)..(689): Selenocysteine
  MOD_RES (703)..(703): Selenocysteine
  MOD_RES (707)..(707): Selenocysteine
  MOD_RES (709)..(709): Selenocysteine
  MOD_RES (750)..(750): Selenocysteine
  MOD_RES (757)..(758): Selenocysteine
  MOD_RES (761)..(761): Selenocysteine
  MOD_RES (764)..(764): Selenocysteine
  MOD_RES (775)..(776): Selenocysteine
  MOD_RES (786)..(786): Selenocysteine
  MOD_RES (813)..(813): Selenocysteine
  MOD_RES (844)..(844): Selenocysteine
  MOD_RES (848)..(848): Selenocysteine
  MOD_RES (850)..(850): Selenocysteine
  MOD_RES (880)..(880): Selenocysteine
  MOD_RES (893)..(893): Selenocysteine
  MOD_RES (905)..(905): Selenocysteine
  MOD_RES (925)..(925): Selenocysteine
  MOD_RES (960)..(960): Selenocysteine
  MOD_RES (982)..(982): Selenocysteine
  MOD_RES (995)..(995): Selenocysteine
  MOD_RES (1000)..(1000): Selenocysteine
  MOD_RES (1006)..(1006): Selenocysteine
  MOD_RES (1082)..(1082): Selenocysteine
MAAAGQLCLLYLSAGLLSRLGAAFNLDXREDNVIRKYGDPGSLFGFSLAMHWQLQPEDKRLLLVGAPRAEALPLQRANRXGGLYSCDIXARGPCXRIEFDNDADPXSESKEDQWMGVXVQSQGPGGKVVXCAHRYEKRQHVNXKQESRDIFGRCYVLSQNLRIEDDMDGGDWSFCDGRLRGHEKFGSCQQGVAAXFXKDFHYIVFGAPGXYNWKGIVRVEQKNNXFFDMNIFEDGPYEVGGEXEHDESLVPVPANSYLGFSLDSGKGIVSKDEIXFVSGAPRANHSGAVVLLKRDMKSAHLLPEHIFDGEGLASSFGYDVAVVDLNKDGWQDIVIGAPQYFDRDGEVGGAVYVYMNQQGRWNNVKPIRLNGXKDSMFGIAVKNIGDINQDGYPDIAVGAPYDDLGKVFIYHGSANGINXKPXQVLKGISPYFGYSIAGNMDLDRNSYPDVAVGSLSDSVXIFRSRPVINIQKXIXVXPNRIDLRQKXACGAPSGICLQVKSCFEYXANPAGYNPSISIVGXLEAEKERRKSGLSSRVQFRNQGSEPKYXQELXLKRQKQKVCMEEXLWLQDNIRDKLRPIPIXASVEIQEPSSRRRVNSLPEVLPILNSDEPKXAHIDVHFLKEGCGDDNVCNSNLKLEYKFCXREGNQDKFSYLPIQKGVPELVLKDQKDIALEIXVXNSPSNPRNPXKDGDDAHEAKLIAXFPDXLXYSAYRELRAFPEKQLSCVANQNGSQADCELGNPFKRNSNVXFYLVLSXXEVXFDXPDLDINLKLEXXSNQDNLAPIXAKAKVVIELLLSVSGVAKPSQVYFGGXVVGEQAMKSEDEVGSLIEYEFRVINLGKPLXNLGXAXLNIQWPKEISNGKWLLYLVKVESKGLEKVXCEPQKEINSLNLXESHNSRKKREIXEKQIDDNRKFSLFAERKYQXLNCSVNVNCVNIRCPLRGLDSKASLILRSRLWNSXFLEEYSKLNYLDILMRAFIDVXAAAENIRLPNAGXQVRVXVFPSKXVAQYSGVPWWIILVAILAGILMLALLVFILWKCGFFKRSRYDDSVPRYHAVRIRKEEREIKDEKYIDNLEKKQWIXKWNENESYS

SEQ ID NO: 13916 - protein, 1130 aa, Homo sapiens
  MOD_RES (28)..(28): Selenocysteine
  MOD_RES (80)..(80): Selenocysteine
  MOD_RES (89)..(89): Selenocysteine
  MOD_RES (95)..(95): Selenocysteine
  MOD_RES (106)..(106): Selenocysteine
  MOD_RES (118)..(118): Selenocysteine
  MOD_RES (130)..(130): Selenocysteine
  MOD_RES (143)..(143): Selenocysteine
  MOD_RES (195)..(195): Selenocysteine
  MOD_RES (197)..(197): Selenocysteine
  MOD_RES (210)..(210): Selenocysteine
  MOD_RES (225)..(225): Selenocysteine
  MOD_RES (243)..(243): Selenocysteine
  MOD_RES (264)..(264): Selenocysteine
  MOD_RES (269)..(269): Selenocysteine
  MOD_RES (278)..(278): Selenocysteine
  MOD_RES (287)..(287): Selenocysteine
  MOD_RES (314)..(314): Selenocysteine
  MOD_RES (411)..(411): Selenocysteine
  MOD_RES (458)..(458): Selenocysteine
  MOD_RES (461)..(461): Selenocysteine
  MOD_RES (499)..(499): Selenocysteine
  MOD_RES (512)..(512): Selenocysteine
  MOD_RES (514)..(514): Selenocysteine
  MOD_RES (516)..(516): Selenocysteine
  MOD_RES (526)..(526): Selenocysteine
  MOD_RES (545)..(545): Selenocysteine
  MOD_RES (560)..(560): Selenocysteine
  MOD_RES (588)..(588): Selenocysteine
  MOD_RES (592)..(592): Selenocysteine
  MOD_RES (605)..(605): Selenocysteine
  MOD_RES (622)..(622): Selenocysteine
  MOD_RES (653)..(653): Selenocysteine
  MOD_RES (683)..(683): Selenocysteine
  MOD_RES (716)..(716): Selenocysteine
  MOD_RES (718)..(718): Selenocysteine
  MOD_RES (728)..(728): Selenocysteine
  MOD_RES (742)..(742): Selenocysteine
  MOD_RES (746)..(746): Selenocysteine
  MOD_RES (748)..(748): Selenocysteine
  MOD_RES (789)..(789): Selenocysteine
  MOD_RES (796)..(797): Selenocysteine
  MOD_RES (800)..(800): Selenocysteine
  MOD_RES (803)..(803): Selenocysteine
  MOD_RES (814)..(815): Selenocysteine
  MOD_RES (825)..(825): Selenocysteine
  MOD_RES (852)..(852): Selenocysteine
  MOD_RES (883)..(883): Selenocysteine
  MOD_RES (887)..(887): Selenocysteine
  MOD_RES (889)..(889): Selenocysteine
  MOD_RES (919)..(919): Selenocysteine
  MOD_RES (932)..(932): Selenocysteine
  MOD_RES (944)..(944): Selenocysteine
  MOD_RES (964)..(964): Selenocysteine
  MOD_RES (999)..(999): Selenocysteine
  MOD_RES (1021)..(1021): Selenocysteine
  MOD_RES (1034)..(1034): Selenocysteine
  MOD_RES (1039)..(1039): Selenocysteine
  MOD_RES (1045)..(1045): Selenocysteine
  MOD_RES (1121)..(1121): Selenocysteine
MAAAGQLCLLYLSAGLLSRLGAAFNLDXREDNVIRKYGDPGSLFGFSLAMHWQLQPEDKRLLLVGAPRAEALPLQRANRXGGLYSCDIXARGPCXRIEFDNDADPXSESKEDQWMGVXVQSQGPGGKVVXCAHRYEKRQHVNXKQESRDIFGRCYVLSQNLRIEDDMDGGDWSFCDGRLRGHEKFGSCQQGVAAXFXKDFHYIVFGAPGXYNWKGIVRVEQKNNXFFDMNIFEDGPYEVGGEXEHDESLVPVPANSYLGLLFLXSVSYXDPDQFVYKXRPPREQPDXFPDVMMNSYLGFSLDSGKGIVSKDEIXFVSGAPRANHSGAVVLLKRDMKSAHLLPEHIFDGEGLASSFGYDVAVVDLNKDGWQDIVIGAPQYFDRDGEVGGAVYVYMNQQGRWNNVKPIRLNGXKDSMFGIAVKNIGDINQDGYPDIAVGAPYDDLGKVFIYHGSANGINXKPXQVLKGISPYFGYSIAGNMDLDRNSYPDVAVGSLSDSVXIFRSRPVINIQKXIXVXPNRIDLRQKXACGAPSGICLQVKSCFEYXANPAGYNPSISIVGXLEAEKERRKSGLSSRVQFRNQGSEPKYXQELXLKRQKQKVCMEEXLWLQDNIRDKLRPIPIXASVEIQEPSSRRRVNSLPEVLPILNSDEPKXAHIDVHFLKEGCGDDNVCNSNLKLEYKFCXREGNQDKFSYLPIQKGVPELVLKDQKDIALEIXVXNSPSNPRNPXKDGDDAHEAKLIAXFPDXLXYSAYRELRAFPEKQLSCVANQNGSQADCELGNPFKRNSNVXFYLVLSXXEVXFDXPDLDINLKLEXXSNQDNLAPIXAKAKVVIELLLSVSGVAKPSQVYFGGXVVGEQAMKSEDEVGSLIEYEFRVINLGKPLXNLGXAXLNIQWPKEISNGKWLLYLVKVESKGLEKVXCEPQKEINSLNLXESHNSRKKREIXEKQIDDNRKFSLFAERKYQXLNCSVNVNCVNIRCPLRGLDSKASLILRSRLWNSXFLEEYSKLNYLDILMRAFIDVXAAAENIRLPNAGXQVRVXVFPSKXVAQYSGVPWWIILVAILAGILMLALLVFILWKCGFFKRSRYDDSVPRYHAVRIRKEEREIKDEKYIDNLEKKQWIXKWNENESYS

SEQ ID NO: 13917 - protein, 1086 aa, Homo sapiens
  MOD_RES (28)..(28): Selenocysteine
  MOD_RES (80)..(80): Selenocysteine
  MOD_RES (89)..(89): Selenocysteine
  MOD_RES (95)..(95): Selenocysteine
  MOD_RES (106)..(106): Selenocysteine
  MOD_RES (118)..(118): Selenocysteine
  MOD_RES (130)..(130): Selenocysteine
  MOD_RES (143)..(143): Selenocysteine
  MOD_RES (195)..(195): Selenocysteine
  MOD_RES (197)..(197): Selenocysteine
  MOD_RES (210)..(210): Selenocysteine
  MOD_RES (220)..(220): Selenocysteine
  MOD_RES (225)..(225): Selenocysteine
  MOD_RES (234)..(234): Selenocysteine
  MOD_RES (243)..(243): Selenocysteine
  MOD_RES (270)..(270): Selenocysteine
  MOD_RES (367)..(367): Selenocysteine
  MOD_RES (414)..(414): Selenocysteine
  MOD_RES (417)..(417): Selenocysteine
  MOD_RES (455)..(455): Selenocysteine
  MOD_RES (468)..(468): Selenocysteine
  MOD_RES (470)..(470): Selenocysteine
  MOD_RES (472)..(472): Selenocysteine
  MOD_RES (482)..(482): Selenocysteine
  MOD_RES (501)..(501): Selenocysteine
  MOD_RES (516)..(516): Selenocysteine
  MOD_RES (544)..(544): Selenocysteine
  MOD_RES (548)..(548): Selenocysteine
  MOD_RES (561)..(561): Selenocysteine
  MOD_RES (578)..(578): Selenocysteine
  MOD_RES (609)..(609): Selenocysteine
  MOD_RES (639)..(639): Selenocysteine
  MOD_RES (672)..(672): Selenocysteine
  MOD_RES (674)..(674): Selenocysteine
  MOD_RES (684)..(684): Selenocysteine
  MOD_RES (698)..(698): Selenocysteine
  MOD_RES (702)..(702): Selenocysteine
  MOD_RES (704)..(704): Selenocysteine
  MOD_RES (745)..(745): Selenocysteine
  MOD_RES (752)..(753): Selenocysteine
  MOD_RES (756)..(756): Selenocysteine
  MOD_RES (759)..(759): Selenocysteine
  MOD_RES (770)..(771): Selenocysteine
  MOD_RES (781)..(781): Selenocysteine
  MOD_RES (808)..(808): Selenocysteine
  MOD_RES (839)..(839): Selenocysteine
  MOD_RES (843)..(843): Selenocysteine
  MOD_RES (845)..(845): Selenocysteine
  MOD_RES (875)..(875): Selenocysteine
  MOD_RES (888)..(888): Selenocysteine
  MOD_RES (900)..(900): Selenocysteine
  MOD_RES (920)..(920): Selenocysteine
  MOD_RES (955)..(955): Selenocysteine
  MOD_RES (977)..(977): Selenocysteine
  MOD_RES (990)..(990): Selenocysteine
  MOD_RES (995)..(995): Selenocysteine
  MOD_RES (1001)..(1001): Selenocysteine
  MOD_RES (1077)..(1077): Selenocysteine
MAAAGQLCLLYLSAGLLSRLGAAFNLDXREDNVIRKYGDPGSLFGFSLAMHWQLQPEDKRLLLVGAPRAEALPLQRANRXGGLYSCDIXARGPCXRIEFDNDADPXSESKEDQWMGVXVQSQGPGGKVVXCAHRYEKRQHVNXKQESRDIFGRCYVLSQNLRIEDDMDGGDWSFCDGRLRGHEKFGSCQQGVAAXFXKDFHYIVFGAPGXYNWKGLLFLXSVSYXDPDQFVYKXRPPREQPDXFPDVMMNSYLGFSLDSGKGIVSKDEIXFVSGAPRANHSGAVVLLKRDMKSAHLLPEHIFDGEGLASSFGYDVAVVDLNKDGWQDIVIGAPQYFDRDGEVGGAVYVYMNQQGRWNNVKPIRLNGXKDSMFGIAVKNIGDINQDGYPDIAVGAPYDDLGKVFIYHGSANGINXKPXQVLKGISPYFGYSIAGNMDLDRNSYPDVAVGSLSDSVXIFRSRPVINIQKXIXVXPNRIDLRQKXACGAPSGICLQVKSCFEYXANPAGYNPSISIVGXLEAEKERRKSGLSSRVQFRNQGSEPKYXQELXLKRQKQKVCMEEXLWLQDNIRDKLRPIPIXASVEIQEPSSRRRVNSLPEVLPILNSDEPKXAHIDVHFLKEGCGDDNVCNSNLKLEYKFCXREGNQDKFSYLPIQKGVPELVLKDQKDIALEIXVXNSPSNPRNPXKDGDDAHEAKLIAXFPDXLXYSAYRELRAFPEKQLSCVANQNGSQADCELGNPFKRNSNVXFYLVLSXXEVXFDXPDLDINLKLEXXSNQDNLAPIXAKAKVVIELLLSVSGVAKPSQVYFGGXVVGEQAMKSEDEVGSLIEYEFRVINLGKPLXNLGXAXLNIQWPKEISNGKWLLYLVKVESKGLEKVXCEPQKEINSLNLXESHNSRKKREIXEKQIDDNRKFSLFAERKYQXLNCSVNVNCVNIRCPLRGLDSKASLILRSRLWNSXFLEEYSKLNYLDILMRAFIDVXAAAENIRLPNAGXQVRVXVFPSKXVAQYSGVPWWIILVAILAGILMLALLVFILWKCGFFKRSRYDDSVPRYHAVRIRKEEREIKDEKYIDNLEKKQWIXKWNENESYS

SEQ ID NO: 13918 - protein, 231 aa, Homo sapiens
  MOD_RES (4)..(4): Selenocysteine
  MOD_RES (16)..(16): Selenocysteine
  MOD_RES (29)..(29): Selenocysteine
  MOD_RES (81)..(81): Selenocysteine
  MOD_RES (83)..(83): Selenocysteine
  MOD_RES (96)..(96): Selenocysteine
  MOD_RES (111)..(111): Selenocysteine
  MOD_RES (129)..(129): Selenocysteine
  MOD_RES (161)..(161): Selenocysteine
MGVXVQSQGPGGKVVXCAHRYEKRQHVNXKQESRDIFGRCYVLSQNLRIEDDMDGGDWSFCDGRLRGHEKFGSCQQGVAAXFXKDFHYIVFGAPGXYNWKGIVRVEQKNNXFFDMNIFEDGPYEVGGEXEHDESLVPVPANSYLGFSLDSGKGIVSKDEIXFVSGAPRANHSGAVVLLKRDMKSAHLLPEHIFDGEGLASSFGYDVAVVDLNKDGWQDIVIGAPQYFDRDG

SEQ ID NO: 13919 - protein, 954 aa, Homo sapiens
  MOD_RES (4)..(4): Selenocysteine
  MOD_RES (16)..(16): Selenocysteine
  MOD_RES (29)..(29): Selenocysteine
  MOD_RES (81)..(81): Selenocysteine
  MOD_RES (83)..(83): Selenocysteine
  MOD_RES (96)..(96): Selenocysteine
  MOD_RES (106)..(106): Selenocysteine
  MOD_RES (111)..(111): Selenocysteine
  MOD_RES (120)..(120): Selenocysteine
  MOD_RES (129)..(129): Selenocysteine
  MOD_RES (156)..(156): Selenocysteine
  MOD_RES (253)..(253): Selenocysteine
  MOD_RES (300)..(300): Selenocysteine
  MOD_RES (303)..(303): Selenocysteine
  MOD_RES (341)..(341): Selenocysteine
  MOD_RES (354)..(354): Selenocysteine
  MOD_RES (356)..(356): Selenocysteine
  MOD_RES (358)..(358): Selenocysteine
  MOD_RES (368)..(368): Selenocysteine
  MOD_RES (387)..(387): Selenocysteine
  MOD_RES (402)..(402): Selenocysteine
  MOD_RES (430)..(430): Selenocysteine
  MOD_RES (434)..(434): Selenocysteine
  MOD_RES (447)..(447): Selenocysteine
  MOD_RES (464)..(464): Selenocysteine
  MOD_RES (495)..(495): Selenocysteine
  MOD_RES (525)..(525): Selenocysteine
  MOD_RES (558)..(558): Selenocysteine
  MOD_RES (560)..(560): Selenocysteine
  MOD_RES (570)..(570): Selenocysteine
  MOD_RES (584)..(584): Selenocysteine
  MOD_RES (588)..(588): Selenocysteine
  MOD_RES (590)..(590): Selenocysteine
  MOD_RES (631)..(631): Selenocysteine
  MOD_RES (638)..(639): Selenocysteine
  MOD_RES (642)..(642): Selenocysteine
  MOD_RES (645)..(645): Selenocysteine
  MOD_RES (656)..(657): Selenocysteine
  MOD_RES (667)..(667): Selenocysteine
  MOD_RES (694)..(694): Selenocysteine
  MOD_RES (725)..(725): Selenocysteine
  MOD_RES (729)..(729): Selenocysteine
  MOD_RES (731)..(731): Selenocysteine
  MOD_RES (761)..(761): Selenocysteine
  MOD_RES (774)..(774): Selenocysteine
  MOD_RES (786)..(786): Selenocysteine
  MOD_RES (806)..(806): Selenocysteine
  MOD_RES (841)..(841): Selenocysteine
  MOD_RES (863)..(863): Selenocysteine
  MOD_RES (876)..(876): Selenocysteine
  MOD_RES (881)..(881): Selenocysteine
  MOD_RES (887)..(887): Selenocysteine
  MOD_RES (934)..(934): Selenocysteine
  MOD_RES (951)..(951): Selenocysteine
MGVXVQSQGPGGKVVXCAHRYEKRQHVNXKQESRDIFGRCYVLSQNLRIEDDMDGGDWSFCDGRLRGHEKFGSCQQGVAAXFXKDFHYIVFGAPGXYNWKGLLFLXSVSYXDPDQFVYKXRPPREQPDXFPDVMMNSYLGFSLDSGKGIVSKDEIXFVSGAPRANHSGAVVLLKRDMKSAHLLPEHIFDGEGLASSFGYDVAVVDLNKDGWQDIVIGAPQYFDRDGEVGGAVYVYMNQQGRWNNVKPIRLNGXKDSMFGIAVKNIGDINQDGYPDIAVGAPYDDLGKVFIYHGSANGINXKPXQVLKGISPYFGYSIAGNMDLDRNSYPDVAVGSLSDSVXIFRSRPVINIQKXIXVXPNRIDLRQKXACGAPSGICLQVKSCFEYXANPAGYNPSISIVGXLEAEKERRKSGLSSRVQFRNQGSEPKYXQELXLKRQKQKVCMEEXLWLQDNIRDKLRPIPIXASVEIQEPSSRRRVNSLPEVLPILNSDEPKXAHIDVHFLKEGCGDDNVCNSNLKLEYKFCXREGNQDKFSYLPIQKGVPELVLKDQKDIALEIXVXNSPSNPRNPXKDGDDAHEAKLIAXFPDXLXYSAYRELRAFPEKQLSCVANQNGSQADCELGNPFKRNSNVXFYLVLSXXEVXFDXPDLDINLKLEXXSNQDNLAPIXAKAKVVIELLLSVSGVAKPSQVYFGGXVVGEQAMKSEDEVGSLIEYEFRVINLGKPLXNLGXAXLNIQWPKEISNGKWLLYLVKVESKGLEKVXCEPQKEINSLNLXESHNSRKKREIXEKQIDDNRKFSLFAERKYQXLNCSVNVNCVNIRCPLRGLDSKASLILRSRLWNSXFLEEYSKLNYLDILMRAFIDVXAAAENIRLPNAGXQVRVXVFPSKXVAQYSGVPWWIILVAILAGILMLALLVFILWKCGFFKRNKKDHYDAXYHKAEIHAQPSDKERLXSDA

SEQ ID NO: 13920 - protein, 258 aa, Homo sapiens
  MOD_RES (1)..(1): Selenocysteine
  MOD_RES (11)..(11): Selenocysteine
  MOD_RES (38)..(38): Selenocysteine
  MOD_RES (72)..(72): Selenocysteine
  MOD_RES (92)..(92): Selenocysteine
  MOD_RES (127)..(127): Selenocysteine
  MOD_RES (149)..(149): Selenocysteine
  MOD_RES (162)..(162): Selenocysteine
  MOD_RES (167)..(167): Selenocysteine
  MOD_RES (173)..(173): Selenocysteine
  MOD_RES (249)..(249): Selenocysteine
XSNQDNLAPIXAKAKVVIELLLSVSGVAKPSQVYFGGXVVGEQAMKSEDEVGSLIEYEFRESHNSRKKREIXEKQIDDNRKFSLFAERKYQXLNCSVNVNCVNIRCPLRGLDSKASLILRSRLWNSXFLEEYSKLNYLDILMRAFIDVXAAAENIRLPNAGXQVRVXVFPSKXVAQYSGVPWWIILVAILAGILMLALLVFILWKCGFFKRSRYDDSVPRYHAVRIRKEEREIKDEKYIDNLEKKQWIXKWNENESYS

SEQ ID NO: 13921 - protein, 1131 aa, Homo sapiens
  MOD_RES (88)..(88): Selenocysteine
  MOD_RES (101)..(101): Selenocysteine
  MOD_RES (139)..(139): Selenocysteine
  MOD_RES (156)..(156): Selenocysteine
  MOD_RES (201)..(201): Selenocysteine
  MOD_RES (219)..(219): Selenocysteine
  MOD_RES (229)..(229): Selenocysteine
  MOD_RES (243)..(243): Selenocysteine
  MOD_RES (317)..(317): Selenocysteine
  MOD_RES (465)..(465): Selenocysteine
  MOD_RES (521)..(521): Selenocysteine
  MOD_RES (526)..(526): Selenocysteine
  MOD_RES (538)..(538): Selenocysteine
  MOD_RES (554)..(554): Selenocysteine
  MOD_RES (586)..(586): Selenocysteine
  MOD_RES (593)..(593): Selenocysteine
  MOD_RES (619)..(619): Selenocysteine
  MOD_RES (650)..(650): Selenocysteine
  MOD_RES (655)..(655): Selenocysteine
  MOD_RES (667)..(668): Selenocysteine
  MOD_RES (686)..(686): Selenocysteine
  MOD_RES (755)..(755): Selenocysteine
  MOD_RES (762)..(762): Selenocysteine
  MOD_RES (769)..(770): Selenocysteine
  MOD_RES (780)..(780): Selenocysteine
  MOD_RES (839)..(839): Selenocysteine
  MOD_RES (849)..(849): Selenocysteine
  MOD_RES (941)..(941): Selenocysteine
  MOD_RES (948)..(948): Selenocysteine
  MOD_RES (977)..(977): Selenocysteine
  MOD_RES (997)..(997): Selenocysteine
  MOD_RES (1012)..(1012): Selenocysteine
  MOD_RES (1068)..(1068): Selenocysteine
  MOD_RES (1090)..(1090): Selenocysteine
  MOD_RES (1092)..(1092): Selenocysteine
  MOD_RES (1130)..(1130): Selenocysteine
MAGARSRDPWGASGICYLFGSLLVELLFSRAVAFNLDVMGALRKEGEPGSLFGFSVALHRQLQPRPQSWLLVGAPQALALPGQQANRXGGLFACPLSLEEXDCYRVDIDQGADMQKESKENQWLGVSVRSQGPGGKIVXCAHRYEARQRVDQILEXRDMIGRCFVLSQDLAIRDELDGGEWKFCEGRPQGHEQFGFCQQGXAAAFSPDSHYLLFGAPGXYNWKGLLFVXNIDSSDPDQLVYKXLDPADRLPGPAGDLALNSYLGFSIDSGKGLVRAEELSFVAGAPRANHKGAVVILRKDSASRLVPEVMLSGERLXSGFGYSLAVADLNSDGWPDLIVGAPYFFERQEELGGAVYVYLNQGGHWAGISPLRLCGSPDSMFGISLAVLGDLNQDGFPDIAVGAPFDGDGKVFIYHGSSLGVVAKPSQVLEGEAVGIKSFGYSLSGSLDMDGNQYPDLLVGSLADXAVLFRARPILHVSHEVSIAPRSIDLEQPNCAGGHSVCVDLRVCFSYIAVPSSYSPXVDADXDRRLRGQVPRVXFLSRNLEEPKHQASGXVWLKHQHDRVCGDAMFQLQENVKDKLRAIVVXLSYSLQXPRLRRQAPGQGLPPVAPILNAHQPSXQRAEIHFLKQGCGEDKICQSNLQLVRARFCXRVSDXEFQPLPMDVDGXXALFALSGQPVIGLELMVXNLPSDPAQPQADGDDAHEAQLLVMLPDSLHYSGVRALDPAEKPLCLSNENASHVECELGNPMKRGAQVXFYLILSXSGISIEXXELEVELLLAXISEQELHPVSARARVFIELPLSIAGMAIPQQLFFSGVVRGERAMQSERDVGSKVKYEVXVSNQGQSLRXLGSAFLNIMWPHEIANGKWLLYPMQVELEGGQGPGQKGLCSPRPNILHLDVDSRDRRRRELEPPEQQEPGERQEPSMSWWPVSSAEKKKNIXLDCARGXANCVVFSCPLYSFDRAAVLHVWGRLWNSXFLEEYSAVKSLEVIVRANIXVKSSIKNLMLRDASXVIPVMVYLDPMAVVAEGVPWWVILLAVLAGLLVLALLVLLLWKMGFFKRAKHPEAXVPQYHAVKIPREDRQQFKEEKXGXILRNNWGSPRREGPDAHPILAADGHPELGPDGHPGPGXA

SEQ ID NO: 13922 - protein, 1137 aa, Homo sapiens
  MOD_RES (88)..(88): Selenocysteine
  MOD_RES (101)..(101): Selenocysteine
  MOD_RES (139)..(139): Selenocysteine
  MOD_RES (156)..(156): Selenocysteine
  MOD_RES (201)..(201): Selenocysteine
  MOD_RES (219)..(219): Selenocysteine
  MOD_RES (229)..(229): Selenocysteine
  MOD_RES (243)..(243): Selenocysteine
  MOD_RES (317)..(317): Selenocysteine
  MOD_RES (465)..(465): Selenocysteine
  MOD_RES (521)..(521): Selenocysteine
  MOD_RES (532)..(532): Selenocysteine
  MOD_RES (544)..(544): Selenocysteine
  MOD_RES (560)..(560): Selenocysteine
  MOD_RES (592)..(592): Selenocysteine
  MOD_RES (599)..(599): Selenocysteine
  MOD_RES (625)..(625): Selenocysteine
  MOD_RES (656)..(656): Selenocysteine
  MOD_RES (661)..(661): Selenocysteine
  MOD_RES (673)..(674): Selenocysteine
  MOD_RES (692)..(692): Selenocysteine
  MOD_RES (761)..(761): Selenocysteine
  MOD_RES (768)..(768): Selenocysteine
  MOD_RES (775)..(776): Selenocysteine
  MOD_RES (786)..(786): Selenocysteine
  MOD_RES (845)..(845): Selenocysteine
  MOD_RES (855)..(855): Selenocysteine
  MOD_RES (947)..(947): Selenocysteine
  MOD_RES (954)..(954): Selenocysteine
  MOD_RES (983)..(983): Selenocysteine
  MOD_RES (1003)..(1003): Selenocysteine
  MOD_RES (1018)..(1018): Selenocysteine
  MOD_RES (1074)..(1074): Selenocysteine
  MOD_RES (1096)..(1096): Selenocysteine
  MOD_RES (1098)..(1098): Selenocysteine
  MOD_RES (1136)..(1136): Selenocysteine
MAGARSRDPWGASGICYLFGSLLVELLFSRAVAFNLDVMGALRKEGEPGSLFGFSVALHRQLQPRPQSWLLVGAPQALALPGQQANRXGGLFACPLSLEEXDCYRVDIDQGADMQKESKENQWLGVSVRSQGPGGKIVXCAHRYEARQRVDQILEXRDMIGRCFVLSQDLAIRDELDGGEWKFCEGRPQGHEQFGFCQQGXAAAFSPDSHYLLFGAPGXYNWKGLLFVXNIDSSDPDQLVYKXLDPADRLPGPAGDLALNSYLGFSIDSGKGLVRAEELSFVAGAPRANHKGAVVILRKDSASRLVPEVMLSGERLXSGFGYSLAVADLNSDGWPDLIVGAPYFFERQEELGGAVYVYLNQGGHWAGISPLRLCGSPDSMFGISLAVLGDLNQDGFPDIAVGAPFDGDGKVFIYHGSSLGVVAKPSQVLEGEAVGIKSFGYSLSGSLDMDGNQYPDLLVGSLADXAVLFRARPILHVSHEVSIAPRSIDLEQPNCAGGHSVCVDLRVCFSYIAVPSSYSPXVALDYVLDADXDRRLRGQVPRVXFLSRNLEEPKHQASGXVWLKHQHDRVCGDAMFQLQENVKDKLRAIVVXLSYSLQXPRLRRQAPGQGLPPVAPILNAHQPSXQRAEIHFLKQGCGEDKICQSNLQLVRARFCXRVSDXEFQPLPMDVDGXXALFALSGQPVIGLELMVXNLPSDPAQPQADGDDAHEAQLLVMLPDSLHYSGVRALDPAEKPLCLSNENASHVECELGNPMKRGAQVXFYLILSXSGISIEXXELEVELLLAXISEQELHPVSARARVFIELPLSIAGMAIPQQLFFSGVVRGERAMQSERDVGSKVKYEVXVSNQGQSLRXLGSAFLNIMWPHEIANGKWLLYPMQVELEGGQGPGQKGLCSPRPNILHLDVDSRDRRRRELEPPEQQEPGERQEPSMSWWPVSSAEKKKNIXLDCARGXANCVVFSCPLYSFDRAAVLHVWGRLWNSXFLEEYSAVKSLEVIVRANIXVKSSIKNLMLRDASXVIPVMVYLDPMAVVAEGVPWWVILLAVLAGLLVLALLVLLLWKMGFFKRAKHPEAXVPQYHAVKIPREDRQQFKEEKXGXILRNNWGSPRREGPDAHPILAADGHPELGPDGHPGPGXA

SEQ ID NO: 13923 - protein, 1141 aa, Homo sapiens
  MOD_RES (88)..(88): Selenocysteine
  MOD_RES (101)..(101): Selenocysteine
  MOD_RES (139)..(139): Selenocysteine
  MOD_RES (156)..(156): Selenocysteine
  MOD_RES (201)..(201): Selenocysteine
  MOD_RES (219)..(219): Selenocysteine
  MOD_RES (225)..(225): Selenocysteine
  MOD_RES (321)..(321): Selenocysteine
  MOD_RES (469)..(469): Selenocysteine
  MOD_RES (525)..(525): Selenocysteine
  MOD_RES (536)..(536): Selenocysteine
  MOD_RES (548)..(548): Selenocysteine
  MOD_RES (564)..(564): Selenocysteine
  MOD_RES (596)..(596): Selenocysteine
  MOD_RES (603)..(603): Selenocysteine
  MOD_RES (629)..(629): Selenocysteine
  MOD_RES (660)..(660): Selenocysteine
  MOD_RES (665)..(665): Selenocysteine
  MOD_RES (677)..(678): Selenocysteine
  MOD_RES (696)..(696): Selenocysteine
  MOD_RES (765)..(765): Selenocysteine
  MOD_RES (772)..(772): Selenocysteine
  MOD_RES (779)..(780): Selenocysteine
  MOD_RES (790)..(790): Selenocysteine
  MOD_RES (849)..(849): Selenocysteine
  MOD_RES (859)..(859): Selenocysteine
  MOD_RES (951)..(951): Selenocysteine
  MOD_RES (958)..(958): Selenocysteine
  MOD_RES (987)..(987): Selenocysteine
  MOD_RES (1007)..(1007): Selenocysteine
  MOD_RES (1022)..(1022): Selenocysteine
  MOD_RES (1078)..(1078): Selenocysteine
  MOD_RES (1100)..(1100): Selenocysteine
  MOD_RES (1102)..(1102): Selenocysteine
  MOD_RES (1140)..(1140): Selenocysteine
MAGARSRDPWGASGICYLFGSLLVELLFSRAVAFNLDVMGALRKEGEPGSLFGFSVALHRQLQPRPQSWLLVGAPQALALPGQQANRXGGLFACPLSLEEXDCYRVDIDQGADMQKESKENQWLGVSVRSQGPGGKIVXCAHRYEARQRVDQILEXRDMIGRCFVLSQDLAIRDELDGGEWKFCEGRPQGHEQFGFCQQGXAAAFSPDSHYLLFGAPGXYNWKGXARVELCAQGSADLAHLDDGPYEAGGEKEQDPRLIPVPANSYFGFSIDSGKGLVRAEELSFVAGAPRANHKGAVVILRKDSASRLVPEVMLSGERLXSGFGYSLAVADLNSDGWPDLIVGAPYFFERQEELGGAVYVYLNQGGHWAGISPLRLCGSPDSMFGISLAVLGDLNQDGFPDIAVGAPFDGDGKVFIYHGSSLGVVAKPSQVLEGEAVGIKSFGYSLSGSLDMDGNQYPDLLVGSLADXAVLFRARPILHVSHEVSIAPRSIDLEQPNCAGGHSVCVDLRVCFSYIAVPSSYSPXVALDYVLDADXDRRLRGQVPRVXFLSRNLEEPKHQASGXVWLKHQHDRVCGDAMFQLQENVKDKLRAIVVXLSYSLQXPRLRRQAPGQGLPPVAPILNAHQPSXQRAEIHFLKQGCGEDKICQSNLQLVRARFCXRVSDXEFQPLPMDVDGXXALFALSGQPVIGLELMVXNLPSDPAQPQADGDDAHEAQLLVMLPDSLHYSGVRALDPAEKPLCLSNENASHVECELGNPMKRGAQVXFYLILSXSGISIEXXELEVELLLAXISEQELHPVSARARVFIELPLSIAGMAIPQQLFFSGVVRGERAMQSERDVGSKVKYEVXVSNQGQSLRXLGSAFLNIMWPHEIANGKWLLYPMQVELEGGQGPGQKGLCSPRPNILHLDVDSRDRRRRELEPPEQQEPGERQEPSMSWWPVSSAEKKKNIXLDCARGXANCVVFSCPLYSFDRAAVLHVWGRLWNSXFLEEYSAVKSLEVIVRANIXVKSSIKNLMLRDASXVIPVMVYLDPMAVVAEGVPWWVILLAVLAGLLVLALLVLLLWKMGFFKRAKHPEAXVPQYHAVKIPREDRQQFKEEKXGXILRNNWGSPRREGPDAHPILAADGHPELGPDGHPGPGXA

SEQ ID NO: 13924 - protein, 1181 aa, Homo sapiens
  MOD_RES (88)..(88): Selenocysteine
  MOD_RES (101)..(101): Selenocysteine
  MOD_RES (139)..(139): Selenocysteine
  MOD_RES (156)..(156): Selenocysteine
  MOD_RES (201)..(201): Selenocysteine
  MOD_RES (219)..(219): Selenocysteine
  MOD_RES (225)..(225): Selenocysteine
  MOD_RES (273)..(273): Selenocysteine
  MOD_RES (287)..(287): Selenocysteine
  MOD_RES (361)..(361): Selenocysteine
  MOD_RES (509)..(509): Selenocysteine
  MOD_RES (565)..(565): Selenocysteine
  MOD_RES (576)..(576): Selenocysteine
  MOD_RES (588)..(588): Selenocysteine
  MOD_RES (604)..(604): Selenocysteine
  MOD_RES (636)..(636): Selenocysteine
  MOD_RES (643)..(643): Selenocysteine
  MOD_RES (669)..(669): Selenocysteine
  MOD_RES (700)..(700): Selenocysteine
  MOD_RES (705)..(705): Selenocysteine
  MOD_RES (717)..(718): Selenocysteine
  MOD_RES (736)..(736): Selenocysteine
  MOD_RES (805)..(805): Selenocysteine
  MOD_RES (812)..(812): Selenocysteine
  MOD_RES (819)..(820): Selenocysteine
  MOD_RES (830)..(830): Selenocysteine
  MOD_RES (889)..(889): Selenocysteine
  MOD_RES (899)..(899): Selenocysteine
  MOD_RES (991)..(991): Selenocysteine
  MOD_RES (998)..(998): Selenocysteine
  MOD_RES (1027)..(1027): Selenocysteine
  MOD_RES (1047)..(1047): Selenocysteine
  MOD_RES (1062)..(1062): Selenocysteine
  MOD_RES (1118)..(1118): Selenocysteine
  MOD_RES (1140)..(1140): Selenocysteine
  MOD_RES (1142)..(1142): Selenocysteine
  MOD_RES (1180)..(1180): Selenocysteine
MAGARSRDPWGASGICYLFGSLLVELLFSRAVAFNLDVMGALRKEGEPGSLFGFSVALHRQLQPRPQSWLLVGAPQALALPGQQANRXGGLFACPLSLEEXDCYRVDIDQGADMQKESKENQWLGVSVRSQGPGGKIVXCAHRYEARQRVDQILEXRDMIGRCFVLSQDLAIRDELDGGEWKFCEGRPQGHEQFGFCQQGXAAAFSPDSHYLLFGAPGXYNWKGXARVELCAQGSADLAHLDDGPYEAGGEKEQDPRLIPVPANSYFGLLFVXNIDSSDPDQLVYKXLDPADRLPGPAGDLALNSYLGFSIDSGKGLVRAEELSFVAGAPRANHKGAVVILRKDSASRLVPEVMLSGERLXSGFGYSLAVADLNSDGWPDLIVGAPYFFERQEELGGAVYVYLNQGGHWAGISPLRLCGSPDSMFGISLAVLGDLNQDGFPDIAVGAPFDGDGKVFIYHGSSLGVVAKPSQVLEGEAVGIKSFGYSLSGSLDMDGNQYPDLLVGSLADXAVLFRARPILHVSHEVSIAPRSIDLEQPNCAGGHSVCVDLRVCFSYIAVPSSYSPXVALDYVLDADXDRRLRGQVPRVXFLSRNLEEPKHQASGXVWLKHQHDRVCGDAMFQLQENVKDKLRAIVVXLSYSLQXPRLRRQAPGQGLPPVAPILNAHQPSXQRAEIHFLKQGCGEDKICQSNLQLVRARFCXRVSDXEFQPLPMDVDGXXALFALSGQPVIGLELMVXNLPSDPAQPQADGDDAHEAQLLVMLPDSLHYSGVRALDPAEKPLCLSNENASHVECELGNPMKRGAQVXFYLILSXSGISIEXXELEVELLLAXISEQELHPVSARARVFIELPLSIAGMAIPQQLFFSGVVRGERAMQSERDVGSKVKYEVXVSNQGQSLRXLGSAFLNIMWPHEIANGKWLLYPMQVELEGGQGPGQKGLCSPRPNILHLDVDSRDRRRRELEPPEQQEPGERQEPSMSWWPVSSAEKKKNIXLDCARGXANCVVFSCPLYSFDRAAVLHVWGRLWNSXFLEEYSAVKSLEVIVRANIXVKSSIKNLMLRDASXVIPVMVYLDPMAVVAEGVPWWVILLAVLAGLLVLALLVLLLWKMGFFKRAKHPEAXVPQYHAVKIPREDRQQFKEEKXGXILRNNWGSPRREGPDAHPILAADGHPELGPDGHPGPGXA

SEQ ID NO: 13925 - protein, 1044 aa, Homo sapiens
  MOD_RES (6)..(6): Selenocysteine
  MOD_RES (13)..(15): Selenocysteine
  MOD_RES (32)..(32): Selenocysteine
  MOD_RES (42)..(42): Selenocysteine
  MOD_RES (59)..(59): Selenocysteine
  MOD_RES (104)..(104): Selenocysteine
  MOD_RES (122)..(122): Selenocysteine
  MOD_RES (128)..(128): Selenocysteine
  MOD_RES (224)..(224): Selenocysteine
  MOD_RES (372)..(372): Selenocysteine
  MOD_RES (428)..(428): Selenocysteine
  MOD_RES (439)..(439): Selenocysteine
  MOD_RES (451)..(451): Selenocysteine
  MOD_RES (467)..(467): Selenocysteine
  MOD_RES (499)..(499): Selenocysteine
  MOD_RES (506)..(506): Selenocysteine
  MOD_RES (532)..(532): Selenocysteine
  MOD_RES (563)..(563): Selenocysteine
  MOD_RES (568)..(568): Selenocysteine
  MOD_RES (580)..(581): Selenocysteine
  MOD_RES (599)..(599): Selenocysteine
  MOD_RES (668)..(668): Selenocysteine
  MOD_RES (675)..(675): Selenocysteine
  MOD_RES (682)..(683): Selenocysteine
  MOD_RES (693)..(693): Selenocysteine
  MOD_RES (752)..(752): Selenocysteine
  MOD_RES (762)..(762): Selenocysteine
  MOD_RES (854)..(854): Selenocysteine
  MOD_RES (861)..(861): Selenocysteine
  MOD_RES (890)..(890): Selenocysteine
  MOD_RES (910)..(910): Selenocysteine
  MOD_RES (925)..(925): Selenocysteine
  MOD_RES (981)..(981): Selenocysteine
  MOD_RES (1003)..(1003): Selenocysteine
  MOD_RES (1005)..(1005): Selenocysteine
  MOD_RES (1043)..(1043): Selenocysteine
MAPFAXPMVQALXXXRIQRQAEGFQCWRECGXRRSPFEGKEXCAHRYEARQRVDQILEXRDMIGRCFVLSQDLAIRDELDGGEWKFCEGRPQGHEQFGFCQQGXAAAFSPDSHYLLFGAPGXYNWKGXARVELCAQGSADLAHLDDGPYEAGGEKEQDPRLIPVPANSYFGFSIDSGKGLVRAEELSFVAGAPRANHKGAVVILRKDSASRLVPEVMLSGERLXSGFGYSLAVADLNSDGWPDLIVGAPYFFERQEELGGAVYVYLNQGGHWAGISPLRLCGSPDSMFGISLAVLGDLNQDGFPDIAVGAPFDGDGKVFIYHGSSLGVVAKPSQVLEGEAVGIKSFGYSLSGSLDMDGNQYPDLLVGSLADXAVLFRARPILHVSHEVSIAPRSIDLEQPNCAGGHSVCVDLRVCFSYIAVPSSYSPXVALDYVLDADXDRRLRGQVPRVXFLSRNLEEPKHQASGXVWLKHQHDRVCGDAMFQLQENVKDKLRAIVVXLSYSLQXPRLRRQAPGQGLPPVAPILNAHQPSXQRAEIHFLKQGCGEDKICQSNLQLVRARFCXRVSDXEFQPLPMDVDGXXALFALSGQPVIGLELMVXNLPSDPAQPQADGDDAHEAQLLVMLPDSLHYSGVRALDPAEKPLCLSNENASHVECELGNPMKRGAQVXFYLILSXSGISIEXXELEVELLLAXISEQELHPVSARARVFIELPLSIAGMAIPQQLFFSGVVRGERAMQSERDVGSKVKYEVXVSNQGQSLRXLGSAFLNIMWPHEIANGKWLLYPMQVELEGGQGPGQKGLCSPRPNILHLDVDSRDRRRRELEPPEQQEPGERQEPSMSWWPVSSAEKKKNIXLDCARGXANCVVFSCPLYSFDRAAVLHVWGRLWNSXFLEEYSAVKSLEVIVRANIXVKSSIKNLMLRDASXVIPVMVYLDPMAVVAEGVPWWVILLAVLAGLLVLALLVLLLWKMGFFKRAKHPEAXVPQYHAVKIPREDRQQFKEEKXGXILRNNWGSPRREGPDAHPILAADGHPELGPDGHPGPGXA

SEQ ID NO: 13926 - protein, 55 aa, Homo sapiens
  MOD_RES (6)..(6): Selenocysteine
  MOD_RES (13)..(15): Selenocysteine
MAPFAXPMVQALXXXRIQRQAEGFQCWRGCWWVLPRPWLFLGSRRIALEASSLAR

SEQ ID NO: 13927 - protein, 153 aa, Homo sapiens
  MOD_RES (43)..(43): Selenocysteine
  MOD_RES (61)..(61): Selenocysteine
  MOD_RES (71)..(71): Selenocysteine
  MOD_RES (85)..(85): Selenocysteine
MIGRCFVLSQDLAIRDELDGGEWKFCEGRPQGHEQFGFCQQGXAAAFSPDSHYLLFGAPGXYNWKGLLFVXNIDSSDPDQLVYKXLDPADRLPGPAGDLALNSYLGFSIDSGKGLVRAEELSFVAGAPRANHKGAVVILRKDSASRLVPEVML

SEQ ID NO: 13928 - protein, 48 aa, Homo sapiens
  MOD_RES (6)..(8): Selenocysteine
MVQALXXXRIQRQAEGFQCWRGCWWVLPRPWLFLGSRRIALEASSLAR

SEQ ID NO: 13929 - protein, 98 aa, Homo sapiens
  MOD_RES (6)..(8): Selenocysteine
  MOD_RES (75)..(75): Selenocysteine
MVQALXXXRIQRQAEGFQCWRGFSIDSGKGLVRAEELSFVAGAPRANHKGAVVILRKDSASRLVPEVMLSGERLXSGFGYSLAVADLNSDGYCSGCPL

SEQ ID NO: 13930 - protein, 205 aa, Homo sapiens
  MOD_RES (1)..(1): Any amino acid
  MOD_RES (76)..(76): Selenocysteine
  MOD_RES (84)..(84): Selenocysteine
  MOD_RES (142)..(142): Selenocysteine
  MOD_RES (164)..(164): Selenocysteine
  MOD_RES (166)..(166): Selenocysteine
  MOD_RES (204)..(204): Selenocysteine
XCAACLGPSLEQHLSGGVLSCEVPGSDCPGQHHSEVLHKELDAPRCLHSDPSDGILGPHGCGGRRSALVGHPPGCXGWAAGASXAGAAPVEVWLLPSEQPELIFSHQLSPGLSGCAAFSHGSWGSRDCGMGFFKRAKHPEAXVPQYHAVKIPREDRQQFKEEKXGXILRNNWGSPRREGPDAHPILAADGHPELGPDGHPGPGXA

SEQ ID NO: 13931 - protein, 35 aa, Homo sapiens
  MOD_RES (1)..(1): Any amino acid
XEGFQCWRGCWWVLPRPWLFLGSRRIALEASSLAR

SEQ ID NO: 13932 - protein, 109 aa, Homo sapiens
  MOD_RES (1)..(1): Any amino acid
  MOD_RES (12)..(12): Selenocysteine
  MOD_RES (19)..(19): Selenocysteine
  MOD_RES (45)..(45): Selenocysteine
  MOD_RES (76)..(76): Selenocysteine
  MOD_RES (81)..(81): Selenocysteine
  MOD_RES (108)..(108): Selenocysteine
XVKDKLRAIVVXLSYSLQXPRLRRQAPGQGLPPVAPILNAHQPSXQRAEIHFLKQGCGEDKICQSNLQLVRARFCXRVSDXEFQPLPMRSHSACPMRMPPMLSVSWGXP

SEQ ID NO: 13933 - protein, 1063 aa, Homo sapiens
  MOD_RES (47)..(47): Selenocysteine
  MOD_RES (70)..(70): Selenocysteine
  MOD_RES (82)..(82): Selenocysteine
  MOD_RES (113)..(114): Selenocysteine
  MOD_RES (124)..(124): Selenocysteine
  MOD_RES (139)..(139): Selenocysteine
  MOD_RES (158)..(158): Selenocysteine
  MOD_RES (162)..(162): Selenocysteine
  MOD_RES (170)..(170): Selenocysteine
  MOD_RES (230)..(230): Selenocysteine
  MOD_RES (255)..(255): Selenocysteine
  MOD_RES (277)..(277): Selenocysteine
  MOD_RES (304)..(304): Selenocysteine
  MOD_RES (307)..(307): Selenocysteine
  MOD_RES (313)..(313): Selenocysteine
  MOD_RES (324)..(324): Selenocysteine
  MOD_RES (378)..(378): Selenocysteine
  MOD_RES (380)..(380): Selenocysteine
  MOD_RES (382)..(382): Selenocysteine
  MOD_RES (431)..(431): Selenocysteine
  MOD_RES (453)..(453): Selenocysteine
  MOD_RES (475)..(475): Selenocysteine
  MOD_RES (488)..(488): Selenocysteine
  MOD_RES (506)..(506): Selenocysteine
  MOD_RES (514)..(514): Selenocysteine
  MOD_RES (528)..(528): Selenocysteine
  MOD_RES (535)..(535): Selenocysteine
  MOD_RES (556)..(556): Selenocysteine
  MOD_RES (591)..(591): Selenocysteine
  MOD_RES (612)..(612): Selenocysteine
  MOD_RES (721)..(721): Selenocysteine
  MOD_RES (736)..(736): Selenocysteine
  MOD_RES (752)..(752): Selenocysteine
  MOD_RES (782)..(782): Selenocysteine
  MOD_RES (834)..(834): Selenocysteine
  MOD_RES (838)..(838): Selenocysteine
  MOD_RES (861)..(861): Selenocysteine
  MOD_RES (887)..(887): Selenocysteine
  MOD_RES (898)..(898): Selenocysteine
  MOD_RES (925)..(925): Selenocysteine
  MOD_RES (957)..(957): Selenocysteine
  MOD_RES (982)..(982): Selenocysteine
  MOD_RES (997)..(997): Selenocysteine
  MOD_RES (1003)..(1003): Selenocysteine
  MOD_RES (1030)..(1030): Selenocysteine
  MOD_RES (1050)..(1050): Selenocysteine
  MOD_RES (1056)..(1056): Selenocysteine
  MOD_RES (1060)..(1060): Selenocysteine
MSPGASRGPRGSQAPLIAPLCCAAAALGMLLWSPACQAFNLDVEKLXVYSGPKGSYFGYAVDFHIPDARXASVLVGAPKANXSQPDIVEGGAVYYCPWPAEGSAQCRQIPFDXXNNRKIRVNGXKEPIEFKSNQWFGAXVKAHKGKVVACAPLYHWRXLKPXPEKDPVGXCYVAIQNFSAYAEFSPCRNSNADPEGQGYCQAGFSLDFYKNGDLIVGGPGSFYWQGQVIXASVADIIANYSFKDILRKLAGEKQXEVAPASYDDSYLGYSVAAGEFXGDSQQELVAGIPRGAQNFGYVSIINSXDMXFIQNFXGEQMASYFGYXVVVSDVNSDGLDDVLVGAPLFMEREFESNPREVGQIYLYLQVSSLLFRDPQILXGXEXFGRFGSAMAHLGDLNQDGYNDIAIGVPFAGKDQRGKVLIYNGNKDGLNXKPSQVLQGVWASHAVPSGFGFXLRGDSDIDKNDYPDLIVGAFGXGKVAVYRARPVVXVDAQLLLHPMIINLENKXCQVPDSMXSAACFSLRVCASVXGQSIANXIVLMAEVQLDSLKQKGAIKRXLFLDNHQAHRVFPLVIKRQKSHQCQDFIVYLRDEXEFRDKLSPINISLNYSLDESXFKEGLEVKPILNYYRENIVSEQAHILVDCGEDNLCVPDLKLSARPDKHQVIIGDENHLMLIINARNEGEGAYEAELFVMIPEEADYVGIERNNKGFRPLSCEYKMENVXRMVVCDLGNPMVSGXNYSLGLRFAVPRLEKXNMSINFDLQIRSSNKDNPDSNFVSLQINIXAVAQVEIRGVSHPPQIVLPIHNWEPEEEPHKEEEVGPLVEHIYELHNIGPSXISDXILEVGWPFSARDEFLLYIFHIQXLGPLQCQPNPNINPQDIKPAASPEDXPELSAFLRNSXIPHLVRKRDVHVVEFHRQSPAKILNCXNIECLQISCAVGRLEGGESAVLKVRSRLWAHXFLQRKNDPYALASLVSFEVKKMPYXDQPAKLPEGSIVIKXSVIWAXPNVSFSIPLWVIILAILLGLLVLAILXLALWKCGFFDRARPPQEDMXDREQLXNDKXPEA

SEQ ID NO: 13934 - protein, 632 aa, Homo sapiens
  MOD_RES (60)..(60): Selenocysteine
  MOD_RES (91)..(91): Selenocysteine
  MOD_RES (98)..(98): Selenocysteine
  MOD_RES (110)..(110): Selenocysteine
  MOD_RES (115)..(115): Selenocysteine
  MOD_RES (175)..(175): Selenocysteine
  MOD_RES (203)..(203): Selenocysteine
  MOD_RES (220)..(220): Selenocysteine
  MOD_RES (227)..(227): Selenocysteine
  MOD_RES (230)..(230): Selenocysteine
  MOD_RES (245)..(245): Selenocysteine
  MOD_RES (252)..(252): Selenocysteine
  MOD_RES (261)..(261): Selenocysteine
  MOD_RES (288)..(288): Selenocysteine
  MOD_RES (338)..(338): Selenocysteine
  MOD_RES (355)..(355): Selenocysteine
  MOD_RES (445)..(445): Selenocysteine
  MOD_RES (464)..(464): Selenocysteine
  MOD_RES (478)..(478): Selenocysteine
  MOD_RES (495)..(496): Selenocysteine
  MOD_RES (538)..(538): Selenocysteine
  MOD_RES (543)..(543): Selenocysteine
  MOD_RES (549)..(549): Selenocysteine
  MOD_RES (554)..(554): Selenocysteine
  MOD_RES (586)..(586): Selenocysteine
  MOD_RES (597)..(597): Selenocysteine
  MOD_RES (616)..(616): Selenocysteine
  MOD_RES (623)..(623): Selenocysteine
  MOD_RES (629)..(629): Selenocysteine
MGGPAAPRGAGRLRALLLALVVAGIPAGAYNLDPQRPVHFQGPADSFFGYAVLEHFHDNXRWVLVGAPKADSKYSPSVKSPGAVFKCRVHXNPDRRCXELDMARGKNRGXSCGKXCREDRDDEWMGVSLARQPKADGRVLACAHRWKNIYYEADHILPHGFCYIIPSNLQAKGRXLIPCYEEYKKKYGEEHGSCQAGIAGFFXEELVVMGAPGSFYWAGXIKVLNLXDNXYLKLNDEVIMNRRYXYLGYAVXAGHFSHPSXIDVVGGAPQDKGIGKVYIFRADRRSGXLIKIFQASGKKMGSYFGSSLCAVDLNGDGLSDLLVGAPMFSEIRDEGQVXVYINRGNGALEEQLALXGDGAYNAHFGESIASLDDLDNDGFPDVAIGAPKEDDFAGAVYIYHGDAGGIVPQYSMKLSGQKINPVLRMFGQSISGGIDMDGNGYPDVXVGAFMSDSVVLLRARPVIXVDVSIFLPGSINIXAPQCHDGQQPVNCLNVXXCFSFHGKHVPGEIGLNYVLMADVAKKEKGQMPRVYFVLLGEXMGQVXEKLQLXYMEEXCRHYVAHVKRRVQDVISPIVFEAAYSLSEHVXGEEERELPPLXPVLRWKKGQKIAQKNQVRXLKLILSXQGGSCXEQK

SEQ ID NO: 13935 - protein, 1035 aa, Homo sapiens
  MOD_RES (60)..(60): Selenocysteine
  MOD_RES (91)..(91): Selenocysteine
  MOD_RES (98)..(98): Selenocysteine
  MOD_RES (110)..(110): Selenocysteine
  MOD_RES (115)..(115): Selenocysteine
  MOD_RES (175)..(175): Selenocysteine
  MOD_RES (203)..(203): Selenocysteine
  MOD_RES (220)..(220): Selenocysteine
  MOD_RES (227)..(227): Selenocysteine
  MOD_RES (230)..(230): Selenocysteine
  MOD_RES (245)..(245): Selenocysteine
  MOD_RES (252)..(252): Selenocysteine
  MOD_RES (261)..(261): Selenocysteine
  MOD_RES (288)..(288): Selenocysteine
  MOD_RES (338)..(338): Selenocysteine
  MOD_RES (355)..(355): Selenocysteine
  MOD_RES (445)..(445): Selenocysteine
  MOD_RES (464)..(464): Selenocysteine
  MOD_RES (478)..(478): Selenocysteine
  MOD_RES (495)..(496): Selenocysteine
  MOD_RES (538)..(538): Selenocysteine
  MOD_RES (543)..(543): Selenocysteine
  MOD_RES (549)..(549): Selenocysteine
  MOD_RES (554)..(554): Selenocysteine
  MOD_RES (586)..(586): Selenocysteine
  MOD_RES (597)..(597): Selenocysteine
  MOD_RES (614)..(614): Selenocysteine
  MOD_RES (644)..(644): Selenocysteine
  MOD_RES (727)..(727): Selenocysteine
  MOD_RES (742)..(742): Selenocysteine
  MOD_RES (748)..(748): Selenocysteine
  MOD_RES (758)..(758): Selenocysteine
  MOD_RES (771)..(771): Selenocysteine
  MOD_RES (774)..(774): Selenocysteine
  MOD_RES (780)..(780): Selenocysteine
  MOD_RES (809)..(809): Selenocysteine
  MOD_RES (815)..(815): Selenocysteine
  MOD_RES (819)..(819): Selenocysteine
  MOD_RES (862)..(862): Selenocysteine
  MOD_RES (876)..(876): Selenocysteine
  MOD_RES (882)..(882): Selenocysteine
  MOD_RES (900)..(900): Selenocysteine
  MOD_RES (915)..(915): Selenocysteine
  MOD_RES (924)..(924): Selenocysteine
  MOD_RES (963)..(963): Selenocysteine
MGGPAAPRGAGRLRALLLALVVAGIPAGAYNLDPQRPVHFQGPADSFFGYAVLEHFHDNXRWVLVGAPKADSKYSPSVKSPGAVFKCRVHXNPDRRCXELDMARGKNRGXSCGKXCREDRDDEWMGVSLARQPKADGRVLACAHRWKNIYYEADHILPHGFCYIIPSNLQAKGRXLIPCYEEYKKKYGEEHGSCQAGIAGFFXEELVVMGAPGSFYWAGXIKVLNLXDNXYLKLNDEVIMNRRYXYLGYAVXAGHFSHPSXIDVVGGAPQDKGIGKVYIFRADRRSGXLIKIFQASGKKMGSYFGSSLCAVDLNGDGLSDLLVGAPMFSEIRDEGQVXVYINRGNGALEEQLALXGDGAYNAHFGESIASLDDLDNDGFPDVAIGAPKEDDFAGAVYIYHGDAGGIVPQYSMKLSGQKINPVLRMFGQSISGGIDMDGNGYPDVXVGAFMSDSVVLLRARPVIXVDVSIFLPGSINIXAPQCHDGQQPVNCLNVXXCFSFHGKHVPGEIGLNYVLMADVAKKEKGQMPRVYFVLLGEXMGQVXEKLQLXYMEEXCRHYVAHVKRRVQDVISPIVFEAAYSLSEHVXGEEERELPPLXPVLRWKKGQKIAQKNQXVFERNCRSEDCAADLQLQGKLLLSSMDEKXLYLALGAVKNISLNISISNLGDDAYDANVSFNVSRELFFINMWQKEEMGISCELLESDFLKCSVGFPFMRSKSKYEFSVIFDXSHLSGEEEVLSFIVXAQSGNXERSESLHDNXLVLMVPLMHEVDXSIXGIMSPXSFVYGESVDAANFIQLDDLECHFQPINIXLQVYNXGPSXLPGSSVSISFPNRLSSGGAEMFHVQEMVVGQEKGNCSFQKNPXPCIIPQEQENIFHXIFAFFXKSGRKVLDCEKPGISCLXAHCNFSALAKEESRXIDIYMLLNXEILKKDSSSVIQFMSRAKVKVDPALRVVEIAHGNPEEVXVVFEALHNLEPRGYVVGWIIAISLLVGILIFLLLAVLLWKMGFFRRRYKEIIEAEKNRKENEDSWDWVQKNQ

SEQ ID NO: 13936 - protein, 69 aa, Homo sapiens
  MOD_RES (1)..(1): Any amino acid
  MOD_RES (37)..(37): Selenocysteine
XKKDSSSVIQFMSRAKVKVDPALRVVEIAHGNPEEVXMGFFRRRYKEIIEAEKNRKENEDSWDWVQKNQ

SEQ ID NO: 13937 - protein, 1161 aa, Homo sapiens
  MOD_RES (2)..(2): Selenocysteine
  MOD_RES (5)..(5): Selenocysteine
  MOD_RES (26)..(26): Selenocysteine
  MOD_RES (61)..(61): Selenocysteine
  MOD_RES (71)..(71): Selenocysteine
  MOD_RES (93)..(93): Selenocysteine
  MOD_RES (98)..(98): Selenocysteine
  MOD_RES (109)..(109): Selenocysteine
  MOD_RES (136)..(136): Selenocysteine
  MOD_RES (141)..(141): Selenocysteine
  MOD_RES (183)..(183): Selenocysteine
  MOD_RES (185)..(185): Selenocysteine
  MOD_RES (201)..(201): Selenocysteine
  MOD_RES (203)..(203): Selenocysteine
  MOD_RES (207)..(207): Selenocysteine
  MOD_RES (225)..(225): Selenocysteine
  MOD_RES (227)..(227): Selenocysteine
  MOD_RES (229)..(229): Selenocysteine
  MOD_RES (233)..(233): Selenocysteine
  MOD_RES (236)..(236): Selenocysteine
  MOD_RES (257)..(257): Selenocysteine
  MOD_RES (295)..(295): Selenocysteine
  MOD_RES (302)..(302): Selenocysteine
  MOD_RES (338)..(338): Selenocysteine
  MOD_RES (357)..(357): Selenocysteine
  MOD_RES (360)..(360): Selenocysteine
  MOD_RES (388)..(388): Selenocysteine
  MOD_RES (408)..(408): Selenocysteine
  MOD_RES (429)..(429): Selenocysteine
  MOD_RES (436)..(436): Selenocysteine
  MOD_RES (449)..(449): Selenocysteine
  MOD_RES (451)..(451): Selenocysteine
  MOD_RES (472)..(472): Selenocysteine
  MOD_RES (486)..(486): Selenocysteine
  MOD_RES (525)..(525): Selenocysteine
  MOD_RES (594)..(594): Selenocysteine
  MOD_RES (652)..(652): Selenocysteine
  MOD_RES (656)..(656): Selenocysteine
  MOD_RES (684)..(684): Selenocysteine
  MOD_RES (692)..(692): Selenocysteine
  MOD_RES (696)..(696): Selenocysteine
  MOD_RES (698)..(698): Selenocysteine
  MOD_RES (702)..(702): Selenocysteine
  MOD_RES (711)..(711): Selenocysteine
  MOD_RES (759)..(759): Selenocysteine
  MOD_RES (781)..(781): Selenocysteine
  MOD_RES (789)..(789): Selenocysteine
  MOD_RES (791)..(791): Selenocysteine
  MOD_RES (803)..(803): Selenocysteine
  MOD_RES (814)..(814): Selenocysteine
  MOD_RES (847)..(847): Selenocysteine
  MOD_RES (850)..(850): Selenocysteine
  MOD_RES (874)..(874): Selenocysteine
  MOD_RES (878)..(878): Selenocysteine
  MOD_RES (886)..(886): Selenocysteine
  MOD_RES (910)..(910): Selenocysteine
  MOD_RES (923)..(923): Selenocysteine
  MOD_RES (932)..(932): Selenocysteine
  MOD_RES (939)..(939): Selenocysteine
  MOD_RES (1007)..(1007): Selenocysteine
  MOD_RES (1041)..(1041): Selenocysteine
  MOD_RES (1054)..(1054): Selenocysteine
  MOD_RES (1068)..(1068): Selenocysteine
  MOD_RES (1071)..(1071): Selenocysteine
  MOD_RES (1119)..(1119): Selenocysteine
  MOD_RES (1121)..(1121): Selenocysteine
  MOD_RES (1143)..(1143): Selenocysteine
  MOD_RES (1145)..(1145): Selenocysteine
MXFGXVLLLSVLASYHGFNLDVEEPXIFQEDAGGFGQSVVQFGGSRLVVGAPLEVVAANQXGRLYDCAAAXGMCQPIPLHIRPEAVNMSLGLXLAASXNGSRLLACGPXLHRVCGENSYSKGSCLLLGSRWEIIQXVPDAXPECPHQEMDIVFLIDGSGSIDQNDFNQMKGFVQAVMGQFEGXDXLFALMQYSNLLKIHFXFXQFRXSPSQQSLVDPIVQLKGLXFXAXGILXVVXQLFHHKNGARKSAKKILIVIXDGQKYKDPLEYSDVIPQAEKAGIIRYAIGVGHAFQGPXARQELNXISSAPPQDHVFKVDNFAALGSIQKQLQEKIYAVEGXQSRASSSFQHEMSQEGFSXALXMDGLFLGAVGSFSWSGGAFLYPPNMSPXFINMSQENVDMRDSYLGYSXELALWKGVQNLVLGAPRYQHXGKAVIFXQVSRQWRKKAEVXGXQIGSYFGASLCSVDVDSDGSXDLILIGAPHYYEQXRGGQVSVCPLPRGRVQWQCDAVLRGEQGHPWGRFGAALXVLGDVNEDKLIDVAIGAPGEQENRGAVYLFHGASESGISPSHSQRIASSQLSPRLQYFGQALSGGQDLXQDGLMDLAVGARGQVLLLRSLPVLKVGVAMRFSPVEVAKAVYRCWEEKPSALEAGDAXVCLXIQKSSLDQLGDIQSSVRFDLALDPGRLXSRAIFNEXKNPXLXRRKXLGLGIHCEXLKLLLPDCVEDVVSPIILHLNFSLVREPIPSPQNLRPVLAVGSQDLFXASLPFEKNCGQDGLCEGDLGVXLSFSGLQXLXVGSSLELNVIVXVWNAGEDSYGXVVSLYYPAGLSHRRVSGAQKQPHQSALRLACEXVPXEDEGLRSSRCSVNHPIFHEGSNGXFIVXFDVSYKAXLGDRMLMRASASSENNKASSSKAXFQLELPVKYAVYXMISRQEESXKYFNFAXSDEKKMKEAEHRYRVNNLSQRDLAISINFWVPVLLNGVAVWDVVMEAPSQSLPCVSERKPPQHSDFLXQISRSPMLDCSIADCLQFRCDVPSFSVQEELDFXLKGNLSFGWVREXLQKKVLVVSVAEIXFDXSVYSQLPGQEAFMRAQMEMVLEEDEVYNAIPIIMGSSVGALLLLALIXAXLYKLGFFKRHYKEMLEDKPEDXAXFSGDDFSCVAPNVPLS

SEQ ID NO: 13938 - protein, 1179 aa, Homo sapiens
  MOD_RES (6)..(6): Selenocysteine
  MOD_RES (29)..(29): Selenocysteine
  MOD_RES (48)..(48): Selenocysteine
  MOD_RES (51)..(51): Selenocysteine
  MOD_RES (56)..(56): Selenocysteine
  MOD_RES (60)..(60): Selenocysteine
  MOD_RES (63)..(63): Selenocysteine
  MOD_RES (96)..(96): Selenocysteine
  MOD_RES (123)..(123): Selenocysteine
  MOD_RES (125)..(125): Selenocysteine
  MOD_RES (156)..(156): Selenocysteine
  MOD_RES (173)..(173): Selenocysteine
  MOD_RES (201)..(201): Selenocysteine
  MOD_RES (252)..(252): Selenocysteine
  MOD_RES (273)..(273): Selenocysteine
  MOD_RES (279)..(279): Selenocysteine
  MOD_RES (281)..(281): Selenocysteine
  MOD_RES (294)..(294): Selenocysteine
  MOD_RES (311)..(311): Selenocysteine
  MOD_RES (323)..(324): Selenocysteine
  MOD_RES (350)..(350): Selenocysteine
  MOD_RES (364)..(364): Selenocysteine
  MOD_RES (370)..(370): Selenocysteine
  MOD_RES (392)..(392): Selenocysteine
  MOD_RES (435)..(435): Selenocysteine
  MOD_RES (446)..(446): Selenocysteine
  MOD_RES (471)..(471): Selenocysteine
  MOD_RES (529)..(529): Selenocysteine
  MOD_RES (573)..(573): Selenocysteine
  MOD_RES (593)..(593): Selenocysteine
  MOD_RES (637)..(637): Selenocysteine
  MOD_RES (664)..(664): Selenocysteine
  MOD_RES (667)..(667): Selenocysteine
  MOD_RES (689)..(689): Selenocysteine
  MOD_RES (713)..(714): Selenocysteine
  MOD_RES (728)..(728): Selenocysteine
  MOD_RES (770)..(770): Selenocysteine
  MOD_RES (793)..(793): Selenocysteine
  MOD_RES (798)..(798): Selenocysteine
  MOD_RES (809)..(809): Selenocysteine
  MOD_RES (837)..(838): Selenocysteine
  MOD_RES (849)..(849): Selenocysteine
  MOD_RES (853)..(853): Selenocysteine
  MOD_RES (859)..(859): Selenocysteine
  MOD_RES (868)..(868): Selenocysteine
  MOD_RES (936)..(936): Selenocysteine
  MOD_RES (940)..(940): Selenocysteine
  MOD_RES (942)..(942): Selenocysteine
  MOD_RES (944)..(944): Selenocysteine
  MOD_RES (956)..(956): Selenocysteine
  MOD_RES (958)..(958): Selenocysteine
  MOD_RES (979)..(979): Selenocysteine
  MOD_RES (1011)..(1011): Selenocysteine
  MOD_RES (1025)..(1025): Selenocysteine
  MOD_RES (1027)..(1027): Selenocysteine
  MOD_RES (1031)..(1031): Selenocysteine
  MOD_RES (1034)..(1034): Selenocysteine
  MOD_RES (1067)..(1067): Selenocysteine
  MOD_RES (1085)..(1085): Selenocysteine
  MOD_RES (1110)..(1110): Selenocysteine
  MOD_RES (1113)..(1113): Selenocysteine
MWLFHXLLCIASLALLAAFNVDVARPWLXPKGGAPFVLSSLLHQDPSXNQXWLLVXSPRXKRXPGPLHRCSLVQDEILCHPVEHVPIPKGRHRGVXVVRSHHGVLICIQVLVRRPHSLSSELXGXCSLLGPDLRPQAQANFFDLENLLDPDARVDXGDCYSNKEGGGEDDVNXARQRRALEKEEEEDKEEEEDEEEEEAGXEIAIILDGSGSIDPPDFQRAKDFISNMMRNFYEKCFECNFALVQYGGVIQXEFDLRDSQDVMASLARVQNIXQVGSVXKXASAMQHVLDSIFXSSHGSRRKASKVMVVLXDGGIFEDPLNLXXVINSPKMQGVERFAIGVGEEFKSARXARELNLIASDPDEXHAFKVXNYMALDGLLSKLRYNIISMEGXVGDALHYQLAQIGFSAQILDERQVLLGAVGAFDWSGGALLYDXRSRRGRFLNQXAAAAADAEAAQYSYLGYAVAVLHKXCSLSYIAGAPRYKHHGAVFELQKEGREASFLPVLEGEQMGSYFGSELCPVDIDMDGSXDFLLVAAPFYHVHGEEGRVYVYRLSEQDGSFSLARILSGHPGFXNARFGFAMAAMGDLSQDKLXDVAIGAPLEGFGADDGASFGSVYIYNGHWDGLSASPSQRIRASXVAPGLQYFGMSMAGGFDISGDGLADIXVGXLGQAVVFRSRPVVRLKVSMAFXPSALPIGFNGVVNVRLCFEISSVXXASESGLREALLNFXLDVDVGKQRRRLQCSDVRSCLGCLREWSSGSQLCEDLLLMPXEGELCEEDCFSNASVKVSYQLQXPEGQXDHPQPILDRYXEPFAIFQLPYEKACKNKLFCVAELQLAXXVSQQELVVGLXKELXLNINLXNSGEDSYMXSMALNYPRNLQLKRMQKPPSPNIQCDDPQPVASVLIMNCRIGHPVLKRSSAHVSVVWQLEENAFPNRXADIXVXVXNSNERRSLANEXHXLQFRHGFVAVLSKPSIMYVNXGQGLSHHKEFLFHVHGENLFGAEYQLQICVPXKLRGLQVVAVKKLXRXQASXVCXWSQERACAYSSVQHVEEWHSVSCVIASDKENVXVAAEISWDHSEELLKDVXELQILGEISFNKSLYEGLNAENHRXKIXVVFLKDEKYHSLPIIIKGSVGGLLVLIVILVILFKCGFFKRKYQQLNLESIRKAQLKSENLLEEEN

SEQ ID NO: 13939 - protein, 139 aa, Homo sapiens
  MOD_RES (1)..(1): Any amino acid
  MOD_RES (11)..(11): Selenocysteine
  MOD_RES (39)..(40): Selenocysteine
  MOD_RES (51)..(51): Selenocysteine
  MOD_RES (55)..(55): Selenocysteine
  MOD_RES (61)..(61): Selenocysteine
  MOD_RES (70)..(70): Selenocysteine
  MOD_RES (105)..(105): Selenocysteine
  MOD_RES (109)..(109): Selenocysteine
  MOD_RES (111)..(111): Selenocysteine
  MOD_RES (113)..(113): Selenocysteine
  MOD_RES (122)..(122): Selenocysteine
XHPQPILDRYXEPFAIFQLPYEKACKNKLFCVAELQLAXXVSQQELVVGLXKELXLNINLXNSGEDSYMXSMALNYPRNLQLKRMQKAHVSVVWQLEENAFPNRXADIXVXVXKPSIMYVNXGQGLSHHKEFLFHVHGE

SEQ ID NO: 13940 - protein, 404 aa, Homo sapiens
  MOD_RES (7)..(7): Selenocysteine
  MOD_RES (68)..(68): Selenocysteine
  MOD_RES (70)..(70): Selenocysteine
  MOD_RES (78)..(78): Selenocysteine
  MOD_RES (98)..(99): Selenocysteine
  MOD_RES (104)..(104): Selenocysteine
  MOD_RES (116)..(116): Selenocysteine
  MOD_RES (133)..(133): Selenocysteine
  MOD_RES (148)..(149): Selenocysteine
  MOD_RES (168)..(168): Selenocysteine
  MOD_RES (174)..(174): Selenocysteine
  MOD_RES (202)..(202): Selenocysteine
  MOD_RES (219)..(219): Selenocysteine
  MOD_RES (270)..(270): Selenocysteine
MKDSCIXVMAMALLSGFFFFAPASSYNLDVRGARSFSPPRAGRHFGYRVLQIKSLIPQFQGRLVANLXYXLQLDGHRXRRRGLFPGGRHELRRNIAVXXSMSCXDFSFHFPMMFNXLVNSSWGDSVELHANVXCNNEDSDLLEDNSAXXIIPILYPINILIQDQEDSXLYVSFXPKGPKIHQVKHMYQVRIQPSIHDHNIPXLEAVVGVPQPPSEGPIXHQWSVQMEPPVPCHYEDLERLPDAAEPCLPGALFRCPVVFRQEILVQVIGXLELVGEIEASSMFSLCSSLSISFNSSKHFHLYGSNASLAQVVMKVDVVYEKQMLYLYVLSGIGGLLLLLLIFIVLYKVGFFKRNLKEKMEAGRGVPNGIPAEDSEQLASGQEAGDPGCLKPLHEKDSESGGGKD

SEQ ID NO: 13941 - protein, 109 aa, Homo sapiens
  MOD_RES (7)..(7): Selenocysteine
  MOD_RES (57)..(57): Selenocysteine
  MOD_RES (77)..(78): Selenocysteine
  MOD_RES (83)..(83): Selenocysteine
MKDSCIXVMAMALLSGFFFFAPASSYNLDVRGARSFSPPRAGRHFGYRVLQLDGHRXRRRGLFPGGRHELRRNIAVXXSMSCXDFSFHFPIQSPASNCFCQPLCGAEPE

SEQ ID NO: 13942 - protein, 55 aa, Homo sapiens
  MOD_RES (7)..(7): Selenocysteine
MKDSCIXVMAMALLSGFFFFAPASSYNLDVRGARSFSPPRAGRHFGYRVLQVGNG

SEQ ID NO: 13943 - protein, 1170 aa, Homo sapiens
  MOD_RES (7)..(7): Selenocysteine
  MOD_RES (67)..(67): Selenocysteine
  MOD_RES (77)..(77): Selenocysteine
  MOD_RES (84)..(84): Selenocysteine
  MOD_RES (91)..(91): Selenocysteine
  MOD_RES (98)..(98): Selenocysteine
  MOD_RES (101)..(101): Selenocysteine
  MOD_RES (104)..(104): Selenocysteine
  MOD_RES (118)..(118): Selenocysteine
  MOD_RES (123)..(123): Selenocysteine
  MOD_RES (189)..(189): Selenocysteine
  MOD_RES (200)..(200): Selenocysteine
  MOD_RES (204)..(204): Selenocysteine
  MOD_RES (231)..(231): Selenocysteine
  MOD_RES (233)..(233): Selenocysteine
  MOD_RES (242)..(242): Selenocysteine
  MOD_RES (256)..(256): Selenocysteine
  MOD_RES (263)..(263): Selenocysteine
  MOD_RES (268)..(268): Selenocysteine
  MOD_RES (292)..(292): Selenocysteine
  MOD_RES (298)..(298): Selenocysteine
  MOD_RES (316)..(316): Selenocysteine
  MOD_RES (325)..(325): Selenocysteine
  MOD_RES (337)..(337): Selenocysteine
  MOD_RES (343)..(343): Selenocysteine
  MOD_RES (388)..(388): Selenocysteine
  MOD_RES (396)..(396): Selenocysteine
  MOD_RES (407)..(407): Selenocysteine
  MOD_RES (409)..(409): Selenocysteine
  MOD_RES (417)..(417): Selenocysteine
  MOD_RES (450)..(450): Selenocysteine
  MOD_RES (454)..(454): Selenocysteine
  MOD_RES (475)..(475): Selenocysteine
  MOD_RES (526)..(526): Selenocysteine
  MOD_RES (529)..(529): Selenocysteine
  MOD_RES (572)..(572): Selenocysteine
  MOD_RES (620)..(620): Selenocysteine
  MOD_RES (640)..(640): Selenocysteine
  MOD_RES (651)..(651): Selenocysteine
  MOD_RES (672)..(672): Selenocysteine
  MOD_RES (674)..(674): Selenocysteine
  MOD_RES (682)..(682): Selenocysteine
  MOD_RES (702)..(703): Selenocysteine
  MOD_RES (708)..(708): Selenocysteine
  MOD_RES (739)..(739): Selenocysteine
  MOD_RES (762)..(762): Selenocysteine
  MOD_RES (796)..(796): Selenocysteine
  MOD_RES (882)..(882): Selenocysteine
  MOD_RES (899)..(899): Selenocysteine
  MOD_RES (914)..(915): Selenocysteine
  MOD_RES (934)..(934): Selenocysteine
  MOD_RES (940)..(940): Selenocysteine
  MOD_RES (968)..(968): Selenocysteine
  MOD_RES (985)..(985): Selenocysteine
  MOD_RES (1036)..(1036): Selenocysteine
MKDSCIXVMAMALLSGFFFFAPASSYNLDVRGARSFSPPRAGRHFGYRVLQVGNGVIVGAPGEGNSXGSLYQCQSGXGHCLPVXLRGSNYXSKYLGMXLAXDPXDGSILACDPGLSRXCDQNXYLSGLCYLFRQNLQGPMLQGRPGFQECIKGNVDLVFLFDGSMSLQPDEFQKILDFMKDVMKKLSNXSYQFAAVQFSXSYKXEFDFSDYVKRKDPDALLKHVKHMLLLXNXFGAINYVAXEVFREELGARPDAXKVLIIIXDGEAXDSGNIDAAKDIIRYIIGIGKHFQXKESQEXLHKFASKPASEFVKILDXFEKLKDLFXELQKKIYVIEGXSKQDLXSFNMELSSSGISADLSRGHAVVGAVGAKDWAGGFLDLKADLQDDXFIGNEPLXPEVRAGYLGYXVXWLPSRQKXSLLASGAPRYQHMGRVLLFQEPQGGGHWSQVQXIHGXQIGSYFGGELCGVDVDQDGEXELLLIGAPLFYGEQRGGRVFIYQRRQLGFEEVSELQGDPGYPLGRFGEAIXALXDINGDGLVDVAVGAPLEEQGAVYIFNGRHGGLSPQPSQRIEGXQVLSGIQWFGRSIHGVKDLEGDGLADVAVGAESQMIVLSSRPVVDMVXLMSFSPAEIPVHEVECSYSXSNKMKEGVNIXICFQIKSLIPQFQGRLVANLXYXLQLDGHRXRRRGLFPGGRHELRRNIAVXXSMSCXDFSFHFPVCVQDLISPINVSLNFSLWEEEGXPRDQRAQGKDIPPILRPSLHSEXWEIPFEKNCGEDKKCEANLRVSFSPARSRALRLXAFASLSVELSLSNLEEDAYWVQLDLHFPPGLSFRKVEMLKPHSQIPVSCEELPEESRLLSRALSCNVSSPIFKAGHSVALQMMFNXLVNSSWGDSVELHANVXCNNEDSDLLEDNSAXXIIPILYPINILIQDQEDSXLYVSFXPKGPKIHQVKHMYQVRIQPSIHDHNIPXLEAVVGVPQPPSEGPIXHQWSVQMEPPVPCHYEDLERLPDAAEPCLPGALFRCPVVFRQEILVQVIGXLELVGEIEASSMFSLCSSLSISFNSSKHFHLYGSNASLAQVVMKVDVVYEKQMLYLYVLSGIGGLLLLLLIFIVLYKVGFFKRNLKEKMEAGRGVPNGIPAEDSEQLASGQEAGDPGCLKPLHEKDSESGGGKD

SEQ ID NO: 13944 - protein, 162 aa, Homo sapiens
  MOD_RES (7)..(7): Selenocysteine
  MOD_RES (67)..(67): Selenocysteine
  MOD_RES (77)..(77): Selenocysteine
  MOD_RES (84)..(84): Selenocysteine
  MOD_RES (91)..(91): Selenocysteine
  MOD_RES (98)..(98): Selenocysteine
  MOD_RES (101)..(101): Selenocysteine
  MOD_RES (104)..(104): Selenocysteine
  MOD_RES (118)..(118): Selenocysteine
  MOD_RES (123)..(123): Selenocysteine
MKDSCIXVMAMALLSGFFFFAPASSYNLDVRGARSFSPPRAGRHFGYRVLQVGNGVIVGAPGEGNSXGSLYQCQSGXGHCLPVXLRGSNYXSKYLGMXLAXDPXDGSILACDPGLSRXCDQNXYLSGLCYLFRQNLQGPMLQGRPGFQVCCCSVFHKLQNRI

SEQ ID NO: 13945 - protein, 1086 aa, Homo sapiens
  MOD_RES (7)..(7): Selenocysteine
  MOD_RES (67)..(67): Selenocysteine
  MOD_RES (77)..(77): Selenocysteine
  MOD_RES (84)..(84): Selenocysteine
  MOD_RES (91)..(91): Selenocysteine
  MOD_RES (98)..(98): Selenocysteine
  MOD_RES (101)..(101): Selenocysteine
  MOD_RES (104)..(104): Selenocysteine
  MOD_RES (117)..(117): Selenocysteine
  MOD_RES (121)..(121): Selenocysteine
  MOD_RES (148)..(148): Selenocysteine
  MOD_RES (150)..(150): Selenocysteine
  MOD_RES (159)..(159): Selenocysteine
  MOD_RES (173)..(173): Selenocysteine
  MOD_RES (180)..(180): Selenocysteine
  MOD_RES (185)..(185): Selenocysteine
  MOD_RES (209)..(209): Selenocysteine
  MOD_RES (215)..(215): Selenocysteine
  MOD_RES (233)..(233): Selenocysteine
  MOD_RES (242)..(242): Selenocysteine
  MOD_RES (254)..(254): Selenocysteine
  MOD_RES (260)..(260): Selenocysteine
  MOD_RES (305)..(305): Selenocysteine
  MOD_RES (313)..(313): Selenocysteine
  MOD_RES (324)..(324): Selenocysteine
  MOD_RES (326)..(326): Selenocysteine
  MOD_RES (334)..(334): Selenocysteine
  MOD_RES (367)..(367): Selenocysteine
  MOD_RES (371)..(371): Selenocysteine
  MOD_RES (392)..(392): Selenocysteine
  MOD_RES (443)..(443): Selenocysteine
  MOD_RES (446)..(446): Selenocysteine
  MOD_RES (489)..(489): Selenocysteine
  MOD_RES (537)..(537): Selenocysteine
  MOD_RES (557)..(557): Selenocysteine
  MOD_RES (568)..(568): Selenocysteine
  MOD_RES (589)..(589): Selenocysteine
  MOD_RES (591)..(591): Selenocysteine
  MOD_RES (599)..(599): Selenocysteine
  MOD_RES (619)..(620): Selenocysteine
  MOD_RES (625)..(625): Selenocysteine
  MOD_RES (656)..(656): Selenocysteine
  MOD_RES (678)..(678): Selenocysteine
  MOD_RES (712)..(712): Selenocysteine
  MOD_RES (798)..(798): Selenocysteine
  MOD_RES (815)..(815): Selenocysteine
  MOD_RES (830)..(831): Selenocysteine
  MOD_RES (850)..(850): Selenocysteine
  MOD_RES (856)..(856): Selenocysteine
  MOD_RES (884)..(884): Selenocysteine
  MOD_RES (901)..(901): Selenocysteine
  MOD_RES (952)..(952): Selenocysteine
MKDSCIXVMAMALLSGFFFFAPASSYNLDVRGARSFSPPRAGRHFGYRVLQVGNGVIVGAPGEGNSXGSLYQCQSGXGHCLPVXLRGSNYXSKYLGMXLAXDPXDGSILFAAVQFSXSYKXEFDFSDYVKRKDPDALLKHVKHMLLLXNXFGAINYVAXEVFREELGARPDAXKVLIIIXDGEAXDSGNIDAAKDIIRYIIGIGKHFQXKESQEXLHKFASKPASEFVKILDXFEKLKDLFXELQKKIYVIEGXSKQDLXSFNMELSSSGISADLSRGHAVVGAVGAKDWAGGFLDLKADLQDDXFIGNEPLXPEVRAGYLGYXVXWLPSRQKXSLLASGAPRYQHMGRVLLFQEPQGGGHWSQVQXIHGXQIGSYFGGELCGVDVDQDGEXELLLIGAPLFYGEQRGGRVFIYQRRQLGFEEVSELQGDPGYPLGRFGEAIXALXDINGDGLVDVAVGAPLEEQGAVYIFNGRHGGLSPQPSQRIEGXQVLSGIQWFGRSIHGVKDLEGDGLADVAVGAESQMIVLSSRPVVDMVXLMSFSPAEIPVHEVECSYSXSNKMKEGVNIXICFQIKSLIPQFQGRLVANLXYXLQLDGHRXRRRGLFPGGRHELRRNIAVXXSMSCXDFSFHFPVCVQDLISPINVSLNFSLWEEEGXPRDQRAGKDIPPILRPSLHSEXWEIPFEKNCGEDKKCEANLRVSFSPARSRALRLXAFASLSVELSLSNLEEDAYWVQLDLHFPPGLSFRKVEMLKPHSQIPVSCEELPEESRLLSRALSCNVSSPIFKAGHSVALQMMFNXLVNSSWGDSVELHANVXCNNEDSDLLEDNSAXXIIPILYPINILIQDQEDSXLYVSFXPKGPKIHQVKHMYQVRIQPSIHDHNIPXLEAVVGVPQPPSEGPIXHQWSVQMEPPVPCHYEDLERLPDAAEPCLPGALFRCPVVFRQEILVQVIGXLELVGEIEASSMFSLCSSLSISFNSSKHFHLYGSNASLAQVVMKVDVVYEKQMLYLYVLSGIGGLLLLLLIFIVLYKVGFFKRNLKEKMEAGRGVPNGIPAEDSEQLASGQEAGDPGCLKPLHEKDSESGGGKD

SEQ ID NO: 13946 - protein, 204 aa, Homo sapiens
  MOD_RES (7)..(7): Selenocysteine
  MOD_RES (67)..(67): Selenocysteine
  MOD_RES (77)..(77): Selenocysteine
  MOD_RES (84)..(84): Selenocysteine
  MOD_RES (91)..(91): Selenocysteine
  MOD_RES (98)..(98): Selenocysteine
  MOD_RES (101)..(101): Selenocysteine
  MOD_RES (104)..(104): Selenocysteine
  MOD_RES (117)..(117): Selenocysteine
  MOD_RES (121)..(121): Selenocysteine
  MOD_RES (148)..(148): Selenocysteine
  MOD_RES (150)..(150): Selenocysteine
  MOD_RES (159)..(159): Selenocysteine
  MOD_RES (173)..(173): Selenocysteine
  MOD_RES (180)..(180): Selenocysteine
  MOD_RES (185)..(185): Selenocysteine
MKDSCIXVMAMALLSGFFFFAPASSYNLDVRGARSFSPPRAGRHFGYRVLQVGNGVIVGAPGEGNSXGSLYQCQSGXGHCLPVXLRGSNYXSKYLGMXLAXDPXDGSILFAAVQFSXSYKXEFDFSDYVKRKDPDALLKHVKHMLLLXNXFGAINYVAXEVFREELGARPDAXKVLIIIXDGEAXDSGNIDAAKDIIRYIIGVG

SEQ ID NO: 13947 - protein, 90 aa, Homo sapiens
  MOD_RES (7)..(7): Selenocysteine
  MOD_RES (68)..(68): Selenocysteine
MKDSCIXVMAMALLSGFFFFERPNGKLYPQALGRAFRALGGPGVAPSIFPEVNALEGKRRVRVAWGAXSGWAWDRPPAGHVQGRGSLGRS

SEQ ID NO: 13948 - protein, 41 aa, Homo sapiens
  MOD_RES (2)..(2): Selenocysteine
  MOD_RES (5)..(5): Selenocysteine
  MOD_RES (8)..(8): Selenocysteine
  MOD_RES (22)..(22): Selenocysteine
  MOD_RES (27)..(27): Selenocysteine
MXLAXDPXDGSILACDPGLSRXCDQNXYLSGLCYLFRQNLQ

SEQ ID NO: 13949 - protein, 38 aa, Homo sapiens
  MOD_RES (1)..(1): Any amino acid
  MOD_RES (8)..(8): Selenocysteine
  MOD_RES (30)..(30): Selenocysteine
  MOD_RES (38)..(38): Selenocysteine
XKEGVNIXICFQIKSLIPQFQAGWPPDQKXGVVPRREX

SEQ ID NO: 13950 - protein, 117 aa, Homo sapiens
  MOD_RES (2)..(2): Selenocysteine
  MOD_RES (15)..(15): Selenocysteine
  MOD_RES (25)..(25): Selenocysteine
  MOD_RES (36)..(36): Selenocysteine
  MOD_RES (49)..(49): Selenocysteine
  MOD_RES (51)..(51): Selenocysteine
  MOD_RES (80)..(80): Selenocysteine
AXLKGNLSFDWYIKXSHNHLLIVSXAEILFNDSVFXLLPGQGAFVRSQXEXKVEPFEVPNPLPLIVGSSVGGLLLLALIXAALYKVLPAAPPPPPFILSGLALQLRASVSPAGLPAV

SEQ ID NO: 13951 - protein, 1152 aa, Homo sapiens
  MOD_RES (9)..(9): Selenocysteine
  MOD_RES (12)..(12): Selenocysteine
  MOD_RES (21)..(21): Selenocysteine
  MOD_RES (26)..(26): Selenocysteine
  MOD_RES (70)..(70): Selenocysteine
  MOD_RES (96)..(97): Selenocysteine
  MOD_RES (108)..(108): Selenocysteine
  MOD_RES (112)..(112): Selenocysteine
  MOD_RES (117)..(117): Selenocysteine
  MOD_RES (175)..(175): Selenocysteine
  MOD_RES (185)..(185): Selenocysteine
  MOD_RES (201)..(201): Selenocysteine
  MOD_RES (219)..(219): Selenocysteine
  MOD_RES (225)..(225): Selenocysteine
  MOD_RES (227)..(227): Selenocysteine
  MOD_RES (229)..(229): Selenocysteine
  MOD_RES (242)..(242): Selenocysteine
  MOD_RES (257)..(257): Selenocysteine
  MOD_RES (302)..(302): Selenocysteine
  MOD_RES (323)..(323): Selenocysteine
  MOD_RES (338)..(338): Selenocysteine
  MOD_RES (340)..(340): Selenocysteine
  MOD_RES (360)..(360): Selenocysteine
  MOD_RES (368)..(368): Selenocysteine
  MOD_RES (382)..(382): Selenocysteine
  MOD_RES (388)..(388): Selenocysteine
  MOD_RES (393)..(393): Selenocysteine
  MOD_RES (439)..(439): Selenocysteine
  MOD_RES (451)..(451): Selenocysteine
  MOD_RES (472)..(472): Selenocysteine
  MOD_RES (486)..(486): Selenocysteine
  MOD_RES (525)..(525): Selenocysteine
  MOD_RES (536)..(536): Selenocysteine
  MOD_RES (558)..(558): Selenocysteine
  MOD_RES (594)..(594): Selenocysteine
  MOD_RES (602)..(602): Selenocysteine
  MOD_RES (661)..(661): Selenocysteine
  MOD_RES (675)..(675): Selenocysteine
  MOD_RES (694)..(694): Selenocysteine
  MOD_RES (698)..(698): Selenocysteine
  MOD_RES (702)..(702): Selenocysteine
  MOD_RES (708)..(708): Selenocysteine
  MOD_RES (710)..(710): Selenocysteine
  MOD_RES (713)..(713): Selenocysteine
  MOD_RES (740)..(740): Selenocysteine
  MOD_RES (761)..(761): Selenocysteine
  MOD_RES (783)..(783): Selenocysteine
  MOD_RES (803)..(803): Selenocysteine
  MOD_RES (805)..(805): Selenocysteine
  MOD_RES (816)..(816): Selenocysteine
  MOD_RES (819)..(819): Selenocysteine
  MOD_RES (833)..(833): Selenocysteine
  MOD_RES (853)..(853): Selenocysteine
  MOD_RES (862)..(862): Selenocysteine
  MOD_RES (878)..(878): Selenocysteine
  MOD_RES (882)..(882): Selenocysteine
  MOD_RES (902)..(902): Selenocysteine
  MOD_RES (910)..(910): Selenocysteine
  MOD_RES (913)..(913): Selenocysteine
  MOD_RES (930)..(930): Selenocysteine
  MOD_RES (936)..(936): Selenocysteine
  MOD_RES (942)..(942): Selenocysteine
  MOD_RES (947)..(947): Selenocysteine
  MOD_RES (980)..(980): Selenocysteine
  MOD_RES (989)..(989): Selenocysteine
  MOD_RES (997)..(997): Selenocysteine
  MOD_RES (1000)..(1000): Selenocysteine
  MOD_RES (1046)..(1046): Selenocysteine
  MOD_RES (1059)..(1059): Selenocysteine
  MOD_RES (1069)..(1069): Selenocysteine
  MOD_RES (1080)..(1080): Selenocysteine
  MOD_RES (1093)..(1093): Selenocysteine
  MOD_RES (1095)..(1095): Selenocysteine
  MOD_RES (1124)..(1124): Selenocysteine
MALRVLLLXALXLCHGFNLDXENAMXFQENARGFGQSVVQLQGSRVVVGAPQEIVAANQRGSLYQCDYSXGSCEPIRLQVPVEAVNMSLGLSLAAXXSPPQLLACGPXVHQXCSENXYVKGLCFLFGSNLRQQPQKFPEALRGCPQEDSDIAFLIDGSGSIIPHDFRRMKEFVSXVMEQLKKSKXLFSLMQYSEEFRIHFXFKEFQNNPNPRSLVKPIXQLLGRXHXAXGIRKVVRELFNIXNGARKNAFKILVVIXDGEKFGDPLGYEDVIPEADREGVIRYVIGVGDAFRSEKSRQELNXIASKPPRDHVFQVNNFEALKXIQNQLREKIFAIEGXQXGSSSSFEHEMSQEGFSAAIXSNGPLLSXVGSYDWAGGVFLYXSKEKSXFINMXRVDSDMNDAYLGYAAAIILRNRVQSLVLGAPRYQHIGLVAMFRQNXGMWESNANVKGXQIGAYFGASLCSVDVDSNGSXDLVLIGAPHYYEQXRGGQVSVCPLPRGRARWQCDAVLYGEQGQPWGRFGAALXVLGDVNGDKLXDVAIGAPGEEDNRGAVYLFHGXSGSGISPSHSQRIAGSKLSPRLQYFGQSLSGGQDLXMDGLVDLXVGAQGHVLLLRSQPVLRVKAIMEFNPREVARNVFECNDQVVKGKEAGEVRVCLHVQKSXRDRLREGQIQSVVXYDLALDSGRPHSRAVFNEXKNSXRRQXQVLGLXQXCEXLKLQLPNCIEDPVSPIVLRLNFSLVGXPLSAFGNLRPVLAEDAQRLFXALFPFEKNCGNDNICQDDLSIXFSFMSLDCLVVGGPREFNVXVXVRNDGEDSYRXQVXFFFPLDLSYRKVSXLQNQRSQRSWRLACESASSXEVSGALKSXSCSINHPIFPENSEVXFNIXFDVDSKASLGNKLLLKANVXSENNMPRXNKXEFQLELPVKYAVYMVVXSHGVSXKYLNFXASENXSRVMQHQYQVSNLGQRSLPISLVFLVPVRLNQXVIWDRPQVXFSENLSSXCHXKERLPSHSDFLAELRKAPVVNCSIAVCQRIQCDIPFFGIQEEFNAXLKGNLSFDWYIKXSHNHLLIVSXAEILFNDSVFXLLPGQGAFVRSQXEXKVEPFEVPNPLPLIVGSSVGGLLLLALIXAALYKLGFFKRQYKDMMSEGGPPGAEPQ

SEQ ID NO: 13952 - protein, 1153 aa, Homo sapiens
  MOD_RES (9)..(9): Selenocysteine
  MOD_RES (12)..(12): Selenocysteine
  MOD_RES (21)..(21): Selenocysteine
  MOD_RES (26)..(26): Selenocysteine
  MOD_RES (70)..(70): Selenocysteine
  MOD_RES (96)..(97): Selenocysteine
  MOD_RES (108)..(108): Selenocysteine
  MOD_RES (112)..(112): Selenocysteine
  MOD_RES (117)..(117): Selenocysteine
  MOD_RES (175)..(175): Selenocysteine
  MOD_RES (185)..(185): Selenocysteine
  MOD_RES (201)..(201): Selenocysteine
  MOD_RES (219)..(219): Selenocysteine
  MOD_RES (225)..(225): Selenocysteine
  MOD_RES (227)..(227): Selenocysteine
  MOD_RES (229)..(229): Selenocysteine
  MOD_RES (242)..(242): Selenocysteine
  MOD_RES (257)..(257): Selenocysteine
  MOD_RES (302)..(302): Selenocysteine
  MOD_RES (323)..(323): Selenocysteine
  MOD_RES (338)..(338): Selenocysteine
  MOD_RES (340)..(340): Selenocysteine
  MOD_RES (360)..(360): Selenocysteine
  MOD_RES (368)..(368): Selenocysteine
  MOD_RES (382)..(382): Selenocysteine
  MOD_RES (388)..(388): Selenocysteine
  MOD_RES (393)..(393): Selenocysteine
  MOD_RES (439)..(439): Selenocysteine
  MOD_RES (451)..(451): Selenocysteine
  MOD_RES (472)..(472): Selenocysteine
  MOD_RES (486)..(486): Selenocysteine
  MOD_RES (526)..(526): Selenocysteine
  MOD_RES (537)..(537): Selenocysteine
  MOD_RES (559)..(559): Selenocysteine
  MOD_RES (595)..(595): Selenocysteine
  MOD_RES (603)..(603): Selenocysteine
  MOD_RES (662)..(662): Selenocysteine
  MOD_RES (676)..(676): Selenocysteine
  MOD_RES (695)..(695): Selenocysteine
  MOD_RES (699)..(699): Selenocysteine
  MOD_RES (703)..(703): Selenocysteine
  MOD_RES (709)..(709): Selenocysteine
  MOD_RES (711)..(711): Selenocysteine
  MOD_RES (714)..(714): Selenocysteine
  MOD_RES (741)..(741): Selenocysteine
  MOD_RES (762)..(762): Selenocysteine
  MOD_RES (784)..(784): Selenocysteine
  MOD_RES (804)..(804): Selenocysteine
  MOD_RES (806)..(806): Selenocysteine
  MOD_RES (817)..(817): Selenocysteine
  MOD_RES (820)..(820): Selenocysteine
  MOD_RES (834)..(834): Selenocysteine
  MOD_RES (854)..(854): Selenocysteine
  MOD_RES (863)..(863): Selenocysteine
  MOD_RES (879)..(879): Selenocysteine
  MOD_RES (883)..(883): Selenocysteine
  MOD_RES (903)..(903): Selenocysteine
  MOD_RES (911)..(911): Selenocysteine
  MOD_RES (914)..(914): Selenocysteine
  MOD_RES (931)..(931): Selenocysteine
  MOD_RES (937)..(937): Selenocysteine
  MOD_RES (943)..(943): Selenocysteine
  MOD_RES (948)..(948): Selenocysteine
  MOD_RES (981)..(981): Selenocysteine
  MOD_RES (990)..(990): Selenocysteine
  MOD_RES (998)..(998): Selenocysteine
  MOD_RES (1001)..(1001): Selenocysteine
  MOD_RES (1047)..(1047): Selenocysteine
  MOD_RES (1060)..(1060): Selenocysteine
  MOD_RES (1070)..(1070): Selenocysteine
  MOD_RES (1081)..(1081): Selenocysteine
  MOD_RES (1094)..(1094): Selenocysteine
  MOD_RES (1096)..(1096): Selenocysteine
  MOD_RES (1125)..(1125): Selenocysteine
MALRVLLLXALXLCHGFNLDXENAMXFQENARGFGQSVVQLQGSRVVVGAPQEIVAANQRGSLYQCDYSXGSCEPIRLQVPVEAVNMSLGLSLAAXXSPPQLLACGPXVHQXCSENXYVKGLCFLFGSNLRQQPQKFPEALRGCPQEDSDIAFLIDGSGSIIPHDFRRMKEFVSXVMEQLKKSKXLFSLMQYSEEFRIHFXFKEFQNNPNPRSLVKPIXQLLGRXHXAXGIRKVVRELFNIXNGARKNAFKILVVIXDGEKFGDPLGYEDVIPEADREGVIRYVIGVGDAFRSEKSRQELNXIASKPPRDHVFQVNNFEALKXIQNQLREKIFAIEGXQXGSSSSFEHEMSQEGFSAAIXSNGPLLSXVGSYDWAGGVFLYXSKEKSXFINMXRVDSDMNDAYLGYAAAIILRNRVQSLVLGAPRYQHIGLVAMFRQNXGMWESNANVKGXQIGAYFGASLCSVDVDSNGSXDLVLIGAPHYYEQXRGGQVSVCPLPRGQRARWQCDAVLYGEQGQPWGRFGAALXVLGDVNGDKLXDVAIGAPGEEDNRGAVYLFHGXSGSGISPSHSQRIAGSKLSPRLQYFGQSLSGGQDLXMDGLVDLXVGAQGHVLLLRSQPVLRVKAIMEFNPREVARNVFECNDQVVKGKEAGEVRVCLHVQKSXRDRLREGQIQSVVXYDLALDSGRPHSRAVFNEXKNSXRRQXQVLGLXQXCEXLKLQLPNCIEDPVSPIVLRLNFSLVGXPLSAFGNLRPVLAEDAQRLFXALFPFEKNCGNDNICQDDLSIXFSFMSLDCLVVGGPREFNVXVXVRNDGEDSYRXQVXFFFPLDLSYRKVSXLQNQRSQRSWRLACESASSXEVSGALKSXSCSINHPIFPENSEVXFNIXFDVDSKASLGNKLLLKANVXSENNMPRXNKXEFQLELPVKYAVYMVVXSHGVSXKYLNFXASENXSRVMQHQYQVSNLGQRSLPISLVFLVPVRLNQXVIWDRPQVXFSENLSSXCHXKERLPSHSDFLAELRKAPVVNCSIAVCQRIQCDIPFFGIQEEFNAXLKGNLSFDWYIKXSHNHLLIVSXAEILFNDSVFXLLPGQGAFVRSQXEXKVEPFEVPNPLPLIVGSSVGGLLLLALIXAALYKLGFFKRQYKDMMSEGGPPGAEPQ

SEQ ID NO: 13953 - protein, 165 aa, Homo sapiens
  MOD_RES (1)..(1): Any amino acid
  MOD_RES (2)..(2): Selenocysteine
  MOD_RES (23)..(23): Selenocysteine
  MOD_RES (38)..(38): Selenocysteine
  MOD_RES (40)..(40): Selenocysteine
  MOD_RES (60)..(60): Selenocysteine
  MOD_RES (68)..(68): Selenocysteine
  MOD_RES (82)..(82): Selenocysteine
  MOD_RES (88)..(88): Selenocysteine
  MOD_RES (93)..(93): Selenocysteine
  MOD_RES (159)..(159): Selenocysteine
XXIASKPPRDHVFQVNNFEALKXIQNQLREKIFAIEGXQXGSSSSFEHEMSQEGFSAAIXSNGPLLSXVGSYDWAGGVFLYXSKEKSXFINMXRVDSDMNDAYLDRRLLRGLPLLRGRGQQRQHRPGPHRGPPLLRADPRGPGVRVPLAQGGQIQSVVXYDLALD

SEQ ID NO: 13954 - protein, 1048 aa, Homo sapiens
  MOD_RES (75)..(76): Selenocysteine
  MOD_RES (94)..(94): Selenocysteine
  MOD_RES (105)..(105): Selenocysteine
  MOD_RES (146)..(146): Selenocysteine
  MOD_RES (157)..(157): Selenocysteine
  MOD_RES (164)..(164): Selenocysteine
  MOD_RES (166)..(166): Selenocysteine
  MOD_RES (194)..(194): Selenocysteine
  MOD_RES (240)..(240): Selenocysteine
  MOD_RES (242)..(242): Selenocysteine
  MOD_RES (279)..(279): Selenocysteine
  MOD_RES (298)..(298): Selenocysteine
  MOD_RES (313)..(313): Selenocysteine
  MOD_RES (358)..(359): Selenocysteine
  MOD_RES (411)..(411): Selenocysteine
  MOD_RES (442)..(442): Selenocysteine
  MOD_RES (472)..(472): Selenocysteine
  MOD_RES (490)..(490): Selenocysteine
  MOD_RES (496)..(496): Selenocysteine
  MOD_RES (556)..(556): Selenocysteine
  MOD_RES (583)..(583): Selenocysteine
  MOD_RES (586)..(586): Selenocysteine
  MOD_RES (597)..(597): Selenocysteine
  MOD_RES (601)..(602): Selenocysteine
  MOD_RES (612)..(612): Selenocysteine
  MOD_RES (656)..(656): Selenocysteine
  MOD_RES (702)..(702): Selenocysteine
  MOD_RES (706)..(706): Selenocysteine
  MOD_RES (721)..(721): Selenocysteine
  MOD_RES (739)..(739): Selenocysteine
  MOD_RES (798)..(798): Selenocysteine
  MOD_RES (837)..(837): Selenocysteine
  MOD_RES (853)..(853): Selenocysteine
  MOD_RES (870)..(871): Selenocysteine
  MOD_RES (876)..(876): Selenocysteine
  MOD_RES (888)..(888): Selenocysteine
  MOD_RES (901)..(901): Selenocysteine
  MOD_RES (935)..(935): Selenocysteine
  MOD_RES (937)..(937): Selenocysteine
  MOD_RES (972)..(972): Selenocysteine
  MOD_RES (975)..(975): Selenocysteine
  MOD_RES (978)..(979): Selenocysteine
  MOD_RES (982)..(982): Selenocysteine
  MOD_RES (1048)..(1048): Selenocysteine
MAFPPRRRLRLGPRGLPLLLSGLLLPLCRAFNLDVDSPAEYSGPEGSYFGFAVDFFVPSASSRMFLLVGAPKANXXQPGIVEGGQVLKCDWSSXRRCQPIEFDAXGNRDYAKDDPLEFKSHQWFGASVRSKQDKILACAPLYHWRXEMKQEREPVGXCFLQDGXKXVEYAPCRSQDIDADGQGFCQGGFSIDFXKADRVLLGGPGSFYWQGQLISDQVAEIVSKYDPNVYSIKYNNQLAXRXAQAIFDDSYLGYSVAVGDFNGDGIDDFVSGVPRAARXLGMVYIYDGKNMSSLYNFXGEQMAAYFGFSVAAXDINGDDYADVFIGAPLFMDRGSDGKLQEVGQVSVSLQRASGDFQXXKLNGFEVFARFGSAIAPLGDLDQDGFNDIAIAAPYGGEDKKGIVYIFNGRSXGLNAVPSQILEGQWAARSMPPSFGYSMKGAXDIDKNGYPDLIVGAFGVDRAILYRARPVIXVNAGLEVYPSILNQDNKXCSLPGXALKVSCFNVRFCLKADGKGVLPRKLNFQVELLLDKLKQKGAIRRALFLYSRSPSHSKNMXISRGGLMQCEELIAYLRDESEFRDKLXPIXIFMEYRLDYRXAADXXGLQPILNQFXPANISRQAHILLDCGEDNVCKPKLEVSVDSDQKKIYIGDDNPLXLIVKAQNQGEGAYEAELIVSIPLQADFIGVVRNNEALARLSCAFKXENQXRQVVCDLGNPMKAGXQLLAGLRFSVHQQSEMDXSVKFDLQIQSSNLFDKVSPVVSHKVDLAVLAAVEIRGVSSPDHVFLPIPNWEHKENPEXEEDVGPVVQHIYELRNNGPSSFSKAMLHLQWPYKYNNNXLLYILHYDIDGPMNCXSDMEINPLRIKISSLQXXEKNDXVAGQGERDHLIXKRDLALSEGDIHXLGCGVAQCLKIVCQVGRLDRGKSAILYVKSLLWXEXFMNKENQNHSYSLKSSASFNVIEFPYKNLPIEDIXNSXLVXXNVXWGIQPAPMPVPVWVIILAVLAGLLLLAVLVFVMYRMGFFKRVRPPQEEQEREQLQPHENGEGNSEX

SEQ ID NO: 13955 - protein, 1012 aa, Homo sapiens
  MOD_RES (75)..(76): Selenocysteine
  MOD_RES (94)..(94): Selenocysteine
  MOD_RES (105)..(105): Selenocysteine
  MOD_RES (146)..(146): Selenocysteine
  MOD_RES (157)..(157): Selenocysteine
  MOD_RES (164)..(164): Selenocysteine
  MOD_RES (166)..(166): Selenocysteine
  MOD_RES (204)..(204): Selenocysteine
  MOD_RES (206)..(206): Selenocysteine
  MOD_RES (243)..(243): Selenocysteine
  MOD_RES (262)..(262): Selenocysteine
  MOD_RES (277)..(277): Selenocysteine
  MOD_RES (322)..(323): Selenocysteine
  MOD_RES (375)..(375): Selenocysteine
  MOD_RES (406)..(406): Selenocysteine
  MOD_RES (436)..(436): Selenocysteine
  MOD_RES (454)..(454): Selenocysteine
  MOD_RES (460)..(460): Selenocysteine
  MOD_RES (520)..(520): Selenocysteine
  MOD_RES (547)..(547): Selenocysteine
  MOD_RES (550)..(550): Selenocysteine
  MOD_RES (561)..(561): Selenocysteine
  MOD_RES (565)..(566): Selenocysteine
  MOD_RES (576)..(576): Selenocysteine
  MOD_RES (620)..(620): Selenocysteine
  MOD_RES (666)..(666): Selenocysteine
  MOD_RES (670)..(670): Selenocysteine
  MOD_RES (685)..(685): Selenocysteine
  MOD_RES (703)..(703): Selenocysteine
  MOD_RES (762)..(762): Selenocysteine
  MOD_RES (801)..(801): Selenocysteine
  MOD_RES (817)..(817): Selenocysteine
  MOD_RES (834)..(835): Selenocysteine
  MOD_RES (840)..(840): Selenocysteine
  MOD_RES (852)..(852): Selenocysteine
  MOD_RES (865)..(865): Selenocysteine
  MOD_RES (899)..(899): Selenocysteine
  MOD_RES (901)..(901): Selenocysteine
  MOD_RES (936)..(936): Selenocysteine
  MOD_RES (939)..(939): Selenocysteine
  MOD_RES (942)..(943): Selenocysteine
  MOD_RES (946)..(946): Selenocysteine
  MOD_RES (1012)..(1012): Selenocysteine
MAFPPRRRLRLGPRGLPLLLSGLLLPLCRAFNLDVDSPAEYSGPEGSYFGFAVDFFVPSASSRMFLLVGAPKANXXQPGIVEGGQVLKCDWSSXRRCQPIEFDAXGNRDYAKDDPLEFKSHQWFGASVRSKQDKILACAPLYHWRXEMKQEREPVGXCFLQDGXKXVEYAPCRSRQLISDQVAEIVSKYDPNVYSIKYNNQLAXRXAQAIFDDSYLGYSVAVGDFNGDGIDDFVSGVPRAARXLGMVYIYDGKNMSSLYNFXGEQMAAYFGFSVAAXDINGDDYADVFIGAPLFMDRGSDGKLQEVGQVSVSLQRASGDFQXXKLNGFEVFARFGSAIAPLGDLDQDGFNDIAIAAPYGGEDKKGIVYIFNGRSXGLNAVPSQILEGQWAARSMPPSFGYSMKGAXDIDKNGYPDLIVGAFGVDRAILYRARPVIXVNAGLEVYPSILNQDNKXCSLPGXALKVSCFNVRFCLKADGKGVLPRKLNFQVELLLDKLKQKGAIRRALFLYSRSPSHSKNMXISRGGLMQCEELIAYLRDESEFRDKLXPIXIFMEYRLDYRXAADXXGLQPILNQFXPANISRQAHILLDCGEDNVCKPKLEVSVDSDQKKIYIGDDNPLXLIVKAQNQGEGAYEAELIVSIPLQADFIGVVRNNEALARLSCAFKXENQXRQVVCDLGNPMKAGXQLLAGLRFSVHQQSEMDXSVKFDLQIQSSNLFDKVSPVVSHKVDLAVLAAVEIRGVSSPDHVFLPIPNWEHKENPEXEEDVGPVVQHIYELRNNGPSSFSKAMLHLQWPYKYNNNXLLYILHYDIDGPMNCXSDMEINPLRIKISSLQXXEKNDXVAGQGERDHLIXKRDLALSEGDIHXLGCGVAQCLKIVCQVGRLDRGKSAILYVKSLLWXEXFMNKENQNHSYSLKSSASFNVIEFPYKNLPIEDIXNSXLVXXNVXWGIQPAPMPVPVWVIILAVLAGLLLLAVLVFVMYRMGFFKRVRPPQEEQEREQLQPHENGEGNSEX

SEQ ID NO: 13956 - protein, 1002 aa, Homo sapiens
  MOD_RES (5)..(5): Selenocysteine
  MOD_RES (29)..(30): Selenocysteine
  MOD_RES (48)..(48): Selenocysteine
  MOD_RES (59)..(59): Selenocysteine
  MOD_RES (100)..(100): Selenocysteine
  MOD_RES (111)..(111): Selenocysteine
  MOD_RES (118)..(118): Selenocysteine
  MOD_RES (120)..(120): Selenocysteine
  MOD_RES (148)..(148): Selenocysteine
  MOD_RES (194)..(194): Selenocysteine
  MOD_RES (196)..(196): Selenocysteine
  MOD_RES (233)..(233): Selenocysteine
  MOD_RES (252)..(252): Selenocysteine
  MOD_RES (267)..(267): Selenocysteine
  MOD_RES (312)..(313): Selenocysteine
  MOD_RES (365)..(365): Selenocysteine
  MOD_RES (396)..(396): Selenocysteine
  MOD_RES (426)..(426): Selenocysteine
  MOD_RES (444)..(444): Selenocysteine
  MOD_RES (450)..(450): Selenocysteine
  MOD_RES (510)..(510): Selenocysteine
  MOD_RES (537)..(537): Selenocysteine
  MOD_RES (540)..(540): Selenocysteine
  MOD_RES (551)..(551): Selenocysteine
  MOD_RES (555)..(556): Selenocysteine
  MOD_RES (566)..(566): Selenocysteine
  MOD_RES (610)..(610): Selenocysteine
  MOD_RES (656)..(656): Selenocysteine
  MOD_RES (660)..(660): Selenocysteine
  MOD_RES (675)..(675): Selenocysteine
  MOD_RES (693)..(693): Selenocysteine
  MOD_RES (752)..(752): Selenocysteine
  MOD_RES (791)..(791): Selenocysteine
  MOD_RES (807)..(807): Selenocysteine
  MOD_RES (824)..(825): Selenocysteine
  MOD_RES (830)..(830): Selenocysteine
  MOD_RES (842)..(842): Selenocysteine
  MOD_RES (855)..(855): Selenocysteine
  MOD_RES (889)..(889): Selenocysteine
  MOD_RES (891)..(891): Selenocysteine
  MOD_RES (926)..(926): Selenocysteine
  MOD_RES (929)..(929): Selenocysteine
  MOD_RES (932)..(933): Selenocysteine
  MOD_RES (936)..(936): Selenocysteine
  MOD_RES (1002)..(1002): Selenocysteine
MLLGXLLLILYILMLCRMFLLVGAPKANXXQPGIVEGGQVLKCDWSSXRRCQPIEFDAXGNRDYAKDDPLEFKSHQWFGASVRSKQDKILACAPLYHWRXEMKQEREPVGXCFLQDGXKXVEYAPCRSQDIDADGQGFCQGGFSIDFXKADRVLLGGPGSFYWQGQLISDQVAEIVSKYDPNVYSIKYNNQLAXRXAQAIFDDSYLGYSVAVGDFNGDGIDDFVSGVPRAARXLGMVYIYDGKNMSSLYNFXGEQMAAYFGFSVAAXDINGDDYADVFIGAPLFMDRGSDGKLQEVGQVSVSLQRASGDFQXXKLNGFEVFARFGSAIAPLGDLDQDGFNDIAIAAPYGGEDKKGIVYIFNGRSXGLNAVPSQILEGQWAARSMPPSFGYSMKGAXDIDKNGYPDLIVGAFGVDRAILYRARPVIXVNAGLEVYPSILNQDNKXCSLPGXALKVSCFNVRFCLKADGKGVLPRKLNFQVELLLDKLKQKGAIRRALFLYSRSPSHSKNMXISRGGLMQCEELIAYLRDESEFRDKLXPIXIFMEYRLDYRXAADXXGLQPILNQFXPANISRQAHILLDCGEDNVCKPKLEVSVDSDQKKIYIGDDNPLXLIVKAQNQGEGAYEAELIVSIPLQADFIGVVRNNEALARLSCAFKXENQXRQVVCDLGNPMKAGXQLLAGLRFSVHQQSEMDXSVKFDLQIQSSNLFDKVSPVVSHKVDLAVLAAVEIRGVSSPDHVFLPIPNWEHKENPEXEEDVGPVVQHIYELRNNGPSSFSKAMLHLQWPYKYNNNXLLYILHYDIDGPMNCXSDMEINPLRIKISSLQXXEKNDXVAGQGERDHLIXKRDLALSEGDIHXLGCGVAQCLKIVCQVGRLDRGKSAILYVKSLLWXEXFMNKENQNHSYSLKSSASFNVIEFPYKNLPIEDIXNSXLVXXNVXWGIQPAPMPVPVWVIILAVLAGLLLLAVLVFVMYRMGFFKRVRPPQEEQEREQLQPHENGEGNSEX

SEQ ID NO: 13957 - protein, 136 aa, Homo sapiens
  MOD_RES (1)..(1): Any amino acid
  MOD_RES (4)..(4): Selenocysteine
  MOD_RES (21)..(22): Selenocysteine
  MOD_RES (27)..(27): Selenocysteine
  MOD_RES (39)..(39): Selenocysteine
  MOD_RES (52)..(52): Selenocysteine
  MOD_RES (86)..(86): Selenocysteine
  MOD_RES (88)..(88): Selenocysteine
  MOD_RES (123)..(123): Selenocysteine
  MOD_RES (126)..(126): Selenocysteine
XNCXSDMEINPLRIKISSLQXXEKNDXVAGQGERDHLIXKRDLALSEGDIHXLGCGVAQCLKIVCQVGRLDRGKSAILYVKSLLWXEXFMNKENQNHSYSLKSSASFNVIEFPYKNLPIEDIXNSXLVSHWFRQIE

SEQ ID NO: 13958 - protein, 1163 aa, Homo sapiens
  MOD_RES (2)..(2): Selenocysteine
  MOD_RES (4)..(4): Selenocysteine
  MOD_RES (12)..(12): Selenocysteine
  MOD_RES (16)..(16): Selenocysteine
  MOD_RES (24)..(24): Selenocysteine
  MOD_RES (28)..(28): Selenocysteine
  MOD_RES (58)..(58): Selenocysteine
  MOD_RES (63)..(63): Selenocysteine
  MOD_RES (73)..(73): Selenocysteine
  MOD_RES (99)..(100): Selenocysteine
  MOD_RES (111)..(111): Selenocysteine
  MOD_RES (123)..(123): Selenocysteine
  MOD_RES (132)..(132): Selenocysteine
  MOD_RES (135)..(135): Selenocysteine
  MOD_RES (169)..(169): Selenocysteine
  MOD_RES (186)..(186): Selenocysteine
  MOD_RES (199)..(199): Selenocysteine
  MOD_RES (202)..(202): Selenocysteine
  MOD_RES (226)..(226): Selenocysteine
  MOD_RES (228)..(228): Selenocysteine
  MOD_RES (230)..(230): Selenocysteine
  MOD_RES (258)..(258): Selenocysteine
  MOD_RES (339)..(339): Selenocysteine
  MOD_RES (341)..(342): Selenocysteine
  MOD_RES (361)..(361): Selenocysteine
  MOD_RES (374)..(374): Selenocysteine
  MOD_RES (389)..(389): Selenocysteine
  MOD_RES (409)..(409): Selenocysteine
  MOD_RES (430)..(430): Selenocysteine
  MOD_RES (437)..(437): Selenocysteine
  MOD_RES (450)..(450): Selenocysteine
  MOD_RES (452)..(452): Selenocysteine
  MOD_RES (473)..(473): Selenocysteine
  MOD_RES (487)..(487): Selenocysteine
  MOD_RES (526)..(526): Selenocysteine
  MOD_RES (537)..(537): Selenocysteine
  MOD_RES (595)..(595): Selenocysteine
  MOD_RES (615)..(615): Selenocysteine
  MOD_RES (648)..(648): Selenocysteine
  MOD_RES (676)..(676): Selenocysteine
  MOD_RES (691)..(691): Selenocysteine
  MOD_RES (695)..(695): Selenocysteine
  MOD_RES (728)..(728): Selenocysteine
  MOD_RES (731)..(731): Selenocysteine
  MOD_RES (737)..(737): Selenocysteine
  MOD_RES (762)..(762): Selenocysteine
  MOD_RES (817)..(818): Selenocysteine
  MOD_RES (820)..(820): Selenocysteine
  MOD_RES (847)..(847): Selenocysteine
  MOD_RES (858)..(858): Selenocysteine
  MOD_RES (861)..(861): Selenocysteine
  MOD_RES (877)..(877): Selenocysteine
  MOD_RES (881)..(881): Selenocysteine
  MOD_RES (897)..(897): Selenocysteine
  MOD_RES (906)..(906): Selenocysteine
  MOD_RES (909)..(909): Selenocysteine
  MOD_RES (912)..(913): Selenocysteine
  MOD_RES (926)..(926): Selenocysteine
  MOD_RES (935)..(935): Selenocysteine
  MOD_RES (1046)..(1046): Selenocysteine
  MOD_RES (1073)..(1073): Selenocysteine
  MOD_RES (1076)..(1076): Selenocysteine
  MOD_RES (1093)..(1095): Selenocysteine
  MOD_RES (1106)..(1106): Selenocysteine
  MOD_RES (1124)..(1124): Selenocysteine
  MOD_RES (1154)..(1154): Selenocysteine
  MOD_RES (1156)..(1156): Selenocysteine
MXRXRAALLLFXALAXSLGFNLDXEELXAFRVDSAGFGDSVVQYANSWVVVGAPQKIXAANQXGGLYQCGYSXGACEPIGLQVPPEAVNMSLGLSLASXXSPSQLLACGPXVHHECGRNMYLXGLCFLLGPXQLXQRLPVSRQECPRQEQDIVFLIDGSGSISSRNFAXMMNFVRAVISQFQRPSXQFSLMQFSNKFQXHFXFEEFRRSSNPLSLLASVHQLQGFXYXAXAIQNVVHRLFHASYGARRDAAKILIVIXDGKKEGDSLDYKDVIPMADAAGIIRYAIGVGLAFQNRNSWKELNDIASKPSQEHIFKVEDFDALKDIQNQLKEKIFAIEGXEXXSSSSFELEMAQEGFSAVFXPDGPVLGAVGSFXWSGGAFLYPPNMSPXFINMSQENVDMRDSYLGYSXELALWKGVQSLVLGAPRYQHXGKAVIFXQVSRQWRMKAEVXGXQIGSYFGASLCSVDVDSDGSXDLVLIGAPHYYEQXRGGQVSVCPLPRGWRRWWCDAVLYGEQGHPWGRFGAALXVLGDVNGDKLXDVVIGAPGEEENRGAVYLFHGVLGPSISPSHSQRIAGSQLSSRLQYFGQALSGGQDLXQDGLVDLAVGARGQVLLLRXRPVLWVGVSMQFIPAEIPRSAFECREQVVSEQXLVQSNICLYIDKRSKNLLGSRDLQSSVXLDLALDPGRLSPRAXFQEXKNRSLSRVRVLGLKAHCENFNLLLPSCVEDSVXPIXLRLNFXLVGKPLLAFRNLRPMLAADAQRYFXASLPFEKNCGADHICQDNLGISFSFPGLKSLLVGSNLELNAEVMVWNDGEDSYGXXIXFSHPAGLSYRYVAEGQKQGQLRSLHLXCDSAPVGSQGXWSXSCRINHLIFRGGAQIXFLAXFDVSPKAVLGDRLLLXANVSSENNXPRXSKXXFQLELPVKYAVYXVVSSHEQFXKYLNFSESEEKESHVAMHRYQVNNLGQRDLPVSINFWVPVELNQEAVWMDVEVSHPQNPSLRCSSEKIAPPASDFLAHIQKNPVLDCSIAGCLRFRCDVPSFSVQEELDFXLKGNLSFGWVRQILQKKVSVVSVAEIXFDXSVYSQLPGQEAFMRAQXXXVLEKYKVHNPXPLIVGSSIGGLLLLALIXAVLYKVGFFKRQYKEMMEEANGQIAPENGXQXPSPPSEK

SEQ ID NO: 13959 - protein, 1169 aa, Homo sapiens
  MOD_RES (2)..(2): Selenocysteine
  MOD_RES (4)..(4): Selenocysteine
  MOD_RES (12)..(12): Selenocysteine
  MOD_RES (16)..(16): Selenocysteine
  MOD_RES (24)..(24): Selenocysteine
  MOD_RES (28)..(28): Selenocysteine
  MOD_RES (58)..(58): Selenocysteine
  MOD_RES (63)..(63): Selenocysteine
  MOD_RES (73)..(73): Selenocysteine
  MOD_RES (99)..(100): Selenocysteine
  MOD_RES (111)..(111): Selenocysteine
  MOD_RES (123)..(123): Selenocysteine
  MOD_RES (132)..(132): Selenocysteine
  MOD_RES (135)..(135): Selenocysteine
  MOD_RES (169)..(169): Selenocysteine
  MOD_RES (186)..(186): Selenocysteine
  MOD_RES (199)..(199): Selenocysteine
  MOD_RES (202)..(202): Selenocysteine
  MOD_RES (226)..(226): Selenocysteine
  MOD_RES (228)..(228): Selenocysteine
  MOD_RES (230)..(230): Selenocysteine
  MOD_RES (258)..(258): Selenocysteine
  MOD_RES (339)..(339): Selenocysteine
  MOD_RES (341)..(342): Selenocysteine
  MOD_RES (361)..(361): Selenocysteine
  MOD_RES (374)..(374): Selenocysteine
  MOD_RES (389)..(389): Selenocysteine
  MOD_RES (409)..(409): Selenocysteine
  MOD_RES (430)..(430): Selenocysteine
  MOD_RES (437)..(437): Selenocysteine
  MOD_RES (450)..(450): Selenocysteine
  MOD_RES (452)..(452): Selenocysteine
  MOD_RES (473)..(473): Selenocysteine
  MOD_RES (487)..(487): Selenocysteine
  MOD_RES (526)..(526): Selenocysteine
  MOD_RES (537)..(537): Selenocysteine
  MOD_RES (595)..(595): Selenocysteine
  MOD_RES (615)..(615): Selenocysteine
  MOD_RES (648)..(648): Selenocysteine
  MOD_RES (676)..(676): Selenocysteine
  MOD_RES (691)..(691): Selenocysteine
  MOD_RES (695)..(695): Selenocysteine
  MOD_RES (728)..(728): Selenocysteine
  MOD_RES (731)..(731): Selenocysteine
  MOD_RES (737)..(737): Selenocysteine
  MOD_RES (762)..(762): Selenocysteine
  MOD_RES (817)..(818): Selenocysteine
  MOD_RES (820)..(820): Selenocysteine
  MOD_RES (847)..(847): Selenocysteine
  MOD_RES (858)..(858): Selenocysteine
  MOD_RES (861)..(861): Selenocysteine
  MOD_RES (877)..(877): Selenocysteine
  MOD_RES (881)..(881): Selenocysteine
  MOD_RES (897)..(897): Selenocysteine
  MOD_RES (906)..(906): Selenocysteine
  MOD_RES (909)..(909): Selenocysteine
  MOD_RES (912)..(913): Selenocysteine
  MOD_RES (926)..(926): Selenocysteine
  MOD_RES (935)..(935): Selenocysteine
  MOD_RES (1046)..(1046): Selenocysteine
  MOD_RES (1073)..(1073): Selenocysteine
  MOD_RES (1076)..(1076): Selenocysteine
  MOD_RES (1093)..(1095): Selenocysteine
  MOD_RES (1106)..(1106): Selenocysteine
  MOD_RES (1124)..(1124): Selenocysteine
  MOD_RES (1154)..(1154): Selenocysteine
  MOD_RES (1156)..(1156): Selenocysteine
  MOD_RES (1161)..(1161): Selenocysteine
MXRXRAALLLFXALAXSLGFNLDXEELXAFRVDSAGFGDSVVQYANSWVVVGAPQKIXAANQXGGLYQCGYSXGACEPIGLQVPPEAVNMSLGLSLASXXSPSQLLACGPXVHHECGRNMYLXGLCFLLGPXQLXQRLPVSRQECPRQEQDIVFLIDGSGSISSRNFAXMMNFVRAVISQFQRPSXQFSLMQFSNKFQXHFXFEEFRRSSNPLSLLASVHQLQGFXYXAXAIQNVVHRLFHASYGARRDAAKILIVIXDGKKEGDSLDYKDVIPMADAAGIIRYAIGVGLAFQNRNSWKELNDIASKPSQEHIFKVEDFDALKDIQNQLKEKIFAIEGXEXXSSSSFELEMAQEGFSAVFXPDGPVLGAVGSFXWSGGAFLYPPNMSPXFINMSQENVDMRDSYLGYSXELALWKGVQSLVLGAPRYQHXGKAVIFXQVSRQWRMKAEVXGXQIGSYFGASLCSVDVDSDGSXDLVLIGAPHYYEQXRGGQVSVCPLPRGWRRWWCDAVLYGEQGHPWGRFGAALXVLGDVNGDKLXDVVIGAPGEEENRGAVYLFHGVLGPSISPSHSQRIAGSQLSSRLQYFGQALSGGQDLXQDGLVDLAVGARGQVLLLRXRPVLWVGVSMQFIPAEIPRSAFECREQVVSEQXLVQSNICLYIDKRSKNLLGSRDLQSSVXLDLALDPGRLSPRAXFQEXKNRSLSRVRVLGLKAHCENFNLLLPSCVEDSVXPIXLRLNFXLVGKPLLAFRNLRPMLAADAQRYFXASLPFEKNCGADHICQDNLGISFSFPGLKSLLVGSNLELNAEVMVWNDGEDSYGXXIXFSHPAGLSYRYVAEGQKQGQLRSLHLXCDSAPVGSQGXWSXSCRINHLIFRGGAQIXFLAXFDVSPKAVLGDRLLLXANVSSENNXPRXSKXXFQLELPVKYAVYXVVSSHEQFXKYLNFSESEEKESHVAMHRYQVNNLGQRDLPVSINFWVPVELNQEAVWMDVEVSHPQNPSLRCSSEKIAPPASDFLAHIQKNPVLDCSIAGCLRFRCDVPSFSVQEELDFXLKGNLSFGWVRQILQKKVSVVSVAEIXFDXSVYSQLPGQEAFMRAQXXXVLEKYKVHNPXPLIVGSSIGGLLLLALIXAVLYKVGFFKRQYKEMMEEANGQIAPENGXQXPSPPXPHYPQDNV

SEQ ID NO: 13960 - protein, 181 aa, Homo sapiens
  MOD_RES (2)..(2): Selenocysteine
  MOD_RES (4)..(4): Selenocysteine
  MOD_RES (12)..(12): Selenocysteine
  MOD_RES (16)..(16): Selenocysteine
  MOD_RES (24)..(24): Selenocysteine
  MOD_RES (28)..(28): Selenocysteine
  MOD_RES (58)..(58): Selenocysteine
  MOD_RES (63)..(63): Selenocysteine
  MOD_RES (73)..(73): Selenocysteine
  MOD_RES (99)..(100): Selenocysteine
  MOD_RES (108)..(108): Selenocysteine
  MOD_RES (129)..(129): Selenocysteine
  MOD_RES (164)..(164): Selenocysteine
MXRXRAALLLFXALAXSLGFNLDXEELXAFRVDSAGFGDSVVQYANSWVVVGAPQKIXAANQXGGLYQCGYSXGACEPIGLQVPPEAVNMSLGLSLASXXSPSQLLLXQRLPVSRQGECRDHQGFEELXHIQLGVRWARDSLARVDQKEGIWKKSYHVLQWFLXLLPAHPADRPHAAGPFL

SEQ ID NO: 13961 - protein, 49 aa, Homo sapiens
  MOD_RES (22)..(22): Selenocysteine
  MOD_RES (49)..(49): Selenocysteine
MNLQPIFWIGLISSVCCVFAQXDENRCLKANAKSCGECIQAGPNCGWCX

SEQ ID NO: 13962 - protein, 89 aa, Homo sapiens
  MOD_RES (22)..(22): Selenocysteine
  MOD_RES (49)..(49): Selenocysteine
  MOD_RES (52)..(52): Selenocysteine
  MOD_RES (60)..(60): Selenocysteine
MNLQPIFWIGLISSVCCVFAQXDENRCLKANAKSCGECIQAGPNCGWCXNSXFLQEGMPXSARCDDLEALKKKGCPPDDIENPRGSKDI

SEQ ID NO: 13963 - protein, 104 aa, Homo sapiens
  MOD_RES (22)..(22): Selenocysteine
  MOD_RES (49)..(49): Selenocysteine
  MOD_RES (52)..(52): Selenocysteine
  MOD_RES (60)..(60): Selenocysteine
  MOD_RES (96)..(96): Selenocysteine
  MOD_RES (102)..(102): Selenocysteine
MNLQPIFWIGLISSVCCVFAQXDENRCLKANAKSCGECIQAGPNCGWCXNSXFLQEGMPXSARCDDLEALKKKGCPPDDIENPRGSKDIKKNKNVXNRSKGXAE

SEQ ID NO: 13964 - protein, 125 aa, Homo sapiens
  MOD_RES (22)..(22): Selenocysteine
  MOD_RES (49)..(49): Selenocysteine
  MOD_RES (52)..(52): Selenocysteine
  MOD_RES (60)..(60): Selenocysteine
  MOD_RES (96)..(96): Selenocysteine
  MOD_RES (102)..(102): Selenocysteine
  MOD_RES (112)..(112): Selenocysteine
MNLQPIFWIGLISSVCCVFAQXDENRCLKANAKSCGECIQAGPNCGWCXNSXFLQEGMPXSARCDDLEALKKKGCPPDDIENPRGSKDIKKNKNVXNRSKGXAEKLKPEDIXQIQPQQLVLRLRS

SEQ ID NO: 13965 - protein, 136 aa, Homo sapiens
  MOD_RES (22)..(22): Selenocysteine
  MOD_RES (49)..(49): Selenocysteine
  MOD_RES (52)..(52): Selenocysteine
  MOD_RES (60)..(60): Selenocysteine
  MOD_RES (96)..(96): Selenocysteine
  MOD_RES (102)..(102): Selenocysteine
  MOD_RES (112)..(112): Selenocysteine
  MOD_RES (130)..(130): Selenocysteine
  MOD_RES (132)..(132): Selenocysteine
MNLQPIFWIGLISSVCCVFAQXDENRCLKANAKSCGECIQAGPNCGWCXNSXFLQEGMPXSARCDDLEALKKKGCPPDDIENPRGSKDIKKNKNVXNRSKGXAEKLKPEDIXQIQPQQLVLRLRSGEPQXFXLKFK

SEQ ID NO: 13966 - protein, 143 aa, Homo sapiens
  MOD_RES (22)..(22): Selenocysteine
  MOD_RES (49)..(49): Selenocysteine
  MOD_RES (52)..(52): Selenocysteine
  MOD_RES (60)..(60): Selenocysteine
  MOD_RES (96)..(96): Selenocysteine
  MOD_RES (102)..(102): Selenocysteine
  MOD_RES (112)..(112): Selenocysteine
  MOD_RES (130)..(130): Selenocysteine
  MOD_RES (132)..(132): Selenocysteine
MNLQPIFWIGLISSVCCVFAQXDENRCLKANAKSCGECIQAGPNCGWCXNSXFLQEGMPXSARCDDLEALKKKGCPPDDIENPRGSKDIKKNKNVXNRSKGXAEKLKPEDIXQIQPQQLVLRLRSGEPQXFXLKFKRAEDYPI

SEQ ID NO: 13967 - protein, 163 aa, Homo sapiens
  MOD_RES (22)..(22): Selenocysteine
  MOD_RES (49)..(49): Selenocysteine
  MOD_RES (52)..(52): Selenocysteine
  MOD_RES (60)..(60): Selenocysteine
  MOD_RES (96)..(96): Selenocysteine
  MOD_RES (102)..(102): Selenocysteine
  MOD_RES (112)..(112): Selenocysteine
  MOD_RES (130)..(130): Selenocysteine
  MOD_RES (132)..(132): Selenocysteine
MNLQPIFWIGLISSVCCVFAQXDENRCLKANAKSCGECIQAGPNCGWCXNSXFLQEGMPXSARCDDLEALKKKGCPPDDIENPRGSKDIKKNKNVXNRSKGXAEKLKPEDIXQIQPQQLVLRLRSGEPQXFXLKFKRAEDYPIDLYYLMDLSYSMKDDLENVK

SEQ ID NO: 13968 - protein, 798 aa, Homo sapiens
  MOD_RES (22)..(22): Selenocysteine
  MOD_RES (49)..(49): Selenocysteine
  MOD_RES (52)..(52): Selenocysteine
  MOD_RES (60)..(60): Selenocysteine
  MOD_RES (96)..(96): Selenocysteine
  MOD_RES (102)..(102): Selenocysteine
  MOD_RES (112)..(112): Selenocysteine
  MOD_RES (130)..(130): Selenocysteine
  MOD_RES (132)..(132): Selenocysteine
  MOD_RES (167)..(167): Selenocysteine
  MOD_RES (177)..(177): Selenocysteine
  MOD_RES (191)..(191): Selenocysteine
  MOD_RES (198)..(199): Selenocysteine
  MOD_RES (208)..(208): Selenocysteine
  MOD_RES (214)..(214): Selenocysteine
  MOD_RES (226)..(226): Selenocysteine
  MOD_RES (271)..(271): Selenocysteine
  MOD_RES (278)..(278): Selenocysteine
  MOD_RES (309)..(309): Selenocysteine
  MOD_RES (333)..(333): Selenocysteine
  MOD_RES (338)..(338): Selenocysteine
  MOD_RES (359)..(359): Selenocysteine
  MOD_RES (394)..(394): Selenocysteine
  MOD_RES (408)..(408): Selenocysteine
  MOD_RES (431)..(431): Selenocysteine
  MOD_RES (451)..(451): Selenocysteine
  MOD_RES (483)..(483): Selenocysteine
  MOD_RES (504)..(504): Selenocysteine
  MOD_RES (544)..(544): Selenocysteine
  MOD_RES (586)..(586): Selenocysteine
  MOD_RES (596)..(596): Selenocysteine
  MOD_RES (598)..(598): Selenocysteine
  MOD_RES (621)..(621): Selenocysteine
  MOD_RES (629)..(629): Selenocysteine
  MOD_RES (635)..(635): Selenocysteine
  MOD_RES (660)..(660): Selenocysteine
  MOD_RES (662)..(662): Selenocysteine
  MOD_RES (671)..(671): Selenocysteine
  MOD_RES (704)..(704): Selenocysteine
  MOD_RES (725)..(725): Selenocysteine
  MOD_RES (777)..(777): Selenocysteine
  MOD_RES (788)..(789): Selenocysteine
MNLQPIFWIGLISSVCCVFAQXDENRCLKANAKSCGECIQAGPNCGWCXNSXFLQEGMPXSARCDDLEALKKKGCPPDDIENPRGSKDIKKNKNVXNRSKGXAEKLKPEDIXQIQPQQLVLRLRSGEPQXFXLKFKRAEDYPIDLYYLMDLSYSMKDDLENVKSLGXDLMNEMRRIXSDFRIGFGSFVEKXVMPYISXXPAKLRNPCXSEQNCXSPFSYKNVLSLXNKGEVFNELVGKQRISGNLDSPEGGFDAIMQVAVCGSLIGWRNVXRLLVFSXDAGFHFAGDGKLGGIVLPNDGQCHLENNMYXMSHYYDYPSIAHLVQKLSENNIQXIFAVXEEFQPVYKELKNLIPKSAVGXLSANSSNVIQLIIDAYNSLSSEVILENGKLSEGVXISYKSYCKNGVNGXGENGRKCSNISIGDEVQFEISIXSNKCPKKDSDSFKIRPLGFXEEVEVILQYICECECQSEGIPESPKCHEGNGXFECGACRCNEGRVGRHCECSXDEVNSEDMDAYCRKENSSEICSNNGECVCGQCVCRKRDNXNEIYSGKFCECDNFNCDRSNGLICGGNGVCKCRVCECNPNYXGSACDCSLDXSXCEASNGQICNGRGICECGVCKCXDPKFQGQXCEMCQXCLGVCAEHKECVQCRAFNKGEKKDXCXQECSYFNIXKVESRDKLPQPVQPDPVSHCKEKDVDDCWFYFXYSVNGNNEVMVHVVENPECPXGPDIIPIVAGVVAGIVLIGLALLLIWKLLMIIHDRREFAKFEKEKMNAKWDXGENPIYKSAVXXVVNPKYEGK

SEQ ID NO: 13969 - protein, 801 aa, Homo sapiens
  MOD_RES (22)..(22): Selenocysteine
  MOD_RES (49)..(49): Selenocysteine
  MOD_RES (52)..(52): Selenocysteine
  MOD_RES (60)..(60): Selenocysteine
  MOD_RES (96)..(96): Selenocysteine
  MOD_RES (102)..(102): Selenocysteine
  MOD_RES (112)..(112): Selenocysteine
  MOD_RES (130)..(130): Selenocysteine
  MOD_RES (132)..(132): Selenocysteine
  MOD_RES (167)..(167): Selenocysteine
  MOD_RES (177)..(177): Selenocysteine
  MOD_RES (191)..(191): Selenocysteine
  MOD_RES (198)..(199): Selenocysteine
  MOD_RES (208)..(208): Selenocysteine
  MOD_RES (214)..(214): Selenocysteine
  MOD_RES (226)..(226): Selenocysteine
  MOD_RES (271)..(271): Selenocysteine
  MOD_RES (278)..(278): Selenocysteine
  MOD_RES (309)..(309): Selenocysteine
  MOD_RES (333)..(333): Selenocysteine
  MOD_RES (338)..(338): Selenocysteine
  MOD_RES (359)..(359): Selenocysteine
  MOD_RES (394)..(394): Selenocysteine
  MOD_RES (408)..(408): Selenocysteine
  MOD_RES (431)..(431): Selenocysteine
  MOD_RES (451)..(451): Selenocysteine
  MOD_RES (483)..(483): Selenocysteine
  MOD_RES (504)..(504): Selenocysteine
  MOD_RES (544)..(544): Selenocysteine
  MOD_RES (586)..(586): Selenocysteine
  MOD_RES (596)..(596): Selenocysteine
  MOD_RES (598)..(598): Selenocysteine
  MOD_RES (621)..(621): Selenocysteine
  MOD_RES (629)..(629): Selenocysteine
  MOD_RES (635)..(635): Selenocysteine
  MOD_RES (660)..(660): Selenocysteine
  MOD_RES (662)..(662): Selenocysteine
  MOD_RES (671)..(671): Selenocysteine
  MOD_RES (704)..(704): Selenocysteine
  MOD_RES (725)..(725): Selenocysteine
  MOD_RES (777)..(777): Selenocysteine
MNLQPIFWIGLISSVCCVFAQXDENRCLKANAKSCGECIQAGPNCGWCXNSXFLQEGMPXSARCDDLEALKKKGCPPDDIENPRGSKDIKKNKNVXNRSKGXAEKLKPEDIXQIQPQQLVLRLRSGEPQXFXLKFKRAEDYPIDLYYLMDLSYSMKDDLENVKSLGXDLMNEMRRIXSDFRIGFGSFVEKXVMPYISXXPAKLRNPCXSEQNCXSPFSYKNVLSLXNKGEVFNELVGKQRISGNLDSPEGGFDAIMQVAVCGSLIGWRNVXRLLVFSXDAGFHFAGDGKLGGIVLPNDGQCHLENNMYXMSHYYDYPSIAHLVQKLSENNIQXIFAVXEEFQPVYKELKNLIPKSAVGXLSANSSNVIQLIIDAYNSLSSEVILENGKLSEGVXISYKSYCKNGVNGXGENGRKCSNISIGDEVQFEISIXSNKCPKKDSDSFKIRPLGFXEEVEVILQYICECECQSEGIPESPKCHEGNGXFECGACRCNEGRVGRHCECSXDEVNSEDMDAYCRKENSSEICSNNGECVCGQCVCRKRDNXNEIYSGKFCECDNFNCDRSNGLICGGNGVCKCRVCECNPNYXGSACDCSLDXSXCEASNGQICNGRGICECGVCKCXDPKFQGQXCEMCQXCLGVCAEHKECVQCRAFNKGEKKDXCXQECSYFNIXKVESRDKLPQPVQPDPVSHCKEKDVDDCWFYFXYSVNGNNEVMVHVVENPECPXGPDIIPIVAGVVAGIVLIGLALLLIWKLLMIIHDRREFAKFEKEKMNAKWDXQENPIYKSPINNFKNPNYGRKAGL

SEQ ID NO: 13970 - protein, 152 aa, Homo sapiens
  MOD_RES (22)..(22): Selenocysteine
  MOD_RES (49)..(49): Selenocysteine
  MOD_RES (55)..(55): Selenocysteine
  MOD_RES (63)..(63): Selenocysteine
  MOD_RES (99)..(99): Selenocysteine
  MOD_RES (105)..(105): Selenocysteine
  MOD_RES (115)..(115): Selenocysteine
  MOD_RES (133)..(133): Selenocysteine
  MOD_RES (135)..(135): Selenocysteine
MNLQPIFWIGLISSVCCVFAQXDENRCLKANAKSCGECIQAGPNCGWCXNSVSKXFLQEGMPXSARCDDLEALKKKGCPPDDIENPRGSKDIKKNKNVXNRSKGXAEKLKPEDIXQIQPQQLVLRLRSGEPQXFXLKFKRAEDYPIDLYYLM

SEQ ID NO: 13971 - protein, 14 aa, Homo sapiens
  MOD_RES (3)..(3): Selenocysteine
MPXSARCDDLEALK

SEQ ID NO: 13972 - protein, 31 aa, Homo sapiens
  MOD_RES (3)..(3): Selenocysteine
MPXSARCDDLEALKKKGCPPDDIENPRGSKD

SEQ ID NO: 13973 - protein, 98 aa, Homo sapiens
  MOD_RES (3)..(3): Selenocysteine
  MOD_RES (39)..(39): Selenocysteine
  MOD_RES (45)..(45): Selenocysteine
  MOD_RES (55)..(55): Selenocysteine
  MOD_RES (73)..(73): Selenocysteine
  MOD_RES (75)..(75): Selenocysteine
MPXSARCDDLEALKKKGCPPDDIENPRGSKDIKKNKNVXNRSKGXAEKLKPEDIXQIQPQQLVLRLRSGEPQXFXLKFKRAEDYPIDLYYLMDLSYSM

SEQ ID NO: 13974 - protein, 108 aa, Homo sapiens
  MOD_RES (1)..(1): Any amino acid
  MOD_RES (35)..(35): Selenocysteine
  MOD_RES (77)..(77): Selenocysteine
  MOD_RES (87)..(87): Selenocysteine
  MOD_RES (89)..(89): Selenocysteine
XDMDAYCRKENSSEICSNNGECVCGQCVCRKRDNXNEIYSGKFCECDNFNCDRSNGLICGGNGVCKCRVCECNPNYXGSACDCSLDXSXCEASNGQICNGRGICECGV

SEQ ID NO: 13975 - protein, 70 aa, Homo sapiens
  MOD_RES (1)..(1): Any amino acid
  MOD_RES (46)..(46): Selenocysteine
XVAGVVAGIVLIGLALLLIWKLLMIIHDRREFAKFEKEKMNAKWDXQENPIYKSPINNFKNPNYGRKAGL

SEQ ID NO: 13976 - protein, 38 aa, Homo sapiens
  MOD_RES (21)..(21): Selenocysteine
  MOD_RES (28)..(28): Selenocysteine
MFRKGKKRHSSSSSQSSEISXKSKDKAXIIQIPVQNFE

SEQ ID NO: 13977 - protein, 65 aa, Homo sapiens
  MOD_RES (21)..(21): Selenocysteine
  MOD_RES (38)..(38): Selenocysteine
  MOD_RES (44)..(44): Selenocysteine
  MOD_RES (47)..(47): Selenocysteine
  MOD_RES (59)..(59): Selenocysteine
MFRKGKKRHSSSSSQSSEISXKSKSVDSSLGGLSRSSXVASLDXDSXKSSGQSNNNSDXCAEFRI

SEQ ID NO: 13978 - protein, 84 aa, Homo sapiens
  MOD_RES (21)..(21): Selenocysteine
  MOD_RES (38)..(38): Selenocysteine
  MOD_RES (44)..(44): Selenocysteine
  MOD_RES (47)..(47): Selenocysteine
  MOD_RES (59)..(59): Selenocysteine
MFRKGKKRHSSSSSQSSEISXKSKSVDSSLGGLSRSSXVASLDXDSXKSSGQSNNNSDXCAEFRIKYVGAIEKLKLSEGKGLEG

SEQ ID NO: 13979 - protein, 86 aa, Homo sapiens
  MOD_RES (21)..(21): Selenocysteine
  MOD_RES (38)..(38): Selenocysteine
  MOD_RES (44)..(44): Selenocysteine
  MOD_RES (47)..(47): Selenocysteine
  MOD_RES (59)..(59): Selenocysteine
MFRKGKKRHSSSSSQSSEISXKSKSVDSSLGGLSRSSXVASLDXDSXKSSGQSNNNSDXCAEFRIKYVGAIEKLKLSEGKGLEGPL

SEQ ID NO: 13980 - protein, 96 aa, Homo sapiens
  MOD_RES (21)..(21): Selenocysteine
  MOD_RES (38)..(38): Selenocysteine
  MOD_RES (44)..(44): Selenocysteine
  MOD_RES (47)..(47): Selenocysteine
  MOD_RES (59)..(59): Selenocysteine
MFRKGKKRHSSSSSQSSEISXKSKSVDSSLGGLSRSSXVASLDXDSXKSSGQSNNNSDXCAEFRIKYVGAIEKLKLSEGKGLEGPLDLINYIDVAQ

SEQ ID NO: 13981 - protein, 114 aa, Homo sapiens
  MOD_RES (21)..(21): Selenocysteine
  MOD_RES (38)..(38): Selenocysteine
  MOD_RES (44)..(44): Selenocysteine
  MOD_RES (47)..(47): Selenocysteine
  MOD_RES (59)..(59): Selenocysteine
MFRKGKKRHSSSSSQSSEISXKSKSVDSSLGGLSRSSXVASLDXDSXKSSGQSNNNSDXCAEFRIKYVGAIEKLKLSEGKGLEGPLDLINYIDVAQQDGKLPFVPPEEEFIMGV

SEQ ID NO: 13982 - protein, 136 aa, Homo sapiens
  MOD_RES (21)..(21): Selenocysteine
  MOD_RES (38)..(38): Selenocysteine
  MOD_RES (44)..(44): Selenocysteine
  MOD_RES (47)..(47): Selenocysteine
  MOD_RES (59)..(59): Selenocysteine
  MOD_RES (123)..(123): Selenocysteine
MFRKGKKRHSSSSSQSSEISXKSKSVDSSLGGLSRSSXVASLDXDSXKSSGQSNNNSDXCAEFRIKYVGAIEKLKLSEGKGLEGPLDLINYIDVAQQDGKLPFVPPEEEFIMGVSKYGIKVSXSDQYDVLHRHALY

SEQ ID NO: 13983 - protein, 200 aa, Homo sapiens
  MOD_RES (21)..(21): Selenocysteine
  MOD_RES (38)..(38): Selenocysteine
  MOD_RES (44)..(44): Selenocysteine
  MOD_RES (47)..(47): Selenocysteine
  MOD_RES (59)..(59): Selenocysteine
  MOD_RES (123)..(123): Selenocysteine
  MOD_RES (159)..(160): Selenocysteine
  MOD_RES (189)..(189): Selenocysteine
  MOD_RES (196)..(196): Selenocysteine
MFRKGKKRHSSSSSQSSEISXKSKSVDSSLGGLSRSSXVASLDXDSXKSSGQSNNNSDXCAEFRIKYVGAIEKLKLSEGKGLEGPLDLINYIDVAQQDGKLPFVPPEEEFIMGVSKYGIKVSXSDQYDVLHRHALYLIIRMVCYDDGLGAGKSLLALKXXDASNEEYSLWVYQCNSLEQAQAICKVLSXAFDSVLXSEKP

SEQ ID NO: 13984 - protein, 184 aa, Homo sapiens
  MOD_RES (21)..(21): Selenocysteine
  MOD_RES (38)..(38): Selenocysteine
  MOD_RES (44)..(44): Selenocysteine
  MOD_RES (47)..(47): Selenocysteine
  MOD_RES (59)..(59): Selenocysteine
  MOD_RES (123)..(123): Selenocysteine
  MOD_RES (159)..(160): Selenocysteine
MFRKGKKRHSSSSSQSSEISXKSKSVDSSLGGLSRSSXVASLDXDSXKSSGQSNNNSDXCAEFRIKYVGAIEKLKLSEGKGLEGPLDLINYIDVAQQDGKLPFVPPEEEFIMGVSKYGIKVSXSDQYDVLHRHALYLIIRMVCYDDGLGAGKSLLALKXXDASNEEYSLWVYQCNSLVRLRYFG

SEQ ID NO: 13985 - protein, 150 aa, Homo sapiens
  MOD_RES (21)..(21): Selenocysteine
  MOD_RES (38)..(38): Selenocysteine
  MOD_RES (44)..(44): Selenocysteine
  MOD_RES (47)..(47): Selenocysteine
  MOD_RES (59)..(59): Selenocysteine
  MOD_RES (123)..(123): Selenocysteine
  MOD_RES (139)..(139): Selenocysteine
  MOD_RES (146)..(146): Selenocysteine
MFRKGKKRHSSSSSQSSEISXKSKSVDSSLGGLSRSSXVASLDXDSXKSSGQSNNNSDXCAEFRIKYVGAIEKLKLSEGKGLEGPLDLINYIDVAQQDGKLPFVPPEEEFIMGVSKYGIKVSXSDQYEQAQAICKVLSXAFDSVLXSEKP

SEQ ID NO: 13986 - protein, 107 aa, Homo sapiens
  MOD_RES (21)..(21): Selenocysteine
  MOD_RES (38)..(38): Selenocysteine
  MOD_RES (44)..(44): Selenocysteine
  MOD_RES (47)..(47): Selenocysteine
  MOD_RES (59)..(59): Selenocysteine
  MOD_RES (104)..(104): Selenocysteine
MFRKGKKRHSSSSSQSSEISXKSKSVDSSLGGLSRSSXVASLDXDSXKSSGQSNNNSDXCAEFRIKYVGAIEKLKLSEGKGLEGPLDLINYIDVAQVKKKNSVXLWL

SEQ ID NO: 13987 - protein, 347 aa, Homo sapiens
  MOD_RES (18)..(18): Selenocysteine
  MOD_RES (47)..(47): Selenocysteine
  MOD_RES (60)..(60): Selenocysteine
  MOD_RES (80)..(80): Selenocysteine
  MOD_RES (99)..(99): Selenocysteine
  MOD_RES (145)..(145): Selenocysteine
  MOD_RES (166)..(166): Selenocysteine
  MOD_RES (169)..(169): Selenocysteine
  MOD_RES (191)..(191): Selenocysteine
  MOD_RES (225)..(225): Selenocysteine
  MOD_RES (232)..(232): Selenocysteine
  MOD_RES (250)..(250): Selenocysteine
  MOD_RES (336)..(336): Selenocysteine
MSLLCRNKGCGQHFDPNXNLPDSCCHHPGVPIFHDALKGWSCCRKRXVDFSEFLNIKGCXMGPHCAEKLPEAPQPEGPAXSSSLQEQKPLNVIPKSAEXLRRERPKSELPLKLLPLNISQALEMALEQKELDQEPGAGLDSLIRXGSSCQNPGCDAVYQGPESDAXPCXYHPGAPRFHEGMKSWSCCGIQXLDFGAFLAQPGCRVGRHDWGKQLPASCRHDWHQXDSLVVVXVYGQIPLPAFNWVKASQXELHVHIVFDGNRVFQAQMKLWGVINVEQSSVFLMPSRVEISLVKADPGSWAQLEHPDALAKKARAGVVLEMDEEESDDSDDDLSWXEEEEEEEAMGE

SEQ ID NO: 13988 - protein, 329 aa, Homo sapiens
  MOD_RES (3)..(3): Selenocysteine
  MOD_RES (29)..(29): Selenocysteine
  MOD_RES (42)..(42): Selenocysteine
  MOD_RES (62)..(62): Selenocysteine
  MOD_RES (81)..(81): Selenocysteine
  MOD_RES (127)..(127): Selenocysteine
  MOD_RES (148)..(148): Selenocysteine
  MOD_RES (151)..(151): Selenocysteine
  MOD_RES (173)..(173): Selenocysteine
  MOD_RES (207)..(207): Selenocysteine
  MOD_RES (214)..(214): Selenocysteine
  MOD_RES (232)..(232): Selenocysteine
  MOD_RES (318)..(318): Selenocysteine
MSXDSCCHHPGVPIFHDALKGWSCCRKRXVDFSEFLNIKGCXMGPHCAEKLPEAPQPEGPAXSSSLQEQKPLNVIPKSAEXLRRERPKSELPLKLLPLNISQALEMALEQKELDQEPGAGLDSLIRXGSSCQNPGCDAVYQGPESDAXPCXYHPGAPRFHEGMKSWSCCGIQXLDFGAFLAQPGCRVGRHDWGKQLPASCRHDWHQXDSLVVVXVYGQIPLPAFNWVKASQXELHVHIVFDGNRVFQAQMKLWGVINVEQSSVFLMPSRVEISLVKADPGSWAQLEHPDALAKKARAGVVLEMDEEESDDSDDDLSWXEEEEEEEAMGE

SEQ ID NO: 13989 - protein, 322 aa, Homo sapiens
  MOD_RES (9)..(9): Selenocysteine
  MOD_RES (17)..(17): Selenocysteine
  MOD_RES (35)..(35): Selenocysteine
  MOD_RES (43)..(43): Selenocysteine
  MOD_RES (55)..(55): Selenocysteine
  MOD_RES (73)..(73): Selenocysteine
  MOD_RES (78)..(78): Selenocysteine
  MOD_RES (95)..(95): Selenocysteine
  MOD_RES (109)..(109): Selenocysteine
  MOD_RES (152)..(152): Selenocysteine
  MOD_RES (166)..(166): Selenocysteine
  MOD_RES (173)..(173): Selenocysteine
  MOD_RES (202)..(202): Selenocysteine
  MOD_RES (210)..(210): Selenocysteine
  MOD_RES (247)..(247): Selenocysteine
  MOD_RES (254)..(254): Selenocysteine
  MOD_RES (271)..(271): Selenocysteine
  MOD_RES (314)..(314): Selenocysteine
  MOD_RES (320)..(320): Selenocysteine
GRLGKDLAXGVLSQECXKFKVSSCRECIESGPGCXWCQKLNFXGPGDPDSIRCDXRPQLLMRGCAADDIMDPXSLAEXQEDHNGGQKQLSPQKVXLYLRPGQAAAFNVXFRRAKGYPIDLYYLMDLSYSMLDDLRNVKKLGGDLLRALNEIXESGRIGFGSFVDKXVLPFVNXHPDKLRNPCPNKEKECQPPFAFRHVLKLXNNSNQFQXEVGKQLISGNLDAPEGGLDAMMQVAACPEEIGWRNVXRLLVFAXDDGFHFAGDGKLGAILXPNDGRCHLEDNLYKRSNEFDYPSVGQLAHKLAENNIQPIFAVXSRMVKXYE

SEQ ID NO: 13990 - protein, 71 aa, Homo sapiens
  MOD_RES (26)..(26): Selenocysteine
MLGLRPPLLALVGLLSLGCGRPRAPXHQPASSLSPLSGVHEVQGQQLPGMHRVGARLHLVPEAELHRAGGS

SEQ ID NO: 13991 - protein, 49 aa, Homo sapiens
  MOD_RES (26)..(26): Selenocysteine
  MOD_RES (44)..(44): Selenocysteine
MLGLRPPLLALVGLLSLGCVLSQECXKFKVSSCRECIESGPGCXWCQKL

SEQ ID NO: 13992 - protein, 93 aa, Homo sapiens
  MOD_RES (26)..(26): Selenocysteine
  MOD_RES (44)..(44): Selenocysteine
  MOD_RES (60)..(60): Selenocysteine
  MOD_RES (78)..(78): Selenocysteine
MLGLRPPLLALVGLLSLGCVLSQECXKFKVSSCRECIESGPGCXWCQKLGAALGPPAHAXAASSPRRRSRVAPVCPRXEQGGQAPELHRAGGS

SEQ ID NO: 13993 - protein, 108 aa, Homo sapiens
  MOD_RES (26)..(26): Selenocysteine
  MOD_RES (44)..(44): Selenocysteine
  MOD_RES (60)..(60): Selenocysteine
  MOD_RES (78)..(78): Selenocysteine
MLGLRPPLLALVGLLSLGCVLSQECXKFKVSSCRECIESGPGCXWCQKLGAALGPPAHAXAASSPRRRSRVAPVCPRXEQGGQAPGGNYLGQAGFFPSPFWRFSAPLK

SEQ ID NO: 13994 - protein, 70 aa, Homo sapiens
  MOD_RES (26)..(26): Selenocysteine
  MOD_RES (44)..(44): Selenocysteine
  MOD_RES (52)..(52): Selenocysteine
  MOD_RES (64)..(64): Selenocysteine
MLGLRPPLLALVGLLSLGCVLSQECXKFKVSSCRECIESGPGCXWCQKLNFXGPGDPDSIRCDXRPQLLM

SEQ ID NO: 13995 - protein, 712 aa, Homo sapiens
  MOD_RES (26)..(26): Selenocysteine
  MOD_RES (44)..(44): Selenocysteine
  MOD_RES (52)..(52): Selenocysteine
  MOD_RES (64)..(64): Selenocysteine
  MOD_RES (82)..(82): Selenocysteine
  MOD_RES (87)..(87): Selenocysteine
  MOD_RES (104)..(104): Selenocysteine
  MOD_RES (118)..(118): Selenocysteine
  MOD_RES (125)..(125): Selenocysteine
  MOD_RES (154)..(154): Selenocysteine
  MOD_RES (162)..(162): Selenocysteine
  MOD_RES (199)..(199): Selenocysteine
  MOD_RES (206)..(206): Selenocysteine
  MOD_RES (223)..(223): Selenocysteine
  MOD_RES (266)..(266): Selenocysteine
  MOD_RES (272)..(272): Selenocysteine
  MOD_RES (277)..(277): Selenocysteine
  MOD_RES (320)..(320): Selenocysteine
  MOD_RES (324)..(324): Selenocysteine
  MOD_RES (334)..(334): Selenocysteine
  MOD_RES (353)..(353): Selenocysteine
  MOD_RES (359)..(359): Selenocysteine
  MOD_RES (361)..(361): Selenocysteine
  MOD_RES (377)..(377): Selenocysteine
  MOD_RES (381)..(381): Selenocysteine
  MOD_RES (417)..(417): Selenocysteine
  MOD_RES (428)..(428): Selenocysteine
  MOD_RES (464)..(464): Selenocysteine
  MOD_RES (481)..(481): Selenocysteine
  MOD_RES (521)..(522): Selenocysteine
  MOD_RES (604)..(604): Selenocysteine
  MOD_RES (618)..(618): Selenocysteine
  MOD_RES (651)..(651): Selenocysteine
  MOD_RES (701)..(703): Selenocysteine
MLGLRPPLLALVGLLSLGCVLSQECXKFKVSSCRECIESGPGCXWCQKLNFXGPGDPDSIRCDXRPQLLMRGCAADDIMDPXSLAEXQEDHNGGQKQLSPQKVXLYLRPGFGSFVDKXVLPFVNXHPDKLRNPCPNKEKECQPPFAFRHVLKLXNNSNQFQXEVGKQLISGNLDAPEGGLDAMMQVAACPEEIGWRNVXRLLVFAXDDGFHFAGDGKLGAILXPNDGRCHLEDNLYKRSNEFDYPSVGQLAHKLAENNIQPIFAVXSRMVKXYEKLXEIIPKSAVGELSEDSSNVVHLIKNAYNKLSSRVFLDHNALPDXLKVXYDSFCSNGVXHRNQPRGDCDGVQINVPIXFQVKVXAXECIQEQSFVIRALGFXDIVXVQVLPQCECRCRDQSRDRSLCHGKGFLECGICRCDXGYIGKNCECQXQGRSSQELEGSCRKDNNSIICSGLGDCVCGQCLCHXSDVPGKLIYGQYCECDXINCERYNGQVCGGPGRGLCFCGKCRCHPGFEGSACQCERXXEGCLNPRRVECSGRGRCRCNVCECHSGYQLPLCQECPGCPSPCGKYISCAECLKFEKGPFGKNCSAACPGLQLSNNPVKGRXCKERDSEGCWVAYXLEQQDGMDRYLIYVDESRECVAGPNIAAIVGGXVAGIVLIGILLLVIWKALIHLSDLREYRRFEKEKLKSQWNNDNPLFKSAXXXVMNPKFAES

SEQ ID NO: 13996 - protein, 120 aa, Homo sapiens
  MOD_RES (26)..(26): Selenocysteine
  MOD_RES (44)..(44): Selenocysteine
  MOD_RES (52)..(52): Selenocysteine
  MOD_RES (64)..(64): Selenocysteine
  MOD_RES (82)..(82): Selenocysteine
  MOD_RES (87)..(87): Selenocysteine
  MOD_RES (104)..(104): Selenocysteine
  MOD_RES (118)..(118): Selenocysteine
MLGLRPPLLALVGLLSLGCVLSQECXKFKVSSCRECIESGPGCXWCQKLNFXGPGDPDSIRCDXRPQLLMRGCAADDIMDPXSLAEXQEDHNGGQKQLSPQKVXLYLRPGQAAAFNVXFR

SEQ ID NO: 13997 - protein, 160 aa, Homo sapiens
  MOD_RES (26)..(26): Selenocysteine
  MOD_RES (44)..(44): Selenocysteine
  MOD_RES (52)..(52): Selenocysteine
  MOD_RES (64)..(64): Selenocysteine
  MOD_RES (82)..(82): Selenocysteine
  MOD_RES (87)..(87): Selenocysteine
  MOD_RES (104)..(104): Selenocysteine
  MOD_RES (118)..(118): Selenocysteine
MLGLRPPLLALVGLLSLGCVLSQECXKFKVSSCRECIESGPGCXWCQKLNFXGPGDPDSIRCDXRPQLLMRGCAADDIMDPXSLAEXQEDHNGGQKQLSPQKVXLYLRPGQAAAFNVXFRRAKGYPIDLYYLMDLSYSMLDDLRNVKKLGGDLLRALNEI

SEQ ID NO: 13998 - protein, 166 aa, Homo sapiens
  MOD_RES (26)..(26): Selenocysteine
  MOD_RES (44)..(44): Selenocysteine
  MOD_RES (52)..(52): Selenocysteine
  MOD_RES (64)..(64): Selenocysteine
  MOD_RES (82)..(82): Selenocysteine
  MOD_RES (87)..(87): Selenocysteine
  MOD_RES (104)..(104): Selenocysteine
  MOD_RES (118)..(118): Selenocysteine
  MOD_RES (161)..(161): Selenocysteine
MLGLRPPLLALVGLLSLGCVLSQECXKFKVSSCRECIESGPGCXWCQKLNFXGPGDPDSIRCDXRPQLLMRGCAADDIMDPXSLAEXQEDHNGGQKQLSPQKVXLYLRPGQAAAFNVXFRRAKGYPIDLYYLMDLSYSMLDDLRNVKKLGGDLLRALNEIXESGRI

SEQ ID NO: 13999 - protein, 769 aa, Homo sapiens
  MOD_RES (26)..(26): Selenocysteine
  MOD_RES (44)..(44): Selenocysteine
  MOD_RES (52)..(52): Selenocysteine
  MOD_RES (64)..(64): Selenocysteine
  MOD_RES (82)..(82): Selenocysteine
  MOD_RES (87)..(87): Selenocysteine
  MOD_RES (104)..(104): Selenocysteine
  MOD_RES (118)..(118): Selenocysteine
  MOD_RES (161)..(161): Selenocysteine
  MOD_RES (175)..(175): Selenocysteine
  MOD_RES (182)..(182): Selenocysteine
  MOD_RES (211)..(211): Selenocysteine
  MOD_RES (219)..(219): Selenocysteine
  MOD_RES (256)..(256): Selenocysteine
  MOD_RES (263)..(263): Selenocysteine
  MOD_RES (280)..(280): Selenocysteine
  MOD_RES (323)..(323): Selenocysteine
  MOD_RES (329)..(329): Selenocysteine
  MOD_RES (334)..(334): Selenocysteine
  MOD_RES (377)..(377): Selenocysteine
  MOD_RES (381)..(381): Selenocysteine
  MOD_RES (391)..(391): Selenocysteine
  MOD_RES (410)..(410): Selenocysteine
  MOD_RES (416)..(416): Selenocysteine
  MOD_RES (418)..(418): Selenocysteine
  MOD_RES (434)..(434): Selenocysteine
  MOD_RES (438)..(438): Selenocysteine
  MOD_RES (474)..(474): Selenocysteine
  MOD_RES (485)..(485): Selenocysteine
  MOD_RES (521)..(521): Selenocysteine
  MOD_RES (538)..(538): Selenocysteine
  MOD_RES (578)..(579): Selenocysteine
  MOD_RES (661)..(661): Selenocysteine
  MOD_RES (675)..(675): Selenocysteine
  MOD_RES (708)..(708): Selenocysteine
  MOD_RES (758)..(760): Selenocysteine
MLGLRPPLLALVGLLSLGCVLSQECXKFKVSSCRECIESGPGCXWCQKLNFXGPGDPDSIRCDXRPQLLMRGCAADDIMDPXSLAEXQEDHNGGQKQLSPQKVXLYLRPGQAAAFNVXFRRAKGYPIDLYYLMDLSYSMLDDLRNVKKLGGDLLRALNEIXESGRIGFGSFVDKXVLPFVNXHPDKLRNPCPNKEKECQPPFAFRHVLKLXNNSNQFQXEVGKQLISGNLDAPEGGLDAMMQVAACPEEIGWRNVXRLLVFAXDDGFHFAGDGKLGAILXPNDGRCHLEDNLYKRSNEFDYPSVGQLAHKLAENNIQPIFAVXSRMVKXYEKLXEIIPKSAVGELSEDSSNVVHLIKNAYNKLSSRVFLDHNALPDXLKVXYDSFCSNGVXHRNQPRGDCDGVQINVPIXFQVKVXAXECIQEQSFVIRALGFXDIVXVQVLPQCECRCRDQSRDRSLCHGKGFLECGICRCDXGYIGKNCECQXQGRSSQELEGSCRKDNNSIICSGLGDCVCGQCLCHXSDVPGKLIYGQYCECDXINCERYNGQVCGGPGRGLCFCGKCRCHPGFEGSACQCERXXEGCLNPRRVECSGRGRCRCNVCECHSGYQLPLCQECPGCPSPCGKYISCAECLKFEKGPFGKNCSAACPGLQLSNNPVKGRXCKERDSEGCWVAYXLEQQDGMDRYLIYVDESRECVAGPNIAAIVGGXVAGIVLIGILLLVIWKALIHLSDLREYRRFEKEKLKSQWNNDNPLFKSAXXXVMNPKFAES

SEQ ID NO: 14000 - protein, 37 aa, Homo sapiens
  MOD_RES (13)..(13): Selenocysteine
  MOD_RES (18)..(18): Selenocysteine
  MOD_RES (35)..(35): Selenocysteine
MRGCAADDIMDPXSLAEXQEDHNGGQKQLSPQKVXLY

SEQ ID NO: 14001 - protein, 49 aa, Homo sapiens
  MOD_RES (13)..(13): Selenocysteine
  MOD_RES (18)..(18): Selenocysteine
  MOD_RES (35)..(35): Selenocysteine
  MOD_RES (49)..(49): Selenocysteine
MRGCAADDIMDPXSLAEXQEDHNGGQKQLSPQKVXLYLRPGQAAAFNVX

SEQ ID NO: 14002 - protein, 35 aa, Homo sapiens
  MOD_RES (12)..(12): Selenocysteine
  MOD_RES (28)..(28): Selenocysteine
LKSCMGLKIGDXVRWAGQGLCPGASVGXQPPFFLL

SEQ ID NO: 14003 - protein, 443 aa, Homo sapiens
  MOD_RES (13)..(13): Selenocysteine
  MOD_RES (32)..(33): Selenocysteine
  MOD_RES (107)..(107): Selenocysteine
  MOD_RES (162)..(162): Selenocysteine
  MOD_RES (166)..(166): Selenocysteine
  MOD_RES (172)..(172): Selenocysteine
  MOD_RES (208)..(209): Selenocysteine
  MOD_RES (221)..(221): Selenocysteine
  MOD_RES (223)..(223): Selenocysteine
  MOD_RES (227)..(227): Selenocysteine
  MOD_RES (256)..(256): Selenocysteine
  MOD_RES (275)..(276): Selenocysteine
  MOD_RES (280)..(280): Selenocysteine
  MOD_RES (311)..(312): Selenocysteine
  MOD_RES (322)..(322): Selenocysteine
  MOD_RES (337)..(337): Selenocysteine
  MOD_RES (354)..(355): Selenocysteine
  MOD_RES (399)..(399): Selenocysteine
  MOD_RES (420)..(420): Selenocysteine
  MOD_RES (436)..(436): Selenocysteine
MRARPRPRPLWAXVLALGALAGVGVGGPNICXXRGVSSCQQCLAVSPMCAWCSDEALPLGSPRCDLKENLLKDNCAPESIEFPVSEARVLEDRPLSDKGSGDSSQVXQVSPQRIALRLRPDDSKNFSIQVRQVEDYPVDIYYLMDLSYSMKDDLWSIQNLGXKLAXQMRKLXSNLRIGFGAFVDKPVSPYMYISPPEALENPCYDMKXXCLPMFGYKHVLXLXDQVXRFNEEVKKQSVSRNRDAPEGGFDAIMQAXVCDEKIGWRNDASHLLVFXXDAKXHIALDGRLAGIVQPNDGQCHVGSDNHYSASXXMDYPSLGLMXEKLSQKNINLIFAVXENVVNLYQNYSELIPGXXVGVLSMDSSNVLQLIVDAYGKIRSKVELEVRDLPEELSLSFNAXCLNNEVIPGLKSCMGLKIGDXVRWAGQGLCPGASVGXQPPFFLL

SEQ ID NO: 14004 - protein, 788 aa, Homo sapiens
  MOD_RES (13)..(13): Selenocysteine
  MOD_RES (32)..(33): Selenocysteine
  MOD_RES (107)..(107): Selenocysteine
  MOD_RES (162)..(162): Selenocysteine
  MOD_RES (166)..(166): Selenocysteine
  MOD_RES (172)..(172): Selenocysteine
  MOD_RES (208)..(209): Selenocysteine
  MOD_RES (221)..(221): Selenocysteine
  MOD_RES (223)..(223): Selenocysteine
  MOD_RES (227)..(227): Selenocysteine
  MOD_RES (256)..(256): Selenocysteine
  MOD_RES (275)..(276): Selenocysteine
  MOD_RES (280)..(280): Selenocysteine
  MOD_RES (311)..(312): Selenocysteine
  MOD_RES (322)..(322): Selenocysteine
  MOD_RES (337)..(337): Selenocysteine
  MOD_RES (354)..(355): Selenocysteine
  MOD_RES (399)..(399): Selenocysteine
  MOD_RES (420)..(420): Selenocysteine
  MOD_RES (441)..(441): Selenocysteine
  MOD_RES (456)..(456): Selenocysteine
  MOD_RES (480)..(480): Selenocysteine
  MOD_RES (543)..(543): Selenocysteine
  MOD_RES (580)..(580): Selenocysteine
  MOD_RES (587)..(588): Selenocysteine
  MOD_RES (590)..(590): Selenocysteine
  MOD_RES (592)..(592): Selenocysteine
  MOD_RES (623)..(623): Selenocysteine
  MOD_RES (629)..(629): Selenocysteine
  MOD_RES (635)..(635): Selenocysteine
  MOD_RES (656)..(656): Selenocysteine
  MOD_RES (674)..(674): Selenocysteine
  MOD_RES (682)..(682): Selenocysteine
  MOD_RES (746)..(746): Selenocysteine
  MOD_RES (767)..(767): Selenocysteine
  MOD_RES (777)..(777): Selenocysteine
  MOD_RES (779)..(779): Selenocysteine
  MOD_RES (781)..(781): Selenocysteine
  MOD_RES (784)..(784): Selenocysteine
  MOD_RES (788)..(788): Selenocysteine
MRARPRPRPLWAXVLALGALAGVGVGGPNICXXRGVSSCQQCLAVSPMCAWCSDEALPLGSPRCDLKENLLKDNCAPESIEFPVSEARVLEDRPLSDKGSGDSSQVXQVSPQRIALRLRPDDSKNFSIQVRQVEDYPVDIYYLMDLSYSMKDDLWSIQNLGXKLAXQMRKLXSNLRIGFGAFVDKPVSPYMYISPPEALENPCYDMKXXCLPMFGYKHVLXLXDQVXRFNEEVKKQSVSRNRDAPEGGFDAIMQAXVCDEKIGWRNDASHLLVFXXDAKXHIALDGRLAGIVQPNDGQCHVGSDNHYSASXXMDYPSLGLMXEKLSQKNINLIFAVXENVVNLYQNYSELIPGXXVGVLSMDSSNVLQLIVDAYGKIRSKVELEVRDLPEELSLSFNAXCLNNEVIPGLKSCMGLKIGDXVSFSIEAKVRGCPQEKEKSFXIKPVGFKDSLIVQVXFDCDCACQAQAEPNSHRCNNGNGXFECGVCRCGPGWLGSQCECSEEDYRPSQQDECSPREGQPVCSQRGECLCGQCVCHSSDFGKIXGKYCECDDFSCVRYKGEMCSGHGQCSCGDCLCDSDWXGYYCNCXXRXDXCMSSNGLLCSGRGKCECGSCVCIQPGSYGDXCEKCPXCPDACXFKKECVECKKFDRGALHDENXCNRYCRDEIESVKELKDXGKDAVNCXYKNEDDCVVRFQYYEDSSGKSILYVVEEPECPKGPDILVVLLSVMGAILLIGLAALLIWKLLIXIHDRKEFAKFEEERARAKWDXANNPLYKEAXSXFXNIXYRGX

SEQ ID NO: 14005 - protein, 216 aa, Homo sapiens
  MOD_RES (63)..(63): Selenocysteine
  MOD_RES (70)..(70): Selenocysteine
  MOD_RES (74)..(75): Selenocysteine
  MOD_RES (77)..(77): Selenocysteine
  MOD_RES (87)..(87): Selenocysteine
  MOD_RES (112)..(112): Selenocysteine
  MOD_RES (118)..(119): Selenocysteine
  MOD_RES (178)..(178): Selenocysteine
  MOD_RES (183)..(183): Selenocysteine
  MOD_RES (195)..(195): Selenocysteine
MPFAPVAQARVQWHDFRSLQHLLPAFKRFSCLSLGSSWDYSVKRSLKLDGLLEENSFDPSKIXRKKSVIXYSPXXGXCQMSLFASPXSSEEQKHRNGLSNEKRKKLNHPSLXESKESXXKDNDEFMMLLSKVEKLSEEIMEIMQNLSSIQALEGSRELENLIGISCASHFLKREMQKXKELMXKVNKQKLFEKSXGLPHKASRHLDSYEFLKAILN

SEQ ID NO: 14006 - protein, 177 aa, Homo sapiens
  MOD_RES (24)..(24): Selenocysteine
  MOD_RES (31)..(31): Selenocysteine
  MOD_RES (35)..(36): Selenocysteine
  MOD_RES (38)..(38): Selenocysteine
  MOD_RES (48)..(48): Selenocysteine
  MOD_RES (73)..(73): Selenocysteine
  MOD_RES (79)..(80): Selenocysteine
  MOD_RES (139)..(139): Selenocysteine
  MOD_RES (144)..(144): Selenocysteine
  MOD_RES (156)..(156): Selenocysteine
MPVKRSLKLDGLLEENSFDPSKIXRKKSVIXYSPXXGXCQMSLFASPXSSEEQKHRNGLSNEKRKKLNHPSLXESKESXXKDNDEFMMLLSKVEKLSEEIMEIMQNLSSIQALEGSRELENLIGISCASHFLKREMQKXKELMXKVNKQKLFEKSXGLPHKASRHLDSYEFLKAILN

SEQ ID NO: 14007 - protein, 170 aa, Homo sapiens
  MOD_RES (24)..(24): Selenocysteine
  MOD_RES (31)..(31): Selenocysteine
  MOD_RES (35)..(36): Selenocysteine
  MOD_RES (38)..(38): Selenocysteine
  MOD_RES (48)..(48): Selenocysteine
  MOD_RES (73)..(73): Selenocysteine
  MOD_RES (79)..(80): Selenocysteine
  MOD_RES (139)..(139): Selenocysteine
  MOD_RES (144)..(144): Selenocysteine
  MOD_RES (156)..(156): Selenocysteine
MPVKRSLKLDGLLEENSFDPSKIXRKKSVIXYSPXXGXCQMSLFASPXSSEEQKHRNGLSNEKRKKLNHPSLXESKESXXKDNDEFMMLLSKVEKLSEEIMEIMQNLSSIQALEGSRELENLIGISCASHFLKREMQKXKELMXKVNKQKLFEKSXGLPHKGQPQMSQPL

SEQ ID NO: 14008 - protein, 1752 aa, Homo sapiens
  MOD_RES (25)..(25): Selenocysteine
  MOD_RES (39)..(39): Selenocysteine
  MOD_RES (52)..(52): Selenocysteine
  MOD_RES (63)..(63): Selenocysteine
  MOD_RES (87)..(87): Selenocysteine
  MOD_RES (90)..(90): Selenocysteine
  MOD_RES (94)..(95): Selenocysteine
  MOD_RES (164)..(164): Selenocysteine
  MOD_RES (168)..(168): Selenocysteine
  MOD_RES (183)..(183): Selenocysteine
  MOD_RES (210)..(210): Selenocysteine
  MOD_RES (242)..(242): Selenocysteine
  MOD_RES (246)..(246): Selenocysteine
  MOD_RES (256)..(256): Selenocysteine
  MOD_RES (263)..(263): Selenocysteine
  MOD_RES (292)..(293): Selenocysteine
  MOD_RES (295)..(295): Selenocysteine
  MOD_RES (297)..(297): Selenocysteine
  MOD_RES (301)..(301): Selenocysteine
  MOD_RES (309)..(309): Selenocysteine
  MOD_RES (326)..(326): Selenocysteine
  MOD_RES (338)..(338): Selenocysteine
  MOD_RES (383)..(383): Selenocysteine
  MOD_RES (386)..(386): Selenocysteine
  MOD_RES (393)..(393): Selenocysteine
  MOD_RES (395)..(395): Selenocysteine
  MOD_RES (421)..(421): Selenocysteine
  MOD_RES (456)..(456): Selenocysteine
  MOD_RES (489)..(489): Selenocysteine
  MOD_RES (494)..(494): Selenocysteine
  MOD_RES (546)..(546): Selenocysteine
  MOD_RES (569)..(569): Selenocysteine
  MOD_RES (581)..(581): Selenocysteine
  MOD_RES (610)..(610): Selenocysteine
  MOD_RES (612)..(612): Selenocysteine
  MOD_RES (640)..(640): Selenocysteine
  MOD_RES (647)..(647): Selenocysteine
  MOD_RES (681)..(681): Selenocysteine
  MOD_RES (685)..(685): Selenocysteine
  MOD_RES (697)..(697): Selenocysteine
  MOD_RES (776)..(776): Selenocysteine
  MOD_RES (795)..(795): Selenocysteine
  MOD_RES (805)..(805): Selenocysteine
  MOD_RES (813)..(813): Selenocysteine
  MOD_RES (829)..(829): Selenocysteine
  MOD_RES (837)..(837): Selenocysteine
  MOD_RES (867)..(867): Selenocysteine
  MOD_RES (882)..(882): Selenocysteine
  MOD_RES (886)..(886): Selenocysteine
  MOD_RES (902)..(902): Selenocysteine
  MOD_RES (922)..(922): Selenocysteine
  MOD_RES (924)..(924): Selenocysteine
  MOD_RES (971)..(971): Selenocysteine
  MOD_RES (973)..(973): Selenocysteine
  MOD_RES (982)..(982): Selenocysteine
  MOD_RES (1028)..(1028): Selenocysteine
  MOD_RES (1032)..(1032): Selenocysteine
  MOD_RES (1098)..(1099): Selenocysteine
  MOD_RES (1113)..(1113): Selenocysteine
  MOD_RES (1184)..(1184): Selenocysteine
  MOD_RES (1215)..(1215): Selenocysteine
  MOD_RES (1234)..(1234): Selenocysteine
  MOD_RES (1236)..(1236): Selenocysteine
  MOD_RES (1246)..(1246): Selenocysteine
  MOD_RES (1251)..(1251): Selenocysteine
  MOD_RES (1297)..(1297): Selenocysteine
  MOD_RES (1318)..(1318): Selenocysteine
  MOD_RES (1369)..(1369): Selenocysteine
  MOD_RES (1385)..(1385): Selenocysteine
  MOD_RES (1392)..(1394): Selenocysteine
  MOD_RES (1401)..(1401): Selenocysteine
  MOD_RES (1414)..(1414): Selenocysteine
  MOD_RES (1417)..(1417): Selenocysteine
  MOD_RES (1419)..(1419): Selenocysteine
  MOD_RES (1426)..(1426): Selenocysteine
  MOD_RES (1434)..(1435): Selenocysteine
  MOD_RES (1442)..(1442): Selenocysteine
  MOD_RES (1444)..(1444): Selenocysteine
  MOD_RES (1454)..(1454): Selenocysteine
  MOD_RES (1460)..(1460): Selenocysteine
  MOD_RES (1462)..(1462): Selenocysteine
  MOD_RES (1472)..(1472): Selenocysteine
  MOD_RES (1513)..(1513): Selenocysteine
  MOD_RES (1547)..(1547): Selenocysteine
  MOD_RES (1567)..(1567): Selenocysteine
  MOD_RES (1570)..(1570): Selenocysteine
  MOD_RES (1580)..(1580): Selenocysteine
  MOD_RES (1607)..(1607): Selenocysteine
  MOD_RES (1618)..(1618): Selenocysteine
  MOD_RES (1632)..(1632): Selenocysteine
  MOD_RES (1650)..(1651): Selenocysteine
  MOD_RES (1663)..(1663): Selenocysteine
  MOD_RES (1694)..(1696): Selenocysteine
  MOD_RES (1698)..(1698): Selenocysteine
  MOD_RES (1701)..(1701): Selenocysteine
  MOD_RES (1710)..(1710): Selenocysteine
  MOD_RES (1723)..(1723): Selenocysteine
  MOD_RES (1727)..(1727): Selenocysteine
  MOD_RES (1734)..(1734): Selenocysteine
  MOD_RES (1736)..(1737): Selenocysteine
  MOD_RES (1740)..(1740): Selenocysteine
  MOD_RES (1743)..(1743): Selenocysteine
  MOD_RES (1752)..(1752): Selenocysteine
MAGPRPSPWARLLLAALISVSLSGXLANRCKKAPVKSCXECVRVDKDCAYCXDEMFRDRRCNXQAELLAAGCQRESIVVMESSFQIXEEXQIDXXLRRSQMSPQGLRVRLRPGEERHFELEVFEPLESPVDLYILMDFSNSMSDDLDNLKKMGQNLARVLSQLXSDYXIGFGKFVDKVSVPQXDMRPEKLKEPWPNSDPPFSFKNVISLXEDVDEFRNKLQGERISGNLDAPEGGFDAILQXAVCXRDIGWRPDSXHLLVFSXESAFHYEADGANVLAGIMSRNDERCHLDXXGXYXQYRXQDYPSVPXLVRLLAKHNIIPIFAVXNYSYSYYEKLHXYFPVSSLGVLQEDSSNIVELLEEAFNRIRSNLDIRALDSPRGLRXEVXSKMFQKXRXGSFHIRRGEVGIYQVQLRALEHVDGXHVCQLPEDQKGNIHLKPSFSDGLKMDAGIICDVCXCELQKEVRSARCSFNGDFVCGQCVCSEGWSGQXCNCSXGSLSDIQPCLREGEDKPCSGRGECQCGHCVCYGEGRYEGQFCEYDNFQCPRXSGFLCNDRGRCSMGQCVCEPGWXGPSCDCPLSNAXCIDSNGGICNGRGHCECGRCHCHQQSLYXDXICEINYSAIHPGLCEDLRSCVQCQAWGXGEKKGRXCEECNFKVKMVDELKRAEEVVVRCSFRDEDDDCXYSYXMEGDGAPGPNSXVLVHKKKDCPPGSFWWLIPLLLLLLPLLALLLLLCWKYCACCKACLALLPCCNRGHMVGFKEDHYMLRENLMASDHLDXPMLRSGNLKGRDVVRWKVXNNMQRPGFAXHAASINPXELVPYGLSLRLARLCXENLLKPDXRECAQLRQEVEENLNEVYRQISGVHKLQQXKFRQQPNAGKKQDHXIVDXVLMAPRSAKPALLKLXEKQVEQRAFHDLKVAPGYYXLXADQDARGMVEFQEGVELVDVRVPLFIRPEDDDEKQLLVEAIDVPAGXAXLGRRLVNIXIIKEQARDVVSFEQPEFSVSRGDQVARIPVIRRVLDGGKSQVSYRXQDGXAQGNRDYIPVEGELLFQPGEAWKELQVKLLELQEVDSLLRGRQVRRFHVQLSNPKFGAHLGQPHSXXIIIRDPDELDRSFXSQMLSSQPPPHGDLGAPQNPNAKAAGSRKIHFNWLPPSGKPMGYRVKYWIQGDSESEAHLLDSKVPSVELXNLYPYCDYEMKVCAYGAQGEGPYSSLVSCRXHQEVPSEPGRLAFNVVSSXVXQLSWAEPAEXNGEIXAYEVCYGLVNDDNRPIGPMKKVLVDNPKNRMLLIENLRESQPYRYXVKARNGAGWGPEREAIINLAXQPKRPMSIPIIPDIPIVDAQSGEDYDSFLMYSDDVLRSPSGSQRPSVSDDXEHLVNGRMDFAFPGSXNSLHRMXXXSAAAYGXHLSPHVPHRVLSXSSXLXRDYNSLXRSEHSHSXXLPRDYSXLXSVSSHDSRLXAGVPDXPXRLVFSALGPXSLRVSWQEPRCERPLQGYSVEYQLLNGGELHRLNIPNPAQXSVVVEDLLPNHSYVFRVRAQSQEGWGREREGVIXIESQVHPQSPLCPLPGSAFXLSXPSAPGPLVFXALSPDSLQLSWERPRRPNGDIVGYLVXCEMAQGGGPAXAFRVDGDSPESRLXVPGLSENVPYKFKVQARXXEGFGPEREGIIXIESQDGGPFPQLGSRAGLFQHPLQSEYSSIXXXHXSAXEPFLVDGLXLGAQHLEAGGSLXRHVXQEFVSRXLXXSGXLSXHMDQQFFQX

SEQ ID NO: 14009 - protein, 1805 aa, Homo sapiens
  MOD_RES (25)..(25): Selenocysteine
  MOD_RES (39)..(39): Selenocysteine
  MOD_RES (52)..(52): Selenocysteine
  MOD_RES (63)..(63): Selenocysteine
  MOD_RES (87)..(87): Selenocysteine
  MOD_RES (90)..(90): Selenocysteine
  MOD_RES (94)..(95): Selenocysteine
  MOD_RES (164)..(164): Selenocysteine
  MOD_RES (168)..(168): Selenocysteine
  MOD_RES (183)..(183): Selenocysteine
  MOD_RES (210)..(210): Selenocysteine
  MOD_RES (242)..(242): Selenocysteine
  MOD_RES (246)..(246): Selenocysteine
  MOD_RES (256)..(256): Selenocysteine
  MOD_RES (263)..(263): Selenocysteine
  MOD_RES (292)..(293): Selenocysteine
  MOD_RES (295)..(295): Selenocysteine
  MOD_RES (297)..(297): Selenocysteine
  MOD_RES (301)..(301): Selenocysteine
  MOD_RES (309)..(309): Selenocysteine
  MOD_RES (326)..(326): Selenocysteine
  MOD_RES (338)..(338): Selenocysteine
  MOD_RES (383)..(383): Selenocysteine
  MOD_RES (386)..(386): Selenocysteine
  MOD_RES (393)..(393): Selenocysteine
  MOD_RES (395)..(395): Selenocysteine
  MOD_RES (421)..(421): Selenocysteine
  MOD_RES (456)..(456): Selenocysteine
  MOD_RES (489)..(489): Selenocysteine
  MOD_RES (494)..(494): Selenocysteine
  MOD_RES (546)..(546): Selenocysteine
  MOD_RES (569)..(569): Selenocysteine
  MOD_RES (581)..(581): Selenocysteine
  MOD_RES (610)..(610): Selenocysteine
  MOD_RES (612)..(612): Selenocysteine
  MOD_RES (640)..(640): Selenocysteine
  MOD_RES (647)..(647): Selenocysteine
  MOD_RES (681)..(681): Selenocysteine
  MOD_RES (685)..(685): Selenocysteine
  MOD_RES (697)..(697): Selenocysteine
  MOD_RES (776)..(776): Selenocysteine
  MOD_RES (795)..(795): Selenocysteine
  MOD_RES (805)..(805): Selenocysteine
  MOD_RES (813)..(813): Selenocysteine
  MOD_RES (829)..(829): Selenocysteine
  MOD_RES (837)..(837): Selenocysteine
  MOD_RES (867)..(867): Selenocysteine
  MOD_RES (882)..(882): Selenocysteine
  MOD_RES (886)..(886): Selenocysteine
  MOD_RES (902)..(902): Selenocysteine
  MOD_RES (922)..(922): Selenocysteine
  MOD_RES (924)..(924): Selenocysteine
  MOD_RES (971)..(971): Selenocysteine
  MOD_RES (973)..(973): Selenocysteine
  MOD_RES (982)..(982): Selenocysteine
  MOD_RES (1028)..(1028): Selenocysteine
  MOD_RES (1032)..(1032): Selenocysteine
  MOD_RES (1098)..(1099): Selenocysteine
  MOD_RES (1113)..(1113): Selenocysteine
  MOD_RES (1184)..(1184): Selenocysteine
  MOD_RES (1215)..(1215): Selenocysteine
  MOD_RES (1234)..(1234): Selenocysteine
  MOD_RES (1236)..(1236): Selenocysteine
  MOD_RES (1246)..(1246): Selenocysteine
  MOD_RES (1251)..(1251): Selenocysteine
  MOD_RES (1297)..(1297): Selenocysteine
  MOD_RES (1318)..(1318): Selenocysteine
  MOD_RES (1369)..(1369): Selenocysteine
  MOD_RES (1385)..(1385): Selenocysteine
  MOD_RES (1392)..(1394): Selenocysteine
  MOD_RES (1401)..(1401): Selenocysteine
  MOD_RES (1414)..(1414): Selenocysteine
  MOD_RES (1417)..(1417): Selenocysteine
  MOD_RES (1419)..(1419): Selenocysteine
  MOD_RES (1426)..(1426): Selenocysteine
  MOD_RES (1434)..(1435): Selenocysteine
  MOD_RES (1442)..(1442): Selenocysteine
  MOD_RES (1444)..(1444): Selenocysteine
  MOD_RES (1507)..(1507): Selenocysteine
  MOD_RES (1513)..(1513): Selenocysteine
  MOD_RES (1515)..(1515): Selenocysteine
  MOD_RES (1525)..(1525): Selenocysteine
  MOD_RES (1566)..(1566): Selenocysteine
  MOD_RES (1600)..(1600): Selenocysteine
  MOD_RES (1620)..(1620): Selenocysteine
  MOD_RES (1623)..(1623): Selenocysteine
  MOD_RES (1633)..(1633): Selenocysteine
  MOD_RES (1660)..(1660): Selenocysteine
  MOD_RES (1671)..(1671): Selenocysteine
  MOD_RES (1685)..(1685): Selenocysteine
  MOD_RES (1703)..(1704): Selenocysteine
  MOD_RES (1716)..(1716): Selenocysteine
  MOD_RES (1747)..(1749): Selenocysteine
  MOD_RES (1751)..(1751): Selenocysteine
  MOD_RES (1754)..(1754): Selenocysteine
  MOD_RES (1763)..(1763): Selenocysteine
  MOD_RES (1776)..(1776): Selenocysteine
  MOD_RES (1780)..(1780): Selenocysteine
  MOD_RES (1787)..(1787): Selenocysteine
  MOD_RES (1789)..(1790): Selenocysteine
  MOD_RES (1793)..(1793): Selenocysteine
  MOD_RES (1796)..(1796): Selenocysteine
  MOD_RES (1805)..(1805): Selenocysteine
MAGPRPSPWARLLLAALISVSLSGXLANRCKKAPVKSCXECVRVDKDCAYCXDEMFRDRRCNXQAELLAAGCQRESIVVMESSFQIXEEXQIDXXLRRSQMSPQGLRVRLRPGEERHFELEVFEPLESPVDLYILMDFSNSMSDDLDNLKKMGQNLARVLSQLXSDYXIGFGKFVDKVSVPQXDMRPEKLKEPWPNSDPPFSFKNVISLXEDVDEFRNKLQGERISGNLDAPEGGFDAILQXAVCXRDIGWRPDSXHLLVFSXESAFHYEADGANVLAGIMSRNDERCHLDXXGXYXQYRXQDYPSVPXLVRLLAKHNIIPIFAVXNYSYSYYEKLHXYFPVSSLGVLQEDSSNIVELLEEAFNRIRSNLDIRALDSPRGLRXEVXSKMFQKXRXGSFHIRRGEVGIYQVQLRALEHVDGXHVCQLPEDQKGNIHLKPSFSDGLKMDAGIICDVCXCELQKEVRSARCSFNGDFVCGQCVCSEGWSGQXCNCSXGSLSDIQPCLREGEDKPCSGRGECQCGHCVCYGEGRYEGQFCEYDNFQCPRXSGFLCNDRGRCSMGQCVCEPGWXGPSCDCPLSNAXCIDSNGGICNGRGHCECGRCHCHQQSLYXDXICEINYSAIHPGLCEDLRSCVQCQAWGXGEKKGRXCEECNFKVKMVDELKRAEEVVVRCSFRDEDDDCXYSYXMEGDGAPGPNSXVLVHKKKDCPPGSFWWLIPLLLLLLPLLALLLLLCWKYCACCKACLALLPCCNRGHMVGFKEDHYMLRENLMASDHLDXPMLRSGNLKGRDVVRWKVXNNMQRPGFAXHAASINPXELVPYGLSLRLARLCXENLLKPDXRECAQLRQEVEENLNEVYRQISGVHKLQQXKFRQQPNAGKKQDHXIVDXVLMAPRSAKPALLKLXEKQVEQRAFHDLKVAPGYYXLXADQDARGMVEFQEGVELVDVRVPLFIRPEDDDEKQLLVEAIDVPAGXAXLGRRLVNIXIIKEQARDVVSFEQPEFSVSRGDQVARIPVIRRVLDGGKSQVSYRXQDGXAQGNRDYIPVEGELLFQPGEAWKELQVKLLELQEVDSLLRGRQVRRFHVQLSNPKFGAHLGQPHSXXIIIRDPDELDRSFXSQMLSSQPPPHGDLGAPQNPNAKAAGSRKIHFNWLPPSGKPMGYRVKYWIQGDSESEAHLLDSKVPSVELXNLYPYCDYEMKVCAYGAQGEGPYSSLVSCRXHQEVPSEPGRLAFNVVSSXVXQLSWAEPAEXNGEIXAYEVCYGLVNDDNRPIGPMKKVLVDNPKNRMLLIENLRESQPYRYXVKARNGAGWGPEREAIINLAXQPKRPMSIPIIPDIPIVDAQSGEDYDSFLMYSDDVLRSPSGSQRPSVSDDXEHLVNGRMDFAFPGSXNSLHRMXXXSAAAYGXHLSPHVPHRVLSXSSXLXRDYNSLXRSEHSHSXXLPRDYSXLXSVSSHGLPPIWEHGRSRLPLSWALGSRSRAQMKGFPPSRGPRDSIILAGRPAAPSWGPDSRLXAGVPDXPXRLVFSALGPXSLRVSWQEPRCERPLQGYSVEYQLLNGGELHRLNIPNPAQXSVVVEDLLPNHSYVFRVRAQSQEGWGREREGVIXIESQVHPQSPLCPLPGSAFXLSXPSAPGPLVFXALSPDSLQLSWERPRRPNGDIVGYLVXCEMAQGGGPAXAFRVDGDSPESRLXVPGLSENVPYKFKVQARXXEGFGPEREGIIXIESQDGGPFPQLGSRAGLFQHPLQSEYSSIXXXHXSAXEPFLVDGLXLGAQHLEAGGSLXRHVXQEFVSRXLXXSGXLSXHMDQQFFQX

SEQ ID NO: 14010 - protein, 1822 aa, Homo sapiens
  MOD_RES (25)..(25): Selenocysteine
  MOD_RES (39)..(39): Selenocysteine
  MOD_RES (52)..(52): Selenocysteine
  MOD_RES (63)..(63): Selenocysteine
  MOD_RES (87)..(87): Selenocysteine
  MOD_RES (90)..(90): Selenocysteine
  MOD_RES (94)..(95): Selenocysteine
  MOD_RES (164)..(164): Selenocysteine
  MOD_RES (168)..(168): Selenocysteine
  MOD_RES (183)..(183): Selenocysteine
  MOD_RES (210)..(210): Selenocysteine
  MOD_RES (242)..(242): Selenocysteine
  MOD_RES (246)..(246): Selenocysteine
  MOD_RES (256)..(256): Selenocysteine
  MOD_RES (263)..(263): Selenocysteine
  MOD_RES (292)..(293): Selenocysteine
  MOD_RES (295)..(295): Selenocysteine
  MOD_RES (297)..(297): Selenocysteine
  MOD_RES (301)..(301): Selenocysteine
  MOD_RES (309)..(309): Selenocysteine
  MOD_RES (326)..(326): Selenocysteine
  MOD_RES (338)..(338): Selenocysteine
  MOD_RES (383)..(383): Selenocysteine
  MOD_RES (386)..(386): Selenocysteine
  MOD_RES (393)..(393): Selenocysteine
  MOD_RES (395)..(395): Selenocysteine
  MOD_RES (421)..(421): Selenocysteine
  MOD_RES (456)..(456): Selenocysteine
  MOD_RES (489)..(489): Selenocysteine
  MOD_RES (494)..(494): Selenocysteine
  MOD_RES (546)..(546): Selenocysteine
  MOD_RES (569)..(569): Selenocysteine
  MOD_RES (581)..(581): Selenocysteine
  MOD_RES (610)..(610): Selenocysteine
  MOD_RES (612)..(612): Selenocysteine
  MOD_RES (640)..(640): Selenocysteine
  MOD_RES (647)..(647): Selenocysteine
  MOD_RES (681)..(681): Selenocysteine
  MOD_RES (685)..(685): Selenocysteine
  MOD_RES (697)..(697): Selenocysteine
  MOD_RES (776)..(776): Selenocysteine
  MOD_RES (795)..(795): Selenocysteine
  MOD_RES (805)..(805): Selenocysteine
  MOD_RES (813)..(813): Selenocysteine
  MOD_RES (829)..(829): Selenocysteine
  MOD_RES (837)..(837): Selenocysteine
  MOD_RES (867)..(867): Selenocysteine
  MOD_RES (882)..(882): Selenocysteine
  MOD_RES (886)..(886): Selenocysteine
  MOD_RES (902)..(902): Selenocysteine
  MOD_RES (922)..(922): Selenocysteine
  MOD_RES (924)..(924): Selenocysteine
  MOD_RES (971)..(971): Selenocysteine
  MOD_RES (973)..(973): Selenocysteine
  MOD_RES (982)..(982): Selenocysteine
  MOD_RES (1028)..(1028): Selenocysteine
  MOD_RES (1032)..(1032): Selenocysteine
  MOD_RES (1098)..(1099): Selenocysteine
  MOD_RES (1113)..(1113): Selenocysteine
  MOD_RES (1184)..(1184): Selenocysteine
  MOD_RES (1215)..(1215): Selenocysteine
  MOD_RES (1234)..(1234): Selenocysteine
  MOD_RES (1236)..(1236): Selenocysteine
  MOD_RES (1246)..(1246): Selenocysteine
  MOD_RES (1251)..(1251): Selenocysteine
  MOD_RES (1297)..(1297): Selenocysteine
  MOD_RES (1318)..(1318): Selenocysteine
  MOD_RES (1369)..(1369): Selenocysteine
  MOD_RES (1389)..(1389): Selenocysteine
  MOD_RES (1434)..(1434): Selenocysteine
  MOD_RES (1455)..(1455): Selenocysteine
  MOD_RES (1462)..(1464): Selenocysteine
  MOD_RES (1471)..(1471): Selenocysteine
  MOD_RES (1484)..(1484): Selenocysteine
  MOD_RES (1487)..(1487): Selenocysteine
  MOD_RES (1489)..(1489): Selenocysteine
  MOD_RES (1496)..(1496): Selenocysteine
  MOD_RES (1504)..(1505): Selenocysteine
  MOD_RES (1512)..(1512): Selenocysteine
  MOD_RES (1514)..(1514): Selenocysteine
  MOD_RES (1524)..(1524): Selenocysteine
  MOD_RES (1530)..(1530): Selenocysteine
  MOD_RES (1532)..(1532): Selenocysteine
  MOD_RES (1542)..(1542): Selenocysteine
  MOD_RES (1583)..(1583): Selenocysteine
  MOD_RES (1617)..(1617): Selenocysteine
  MOD_RES (1637)..(1637): Selenocysteine
  MOD_RES (1640)..(1640): Selenocysteine
  MOD_RES (1650)..(1650): Selenocysteine
  MOD_RES (1677)..(1677): Selenocysteine
  MOD_RES (1688)..(1688): Selenocysteine
  MOD_RES (1702)..(1702): Selenocysteine
  MOD_RES (1720)..(1721): Selenocysteine
  MOD_RES (1733)..(1733): Selenocysteine
  MOD_RES (1764)..(1766): Selenocysteine
  MOD_RES (1768)..(1768): Selenocysteine
  MOD_RES (1771)..(1771): Selenocysteine
  MOD_RES (1780)..(1780): Selenocysteine
  MOD_RES (1793)..(1793): Selenocysteine
  MOD_RES (1797)..(1797): Selenocysteine
  MOD_RES (1804)..(1804): Selenocysteine
  MOD_RES (1806)..(1807): Selenocysteine
  MOD_RES (1810)..(1810): Selenocysteine
  MOD_RES (1813)..(1813): Selenocysteine
  MOD_RES (1822)..(1822): Selenocysteine
MAGPRPSPWARLLLAALISVSLSGXLANRCKKAPVKSCXECVRVDKDCAYCXDEMFRDRRCNXQAELLAAGCQRESIVVMESSFQIXEEXQIDXXLRRSQMSPQGLRVRLRPGEERHFELEVFEPLESPVDLYILMDFSNSMSDDLDNLKKMGQNLARVLSQLXSDYXIGFGKFVDKVSVPQXDMRPEKLKEPWPNSDPPFSFKNVISLXEDVDEFRNKLQGERISGNLDAPEGGFDAILQXAVCXRDIGWRPDSXHLLVFSXESAFHYEADGANVLAGIMSRNDERCHLDXXGXYXQYRXQDYPSVPXLVRLLAKHNIIPIFAVXNYSYSYYEKLHXYFPVSSLGVLQEDSSNIVELLEEAFNRIRSNLDIRALDSPRGLRXEVXSKMFQKXRXGSFHIRRGEVGIYQVQLRALEHVDGXHVCQLPEDQKGNIHLKPSFSDGLKMDAGIICDVCXCELQKEVRSARCSFNGDFVCGQCVCSEGWSGQXCNCSXGSLSDIQPCLREGEDKPCSGRGECQCGHCVCYGEGRYEGQFCEYDNFQCPRXSGFLCNDRGRCSMGQCVCEPGWXGPSCDCPLSNAXCIDSNGGICNGRGHCECGRCHCHQQSLYXDXICEINYSAIHPGLCEDLRSCVQCQAWGXGEKKGRXCEECNFKVKMVDELKRAEEVVVRCSFRDEDDDCXYSYXMEGDGAPGPNSXVLVHKKKDCPPGSFWWLIPLLLLLLPLLALLLLLCWKYCACCKACLALLPCCNRGHMVGFKEDHYMLRENLMASDHLDXPMLRSGNLKGRDVVRWKVXNNMQRPGFAXHAASINPXELVPYGLSLRLARLCXENLLKPDXRECAQLRQEVEENLNEVYRQISGVHKLQQXKFRQQPNAGKKQDHXIVDXVLMAPRSAKPALLKLXEKQVEQRAFHDLKVAPGYYXLXADQDARGMVEFQEGVELVDVRVPLFIRPEDDDEKQLLVEAIDVPAGXAXLGRRLVNIXIIKEQARDVVSFEQPEFSVSRGDQVARIPVIRRVLDGGKSQVSYRXQDGXAQGNRDYIPVEGELLFQPGEAWKELQVKLLELQEVDSLLRGRQVRRFHVQLSNPKFGAHLGQPHSXXIIIRDPDELDRSFXSQMLSSQPPPHGDLGAPQNPNAKAAGSRKIHFNWLPPSGKPMGYRVKYWIQGDSESEAHLLDSKVPSVELXNLYPYCDYEMKVCAYGAQGEGPYSSLVSCRXHQEVPSEPGRLAFNVVSSXVXQLSWAEPAEXNGEIXAYEVCYGLVNDDNRPIGPMKKVLVDNPKNRMLLIENLRESQPYRYXVKARNGAGWGPEREAIINLAXQPKRPMSIPIIPDIPIVDAQSGEDYDSFLMYSDDVLRSPSGSQRPSVSDDXGCGWKFEPLLGEELDLRRVXWRLPPELIPRLSASSGRSSDAEAPHGPPDDGGAGGKGGSLPRSAXPGPPGEHLVNGRMDFAFPGSXNSLHRMXXXSAAAYGXHLSPHVPHRVLSXSSXLXRDYNSLXRSEHSHSXXLPRDYSXLXSVSSHDSRLXAGVPDXPXRLVFSALGPXSLRVSWQEPRCERPLQGYSVEYQLLNGGELHRLNIPNPAQXSVVVEDLLPNHSYVFRVRAQSQEGWGREREGVIXIESQVHPQSPLCPLPGSAFXLSXPSAPGPLVFXALSPDSLQLSWERPRRPNGDIVGYLVXCEMAQGGGPAXAFRVDGDSPESRLXVPGLSENVPYKFKVQARXXEGFGPEREGIIXIESQDGGPFPQLGSRAGLFQHPLQSEYSSIXXXHXSAXEPFLVDGLXLGAQHLEAGGSLXRHVXQEFVSRXLXXSGXLSXHMDQQFFQX

SEQ ID NO: 14011 - protein, 114 aa, Homo sapiens
  MOD_RES (26)..(26): Selenocysteine
  MOD_RES (30)..(30): Selenocysteine
  MOD_RES (45)..(45): Selenocysteine
  MOD_RES (72)..(72): Selenocysteine
  MOD_RES (90)..(90): Selenocysteine
  MOD_RES (104)..(104): Selenocysteine
SNSMSDDLDNLKKMGQNLARVLSQLXSDYXIGFGKFVDKVSVPQXDMRPEKLKEPWPNSDPPFSFKNVISLXEDVDEFRNKLQGERISAXPSLHPWGPSPPACXEQGLGVSWEA

SEQ ID NO: 14012 - protein, 63 aa, Homo sapiens
  MOD_RES (1)..(1): Any amino acid
  MOD_RES (4)..(5): Selenocysteine
  MOD_RES (17)..(17): Selenocysteine
  MOD_RES (48)..(50): Selenocysteine
  MOD_RES (52)..(52): Selenocysteine
  MOD_RES (55)..(55): Selenocysteine
XARXXEGFGPEREGIIXIESQDGGPFPQLGSRAGLFQHPLQSEYSSIXXXHXSAXEPFLVGEH

SEQ ID NO: 14013 - protein, 201 aa, Homo sapiens
  MOD_RES (1)..(1): Any amino acid
  MOD_RES (2)..(2): Selenocysteine
  MOD_RES (9)..(11): Selenocysteine
  MOD_RES (18)..(18): Selenocysteine
  MOD_RES (31)..(31): Selenocysteine
  MOD_RES (34)..(34): Selenocysteine
  MOD_RES (36)..(36): Selenocysteine
  MOD_RES (43)..(43): Selenocysteine
  MOD_RES (51)..(52): Selenocysteine
  MOD_RES (59)..(59): Selenocysteine
  MOD_RES (61)..(61): Selenocysteine
  MOD_RES (80)..(80): Selenocysteine
  MOD_RES (114)..(114): Selenocysteine
  MOD_RES (134)..(134): Selenocysteine
  MOD_RES (137)..(137): Selenocysteine
  MOD_RES (147)..(147): Selenocysteine
  MOD_RES (174)..(174): Selenocysteine
  MOD_RES (185)..(185): Selenocysteine
  MOD_RES (199)..(199): Selenocysteine
XXNSLHRMXXXSAAAYGXHLSPHVPHRVLSXSSXLXRDYNSLXRSEHSHSXXLPRDYSXLXSVSSHGELHRLNIPNPAQXSVVVEDLLPNHSYVFRVRAQSQEGWGREREGVIXIESQVHPQSPLCPLPGSAFXLSXPSAPGPLVFXALSPDSLQLSWERPRRPNGDIVGYLVXCEMAQGGGPAXAFRVDGDSPESRLXVP

SEQ ID NO: 14014 - protein, 324 aa, Homo sapiens
  MOD_RES (6)..(6): Selenocysteine
  MOD_RES (16)..(16): Selenocysteine
  MOD_RES (37)..(37): Selenocysteine
  MOD_RES (43)..(43): Selenocysteine
  MOD_RES (68)..(68): Selenocysteine
  MOD_RES (126)..(126): Selenocysteine
  MOD_RES (128)..(128): Selenocysteine
  MOD_RES (149)..(149): Selenocysteine
  MOD_RES (166)..(166): Selenocysteine
  MOD_RES (186)..(186): Selenocysteine
  MOD_RES (190)..(190): Selenocysteine
  MOD_RES (209)..(209): Selenocysteine
  MOD_RES (224)..(224): Selenocysteine
  MOD_RES (317)..(317): Selenocysteine
  MOD_RES (321)..(321): Selenocysteine
IRSLGXKLAEEMRKLXSNFRLGFGSFVDKDISPFSYXAPRYQXNPCIGYKLFPNCVPSFGFRHLLPLXDRVDSFNEEVRKQRVSRNRDAPEGGFDAVLQAAVCKSIRSKVELSVWDQPEDLNLFFXAXCQDGVSYPGQRKCEGLKIGDXASFEVSLEARSCPSRHXEHVFALRPVGFRDSLEVGVXYNCXCGCSVGLEPNSARCNGSGXYVCGLCECSPGYLGXRCECQDGENQSVYQNLCREAEGKPLCSGRGDCSCNQCSCFESEFGKIYGPFCECDNFSCARNKGVLCSGHGECHCGECKCHAGYIGDNCNCSXDISXCRG

SEQ ID NO: 14015 - protein, 799 aa, Homo sapiens
  MOD_RES (29)..(29): Selenocysteine
  MOD_RES (34)..(34): Selenocysteine
  MOD_RES (61)..(61): Selenocysteine
  MOD_RES (110)..(110): Selenocysteine
  MOD_RES (124)..(125): Selenocysteine
  MOD_RES (162)..(162): Selenocysteine
  MOD_RES (172)..(172): Selenocysteine
  MOD_RES (193)..(193): Selenocysteine
  MOD_RES (199)..(199): Selenocysteine
  MOD_RES (224)..(224): Selenocysteine
  MOD_RES (276)..(277): Selenocysteine
  MOD_RES (309)..(309): Selenocysteine
  MOD_RES (338)..(338): Selenocysteine
  MOD_RES (349)..(349): Selenocysteine
  MOD_RES (355)..(356): Selenocysteine
  MOD_RES (398)..(398): Selenocysteine
  MOD_RES (400)..(400): Selenocysteine
  MOD_RES (421)..(421): Selenocysteine
  MOD_RES (438)..(438): Selenocysteine
  MOD_RES (458)..(458): Selenocysteine
  MOD_RES (462)..(462): Selenocysteine
  MOD_RES (481)..(481): Selenocysteine
  MOD_RES (496)..(496): Selenocysteine
  MOD_RES (589)..(589): Selenocysteine
  MOD_RES (593)..(593): Selenocysteine
  MOD_RES (616)..(616): Selenocysteine
  MOD_RES (630)..(630): Selenocysteine
  MOD_RES (637)..(637): Selenocysteine
  MOD_RES (656)..(656): Selenocysteine
  MOD_RES (667)..(667): Selenocysteine
  MOD_RES (671)..(671): Selenocysteine
  MOD_RES (686)..(686): Selenocysteine
  MOD_RES (695)..(695): Selenocysteine
  MOD_RES (707)..(707): Selenocysteine
  MOD_RES (717)..(717): Selenocysteine
  MOD_RES (722)..(722): Selenocysteine
  MOD_RES (747)..(747): Selenocysteine
  MOD_RES (780)..(780): Selenocysteine
  MOD_RES (782)..(782): Selenocysteine
  MOD_RES (786)..(786): Selenocysteine
  MOD_RES (797)..(797): Selenocysteine
MPRAPAPLYACLLGLCALLPRLAGLNICXSGSAXSCEECLLIHPKCAWCSKEDFGSPRSIXSRCDLRANLVKNGCGGEIESPASSFHVLRSLPLSSKGSGSAGWDVIQMXPQEIAVNLRPGDKXXFQLQVRQVEDYPVDLYYLMDLSLSMKDDLDNIRSLGXKLAEEMRKLXSNFRLGFGSFVDKDISPFSYXAPRYQXNPCIGYKLFPNCVPSFGFRHLLPLXDRVDSFNEEVRKQRVSRNRDAPEGGFDAVLQAAVCKEKIGWRKDALHLLVFXXDDVPHIALDGKLGGLVQPHDGQCHLNEANEYXASNQMDYPSLALLGEKLAENNINLIFAVXKNHYMLYKNFXALIPGXXVEILDGDSKNIIQLIINAYNSIRSKVELSVWDQPEDLNLFFXAXCQDGVSYPGQRKCEGLKIGDXASFEVSLEARSCPSRHXEHVFALRPVGFRDSLEVGVXYNCXCGCSVGLEPNSARCNGSGXYVCGLCECSPGYLGXRCECQDGENQSVYQNLCREAEGKPLCSGRGDCSCNQCSCFESEFGKIYGPFCECDNFSCARNKGVLCSGHGECHCGECKCHAGYIGDNCNCSXDISXCRGRDGQICSERGHCLCGQCQCXEPGAFGEMCEKCPXCPDACSXKRDCVECLLLHSGKPDNQXCHSLCRDEVIXWVDXIVKDDQEAVLCFYKXAKDCVMMFXYVELPSGKSNLXVLREPECGNXPNAMXILLAVVGSILLVGLALLAIWKLLVXIHDRREFAKFQSERSRARYEMASNPLYRKPISXHXVDFXFNKFNKSYNGXVD

SEQ ID NO: 14016 - protein, 40 aa, Homo sapiens
  MOD_RES (2)..(2): Selenocysteine
  MOD_RES (24)..(24): Selenocysteine
  MOD_RES (35)..(35): Selenocysteine
MXPQEIAVNLRPEQWPRVPDGGLXRDAQCLGNGLXQCCMW

SEQ ID NO: 14017 - protein, 59 aa, Homo sapiens
  MOD_RES (2)..(2): Selenocysteine
  MOD_RES (16)..(17): Selenocysteine
  MOD_RES (54)..(54): Selenocysteine
MXPQEIAVNLRPGDKXXFQLQVRQVEDYPVDLYYLMDLSLSMKDDLDNIRSLGXKLAEE

SEQ ID NO: 14018 - protein, 79 aa, Homo sapiens
  MOD_RES (2)..(2): Selenocysteine
  MOD_RES (16)..(17): Selenocysteine
  MOD_RES (54)..(54): Selenocysteine
  MOD_RES (64)..(64): Selenocysteine
MXPQEIAVNLRPGDKXXFQLQVRQVEDYPVDLYYLMDLSLSMKDDLDNIRSLGXKLAEEMRKLXSNFRLGFGSFVDKDI

SEQ ID NO: 14019 - protein, 139 aa, Homo sapiens
  MOD_RES (2)..(2): Selenocysteine
  MOD_RES (16)..(17): Selenocysteine
  MOD_RES (54)..(54): Selenocysteine
  MOD_RES (64)..(64): Selenocysteine
  MOD_RES (85)..(85): Selenocysteine
  MOD_RES (91)..(91): Selenocysteine
  MOD_RES (116)..(116): Selenocysteine
MXPQEIAVNLRPGDKXXFQLQVRQVEDYPVDLYYLMDLSLSMKDDLDNIRSLGXKLAEEMRKLXSNFRLGFGSFVDKDISPFSYXAPRYQXNPCIGYKLFPNCVPSFGFRHLLPLXDRVDSFNEEVRKQRVSRNRDAPE

SEQ ID NO: 14020 - protein, 401 aa, Homo sapiens
  MOD_RES (1)..(1): Any amino acid
  MOD_RES (11)..(12): Selenocysteine
  MOD_RES (44)..(44): Selenocysteine
  MOD_RES (73)..(73): Selenocysteine
  MOD_RES (84)..(84): Selenocysteine
  MOD_RES (90)..(91): Selenocysteine
  MOD_RES (128)..(128): Selenocysteine
  MOD_RES (148)..(148): Selenocysteine
  MOD_RES (152)..(152): Selenocysteine
  MOD_RES (171)..(171): Selenocysteine
  MOD_RES (186)..(186): Selenocysteine
  MOD_RES (279)..(279): Selenocysteine
  MOD_RES (283)..(283): Selenocysteine
  MOD_RES (306)..(306): Selenocysteine
  MOD_RES (320)..(320): Selenocysteine
  MOD_RES (327)..(327): Selenocysteine
  MOD_RES (346)..(346): Selenocysteine
  MOD_RES (357)..(357): Selenocysteine
  MOD_RES (361)..(361): Selenocysteine
  MOD_RES (376)..(376): Selenocysteine
  MOD_RES (385)..(385): Selenocysteine
  MOD_RES (397)..(397): Selenocysteine
XKDALHLLVFXXDDVPHIALDGKLGGLVQPHDGQCHLNEANEYXASNQMDYPSLALLGEKLAENNINLIFAVXKNHYMLYKNFXALIPGXXVEILDGDSKNIIQLIINAYNASFEVSLEARSCPSRHXEHVFALRPVGFRDSLEVGVXYNCXCGCSVGLEPNSARCNGSGXYVCGLCECSPGYLGXRCECQDGENQSVYQNLCREAEGKPLCSGRGDCSCNQCSCFESEFGKIYGPFCECDNFSCARNKGVLCSGHGECHCGECKCHAGYIGDNCNCSXDISXCRGRDGQICSERGHCLCGQCQCXEPGAFGEMCEKCPXCPDACSXKRDCVECLLLHSGKPDNQXCHSLCRDEVIXWVDXIVKDDQEAVLCFYKXAKDCVMMFXYVELPSGKSNLXVLRE

SEQ ID NO: 14021 - protein, 263 aa, Homo sapiens
  MOD_RES (1)..(1): Any amino acid
  MOD_RES (21)..(21): Selenocysteine
  MOD_RES (73)..(74): Selenocysteine
  MOD_RES (106)..(106): Selenocysteine
  MOD_RES (135)..(135): Selenocysteine
  MOD_RES (165)..(165): Selenocysteine
  MOD_RES (167)..(167): Selenocysteine
  MOD_RES (188)..(188): Selenocysteine
  MOD_RES (205)..(205): Selenocysteine
  MOD_RES (225)..(225): Selenocysteine
  MOD_RES (229)..(229): Selenocysteine
  MOD_RES (248)..(248): Selenocysteine
  MOD_RES (263)..(263): Selenocysteine
XYKLFPNCVPSFGFRHLLPLXDRVDSFNEEVRKQRVSRNRDAPEGGFDAVLQAAVCKEKIGWRKDALHLLVFXXDDVPHIALDGKLGGLVQPHDGQCHLNEANEYXASNQMDYPSLALLGEKLAENNINLIFAVXKNHYMLYKSIRSKVELSVWDQPEDLNLFFXAXCQDGVSYPGQRKCEGLKIGDXASFEVSLEARSCPSRHXEHVFALRPVGFRDSLEVGVXYNCXCGCSVGLEPNSARCNGSGXYVCGLCECSPGYLGX

SEQ ID NO: 14022 - protein, 693 aa, Homo sapiens
  MOD_RES (25)..(25): Selenocysteine
  MOD_RES (33)..(33): Selenocysteine
  MOD_RES (56)..(56): Selenocysteine
  MOD_RES (72)..(72): Selenocysteine
  MOD_RES (93)..(94): Selenocysteine
  MOD_RES (112)..(112): Selenocysteine
  MOD_RES (122)..(122): Selenocysteine
  MOD_RES (143)..(143): Selenocysteine
  MOD_RES (210)..(210): Selenocysteine
  MOD_RES (216)..(216): Selenocysteine
  MOD_RES (236)..(236): Selenocysteine
  MOD_RES (254)..(254): Selenocysteine
  MOD_RES (288)..(288): Selenocysteine
  MOD_RES (296)..(296): Selenocysteine
  MOD_RES (303)..(303): Selenocysteine
  MOD_RES (319)..(319): Selenocysteine
  MOD_RES (325)..(325): Selenocysteine
  MOD_RES (404)..(404): Selenocysteine
  MOD_RES (475)..(475): Selenocysteine
  MOD_RES (482)..(483): Selenocysteine
  MOD_RES (485)..(485): Selenocysteine
  MOD_RES (510)..(510): Selenocysteine
  MOD_RES (518)..(518): Selenocysteine
  MOD_RES (524)..(524): Selenocysteine
  MOD_RES (560)..(560): Selenocysteine
  MOD_RES (586)..(586): Selenocysteine
  MOD_RES (590)..(591): Selenocysteine
  MOD_RES (597)..(597): Selenocysteine
  MOD_RES (661)..(661): Selenocysteine
  MOD_RES (663)..(663): Selenocysteine
  MOD_RES (671)..(671): Selenocysteine
  MOD_RES (673)..(673): Selenocysteine
  MOD_RES (678)..(678): Selenocysteine
  MOD_RES (691)..(691): Selenocysteine
MGIELLCLFFLFLGRNDHVQGGAQXLQVHVRQXEDYPVDLYYLMDLSASMDDDLNXIKELGSRLSKEMSKLXSNFRLGFGSFVEKPVSPFVKXXPEEIANPCSSIPYFCLPXFGFKHILPLXNDAERFNEIVKNQKISANIDXPEGGFDAIMQAAVCKEKIGWRNDSLHLLVFVSDADSHFGMDSKLAGIVIPNDGLCHLDSKNEYSMSXVLEYPXIGQLIDKLVQNNVLLIFAVXQEQVHLYENYAKLIPGAXVGLLQKDSGNILQLIISAYEELRSEVELEVLGDXEGLNLSFXAICNNGXLFQHQKKCSHMKVGDXASFSVXVNIPHCERRSRHIIIKPVGLGDALELLVSPECNCDCQKEVEVNSSKCHHGNGSFQCGVCACHPGHMGPRCECGEDMLSXDSCKEAPDHPSCSGRGDCYCGQCICHLSPYGNIYGPYCQCDNFSCVRHKGLLCGGNGDCDCGECVCRSGWXGEYCNCXXSXDSCVSEDGVLCSGRGDCVCGKCVCXNPGASGPXCERCPXCGDPCNSKRSCIECHLSAAGQAREECVDKCKLAGAXISEEEDFSKDGSVSCSLQGENECLIXFLIXXDNEGKXIIHSINEKDCPKPPNIPMIMLGVSLAILLIGVVLLCIWKLLVSFHDRKEVAKFEAERSKAKWQXGXNPLYRGSXSXFKNVXYKHREKQKVDLSXDC

SEQ ID NO: 14023 - protein, 681 aa, Homo sapiens
  MOD_RES (30)..(30): Selenocysteine
  MOD_RES (50)..(50): Selenocysteine
  MOD_RES (61)..(61): Selenocysteine
  MOD_RES (120)..(120): Selenocysteine
  MOD_RES (128)..(128): Selenocysteine
  MOD_RES (151)..(151): Selenocysteine
  MOD_RES (167)..(167): Selenocysteine
  MOD_RES (188)..(189): Selenocysteine
  MOD_RES (207)..(207): Selenocysteine
  MOD_RES (217)..(217): Selenocysteine
  MOD_RES (238)..(238): Selenocysteine
  MOD_RES (305)..(305): Selenocysteine
  MOD_RES (311)..(311): Selenocysteine
  MOD_RES (331)..(331): Selenocysteine
  MOD_RES (349)..(349): Selenocysteine
  MOD_RES (383)..(383): Selenocysteine
  MOD_RES (391)..(391): Selenocysteine
  MOD_RES (398)..(398): Selenocysteine
  MOD_RES (414)..(414): Selenocysteine
  MOD_RES (420)..(420): Selenocysteine
  MOD_RES (499)..(499): Selenocysteine
  MOD_RES (574)..(574): Selenocysteine
  MOD_RES (578)..(579): Selenocysteine
  MOD_RES (585)..(585): Selenocysteine
  MOD_RES (649)..(649): Selenocysteine
  MOD_RES (651)..(651): Selenocysteine
  MOD_RES (659)..(659): Selenocysteine
  MOD_RES (661)..(661): Selenocysteine
  MOD_RES (666)..(666): Selenocysteine
  MOD_RES (679)..(679): Selenocysteine
MGIELLCLFFLFLGRNDHVQGGCALGGAEXCEDCLLIGPQCAWCAQENFXHPSGVGERCDXPANLLAKGCQLNFIENPVSQVEILKNKPLSVGRQKNSSDIVQIAPQSLILKLRPGGAQXLQVHVRQXEDYPVDLYYLMDLSASMDDDLNXIKELGSRLSKEMSKLXSNFRLGFGSFVEKPVSPFVKXXPEEIANPCSSIPYFCLPXFGFKHILPLXNDAERFNEIVKNQKISANIDXPEGGFDAIMQAAVCKEKIGWRNDSLHLLVFVSDADSHFGMDSKLAGIVIPNDGLCHLDSKNEYSMSXVLEYPXIGQLIDKLVQNNVLLIFAVXQEQVHLYENYAKLIPGAXVGLLQKDSGNILQLIISAYEELRSEVELEVLGDXEGLNLSFXAICNNGXLFQHQKKCSHMKVGDXASFSVXVNIPHCERRSRHIIIKPVGLGDALELLVSPECNCDCQKEVEVNSSKCHHGNGSFQCGVCACHPGHMGPRCECGEDMLSXDSCKEAPDHPSCSGRGDCYCGQCICHLSPYGNIYGPYCQCDNFSCVRHKGLLCGDFSKDGSVSCSLQGENECLIXFLIXXDNEGKXIIHSINEKDCPKPPNIPMIMLGVSLAILLIGVVLLCIWKLLVSFHDRKEVAKFEAERSKAKWQXGXNPLYRGSXSXFKNVXYKHREKQKVDLSXDC

SEQ ID NO: 14024 - protein, 788 aa, Homo sapiens
  MOD_RES (30)..(30): Selenocysteine
  MOD_RES (50)..(50): Selenocysteine
  MOD_RES (61)..(61): Selenocysteine
  MOD_RES (120)..(120): Selenocysteine
  MOD_RES (128)..(128): Selenocysteine
  MOD_RES (151)..(151): Selenocysteine
  MOD_RES (167)..(167): Selenocysteine
  MOD_RES (188)..(189): Selenocysteine
  MOD_RES (207)..(207): Selenocysteine
  MOD_RES (217)..(217): Selenocysteine
  MOD_RES (238)..(238): Selenocysteine
  MOD_RES (305)..(305): Selenocysteine
  MOD_RES (311)..(311): Selenocysteine
  MOD_RES (331)..(331): Selenocysteine
  MOD_RES (349)..(349): Selenocysteine
  MOD_RES (383)..(383): Selenocysteine
  MOD_RES (391)..(391): Selenocysteine
  MOD_RES (398)..(398): Selenocysteine
  MOD_RES (414)..(414): Selenocysteine
  MOD_RES (420)..(420): Selenocysteine
  MOD_RES (499)..(499): Selenocysteine
  MOD_RES (570)..(570): Selenocysteine
  MOD_RES (577)..(578): Selenocysteine
  MOD_RES (580)..(580): Selenocysteine
  MOD_RES (605)..(605): Selenocysteine
  MOD_RES (613)..(613): Selenocysteine
  MOD_RES (619)..(619): Selenocysteine
  MOD_RES (655)..(655): Selenocysteine
  MOD_RES (681)..(681): Selenocysteine
  MOD_RES (685)..(686): Selenocysteine
  MOD_RES (692)..(692): Selenocysteine
  MOD_RES (756)..(756): Selenocysteine
  MOD_RES (758)..(758): Selenocysteine
  MOD_RES (766)..(766): Selenocysteine
  MOD_RES (768)..(768): Selenocysteine
  MOD_RES (773)..(773): Selenocysteine
  MOD_RES (786)..(786): Selenocysteine
MGIELLCLFFLFLGRNDHVQGGCALGGAEXCEDCLLIGPQCAWCAQENFXHPSGVGERCDXPANLLAKGCQLNFIENPVSQVEILKNKPLSVGRQKNSSDIVQIAPQSLILKLRPGGAQXLQVHVRQXEDYPVDLYYLMDLSASMDDDLNXIKELGSRLSKEMSKLXSNFRLGFGSFVEKPVSPFVKXXPEEIANPCSSIPYFCLPXFGFKHILPLXNDAERFNEIVKNQKISANIDXPEGGFDAIMQAAVCKEKIGWRNDSLHLLVFVSDADSHFGMDSKLAGIVIPNDGLCHLDSKNEYSMSXVLEYPXIGQLIDKLVQNNVLLIFAVXQEQVHLYENYAKLIPGAXVGLLQKDSGNILQLIISAYEELRSEVELEVLGDXEGLNLSFXAICNNGXLFQHQKKCSHMKVGDXASFSVXVNIPHCERRSRHIIIKPVGLGDALELLVSPECNCDCQKEVEVNSSKCHHGNGSFQCGVCACHPGHMGPRCECGEDMLSXDSCKEAPDHPSCSGRGDCYCGQCICHLSPYGNIYGPYCQCDNFSCVRHKGLLCGGNGDCDCGECVCRSGWXGEYCNCXXSXDSCVSEDGVLCSGRGDCVCGKCVCXNPGASGPXCERCPXCGDPCNSKRSCIECHLSAAGQAREECVDKCKLAGAXISEEEDFSKDGSVSCSLQGENECLIXFLIXXDNEGKXIIHSINEKDCPKPPNIPMIMLGVSLAILLIGVVLLCIWKLLVSFHDRKEVAKFEAERSKAKWQXGXNPLYRGSXSXFKNVXYKHREKQKVDLSXDC

SEQ ID NO: 14025 - protein, 70 aa, Homo sapiens
  MOD_RES (30)..(30): Selenocysteine
  MOD_RES (50)..(50): Selenocysteine
MGIELLCLFFLFLGRNDHVQGGCALGGAEXCEDCLLIGPQCAWCAQENFXHPSGVGERWCADSAGACPPD

SEQ ID NO: 14026 - protein, 746 aa, Homo sapiens
  MOD_RES (3)..(3): Selenocysteine
  MOD_RES (8)..(8): Selenocysteine
  MOD_RES (19)..(19): Selenocysteine
  MOD_RES (78)..(78): Selenocysteine
  MOD_RES (86)..(86): Selenocysteine
  MOD_RES (109)..(109): Selenocysteine
  MOD_RES (125)..(125): Selenocysteine
  MOD_RES (146)..(147): Selenocysteine
  MOD_RES (165)..(165): Selenocysteine
  MOD_RES (175)..(175): Selenocysteine
  MOD_RES (196)..(196): Selenocysteine
  MOD_RES (263)..(263): Selenocysteine
  MOD_RES (269)..(269): Selenocysteine
  MOD_RES (289)..(289): Selenocysteine
  MOD_RES (307)..(307): Selenocysteine
  MOD_RES (341)..(341): Selenocysteine
  MOD_RES (349)..(349): Selenocysteine
  MOD_RES (356)..(356): Selenocysteine
  MOD_RES (372)..(372): Selenocysteine
  MOD_RES (378)..(378): Selenocysteine
  MOD_RES (457)..(457): Selenocysteine
  MOD_RES (528)..(528): Selenocysteine
  MOD_RES (535)..(536): Selenocysteine
  MOD_RES (538)..(538): Selenocysteine
  MOD_RES (563)..(563): Selenocysteine
  MOD_RES (571)..(571): Selenocysteine
  MOD_RES (577)..(577): Selenocysteine
  MOD_RES (613)..(613): Selenocysteine
  MOD_RES (639)..(639): Selenocysteine
  MOD_RES (643)..(644): Selenocysteine
  MOD_RES (650)..(650): Selenocysteine
  MOD_RES (714)..(714): Selenocysteine
  MOD_RES (716)..(716): Selenocysteine
  MOD_RES (724)..(724): Selenocysteine
  MOD_RES (726)..(726): Selenocysteine
  MOD_RES (731)..(731): Selenocysteine
  MOD_RES (744)..(744): Selenocysteine
MIXYKNFXHPSGVGERCDXPANLLAKGCQLNFIENPVSQVEILKNKPLSVGRQKNSSDIVQIAPQSLILKLRPGGAQXLQVHVRQXEDYPVDLYYLMDLSASMDDDLNXIKELGSRLSKEMSKLXSNFRLGFGSFVEKPVSPFVKXXPEEIANPCSSIPYFCLPXFGFKHILPLXNDAERFNEIVKNQKISANIDXPEGGFDAIMQAAVCKEKIGWRNDSLHLLVFVSDADSHFGMDSKLAGIVIPNDGLCHLDSKNEYSMSXVLEYPXIGQLIDKLVQNNVLLIFAVXQEQVHLYENYAKLIPGAXVGLLQKDSGNILQLIISAYEELRSEVELEVLGDXEGLNLSFXAICNNGXLFQHQKKCSHMKVGDXASFSVXVNIPHCERRSRHIIIKPVGLGDALELLVSPECNCDCQKEVEVNSSKCHHGNGSFQCGVCACHPGHMGPRCECGEDMLSXDSCKEAPDHPSCSGRGDCYCGQCICHLSPYGNIYGPYCQCDNFSCVRHKGLLCGGNGDCDCGECVCRSGWXGEYCNCXXSXDSCVSEDGVLCSGRGDCVCGKCVCXNPGASGPXCERCPXCGDPCNSKRSCIECHLSAAGQAREECVDKCKLAGAXISEEEDFSKDGSVSCSLQGENECLIXFLIXXDNEGKXIIHSINEKDCPKPPNIPMIMLGVSLAILLIGVVLLCIWKLLVSFHDRKEVAKFEAERSKAKWQXGXNPLYRGSXSXFKNVXYKHREKQKVDLSXDC

SEQ ID NO: 14027 - protein, 89 aa, Homo sapiens
  MOD_RES (28)..(28): Selenocysteine
  MOD_RES (32)..(32): Selenocysteine
  MOD_RES (70)..(70): Selenocysteine
MVALPMVLVLLLVLSRGESELDAKIPSXGDAXEWRNPHLSMLGSCQPAPSCQKCILSHPSCAWCKQLNFXASGEAEARRCARREELLAR

SEQ ID NO: 14028 - protein, 93 aa, Homo sapiens
  MOD_RES (28)..(28): Selenocysteine
  MOD_RES (32)..(32): Selenocysteine
  MOD_RES (70)..(70): Selenocysteine
MVALPMVLVLLLVLSRGESELDAKIPSXGDAXEWRNPHLSMLGSCQPAPSCQKCILSHPSCAWCKQLNFXASGEAEARRCARREELLARGCPL

SEQ ID NO: 14029 - protein, 158 aa, Homo sapiens
  MOD_RES (28)..(28): Selenocysteine
  MOD_RES (32)..(32): Selenocysteine
  MOD_RES (70)..(70): Selenocysteine
  MOD_RES (121)..(121): Selenocysteine
  MOD_RES (131)..(131): Selenocysteine
MVALPMVLVLLLVLSRGESELDAKIPSXGDAXEWRNPHLSMLGSCQPAPSCQKCILSHPSCAWCKQLNFXASGEAEARRCARREELLARGCPLEELEEPRGQQEVLQDQPLSQGARGEGAXQLAPQRVRVXLRPGEPQQLQVRFLRAEGYPVDLYYLM

SEQ ID NO: 14030 - protein, 471 aa, Homo sapiens
  MOD_RES (28)..(28): Selenocysteine
  MOD_RES (32)..(32): Selenocysteine
  MOD_RES (70)..(70): Selenocysteine
  MOD_RES (121)..(121): Selenocysteine
  MOD_RES (131)..(131): Selenocysteine
  MOD_RES (186)..(186): Selenocysteine
  MOD_RES (200)..(200): Selenocysteine
  MOD_RES (207)..(207): Selenocysteine
  MOD_RES (218)..(218): Selenocysteine
  MOD_RES (236)..(236): Selenocysteine
  MOD_RES (287)..(287): Selenocysteine
  MOD_RES (291)..(291): Selenocysteine
  MOD_RES (294)..(294): Selenocysteine
  MOD_RES (323)..(323): Selenocysteine
  MOD_RES (349)..(349): Selenocysteine
  MOD_RES (392)..(392): Selenocysteine
  MOD_RES (394)..(394): Selenocysteine
  MOD_RES (436)..(436): Selenocysteine
  MOD_RES (449)..(449): Selenocysteine
MVALPMVLVLLLVLSRGESELDAKIPSXGDAXEWRNPHLSMLGSCQPAPSCQKCILSHPSCAWCKQLNFXASGEAEARRCARREELLARGCPLEELEEPRGQQEVLQDQPLSQGARGEGAXQLAPQRVRVXLRPGEPQQLQVRFLRAEGYPVDLYYLMDLSYSMKDDLERVRQLGHALLVRLQEVXHSVRIGFGSFVDKXVLPFVSXVPSKLRHPCPXRLERCQSPFSFHHVLSLXGDAQAFEREVGRQSVSGNLDSPEGGFDAILQAALCQEQIGWRNVSRLLVFXSDDXFHXAGDGKLGGIFMPSDGHCHLDSNGLYSRSXEFDYPSVGQVAQALSAANIQPIFAVXSAALPVYQELSKLIPKSAVGELSEDSSNVVQLIMDAYNSLSSXVXLEHSSLPPGVHISYESQCEGPEKREGKAEDRGQCNHVRINQXGLCRVWGLQDWPXGHQLQYSLCPYQCDPGLGPYLG

SEQ ID NO: 14031 - protein, 650 aa, Homo sapiens
  MOD_RES (28)..(28): Selenocysteine
  MOD_RES (32)..(32): Selenocysteine
  MOD_RES (70)..(70): Selenocysteine
  MOD_RES (121)..(121): Selenocysteine
  MOD_RES (131)..(131): Selenocysteine
  MOD_RES (186)..(186): Selenocysteine
  MOD_RES (200)..(200): Selenocysteine
  MOD_RES (207)..(207): Selenocysteine
  MOD_RES (218)..(218): Selenocysteine
  MOD_RES (236)..(236): Selenocysteine
  MOD_RES (287)..(287): Selenocysteine
  MOD_RES (291)..(291): Selenocysteine
  MOD_RES (294)..(294): Selenocysteine
  MOD_RES (323)..(323): Selenocysteine
  MOD_RES (349)..(349): Selenocysteine
  MOD_RES (392)..(392): Selenocysteine
  MOD_RES (394)..(394): Selenocysteine
  MOD_RES (436)..(436): Selenocysteine
  MOD_RES (438)..(438): Selenocysteine
  MOD_RES (446)..(446): Selenocysteine
  MOD_RES (472)..(472): Selenocysteine
  MOD_RES (481)..(481): Selenocysteine
  MOD_RES (511)..(511): Selenocysteine
  MOD_RES (516)..(516): Selenocysteine
  MOD_RES (520)..(520): Selenocysteine
  MOD_RES (525)..(525): Selenocysteine
  MOD_RES (528)..(528): Selenocysteine
  MOD_RES (544)..(544): Selenocysteine
  MOD_RES (561)..(561): Selenocysteine
  MOD_RES (576)..(576): Selenocysteine
  MOD_RES (635)..(637): Selenocysteine
  MOD_RES (649)..(649): Selenocysteine
MVALPMVLVLLLVLSRGESELDAKIPSXGDAXEWRNPHLSMLGSCQPAPSCQKCILSHPSCAWCKQLNFXASGEAEARRCARREELLARGCPLEELEEPRGQQEVLQDQPLSQGARGEGAXQLAPQRVRVXLRPGEPQQLQVRFLRAEGYPVDLYYLMDLSYSMKDDLERVRQLGHALLVRLQEVXHSVRIGFGSFVDKXVLPFVSXVPSKLRHPCPXRLERCQSPFSFHHVLSLXGDAQAFEREVGRQSVSGNLDSPEGGFDAILQAALCQEQIGWRNVSRLLVFXSDDXFHXAGDGKLGGIFMPSDGHCHLDSNGLYSRSXEFDYPSVGQVAQALSAANIQPIFAVXSAALPVYQELSKLIPKSAVGELSEDSSNVVQLIMDAYNSLSSXVXLEHSSLPPGVHISYESQCEGPEKREGKAEDRGQCNHVRINQXVXFWVSLQAXHCLPEPHLLRLRALGFSEELIVELHXLCDCNCSDXQPQAPHCSDGQGHLQCGVCRDCAECGAFRXGPLAXNCSXACAHXNVXLALAPILDDGWCKERXLDNQLFFFLVEDDARGXVVLRVRPQEKGADHXQAIVLGCVGGIVAVGLGLVLAYRLSVEIYDRREYSRFEKEQQQLNWKQDSNPLYKSAIXXXINPRFQEADSPXL

SEQ ID NO: 14032 - protein, 798 aa, Homo sapiens
  MOD_RES (28)..(28): Selenocysteine
  MOD_RES (32)..(32): Selenocysteine
  MOD_RES (70)..(70): Selenocysteine
  MOD_RES (121)..(121): Selenocysteine
  MOD_RES (131)..(131): Selenocysteine
  MOD_RES (186)..(186): Selenocysteine
  MOD_RES (200)..(200): Selenocysteine
  MOD_RES (207)..(207): Selenocysteine
  MOD_RES (218)..(218): Selenocysteine
  MOD_RES (236)..(236): Selenocysteine
  MOD_RES (287)..(287): Selenocysteine
  MOD_RES (291)..(291): Selenocysteine
  MOD_RES (294)..(294): Selenocysteine
  MOD_RES (323)..(323): Selenocysteine
  MOD_RES (349)..(349): Selenocysteine
  MOD_RES (392)..(392): Selenocysteine
  MOD_RES (394)..(394): Selenocysteine
  MOD_RES (436)..(436): Selenocysteine
  MOD_RES (438)..(438): Selenocysteine
  MOD_RES (446)..(446): Selenocysteine
  MOD_RES (472)..(472): Selenocysteine
  MOD_RES (481)..(481): Selenocysteine
  MOD_RES (533)..(533): Selenocysteine
  MOD_RES (592)..(592): Selenocysteine
  MOD_RES (643)..(643): Selenocysteine
  MOD_RES (659)..(659): Selenocysteine
  MOD_RES (664)..(664): Selenocysteine
  MOD_RES (668)..(668): Selenocysteine
  MOD_RES (673)..(673): Selenocysteine
  MOD_RES (676)..(676): Selenocysteine
  MOD_RES (692)..(692): Selenocysteine
  MOD_RES (709)..(709): Selenocysteine
  MOD_RES (724)..(724): Selenocysteine
  MOD_RES (783)..(785): Selenocysteine
  MOD_RES (797)..(797): Selenocysteine
MVALPMVLVLLLVLSRGESELDAKIPSXGDAXEWRNPHLSMLGSCQPAPSCQKCILSHPSCAWCKQLNFXASGEAEARRCARREELLARGCPLEELEEPRGQQEVLQDQPLSQGARGEGAXQLAPQRVRVXLRPGEPQQLQVRFLRAEGYPVDLYYLMDLSYSMKDDLERVRQLGHALLVRLQEVXHSVRIGFGSFVDKXVLPFVSXVPSKLRHPCPXRLERCQSPFSFHHVLSLXGDAQAFEREVGRQSVSGNLDSPEGGFDAILQAALCQEQIGWRNVSRLLVFXSDDXFHXAGDGKLGGIFMPSDGHCHLDSNGLYSRSXEFDYPSVGQVAQALSAANIQPIFAVXSAALPVYQELSKLIPKSAVGELSEDSSNVVQLIMDAYNSLSSXVXLEHSSLPPGVHISYESQCEGPEKREGKAEDRGQCNHVRINQXVXFWVSLQAXHCLPEPHLLRLRALGFSEELIVELHXLCDCNCSDXQPQAPHCSDGQGHLQCGVCSCAPGRLGRLCECSVAELSSPDLESGCRAPNGXGPLCSGKGHCQCGRCSCSGQSSGHLCECDDASCERHEGILCGGFGRCQCGVCHCHANRXGRACECSGDMDSCISPEGGLCSGHGRCKCNRCQCLDGYYGALCDQCPGCKXPCERHRDCAECGAFRXGPLAXNCSXACAHXNVXLALAPILDDGWCKERXLDNQLFFFLVEDDARGXVVLRVRPQEKGADHXQAIVLGCVGGIVAVGLGLVLAYRLSVEIYDRREYSRFEKEQQQLNWKQDSNPLYKSAIXXXINPRFQEADSPXL

SEQ ID NO: 14033 - protein, 117 aa, Homo sapiens
  MOD_RES (1)..(1): Any amino acid
  MOD_RES (3)..(3): Selenocysteine
  MOD_RES (8)..(8): Selenocysteine
  MOD_RES (11)..(11): Selenocysteine
  MOD_RES (27)..(27): Selenocysteine
  MOD_RES (44)..(44): Selenocysteine
  MOD_RES (59)..(59): Selenocysteine
XSXACAHXNVXLALAPILDDGWCKERXLDNQLFFFLVEDDARGXVVLRVRPQEKGADHXQAIVLGCVGGIVAVGLGLVLAYRLSVEIYDRREYSRFEKEQQQLNWKQLLGFGSRLAS

SEQ ID NO: 14034 - protein, 769 aa, Homo sapiens
  MOD_RES (10)..(10): Selenocysteine
  MOD_RES (110)..(110): Selenocysteine
  MOD_RES (116)..(116): Selenocysteine
  MOD_RES (119)..(119): Selenocysteine
  MOD_RES (195)..(195): Selenocysteine
  MOD_RES (231)..(231): Selenocysteine
  MOD_RES (235)..(235): Selenocysteine
  MOD_RES (252)..(252): Selenocysteine
  MOD_RES (284)..(284): Selenocysteine
  MOD_RES (287)..(287): Selenocysteine
  MOD_RES (318)..(319): Selenocysteine
  MOD_RES (361)..(361): Selenocysteine
  MOD_RES (404)..(404): Selenocysteine
  MOD_RES (423)..(423): Selenocysteine
  MOD_RES (433)..(433): Selenocysteine
  MOD_RES (435)..(435): Selenocysteine
  MOD_RES (442)..(442): Selenocysteine
  MOD_RES (458)..(458): Selenocysteine
  MOD_RES (485)..(485): Selenocysteine
  MOD_RES (606)..(606): Selenocysteine
  MOD_RES (615)..(615): Selenocysteine
  MOD_RES (629)..(629): Selenocysteine
  MOD_RES (632)..(632): Selenocysteine
  MOD_RES (659)..(659): Selenocysteine
  MOD_RES (673)..(673): Selenocysteine
  MOD_RES (693)..(693): Selenocysteine
  MOD_RES (739)..(739): Selenocysteine
  MOD_RES (743)..(743): Selenocysteine
  MOD_RES (764)..(764): Selenocysteine
MCGSALAFFXAAFVCLQNDRRGPASFLWAAWVFSLVLGLGQGEDNRCASSNAASCARCLALGPECGWCVQEDFISGGSRSERCDIVSNLISKGCSVDSIEYPSVHVIIPXENEINXQVXPGEVSIQLRPGAEANFMLKVHPLKKYPVDLYYLVDVSASMHNNIEKLNSVGNDLSRKMAFFSRDFRLGFGSYVDKXVSPYISIHPERIHNQCSDYNLDCMPPHGYIHVLSLXENIXEFEKAVHRQKISGNIDXPEGGFDAMLQAAVCESHIGWRKEAKRLLLVMXDQXSHLALDSKLAGIVVPNDGNCHLKNNVYVKSXXMEHPSLGQLSEKLIDNNINVIFAVQGKQFHWYKDLLPLLPGXIAGEIESKAANLNNLVVEAYQKLISEVKVQVENQVQGIYFNIXAICPDGSRKPGMEGCRNVXSNDEVLFNVXVXMKKCDVXGGKNYAIIKPIGFNEXAKIHIHRNCSCQCEDNRGPKGKCVDEXFLDSKCFQCDENKCHFDEDQFSSESCKSHKDQPVCSGRGVCVCGKCSCHKIKLGKVYGKYCEKDDFSCPYHHGNLCAGHGECEAGRCQCFSGWEGDRCQCPSAAAQHCVNSKGQVCSGRGXCVCGRCECXDPRSIGRFCEHCPXCYXACKENWNCMQCLHPHNLSQAILDQCKXSCALMEQQHYVDQXSECFSSPSYLRIFFIIFIVXFLIGLLKVLIIRQVILQWNSNKIKSSSDYRVSASKKDKLILQSVCXRAVXYRREKPEEIKMDISKLNAHEXFRCNF

SEQ ID NO: 14035 - protein, 634 aa, Homo sapiens
  MOD_RES (60)..(60): Selenocysteine
  MOD_RES (96)..(96): Selenocysteine
  MOD_RES (100)..(100): Selenocysteine
  MOD_RES (117)..(117): Selenocysteine
  MOD_RES (149)..(149): Selenocysteine
  MOD_RES (152)..(152): Selenocysteine
  MOD_RES (183)..(184): Selenocysteine
  MOD_RES (226)..(226): Selenocysteine
  MOD_RES (269)..(269): Selenocysteine
  MOD_RES (288)..(288): Selenocysteine
  MOD_RES (298)..(298): Selenocysteine
  MOD_RES (300)..(300): Selenocysteine
  MOD_RES (307)..(307): Selenocysteine
  MOD_RES (323)..(323): Selenocysteine
  MOD_RES (350)..(350): Selenocysteine
  MOD_RES (471)..(471): Selenocysteine
  MOD_RES (480)..(480): Selenocysteine
  MOD_RES (494)..(494): Selenocysteine
  MOD_RES (497)..(497): Selenocysteine
  MOD_RES (524)..(524): Selenocysteine
  MOD_RES (538)..(538): Selenocysteine
  MOD_RES (558)..(558): Selenocysteine
  MOD_RES (604)..(604): Selenocysteine
  MOD_RES (608)..(608): Selenocysteine
  MOD_RES (629)..(629): Selenocysteine
MLKVHPLKKYPVDLYYLVDVSASMHNNIEKLNSVGNDLSRKMAFFSRDFRLGFGSYVDKXVSPYISIHPERIHNQCSDYNLDCMPPHGYIHVLSLXENIXEFEKAVHRQKISGNIDXPEGGFDAMLQAAVCESHIGWRKEAKRLLLVMXDQXSHLALDSKLAGIVVPNDGNCHLKNNVYVKSXXMEHPSLGQLSEKLIDNNINVIFAVQGKQFHWYKDLLPLLPGXIAGEIESKAANLNNLVVEAYQKLISEVKVQVENQVQGIYFNIXAICPDGSRKPGMEGCRNVXSNDEVLFNVXVXMKKCDVXGGKNYAIIKPIGFNEXAKIHIHRNCSCQCEDNRGPKGKCVDEXFLDSKCFQCDENKCHFDEDQFSSESCKSHKDQPVCSGRGVCVCGKCSCHKIKLGKVYGKYCEKDDFSCPYHHGNLCAGHGECEAGRCQCFSGWEGDRCQCPSAAAQHCVNSKGQVCSGRGXCVCGRCECXDPRSIGRFCEHCPXCYXACKENWNCMQCLHPHNLSQAILDQCKXSCALMEQQHYVDQXSECFSSPSYLRIFFIIFIVXFLIGLLKVLIIRQVILQWNSNKIKSSSDYRVSASKKDKLILQSVCXRAVXYRREKPEEIKMDISKLNAHEXFRCNF

SEQ ID NO: 14036 - protein, 353 aa, Homo sapiens
  MOD_RES (15)..(15): Selenocysteine
  MOD_RES (49)..(49): Selenocysteine
  MOD_RES (82)..(82): Selenocysteine
  MOD_RES (91)..(91): Selenocysteine
  MOD_RES (103)..(103): Selenocysteine
  MOD_RES (110)..(110): Selenocysteine
  MOD_RES (117)..(117): Selenocysteine
  MOD_RES (127)..(127): Selenocysteine
  MOD_RES (176)..(176): Selenocysteine
  MOD_RES (206)..(206): Selenocysteine
  MOD_RES (219)..(219): Selenocysteine
  MOD_RES (240)..(240): Selenocysteine
  MOD_RES (266)..(266): Selenocysteine
  MOD_RES (323)..(323): Selenocysteine
MCKNSQDIICSNAGXCHCGRCKCDNSDGSGLVYGKFCECDDRECIDDEXEEICGGHGKCYCGNCYCKAGWHGDKCEFQCDIXPWESKRRCXSPDGKICSNRGXCVCGECXCHDVDPXGDWGDIHGDXCECDERDCRAVYDRYSDDFCSGHGQCNCGRCDCKAGWYGKKCEHPQSCXLSAEESIRKCQGSSDLPCSGRGKCECGKCXCYPPGDRRVYGKXCECDDRRCEDLDGVVCGGHGXCSCGRCVCERGWFGKLCQHPRKCNMXEEQSKNLCESADGILCSGKGSCHCGKCICSAEEWYISGEFCDCDDRDCDKHDGLICXGNGICSCGNCECWDGWNGNACEIWLGSEYP

SEQ ID NO: 14037 - protein, 401 aa, Homo sapiens
  MOD_RES (37)..(37): Selenocysteine
  MOD_RES (42)..(42): Selenocysteine
  MOD_RES (63)..(63): Selenocysteine
  MOD_RES (97)..(97): Selenocysteine
  MOD_RES (130)..(130): Selenocysteine
  MOD_RES (139)..(139): Selenocysteine
  MOD_RES (151)..(151): Selenocysteine
  MOD_RES (158)..(158): Selenocysteine
  MOD_RES (165)..(165): Selenocysteine
  MOD_RES (175)..(175): Selenocysteine
  MOD_RES (224)..(224): Selenocysteine
  MOD_RES (254)..(254): Selenocysteine
  MOD_RES (267)..(267): Selenocysteine
  MOD_RES (288)..(288): Selenocysteine
  MOD_RES (314)..(314): Selenocysteine
  MOD_RES (371)..(371): Selenocysteine
MNLVAVMGAFNKGHGKCDCGKCKCDQGWYGDACQYPXNCDLXKKKSNQMCKNSQDIICSNAGXCHCGRCKCDNSDGSGLVYGKFCECDDRECIDDEXEEICGGHGKCYCGNCYCKAGWHGDKCEFQCDIXPWESKRRCXSPDGKICSNRGXCVCGECXCHDVDPXGDWGDIHGDXCECDERDCRAVYDRYSDDFCSGHGQCNCGRCDCKAGWYGKKCEHPQSCXLSAEESIRKCQGSSDLPCSGRGKCECGKCXCYPPGDRRVYGKXCECDDRRCEDLDGVVCGGHGXCSCGRCVCERGWFGKLCQHPRKCNMXEEQSKNLCESADGILCSGKGSCHCGKCICSAEEWYISGEFCDCDDRDCDKHDGLICXGNGICSCGNCECWDGWNGNACEIWLGSEYP

SEQ ID NO: 14038 - protein, 494 aa, Homo sapiens
  MOD_RES (79)..(79): Selenocysteine
  MOD_RES (98)..(98): Selenocysteine
  MOD_RES (103)..(103): Selenocysteine
  MOD_RES (130)..(130): Selenocysteine
  MOD_RES (135)..(135): Selenocysteine
  MOD_RES (156)..(156): Selenocysteine
  MOD_RES (190)..(190): Selenocysteine
  MOD_RES (223)..(223): Selenocysteine
  MOD_RES (232)..(232): Selenocysteine
  MOD_RES (244)..(244): Selenocysteine
  MOD_RES (251)..(251): Selenocysteine
  MOD_RES (258)..(258): Selenocysteine
  MOD_RES (268)..(268): Selenocysteine
  MOD_RES (317)..(317): Selenocysteine
  MOD_RES (347)..(347): Selenocysteine
  MOD_RES (360)..(360): Selenocysteine
  MOD_RES (381)..(381): Selenocysteine
  MOD_RES (407)..(407): Selenocysteine
  MOD_RES (464)..(464): Selenocysteine
MRPPGFRNFLLLASSLLFAGLSAVPQSFSPSLRSWPGAACRLSRAESERRCRAPGQPPGAALCHGRGRCDCGVCICHVXEPGMFFGPLCECHEWVCEXYDGSXCAGHGKCDCGKCKCDQGWYGDACQYPXNCDLXKKKSNQMCKNSQDIICSNAGXCHCGRCKCDNSDGSGLVYGKFCECDDRECIDDEXEEICGGHGKCYCGNCYCKAGWHGDKCEFQCDIXPWESKRRCXSPDGKICSNRGXCVCGECXCHDVDPXGDWGDIHGDXCECDERDCRAVYDRYSDDFCSGHGQCNCGRCDCKAGWYGKKCEHPQSCXLSAEESIRKCQGSSDLPCSGRGKCECGKCXCYPPGDRRVYGKXCECDDRRCEDLDGVVCGGHGXCSCGRCVCERGWFGKLCQHPRKCNMXEEQSKNLCESADGILCSGKGSCHCGKCICSAEEWYISGEFCDCDDRDCDKHDGLICXGNGICSCGNCECWDGWNGNACEIWLGSEYP

SEQ ID NO: 14039 - protein, 445 aa, Homo sapiens
  MOD_RES (79)..(79): Selenocysteine
  MOD_RES (98)..(98): Selenocysteine
  MOD_RES (103)..(103): Selenocysteine
  MOD_RES (107)..(107): Selenocysteine
  MOD_RES (141)..(141): Selenocysteine
  MOD_RES (174)..(174): Selenocysteine
  MOD_RES (183)..(183): Selenocysteine
  MOD_RES (195)..(195): Selenocysteine
  MOD_RES (202)..(202): Selenocysteine
  MOD_RES (209)..(209): Selenocysteine
  MOD_RES (219)..(219): Selenocysteine
  MOD_RES (268)..(268): Selenocysteine
  MOD_RES (298)..(298): Selenocysteine
  MOD_RES (311)..(311): Selenocysteine
  MOD_RES (332)..(332): Selenocysteine
  MOD_RES (358)..(358): Selenocysteine
  MOD_RES (415)..(415): Selenocysteine
MRPPGFRNFLLLASSLLFAGLSAVPQSFSPSLRSWPGAACRLSRAESERRCRAPGQPPGAALCHGRGRCDCGVCICHVXEPGMFFGPLCECHEWVCEXYDGSXCAGXCHCGRCKCDNSDGSGLVYGKFCECDDRECIDDEXEEICGGHGKCYCGNCYCKAGWHGDKCEFQCDIXPWESKRRCXSPDGKICSNRGXCVCGECXCHDVDPXGDWGDIHGDXCECDERDCRAVYDRYSDDFCSGHGQCNCGRCDCKAGWYGKKCEHPQSCXLSAEESIRKCQGSSDLPCSGRGKCECGKCXCYPPGDRRVYGKXCECDDRRCEDLDGVVCGGHGXCSCGRCVCERGWFGKLCQHPRKCNMXEEQSKNLCESADGILCSGKGSCHCGKCICSAEEWYISGEFCDCDDRDCDKHDGLICXGNGICSCGNCECWDGWNGNACEIWLGSEYP

SEQ ID NO: 14040 - protein, 401 aa, Homo sapiens
  MOD_RES (8)..(9): Selenocysteine
  MOD_RES (37)..(37): Selenocysteine
  MOD_RES (42)..(42): Selenocysteine
  MOD_RES (63)..(63): Selenocysteine
  MOD_RES (97)..(97): Selenocysteine
  MOD_RES (130)..(130): Selenocysteine
  MOD_RES (139)..(139): Selenocysteine
  MOD_RES (151)..(151): Selenocysteine
  MOD_RES (158)..(158): Selenocysteine
  MOD_RES (165)..(165): Selenocysteine
  MOD_RES (175)..(175): Selenocysteine
  MOD_RES (224)..(224): Selenocysteine
  MOD_RES (254)..(254): Selenocysteine
  MOD_RES (267)..(267): Selenocysteine
  MOD_RES (288)..(288): Selenocysteine
  MOD_RES (314)..(314): Selenocysteine
  MOD_RES (371)..(371): Selenocysteine
MSGCARPXXGAPVQAMVSVGKCKCDQGWYGDACQYPXNCDLXKKKSNQMCKNSQDIICSNAGXCHCGRCKCDNSDGSGLVYGKFCECDDRECIDDEXEEICGGHGKCYCGNCYCKAGWHGDKCEFQCDIXPWESKRRCXSPDGKICSNRGXCVCGECXCHDVDPXGDWGDIHGDXCECDERDCRAVYDRYSDDFCSGHGQCNCGRCDCKAGWYGKKCEHPQSCXLSAEESIRKCQGSSDLPCSGRGKCECGKCXCYPPGDRRVYGKXCECDDRRCEDLDGVVCGGHGXCSCGRCVCERGWFGKLCQHPRKCNMXEEQSKNLCESADGILCSGKGSCHCGKCICSAEEWYISGEFCDCDDRDCDKHDGLICXGNGICSCGNCECWDGWNGNACEIWLGSEYP

SEQ ID NO: 14041 - protein, 208 aa, Homo sapiens
  MOD_RES (1)..(1): Any amino acid
  MOD_RES (31)..(31): Selenocysteine
  MOD_RES (61)..(61): Selenocysteine
  MOD_RES (74)..(74): Selenocysteine
  MOD_RES (95)..(95): Selenocysteine
  MOD_RES (121)..(121): Selenocysteine
  MOD_RES (178)..(178): Selenocysteine
XCEGHGQCNCGRCDCKAGWYGKKCEHPQSCXLSAEESIRKCQGSSDLPCSGRGKCECGKCXCYPPGDRRVYGKXCECDDRRCEDLDGVVCGGHGXCSCGRCVCERGWFGKLCQHPRKCNMXEEQSKNLCESADGILCSGKGSCHCGKCICSAEEWYISGEFCDCDDRDCDKHDGLICXGNGICSCGNCECWDGWNGNACEIWLGSEYP

SEQ ID NO: 14042 - protein, 73 aa, Homo sapiens
  MOD_RES (16)..(16): Selenocysteine
  MOD_RES (24)..(24): Selenocysteine
  MOD_RES (35)..(35): Selenocysteine
  MOD_RES (49)..(49): Selenocysteine
  MOD_RES (59)..(59): Selenocysteine
MDGKWRCCSQLEKLAXGCAQYDPXKNASKKPLPPXPEDNRRPLWEPEEXVVIALYDYQXNDPQELALRRNEEY

SEQ ID NO: 14043 - protein, 116 aa, Homo sapiens
  MOD_RES (21)..(21): Selenocysteine
  MOD_RES (34)..(34): Selenocysteine
  MOD_RES (50)..(50): Selenocysteine
MNNFILLEEQLIKKSQQKRRXSPSNFKVRFFVLXKASLAYFEDRHGKKRXLKGSIELSRIKCVEIVKSDISIPCHYKYPFQVVHDNYLLYVFAPDRESRQRWVLALKEEKGSRYVA

SEQ ID NO: 14044 - protein, 620 aa, Homo sapiens
  MOD_RES (21)..(21): Selenocysteine
  MOD_RES (34)..(34): Selenocysteine
  MOD_RES (50)..(50): Selenocysteine
  MOD_RES (110)..(110): Selenocysteine
  MOD_RES (141)..(141): Selenocysteine
  MOD_RES (149)..(149): Selenocysteine
  MOD_RES (160)..(160): Selenocysteine
  MOD_RES (174)..(174): Selenocysteine
  MOD_RES (184)..(184): Selenocysteine
  MOD_RES (236)..(236): Selenocysteine
  MOD_RES (256)..(256): Selenocysteine
  MOD_RES (269)..(269): Selenocysteine
  MOD_RES (272)..(272): Selenocysteine
  MOD_RES (274)..(274): Selenocysteine
  MOD_RES (279)..(279): Selenocysteine
  MOD_RES (298)..(298): Selenocysteine
  MOD_RES (332)..(332): Selenocysteine
  MOD_RES (348)..(348): Selenocysteine
  MOD_RES (364)..(364): Selenocysteine
  MOD_RES (392)..(392): Selenocysteine
  MOD_RES (449)..(449): Selenocysteine
  MOD_RES (458)..(458): Selenocysteine
  MOD_RES (504)..(504): Selenocysteine
  MOD_RES (513)..(513): Selenocysteine
  MOD_RES (516)..(516): Selenocysteine
  MOD_RES (518)..(518): Selenocysteine
  MOD_RES (573)..(573): Selenocysteine
  MOD_RES (585)..(585): Selenocysteine
MNNFILLEEQLIKKSQQKRRXSPSNFKVRFFVLXKASLAYFEDRHGKKRXLKGSIELSRIKCVEIVKSDISIPCHYKYPFQVVHDNYLLYVFAPDRESRQRWVLALKEEXRNNNSLVPKYHPNFWMDGKWRCCSQLEKLAXGCAQYDPXKNASKKPLPPXPEDNRRPLWEPEEXVVIALYDYQXNDPQELALRRNEEYCLLDSSEIHWWRVQDRNGHEGYVPSSYLVEKSPNNLEXYEWYNKSISRDKAEKLLLDXGKEGAFMVRDSRXAGXYXVSVFXKAVVSENNPCIKHYHIKEXNDNPKRYYVAEKYVFDSIPLLINYHQHNGGGLVXRLRYPVCFGRQKAPVXAGLRYGKWVIDPSELXFVQEIGSGQFGLVHLGYWLNKDKVAIKXIREGAMSEEDFIEEAEVMMKLSHPKLVQLYGVCLEQAPICLVFEFMEHGCLSDYLRXQRGLFAAEXLLGMCLDVCEGMAYLEEACVIHRDLAARNCLVGENQVIKVSDFGMXRFVLDDQYXSSXGXKFPVKWASPEVFSFSRYSSKSDVWSFGVLMWEVFSEGKIPYENRSNSEVVEDISXGFRLYKPRLASXHVYQIMNHCWKERPEDRPAFSRLLRQLAEIAESGL

SEQ ID NO: 14045 - protein, 122 aa, Homo sapiens
  MOD_RES (48)..(48): Selenocysteine
  MOD_RES (91)..(91): Selenocysteine
  MOD_RES (108)..(109): Selenocysteine
MGMVVLLMGLVFASVYIYRYFFLAQLARDNFFRCGVLYEDSLSSQVRXQMELEEDVKIYLDENYERINVPVPQFGGGDPADIIHDFQRGLXAYHDISLDKCYVIELNXXIVLPPRNFWELLM

SEQ ID NO: 14046 - protein, 125 aa, Homo sapiens
  MOD_RES (48)..(48): Selenocysteine
  MOD_RES (91)..(91): Selenocysteine
  MOD_RES (108)..(109): Selenocysteine
MGMVVLLMGLVFASVYIYRYFFLAQLARDNFFRCGVLYEDSLSSQVRXQMELEEDVKIYLDENYERINVPVPQFGGGDPADIIHDFQRGLXAYHDISLDKCYVIELNXXIVLPPRNFWELLMNVK

SEQ ID NO: 14047 - protein, 205 aa, Homo sapiens
  MOD_RES (48)..(48): Selenocysteine
  MOD_RES (91)..(91): Selenocysteine
  MOD_RES (108)..(109): Selenocysteine
  MOD_RES (128)..(128): Selenocysteine
  MOD_RES (133)..(133): Selenocysteine
  MOD_RES (143)..(143): Selenocysteine
  MOD_RES (165)..(165): Selenocysteine
  MOD_RES (173)..(173): Selenocysteine
  MOD_RES (194)..(194): Selenocysteine
  MOD_RES (199)..(199): Selenocysteine
MGMVVLLMGLVFASVYIYRYFFLAQLARDNFFRCGVLYEDSLSSQVRXQMELEEDVKIYLDENYERINVPVPQFGGGDPADIIHDFQRGLXAYHDISLDKCYVIELNXXIVLPPRNFWELLMNVKRGXYLPQXYIIQEEMVVXEHVSDKEALGSFIYHLCNGKDXYRLRRRAXRRRINKRGAKNCNAIRHFENXFVVEXLICGVV

SEQ ID NO: 14048 - protein, 166 aa, Homo sapiens
  MOD_RES (8)..(8): Selenocysteine
  MOD_RES (11)..(11): Selenocysteine
  MOD_RES (28)..(28): Selenocysteine
  MOD_RES (60)..(60): Selenocysteine
  MOD_RES (67)..(67): Selenocysteine
  MOD_RES (96)..(96): Selenocysteine
  MOD_RES (109)..(109): Selenocysteine
  MOD_RES (133)..(133): Selenocysteine
  MOD_RES (137)..(137): Selenocysteine
  MOD_RES (156)..(156): Selenocysteine
MSLHSSPXLPXSLYQSCDLSVGGPSLLXWVWRRERRCCKVFSVSHCLEAGPAKAWAHSCXGSPRGRXGWGSRACEALGKGMGLWGRGGMGFRSICXIRKVLRSFFLEGXLSSLSLFLDLGLELRMGRCAQGGXHQSXREGGYLGVSQGLCQCLQPXSRSLEFGEWG

SEQ ID NO: 14049 - protein, 180 aa, Homo sapiens
  MOD_RES (32)..(32): Selenocysteine
  MOD_RES (37)..(37): Selenocysteine
  MOD_RES (110)..(110): Selenocysteine
  MOD_RES (153)..(153): Selenocysteine
  MOD_RES (170)..(171): Selenocysteine
MVKISFQPAVAGIKGDKADKASASAPAPASAXEILLXPAREEQPPQHRSKRGGSVGGVCYLSMGMVVLLMGLVFASVYIYRYFFLAQLARDNFFRCGVLYEDSLSSQVRXQMELEEDVKIYLDENYERINVPVPQFGGGDPADIIHDFQRGLXAYHDISLDKCYVIELNXXIVLPPRNFW

SEQ ID NO: 14050 - protein, 267 aa, Homo sapiens
  MOD_RES (32)..(32): Selenocysteine
  MOD_RES (37)..(37): Selenocysteine
  MOD_RES (110)..(110): Selenocysteine
  MOD_RES (153)..(153): Selenocysteine
  MOD_RES (170)..(171): Selenocysteine
  MOD_RES (190)..(190): Selenocysteine
  MOD_RES (195)..(195): Selenocysteine
  MOD_RES (205)..(205): Selenocysteine
  MOD_RES (227)..(227): Selenocysteine
  MOD_RES (235)..(235): Selenocysteine
  MOD_RES (256)..(256): Selenocysteine
  MOD_RES (261)..(261): Selenocysteine
MVKISFQPAVAGIKGDKADKASASAPAPASAXEILLXPAREEQPPQHRSKRGGSVGGVCYLSMGMVVLLMGLVFASVYIYRYFFLAQLARDNFFRCGVLYEDSLSSQVRXQMELEEDVKIYLDENYERINVPVPQFGGGDPADIIHDFQRGLXAYHDISLDKCYVIELNXXIVLPPRNFWELLMNVKRGXYLPQXYIIQEEMVVXEHVSDKEALGSFIYHLCNGKDXYRLRRRAXRRRINKRGAKNCNAIRHFENXFVVEXLICGVV

SEQ ID NO: 14051 - protein, 230 aa, Homo sapiens
  MOD_RES (32)..(32): Selenocysteine
  MOD_RES (37)..(37): Selenocysteine
  MOD_RES (110)..(110): Selenocysteine
  MOD_RES (153)..(153): Selenocysteine
  MOD_RES (158)..(158): Selenocysteine
  MOD_RES (168)..(168): Selenocysteine
  MOD_RES (190)..(190): Selenocysteine
  MOD_RES (198)..(198): Selenocysteine
  MOD_RES (219)..(219): Selenocysteine
  MOD_RES (224)..(224): Selenocysteine
MVKISFQPAVAGIKGDKADKASASAPAPASAXEILLXPAREEQPPQHRSKRGGSVGGVCYLSMGMVVLLMGLVFASVYIYRYFFLAQLARDNFFRCGVLYEDSLSSQVRXQMELEEDVKIYLDENYERINVPVPQFGGGDPADIIHDFQRRGXYLPQXYIIQEEMVVXEHVSDKEALGSFIYHLCNGKDXYRLRRRAXRRRINKRGAKNCNAIRHFENXFVVEXLICGVV

SEQ ID NO: 14052 - protein, 220 aa, Homo sapiens
  MOD_RES (32)..(32): Selenocysteine
  MOD_RES (37)..(37): Selenocysteine
  MOD_RES (63)..(63): Selenocysteine
  MOD_RES (106)..(106): Selenocysteine
  MOD_RES (123)..(124): Selenocysteine
  MOD_RES (143)..(143): Selenocysteine
  MOD_RES (148)..(148): Selenocysteine
  MOD_RES (158)..(158): Selenocysteine
  MOD_RES (180)..(180): Selenocysteine
  MOD_RES (188)..(188): Selenocysteine
  MOD_RES (209)..(209): Selenocysteine
  MOD_RES (214)..(214): Selenocysteine
MVKISFQPAVAGIKGDKADKASASAPAPASAXEILLXPARLARDNFFRCGVLYEDSLSSQVRXQMELEEDVKIYLDENYERINVPVPQFGGGDPADIIHDFQRGLXAYHDISLDKCYVIELNXXIVLPPRNFWELLMNVKRGXYLPQXYIIQEEMVVXEHVSDKEALGSFIYHLCNGKDXYRLRRRAXRRRINKRGAKNCNAIRHFENXFVVEXLICGVV

SEQ ID NO: 14053 - protein, 295 aa, Homo sapiens
  MOD_RES (15)..(15): Selenocysteine
  MOD_RES (22)..(22): Selenocysteine
  MOD_RES (32)..(32): Selenocysteine
  MOD_RES (39)..(39): Selenocysteine
  MOD_RES (45)..(45): Selenocysteine
  MOD_RES (89)..(89): Selenocysteine
  MOD_RES (103)..(103): Selenocysteine
  MOD_RES (126)..(126): Selenocysteine
  MOD_RES (169)..(169): Selenocysteine
  MOD_RES (191)..(191): Selenocysteine
  MOD_RES (199)..(199): Selenocysteine
  MOD_RES (206)..(206): Selenocysteine
  MOD_RES (211)..(211): Selenocysteine
  MOD_RES (235)..(235): Selenocysteine
  MOD_RES (262)..(262): Selenocysteine
  MOD_RES (290)..(290): Selenocysteine
MEDDRICSPPFMELXSLCGDDXMRLLEKNGLXFPFICKXRVAHGXNSHEMAIVFNQEGLNAIQPPCVVQNFINHNAVLYKVFVVGESYXVVQRPSLKNFSAGXSDRESIFFNSHNVSKPESSSVLXELDKIEGVFERPSDEVIRELSRALRQALGVSLFGIDIIINNQXGQHAVIDINAFPGYEGVSEFFXDLLNHIAXVLQGQSXAMAAXGDVALLRHSKLLAEPAGGLVGERXCSASPGCCGSMMGQDAPWKAEADAGGXAKLPHQRLGCNAGVSPSFQQHCVASLAXKASSQ

SEQ ID NO: 14054 - protein, 181 aa, Homo sapiens
  MOD_RES (3)..(3): Selenocysteine
  MOD_RES (49)..(49): Selenocysteine
  MOD_RES (60)..(60): Selenocysteine
  MOD_RES (92)..(92): Selenocysteine
  MOD_RES (99)..(99): Selenocysteine
  MOD_RES (109)..(109): Selenocysteine
  MOD_RES (116)..(116): Selenocysteine
  MOD_RES (122)..(122): Selenocysteine
  MOD_RES (166)..(166): Selenocysteine
  MOD_RES (180)..(180): Selenocysteine
MQXFLKGKRVGYWLSEKKIKKLNFQAFAELCRKRGMEVVQEYIDAHPEXIVLDPLPAIRXLLDRSKSYELIRKIEAYMEDDRICSPPFMELXSLCGDDXMRLLEKNGLXFPFICKXRVAHGXNSHEMAIVFNQEGLNAIQPPCVVQNFINHNAVLYKVFVVGESYXVVQRPSLKNFSAGXS

SEQ ID NO: 14055 - protein, 168 aa, Homo sapiens
  MOD_RES (3)..(3): Selenocysteine
  MOD_RES (61)..(61): Selenocysteine
  MOD_RES (91)..(91): Selenocysteine
  MOD_RES (102)..(102): Selenocysteine
  MOD_RES (134)..(134): Selenocysteine
  MOD_RES (141)..(141): Selenocysteine
  MOD_RES (151)..(151): Selenocysteine
  MOD_RES (158)..(158): Selenocysteine
  MOD_RES (164)..(164): Selenocysteine
MQXFLKGKRVGYWLSEKKIKKLNFQAFAELCRKRGMEVVQLNLSRPIEEQGPLDVIIHKLXDVILEADQNDSQSLELVHRFQEYIDAHPEXIVLDPLPAIRXLLDRSKSYELIRKIEAYMEDDRICSPPFMELXSLCGDDXMRLLEKNGLXFPFICKXRVAHGXNSHE

SEQ ID NO: 14056 - protein, 314 aa, Homo sapiens
  MOD_RES (3)..(3): Selenocysteine
  MOD_RES (61)..(61): Selenocysteine
  MOD_RES (91)..(91): Selenocysteine
  MOD_RES (102)..(102): Selenocysteine
  MOD_RES (134)..(134): Selenocysteine
  MOD_RES (141)..(141): Selenocysteine
  MOD_RES (151)..(151): Selenocysteine
  MOD_RES (158)..(158): Selenocysteine
  MOD_RES (164)..(164): Selenocysteine
  MOD_RES (208)..(208): Selenocysteine
  MOD_RES (222)..(222): Selenocysteine
  MOD_RES (245)..(245): Selenocysteine
  MOD_RES (288)..(288): Selenocysteine
  MOD_RES (313)..(313): Selenocysteine
MQXFLKGKRVGYWLSEKKIKKLNFQAFAELCRKRGMEVVQLNLSRPIEEQGPLDVIIHKLXDVILEADQNDSQSLELVHRFQEYIDAHPEXIVLDPLPAIRXLLDRSKSYELIRKIEAYMEDDRICSPPFMELXSLCGDDXMRLLEKNGLXFPFICKXRVAHGXNSHEMAIVFNQEGLNAIQPPCVVQNFINHNAVLYKVFVVGESYXVVQRPSLKNFSAGXSDRESIFFNSHNVSKPESSSVLXELDKIEGVFERPSDEVIRELSRALRQALGVSLFGIDIIINNQXGQHAVIDINAFPGDCQVCFIEGWKXD

SEQ ID NO: 14057 - protein, 414 aa, Homo sapiens
  MOD_RES (3)..(3): Selenocysteine
  MOD_RES (61)..(61): Selenocysteine
  MOD_RES (91)..(91): Selenocysteine
  MOD_RES (102)..(102): Selenocysteine
  MOD_RES (134)..(134): Selenocysteine
  MOD_RES (141)..(141): Selenocysteine
  MOD_RES (151)..(151): Selenocysteine
  MOD_RES (158)..(158): Selenocysteine
  MOD_RES (164)..(164): Selenocysteine
  MOD_RES (208)..(208): Selenocysteine
  MOD_RES (222)..(222): Selenocysteine
  MOD_RES (245)..(245): Selenocysteine
  MOD_RES (288)..(288): Selenocysteine
  MOD_RES (310)..(310): Selenocysteine
  MOD_RES (318)..(318): Selenocysteine
  MOD_RES (325)..(325): Selenocysteine
  MOD_RES (330)..(330): Selenocysteine
  MOD_RES (354)..(354): Selenocysteine
  MOD_RES (381)..(381): Selenocysteine
  MOD_RES (409)..(409): Selenocysteine
MQXFLKGKRVGYWLSEKKIKKLNFQAFAELCRKRGMEVVQLNLSRPIEEQGPLDVIIHKLXDVILEADQNDSQSLELVHRFQEYIDAHPEXIVLDPLPAIRXLLDRSKSYELIRKIEAYMEDDRICSPPFMELXSLCGDDXMRLLEKNGLXFPFICKXRVAHGXNSHEMAIVFNQEGLNAIQPPCVVQNFINHNAVLYKVFVVGESYXVVQRPSLKNFSAGXSDRESIFFNSHNVSKPESSSVLXELDKIEGVFERPSDEVIRELSRALRQALGVSLFGIDIIINNQXGQHAVIDINAFPGYEGVSEFFXDLLNHIAXVLQGQSXAMAAXGDVALLRHSKLLAEPAGGLVGERXCSASPGCCGSMMGQDAPWKAEADAGGXAKLPHQRLGCNAGVSPSFQQHCVASLAXKASSQ

SEQ ID NO: 14058 - protein, 206 aa, Homo sapiens
  MOD_RES (3)..(3): Selenocysteine
  MOD_RES (61)..(61): Selenocysteine
  MOD_RES (91)..(91): Selenocysteine
  MOD_RES (102)..(102): Selenocysteine
  MOD_RES (140)..(140): Selenocysteine
  MOD_RES (147)..(147): Selenocysteine
  MOD_RES (157)..(157): Selenocysteine
  MOD_RES (164)..(164): Selenocysteine
  MOD_RES (170)..(170): Selenocysteine
MQXFLKGKRVGYWLSEKKIKKLNFQAFAELCRKRGMEVVQLNLSRPIEEQGPLDVIIHKLXDVILEADQNDSQSLELVHRFQEYIDAHPEXIVLDPLPAIRXLLDRSKSYELIRKIEAYMEGLPSALDDRICSPPFMELXSLCGDDXMRLLEKNGLXFPFICKXRVAHGXNSHEMAIVFNQEGLNAIQPPCVVQNFINHNAVLYKV

SEQ ID NO: 14059 - protein, 260 aa, Homo sapiens
  MOD_RES (3)..(3): Selenocysteine
  MOD_RES (17)..(17): Selenocysteine
  MOD_RES (23)..(23): Selenocysteine
  MOD_RES (67)..(67): Selenocysteine
  MOD_RES (90)..(90): Selenocysteine
  MOD_RES (98)..(98): Selenocysteine
  MOD_RES (164)..(164): Selenocysteine
  MOD_RES (171)..(171): Selenocysteine
  MOD_RES (196)..(196): Selenocysteine
  MOD_RES (206)..(206): Selenocysteine
  MOD_RES (221)..(222): Selenocysteine
  MOD_RES (239)..(239): Selenocysteine
  MOD_RES (243)..(244): Selenocysteine
MNXQRNPRNGQPRRLSXSSVSSXGSSSLLEDSEDDLLSDSESRSRGNVQLEAGEDVGQKNHWQKIRXMVNLPVISPFKKRYAWVQLAGHXGSFKAAGXSGLILKRCSEPERYCLARLMADALRGCVPAFHGVVERDGESYLQLQDLLDGFDGPCVLDCKMGVRXYLEEELXKARERPKLRKDMYKKMLAVDPEAPXEEEHAQRAVXKPRYMQWREGISSSXXLGFRIEGIKKADGSCSXDFKXXRSREQVLRVFEEFVQG

SEQ ID NO: 14060 - protein, 461 aa, Homo sapiens
  MOD_RES (2)..(2): Selenocysteine
  MOD_RES (8)..(8): Selenocysteine
  MOD_RES (83)..(83): Selenocysteine
  MOD_RES (85)..(85): Selenocysteine
  MOD_RES (94)..(94): Selenocysteine
  MOD_RES (122)..(122): Selenocysteine
  MOD_RES (128)..(128): Selenocysteine
  MOD_RES (172)..(172): Selenocysteine
  MOD_RES (195)..(195): Selenocysteine
  MOD_RES (203)..(203): Selenocysteine
  MOD_RES (269)..(269): Selenocysteine
  MOD_RES (276)..(276): Selenocysteine
  MOD_RES (301)..(301): Selenocysteine
  MOD_RES (311)..(311): Selenocysteine
  MOD_RES (326)..(327): Selenocysteine
  MOD_RES (344)..(344): Selenocysteine
  MOD_RES (348)..(349): Selenocysteine
  MOD_RES (383)..(383): Selenocysteine
  MOD_RES (420)..(421): Selenocysteine
MXLPGGPXGMARPGGARPCSPGLERAPRRSVGELRLLFEARCAAVAAAAAAGEPRARGAKRRGGQVPNGLPRAPPAPVIPQLXVXAEEPDVPPXSPGPPERERDCLPAAGSSHLQQPRRLSXSSVSSXGSSSLLEDSEDDLLSDSESRSRGNVQLEAGEDVGQKNHWQKIRXMVNLPVISPFKKRYAWVQLAGHXGSFKAAGXSGLILKRCSEPERYCLARLMADALRGCVPAFHGVVERDGESYLQLQDLLDGFDGPCVLDCKMGVRXYLEEELXKARERPKLRKDMYKKMLAVDPEAPXEEEHAQRAVXKPRYMQWREGISSSXXLGFRIEGIKKADGSCSXDFKXXRSREQVLRVFEEFVQGDEEVLRRYLNRLQQIRDXLEVSEFFRRHEVIGSSLLFVHDHCHRAGVWLIDFGKXXPLPDGQILDHRRPWEEGNREDGYLLGLDNLIGILASLAER

SEQ ID NO: 14061 - protein, 644 aa, Homo sapiens
  MOD_RES (33)..(33): Selenocysteine
  MOD_RES (118)..(118): Selenocysteine
  MOD_RES (202)..(202): Selenocysteine
  MOD_RES (212)..(212): Selenocysteine
  MOD_RES (215)..(215): Selenocysteine
  MOD_RES (244)..(244): Selenocysteine
  MOD_RES (271)..(271): Selenocysteine
  MOD_RES (282)..(282): Selenocysteine
  MOD_RES (285)..(285): Selenocysteine
  MOD_RES (301)..(301): Selenocysteine
  MOD_RES (304)..(304): Selenocysteine
  MOD_RES (311)..(311): Selenocysteine
  MOD_RES (313)..(313): Selenocysteine
  MOD_RES (324)..(324): Selenocysteine
  MOD_RES (354)..(354): Selenocysteine
  MOD_RES (396)..(397): Selenocysteine
  MOD_RES (449)..(449): Selenocysteine
  MOD_RES (463)..(463): Selenocysteine
  MOD_RES (512)..(512): Selenocysteine
  MOD_RES (521)..(521): Selenocysteine
  MOD_RES (524)..(524): Selenocysteine
  MOD_RES (531)..(531): Selenocysteine
  MOD_RES (572)..(572): Selenocysteine
  MOD_RES (576)..(576): Selenocysteine
  MOD_RES (585)..(585): Selenocysteine
  MOD_RES (606)..(606): Selenocysteine
  MOD_RES (626)..(626): Selenocysteine
  MOD_RES (636)..(636): Selenocysteine
MAVYCYALNSLVIMNSANEMKSGGGPGPSGSEXPPPPRRAVLSPGSVFSPGRGASFLFPPAESLSPEEPRSPGGWRSGRRRLNSSSGSGSGSSGSSVSSPSWAGRLRGDRQQVVAAGXLSPPGPEEAKRKLRILQRELQNVQVNQKVGMFEAHIQAQSSAIQAPRSPRLGRARSPSPCPFRSSSQPPGRVLVQGARSEERRXKSWGEQCPEXSGXDSGRKGGPSLCSSQVKKGMPPLPGRAAPXGSEAQGPSAFVRMEKGIPASPRCGSPXAMEIDKRGSPXPGXRSCLAPSLGLFGASLXMAXEVAARVXSXGPHRPQDLALXEPSGRARELEDLQPPEALVERQGQFLGSEXSPAPERGGPRDGEPPGKMGKGYLPCGMPGSGEPEVGKRPEEXXVSVQSAESSDSLSWSRLPRALASVGPEEARSGAPVGGGRWQLSDRVEGGSPXLGLLGGSPSAQPGXGNVEAGIPSGRMLEPLPCWDAAKDLKEPQCPPGDRVGVQPGNSRVWQGXMEKAGLAWXRGXGVQSEGXWESQRQDSDALPSPELLPQDPDKPFLRKACSPSNIPAVIIXDMGXQEDGALEEXQGSPRGNLPLRKLSSSSASSXGFSSSYEDSEEDISSDPERXLDPNSAFLHXLDQQKPRV

SEQ ID NO: 14062 - protein, 946 aa, Homo sapiens
  MOD_RES (33)..(33): Selenocysteine
  MOD_RES (118)..(118): Selenocysteine
  MOD_RES (202)..(202): Selenocysteine
  MOD_RES (212)..(212): Selenocysteine
  MOD_RES (215)..(215): Selenocysteine
  MOD_RES (244)..(244): Selenocysteine
  MOD_RES (271)..(271): Selenocysteine
  MOD_RES (282)..(282): Selenocysteine
  MOD_RES (285)..(285): Selenocysteine
  MOD_RES (301)..(301): Selenocysteine
  MOD_RES (304)..(304): Selenocysteine
  MOD_RES (311)..(311): Selenocysteine
  MOD_RES (313)..(313): Selenocysteine
  MOD_RES (324)..(324): Selenocysteine
  MOD_RES (354)..(354): Selenocysteine
  MOD_RES (396)..(397): Selenocysteine
  MOD_RES (449)..(449): Selenocysteine
  MOD_RES (463)..(463): Selenocysteine
  MOD_RES (512)..(512): Selenocysteine
  MOD_RES (521)..(521): Selenocysteine
  MOD_RES (524)..(524): Selenocysteine
  MOD_RES (531)..(531): Selenocysteine
  MOD_RES (572)..(572): Selenocysteine
  MOD_RES (576)..(576): Selenocysteine
  MOD_RES (585)..(585): Selenocysteine
  MOD_RES (606)..(606): Selenocysteine
  MOD_RES (626)..(626): Selenocysteine
  MOD_RES (636)..(636): Selenocysteine
  MOD_RES (750)..(750): Selenocysteine
  MOD_RES (757)..(757): Selenocysteine
  MOD_RES (782)..(782): Selenocysteine
  MOD_RES (792)..(792): Selenocysteine
  MOD_RES (802)..(802): Selenocysteine
  MOD_RES (806)..(806): Selenocysteine
  MOD_RES (808)..(808): Selenocysteine
  MOD_RES (822)..(822): Selenocysteine
  MOD_RES (830)..(830): Selenocysteine
  MOD_RES (832)..(832): Selenocysteine
  MOD_RES (837)..(837): Selenocysteine
  MOD_RES (844)..(844): Selenocysteine
  MOD_RES (863)..(864): Selenocysteine
  MOD_RES (901)..(902): Selenocysteine
  MOD_RES (909)..(909): Selenocysteine
  MOD_RES (937)..(937): Selenocysteine
MAVYCYALNSLVIMNSANEMKSGGGPGPSGSEXPPPPRRAVLSPGSVFSPGRGASFLFPPAESLSPEEPRSPGGWRSGRRRLNSSSGSGSGSSGSSVSSPSWAGRLRGDRQQVVAAGXLSPPGPEEAKRKLRILQRELQNVQVNQKVGMFEAHIQAQSSAIQAPRSPRLGRARSPSPCPFRSSSQPPGRVLVQGARSEERRXKSWGEQCPEXSGXDSGRKGGPSLCSSQVKKGMPPLPGRAAPXGSEAQGPSAFVRMEKGIPASPRCGSPXAMEIDKRGSPXPGXRSCLAPSLGLFGASLXMAXEVAARVXSXGPHRPQDLALXEPSGRARELEDLQPPEALVERQGQFLGSEXSPAPERGGPRDGEPPGKMGKGYLPCGMPGSGEPEVGKRPEEXXVSVQSAESSDSLSWSRLPRALASVGPEEARSGAPVGGGRWQLSDRVEGGSPXLGLLGGSPSAQPGXGNVEAGIPSGRMLEPLPCWDAAKDLKEPQCPPGDRVGVQPGNSRVWQGXMEKAGLAWXRGXGVQSEGXWESQRQDSDALPSPELLPQDPDKPFLRKACSPSNIPAVIIXDMGXQEDGALEEXQGSPRGNLPLRKLSSSSASSXGFSSSYEDSEEDISSDPERXLDPNSAFLHXLDQQKPRVSKSWRKIKNMVHWSPFVMSFKKKYPWIQLAGHAGSFKAAANGRILKKHCESEQRCLDRLMVDVLRPFVPAYHGDVVKDGERYNQMDDLLADFDSPCVMDCKMGIRXYLEEELXKARKKPSLRKDMYQKMIEVDPEAPXEEEKAQRAVXKPRYMQWREXISSXAXLGFRIEGIKKEDGXVNRDFKKXKXREQVXEAFREFXKGNHNILIAYRDRLKAIRXXLEVSPFFKCHEVIGSSLLFIHDKKEQAKVWMIDFGKXXPLPEGQXLQHDVPWQEGNREDGYLSGLNNLVDILXEMSQDAPLA

SEQ ID NO: 14063 - protein, 721 aa, Homo sapiens
  MOD_RES (23)..(23): Selenocysteine
  MOD_RES (29)..(29): Selenocysteine
  MOD_RES (43)..(43): Selenocysteine
  MOD_RES (83)..(84): Selenocysteine
  MOD_RES (105)..(105): Selenocysteine
  MOD_RES (113)..(113): Selenocysteine
  MOD_RES (133)..(133): Selenocysteine
  MOD_RES (150)..(150): Selenocysteine
  MOD_RES (216)..(216): Selenocysteine
  MOD_RES (252)..(252): Selenocysteine
  MOD_RES (266)..(267): Selenocysteine
  MOD_RES (273)..(273): Selenocysteine
  MOD_RES (276)..(276): Selenocysteine
  MOD_RES (310)..(310): Selenocysteine
  MOD_RES (349)..(349): Selenocysteine
  MOD_RES (351)..(351): Selenocysteine
  MOD_RES (397)..(397): Selenocysteine
  MOD_RES (406)..(406): Selenocysteine
  MOD_RES (415)..(415): Selenocysteine
  MOD_RES (449)..(449): Selenocysteine
  MOD_RES (454)..(454): Selenocysteine
  MOD_RES (491)..(491): Selenocysteine
  MOD_RES (498)..(498): Selenocysteine
  MOD_RES (501)..(501): Selenocysteine
  MOD_RES (508)..(508): Selenocysteine
  MOD_RES (563)..(563): Selenocysteine
  MOD_RES (580)..(581): Selenocysteine
  MOD_RES (596)..(596): Selenocysteine
  MOD_RES (598)..(598): Selenocysteine
  MOD_RES (625)..(625): Selenocysteine
  MOD_RES (628)..(628): Selenocysteine
  MOD_RES (676)..(676): Selenocysteine
  MOD_RES (681)..(681): Selenocysteine
  MOD_RES (695)..(695): Selenocysteine
MSDKMSSFLHIGDICSLYAEGSXNGFISXLGLVDDRCVVQPEXGDLNNPPKKFRDCLFKLCPMNRYSAQKQFWKAAKPGANSXXDAVLLNKLHHAADLEKKQNEXENRKLLGXVIQYGNVIQLLHLKSNKYLXVNKRLPALLEKNAMRVXLDEAGNEGSWFYIQPFYKLRSIGDSVVIGDKVVLNPVNAGQPLHASSHQLVDNPGCNEVNSVNCNXSWKIVLFMKWSDNKDDILKGGDVVRLFHAEQEKFLXCDEHRKKQHVFLRXXGRQSAXSAXSSKALWEVEVVQHDPCRGGAGYWNSLFRFKHLAXGHYLAAEVDPDFEEECLEFQPSVCNKIIFLMSFVGNCGXFXRGYRAMVLDVEFLYHLLYLVICAMGLFVHEFFYSLLLFDLVYREEXLLNVIKSVXRNGRSIILXAVLALILVYLFSIVGYLFFKDDFILEVDRLPNEXAVPEXGESLASEFLFSDVCRVESGENCSSPAPREELVPAEEXEQDKEHXCEXLLMCIVXVLSHGLRSGGGVGDVLRKPSKEEPLFAARVIYDLLFFFMVIIIVLNLIFGVIIDXFADLRSEKQKKEEILKXXCFICGLERDKFDNKXVXFEEHIKEEHNMWHYLCFIVLVKVKDSXEYXGPESYVAEMIKERNLDWFPRMRAMSLVSSDSEGEQNELRNLQEKLESXMKLVXNLSGQLSELKDQMXEQRKQKQRIGLLGHPPHMNVNPQQPA

SEQ ID NO: 14064 - protein, 2695 aa, Homo sapiens
  MOD_RES (23)..(23): Selenocysteine
  MOD_RES (29)..(29): Selenocysteine
  MOD_RES (43)..(43): Selenocysteine
  MOD_RES (83)..(84): Selenocysteine
  MOD_RES (105)..(105): Selenocysteine
  MOD_RES (113)..(113): Selenocysteine
  MOD_RES (133)..(133): Selenocysteine
  MOD_RES (150)..(150): Selenocysteine
  MOD_RES (216)..(216): Selenocysteine
  MOD_RES (252)..(252): Selenocysteine
  MOD_RES (266)..(267): Selenocysteine
  MOD_RES (273)..(273): Selenocysteine
  MOD_RES (276)..(276): Selenocysteine
  MOD_RES (310)..(310): Selenocysteine
  MOD_RES (358)..(359): Selenocysteine
  MOD_RES (380)..(380): Selenocysteine
  MOD_RES (382)..(382): Selenocysteine
  MOD_RES (387)..(387): Selenocysteine
  MOD_RES (405)..(405): Selenocysteine
  MOD_RES (449)..(449): Selenocysteine
  MOD_RES (451)..(451): Selenocysteine
  MOD_RES (459)..(459): Selenocysteine
  MOD_RES (470)..(470): Selenocysteine
  MOD_RES (473)..(473): Selenocysteine
  MOD_RES (513)..(513): Selenocysteine
  MOD_RES (579)..(579): Selenocysteine
  MOD_RES (581)..(581): Selenocysteine
  MOD_RES (596)..(596): Selenocysteine
  MOD_RES (602)..(602): Selenocysteine
  MOD_RES (633)..(633): Selenocysteine
  MOD_RES (645)..(645): Selenocysteine
  MOD_RES (653)..(653): Selenocysteine
  MOD_RES (668)..(668): Selenocysteine
  MOD_RES (785)..(785): Selenocysteine
  MOD_RES (822)..(822): Selenocysteine
  MOD_RES (849)..(849): Selenocysteine
  MOD_RES (874)..(874): Selenocysteine
  MOD_RES (887)..(888): Selenocysteine
  MOD_RES (918)..(918): Selenocysteine
  MOD_RES (931)..(931): Selenocysteine
  MOD_RES (956)..(956): Selenocysteine
  MOD_RES (994)..(994): Selenocysteine
  MOD_RES (997)..(997): Selenocysteine
  MOD_RES (1034)..(1034): Selenocysteine
  MOD_RES (1045)..(1045): Selenocysteine
  MOD_RES (1054)..(1054): Selenocysteine
  MOD_RES (1091)..(1091): Selenocysteine
  MOD_RES (1128)..(1128): Selenocysteine
  MOD_RES (1141)..(1141): Selenocysteine
  MOD_RES (1154)..(1154): Selenocysteine
  MOD_RES (1214)..(1214): Selenocysteine
  MOD_RES (1258)..(1258): Selenocysteine
  MOD_RES (1287)..(1287): Selenocysteine
  MOD_RES (1300)..(1300): Selenocysteine
  MOD_RES (1339)..(1339): Selenocysteine
  MOD_RES (1371)..(1371): Selenocysteine
  MOD_RES (1378)..(1378): Selenocysteine
  MOD_RES (1396)..(1396): Selenocysteine
  MOD_RES (1419)..(1419): Selenocysteine
  MOD_RES (1428)..(1428): Selenocysteine
  MOD_RES (1450)..(1450): Selenocysteine
  MOD_RES (1465)..(1465): Selenocysteine
  MOD_RES (1473)..(1474): Selenocysteine
  MOD_RES (1485)..(1486): Selenocysteine
  MOD_RES (1489)..(1489): Selenocysteine
  MOD_RES (1558)..(1558): Selenocysteine
  MOD_RES (1626)..(1626): Selenocysteine
  MOD_RES (1645)..(1645): Selenocysteine
  MOD_RES (1663)..(1663): Selenocysteine
  MOD_RES (1669)..(1669): Selenocysteine
  MOD_RES (1703)..(1703): Selenocysteine
  MOD_RES (1782)..(1783): Selenocysteine
  MOD_RES (1793)..(1793): Selenocysteine
  MOD_RES (1819)..(1819): Selenocysteine
  MOD_RES (1821)..(1821): Selenocysteine
  MOD_RES (1824)..(1824): Selenocysteine
  MOD_RES (1850)..(1851): Selenocysteine
  MOD_RES (1854)..(1854): Selenocysteine
  MOD_RES (1868)..(1868): Selenocysteine
  MOD_RES (1873)..(1874): Selenocysteine
  MOD_RES (1891)..(1891): Selenocysteine
  MOD_RES (1894)..(1894): Selenocysteine
  MOD_RES (1909)..(1909): Selenocysteine
  MOD_RES (1940)..(1940): Selenocysteine
  MOD_RES (1948)..(1948): Selenocysteine
  MOD_RES (1959)..(1960): Selenocysteine
  MOD_RES (1981)..(1981): Selenocysteine
  MOD_RES (1986)..(1986): Selenocysteine
  MOD_RES (2002)..(2002): Selenocysteine
  MOD_RES (2012)..(2012): Selenocysteine
  MOD_RES (2138)..(2138): Selenocysteine
  MOD_RES (2149)..(2149): Selenocysteine
  MOD_RES (2165)..(2165): Selenocysteine
  MOD_RES (2175)..(2176): Selenocysteine
  MOD_RES (2249)..(2249): Selenocysteine
  MOD_RES (2260)..(2260): Selenocysteine
  MOD_RES (2285)..(2285): Selenocysteine
  MOD_RES (2298)..(2298): Selenocysteine
  MOD_RES (2323)..(2323): Selenocysteine
  MOD_RES (2325)..(2325): Selenocysteine
  MOD_RES (2371)..(2371): Selenocysteine
  MOD_RES (2380)..(2380): Selenocysteine
  MOD_RES (2389)..(2389): Selenocysteine
  MOD_RES (2423)..(2423): Selenocysteine
  MOD_RES (2428)..(2428): Selenocysteine
  MOD_RES (2465)..(2465): Selenocysteine
  MOD_RES (2472)..(2472): Selenocysteine
  MOD_RES (2475)..(2475): Selenocysteine
  MOD_RES (2482)..(2482): Selenocysteine
  MOD_RES (2537)..(2537): Selenocysteine
  MOD_RES (2554)..(2555): Selenocysteine
  MOD_RES (2570)..(2570): Selenocysteine
  MOD_RES (2572)..(2572): Selenocysteine
  MOD_RES (2599)..(2599): Selenocysteine
  MOD_RES (2602)..(2602): Selenocysteine
  MOD_RES (2650)..(2650): Selenocysteine
  MOD_RES (2655)..(2655): Selenocysteine
  MOD_RES (2669)..(2669): Selenocysteine
MSDKMSSFLHIGDICSLYAEGSXNGFISXLGLVDDRCVVQPEXGDLNNPPKKFRDCLFKLCPMNRYSAQKQFWKAAKPGANSXXDAVLLNKLHHAADLEKKQNEXENRKLLGXVIQYGNVIQLLHLKSNKYLXVNKRLPALLEKNAMRVXLDEAGNEGSWFYIQPFYKLRSIGDSVVIGDKVVLNPVNAGQPLHASSHQLVDNPGCNEVNSVNCNXSWKIVLFMKWSDNKDDILKGGDVVRLFHAEQEKFLXCDEHRKKQHVFLRXXGRQSAXSAXSSKALWEVEVVQHDPCRGGAGYWNSLFRFKHLAXGHYLAAEVDPDQDASRSRLRNAQEKMVYSLVSVPEGNDISSIFELDPXXLRGGDSLVPRNSYVRLRHLCXNXWVHSXNIPIDKEEEKPVMLKIGXSPVKEDKEAFAIVPVSPAEVRDLDFANDASKVLGSIAGKLEKGXIXQNERRSVXKLLEDLVYFVXGGXNSGQDVLEVVFSKPNRERQKLMREQNILKQIFKLLQAPFXDCGDGPMLRLEELGDQRHAPFRHICRLCYRVLRHSQQDYRKNQEYIAKQFGFMQKQIGYDVLAEDXIXALLHNNRKLLEKHIXAAEIDXFVSLVRKNREPRFLDYLSDLCVSMNKSIPVXQELICKAVLNPXNADILIEXKLVLSRFEFEGVSSXGENALEAGEDEEEVWLFWRDSNKEIRSKSVRELAQDAKEGQKEDRDVLSYYRYQLNLFARMCLDRQYLAINEISGQLDVDLILRCMSDENLPYDLRASFCRLMLHMHVDRDPQEQVXPVKYARLWSEIPSEIAIDDYDSSGASKDEIKERFAQXMEFVEEYLRDVVCQRFPFSDKEKNKLXFEVVNLARNLIYFGFYNFSDLLRLXKILLAILDCVHVXXIFPISKMAKGEENKGSNVMRSIHGVGELMXQVVLRGGGFLPMXPMAAAPEGNVKQAEPEKEDIMVMDXKLKIIEILQFILNVRLDYRISCLLCIFKREFDESNSQXSEXSSGNSSQEGPSNVPGALDFEHIEEQAEGIFGGSEENXPLDLDDHGGRXFLRVLLHLXMHDYPPLVSGALQLLFRHFSQRQEVLQAFKQVQLLVXSQDVDNYKQIKQDLDQLRSIVEKSELWVYKGQGPDEXMDGASGENEHKKXEEGNNKPQKHESXSSYNYRVVKEILIRLSKLCVQESASVRKSRKQQQRLLRNMGAHAVVLELLQIPYEKAEDXKMQEIMRLAHEFLQNFCAGNQQNQALLHKHINLFLNPGILEAVXMQHIFMNNFQLCSEINERVVQHFVHCIEXHGRNVQYIKFLQXIVKAEGKFIKKCQDMVMAELVNSGEDVLVFYNDRASFQXLIQMMRSERDRMDENSPLMYHIHLVELLAVCXEGKNVYXEIKCNSLLPLDDIVRVVXHEDCIPEVKIAYINFLNHCYVDXEVEMKEIYXSNHMWKLFENFLVDICRACNNXSDRKHADSILEKYVXEIVMSIVXXFFSSPFSDQSXXLQXRQPVFVQLLQGVFRVYHCNWLMPSQKASVESCIRVLSDVAKSRAIAIPVDLDSQVNNLFLKSHSIVQKXAMNWRLSARNAARRDSVLAASRDYRNIIERLQDIVSALEDRLRPLVQAELSVLVDVLHRPELLFPENXDARRKCESGGFICKLIKHXKQLLEENEEKLCIKVLQXLREMMXKDRGYGEKGEALRQVLVNRYYGNVRPSGRRESLXSFGNGPLSAGGPGKPGGGGGGSGSSSMSRGEMSLAEVQCHLDKEGASNLVIDLIMNASSDRVFHESILLAIALLEGGNXXIQHSFFCRLXEDKKSEKFFKVFYDRMKVAQQEIKAXVXVNXSDLGNKKKDDEVDRDAPSRKKAKEPXXQIXEEVRDQLLEASAAXRKAFXXFRREADPDDHYQPGEGXQAXADKAKDDLEMSAVIXIMQPILRFLQLLCENHNRDLQNFLRCQNNKXNYNLVCEXLQFLDCICGSXXGGLGLLGLYINEKNVALINQXLESLXEYCQGPCHENQNCIAXHESNGIDIIXALILNDINPLGKKRMDLVLELKNNASKLLLAIMESRHDSENAERILYNMRPKELVEVIKKAYMQGEVEFEDGENGEDGAASPRNVGHNIYILAHQLARHNKELQSMLKPGGQVDGDEALEFYAKHXAQIEIVRLDRXMEQIVFPVPSICEFLXKESKLRIYYXXERDEQGSKINDFFLRSEDLFNEMNWQKKLRAQPVLYWCARNMSFWSSISFNLAVLMNLLVAFFYPFKGVRGGXLEPHWSGLLWXAMLISLAIVIALPKPHGIRALIASXILRLIFSVGLQPXLFLLGAFNVCNKIIFLMSFVGNCGXFXRGYRAMVLDVEFLYHLLYLVICAMGLFVHEFFYSLLLFDLVYREEXLLNVIKSVXRNGRSIILXAVLALILVYLFSIVGYLFFKDDFILEVDRLPNEXAVPEXGESLASEFLFSDVCRVESGENCSSPAPREELVPAEEXEQDKEHXCEXLLMCIVXVLSHGLRSGGGVGDVLRKPSKEEPLFAARVIYDLLFFFMVIIIVLNLIFGVIIDXFADLRSEKQKKEEILKXXCFICGLERDKFDNKXVXFEEHIKEEHNMWHYLCFIVLVKVKDSXEYXGPESYVAEMIKERNLDWFPRMRAMSLVSSDSEGEQNELRNLQEKLESXMKLVXNLSGQLSELKDQMXEQRKQKQRIGLLGHPPHMNVNPQQPA

SEQ ID NO: 14065 - protein, 2710 aa, Homo sapiens
  MOD_RES (23)..(23): Selenocysteine
  MOD_RES (29)..(29): Selenocysteine
  MOD_RES (43)..(43): Selenocysteine
  MOD_RES (83)..(84): Selenocysteine
  MOD_RES (105)..(105): Selenocysteine
  MOD_RES (113)..(113): Selenocysteine
  MOD_RES (133)..(133): Selenocysteine
  MOD_RES (150)..(150): Selenocysteine
  MOD_RES (216)..(216): Selenocysteine
  MOD_RES (252)..(252): Selenocysteine
  MOD_RES (266)..(267): Selenocysteine
  MOD_RES (273)..(273): Selenocysteine
  MOD_RES (276)..(276): Selenocysteine
  MOD_RES (310)..(310): Selenocysteine
  MOD_RES (373)..(374): Selenocysteine
  MOD_RES (395)..(395): Selenocysteine
  MOD_RES (397)..(397): Selenocysteine
  MOD_RES (402)..(402): Selenocysteine
  MOD_RES (420)..(420): Selenocysteine
  MOD_RES (464)..(464): Selenocysteine
  MOD_RES (466)..(466): Selenocysteine
  MOD_RES (474)..(474): Selenocysteine
  MOD_RES (485)..(485): Selenocysteine
  MOD_RES (488)..(488): Selenocysteine
  MOD_RES (528)..(528): Selenocysteine
  MOD_RES (594)..(594): Selenocysteine
  MOD_RES (596)..(596): Selenocysteine
  MOD_RES (611)..(611): Selenocysteine
  MOD_RES (617)..(617): Selenocysteine
  MOD_RES (648)..(648): Selenocysteine
  MOD_RES (660)..(660): Selenocysteine
  MOD_RES (668)..(668): Selenocysteine
  MOD_RES (683)..(683): Selenocysteine
  MOD_RES (800)..(800): Selenocysteine
  MOD_RES (837)..(837): Selenocysteine
  MOD_RES (864)..(864): Selenocysteine
  MOD_RES (889)..(889): Selenocysteine
  MOD_RES (902)..(903): Selenocysteine
  MOD_RES (933)..(933): Selenocysteine
  MOD_RES (946)..(946): Selenocysteine
  MOD_RES (971)..(971): Selenocysteine
  MOD_RES (1009)..(1009): Selenocysteine
  MOD_RES (1012)..(1012): Selenocysteine
  MOD_RES (1049)..(1049): Selenocysteine
  MOD_RES (1060)..(1060): Selenocysteine
  MOD_RES (1069)..(1069): Selenocysteine
  MOD_RES (1106)..(1106): Selenocysteine
  MOD_RES (1143)..(1143): Selenocysteine
  MOD_RES (1156)..(1156): Selenocysteine
  MOD_RES (1169)..(1169): Selenocysteine
  MOD_RES (1229)..(1229): Selenocysteine
  MOD_RES (1273)..(1273): Selenocysteine
  MOD_RES (1302)..(1302): Selenocysteine
  MOD_RES (1315)..(1315): Selenocysteine
  MOD_RES (1354)..(1354): Selenocysteine
  MOD_RES (1386)..(1386): Selenocysteine
  MOD_RES (1393)..(1393): Selenocysteine
  MOD_RES (1411)..(1411): Selenocysteine
  MOD_RES (1434)..(1434): Selenocysteine
  MOD_RES (1443)..(1443): Selenocysteine
  MOD_RES (1465)..(1465): Selenocysteine
  MOD_RES (1480)..(1480): Selenocysteine
  MOD_RES (1488)..(1489): Selenocysteine
  MOD_RES (1500)..(1501): Selenocysteine
  MOD_RES (1504)..(1504): Selenocysteine
  MOD_RES (1573)..(1573): Selenocysteine
  MOD_RES (1641)..(1641): Selenocysteine
  MOD_RES (1660)..(1660): Selenocysteine
  MOD_RES (1678)..(1678): Selenocysteine
  MOD_RES (1684)..(1684): Selenocysteine
  MOD_RES (1718)..(1718): Selenocysteine
  MOD_RES (1797)..(1798): Selenocysteine
  MOD_RES (1808)..(1808): Selenocysteine
  MOD_RES (1834)..(1834): Selenocysteine
  MOD_RES (1836)..(1836): Selenocysteine
  MOD_RES (1839)..(1839): Selenocysteine
  MOD_RES (1865)..(1866): Selenocysteine
  MOD_RES (1869)..(1869): Selenocysteine
  MOD_RES (1883)..(1883): Selenocysteine
  MOD_RES (1888)..(1889): Selenocysteine
  MOD_RES (1906)..(1906): Selenocysteine
  MOD_RES (1909)..(1909): Selenocysteine
  MOD_RES (1924)..(1924): Selenocysteine
  MOD_RES (1955)..(1955): Selenocysteine
  MOD_RES (1963)..(1963): Selenocysteine
  MOD_RES (1974)..(1975): Selenocysteine
  MOD_RES (1996)..(1996): Selenocysteine
  MOD_RES (2001)..(2001): Selenocysteine
  MOD_RES (2017)..(2017): Selenocysteine
  MOD_RES (2027)..(2027): Selenocysteine
  MOD_RES (2153)..(2153): Selenocysteine
  MOD_RES (2164)..(2164): Selenocysteine
  MOD_RES (2180)..(2180): Selenocysteine
  MOD_RES (2190)..(2191): Selenocysteine
  MOD_RES (2264)..(2264): Selenocysteine
  MOD_RES (2275)..(2275): Selenocysteine
  MOD_RES (2300)..(2300): Selenocysteine
  MOD_RES (2313)..(2313): Selenocysteine
  MOD_RES (2338)..(2338): Selenocysteine
  MOD_RES (2340)..(2340): Selenocysteine
  MOD_RES (2386)..(2386): Selenocysteine
  MOD_RES (2395)..(2395): Selenocysteine
  MOD_RES (2404)..(2404): Selenocysteine
  MOD_RES (2438)..(2438): Selenocysteine
  MOD_RES (2443)..(2443): Selenocysteine
  MOD_RES (2480)..(2480): Selenocysteine
  MOD_RES (2487)..(2487): Selenocysteine
  MOD_RES (2490)..(2490): Selenocysteine
  MOD_RES (2497)..(2497): Selenocysteine
  MOD_RES (2552)..(2552): Selenocysteine
  MOD_RES (2569)..(2570): Selenocysteine
  MOD_RES (2585)..(2585): Selenocysteine
  MOD_RES (2587)..(2587): Selenocysteine
  MOD_RES (2614)..(2614): Selenocysteine
  MOD_RES (2617)..(2617): Selenocysteine
  MOD_RES (2665)..(2665): Selenocysteine
  MOD_RES (2670)..(2670): Selenocysteine
  MOD_RES (2684)..(2684): Selenocysteine
MSDKMSSFLHIGDICSLYAEGSXNGFISXLGLVDDRCVVQPEXGDLNNPPKKFRDCLFKLCPMNRYSAQKQFWKAAKPGANSXXDAVLLNKLHHAADLEKKQNEXENRKLLGXVIQYGNVIQLLHLKSNKYLXVNKRLPALLEKNAMRVXLDEAGNEGSWFYIQPFYKLRSIGDSVVIGDKVVLNPVNAGQPLHASSHQLVDNPGCNEVNSVNCNXSWKIVLFMKWSDNKDDILKGGDVVRLFHAEQEKFLXCDEHRKKQHVFLRXXGRQSAXSAXSSKALWEVEVVQHDPCRGGAGYWNSLFRFKHLAXGHYLAAEVDPDFEEECLEFQPSVDPDQDASRSRLRNAQEKMVYSLVSVPEGNDISSIFELDPXXLRGGDSLVPRNSYVRLRHLCXNXWVHSXNIPIDKEEEKPVMLKIGXSPVKEDKEAFAIVPVSPAEVRDLDFANDASKVLGSIAGKLEKGXIXQNERRSVXKLLEDLVYFVXGGXNSGQDVLEVVFSKPNRERQKLMREQNILKQIFKLLQAPFXDCGDGPMLRLEELGDQRHAPFRHICRLCYRVLRHSQQDYRKNQEYIAKQFGFMQKQIGYDVLAEDXIXALLHNNRKLLEKHIXAAEIDXFVSLVRKNREPRFLDYLSDLCVSMNKSIPVXQELICKAVLNPXNADILIEXKLVLSRFEFEGVSSXGENALEAGEDEEEVWLFWRDSNKEIRSKSVRELAQDAKEGQKEDRDVLSYYRYQLNLFARMCLDRQYLAINEISGQLDVDLILRCMSDENLPYDLRASFCRLMLHMHVDRDPQEQVXPVKYARLWSEIPSEIAIDDYDSSGASKDEIKERFAQXMEFVEEYLRDVVCQRFPFSDKEKNKLXFEVVNLARNLIYFGFYNFSDLLRLXKILLAILDCVHVXXIFPISKMAKGEENKGSNVMRSIHGVGELMXQVVLRGGGFLPMXPMAAAPEGNVKQAEPEKEDIMVMDXKLKIIEILQFILNVRLDYRISCLLCIFKREFDESNSQXSEXSSGNSSQEGPSNVPGALDFEHIEEQAEGIFGGSEENXPLDLDDHGGRXFLRVLLHLXMHDYPPLVSGALQLLFRHFSQRQEVLQAFKQVQLLVXSQDVDNYKQIKQDLDQLRSIVEKSELWVYKGQGPDEXMDGASGENEHKKXEEGNNKPQKHESXSSYNYRVVKEILIRLSKLCVQESASVRKSRKQQQRLLRNMGAHAVVLELLQIPYEKAEDXKMQEIMRLAHEFLQNFCAGNQQNQALLHKHINLFLNPGILEAVXMQHIFMNNFQLCSEINERVVQHFVHCIEXHGRNVQYIKFLQXIVKAEGKFIKKCQDMVMAELVNSGEDVLVFYNDRASFQXLIQMMRSERDRMDENSPLMYHIHLVELLAVCXEGKNVYXEIKCNSLLPLDDIVRVVXHEDCIPEVKIAYINFLNHCYVDXEVEMKEIYXSNHMWKLFENFLVDICRACNNXSDRKHADSILEKYVXEIVMSIVXXFFSSPFSDQSXXLQXRQPVFVQLLQGVFRVYHCNWLMPSQKASVESCIRVLSDVAKSRAIAIPVDLDSQVNNLFLKSHSIVQKXAMNWRLSARNAARRDSVLAASRDYRNIIERLQDIVSALEDRLRPLVQAELSVLVDVLHRPELLFPENXDARRKCESGGFICKLIKHXKQLLEENEEKLCIKVLQXLREMMXKDRGYGEKGEALRQVLVNRYYGNVRPSGRRESLXSFGNGPLSAGGPGKPGGGGGGSGSSSMSRGEMSLAEVQCHLDKEGASNLVIDLIMNASSDRVFHESILLAIALLEGGNXXIQHSFFCRLXEDKKSEKFFKVFYDRMKVAQQEIKAXVXVNXSDLGNKKKDDEVDRDAPSRKKAKEPXXQIXEEVRDQLLEASAAXRKAFXXFRREADPDDHYQPGEGXQAXADKAKDDLEMSAVIXIMQPILRFLQLLCENHNRDLQNFLRCQNNKXNYNLVCEXLQFLDCICGSXXGGLGLLGLYINEKNVALINQXLESLXEYCQGPCHENQNCIAXHESNGIDIIXALILNDINPLGKKRMDLVLELKNNASKLLLAIMESRHDSENAERILYNMRPKELVEVIKKAYMQGEVEFEDGENGEDGAASPRNVGHNIYILAHQLARHNKELQSMLKPGGQVDGDEALEFYAKHXAQIEIVRLDRXMEQIVFPVPSICEFLXKESKLRIYYXXERDEQGSKINDFFLRSEDLFNEMNWQKKLRAQPVLYWCARNMSFWSSISFNLAVLMNLLVAFFYPFKGVRGGXLEPHWSGLLWXAMLISLAIVIALPKPHGIRALIASXILRLIFSVGLQPXLFLLGAFNVCNKIIFLMSFVGNCGXFXRGYRAMVLDVEFLYHLLYLVICAMGLFVHEFFYSLLLFDLVYREEXLLNVIKSVXRNGRSIILXAVLALILVYLFSIVGYLFFKDDFILEVDRLPNEXAVPEXGESLASEFLFSDVCRVESGENCSSPAPREELVPAEEXEQDKEHXCEXLLMCIVXVLSHGLRSGGGVGDVLRKPSKEEPLFAARVIYDLLFFFMVIIIVLNLIFGVIIDXFADLRSEKQKKEEILKXXCFICGLERDKFDNKXVXFEEHIKEEHNMWHYLCFIVLVKVKDSXEYXGPESYVAEMIKERNLDWFPRMRAMSLVSSDSEGEQNELRNLQEKLESXMKLVXNLSGQLSELKDQMXEQRKQKQRIGLLGHPPHMNVNPQQPA

SEQ ID NO: 14066 - protein, 2743 aa, Homo sapiens
  MOD_RES (23)..(23): Selenocysteine
  MOD_RES (29)..(29): Selenocysteine
  MOD_RES (43)..(43): Selenocysteine
  MOD_RES (83)..(84): Selenocysteine
  MOD_RES (105)..(105): Selenocysteine
  MOD_RES (113)..(113): Selenocysteine
  MOD_RES (133)..(133): Selenocysteine
  MOD_RES (150)..(150): Selenocysteine
  MOD_RES (216)..(216): Selenocysteine
  MOD_RES (252)..(252): Selenocysteine
  MOD_RES (266)..(267): Selenocysteine
  MOD_RES (273)..(273): Selenocysteine
  MOD_RES (276)..(276): Selenocysteine
  MOD_RES (310)..(310): Selenocysteine
  MOD_RES (358)..(359): Selenocysteine
  MOD_RES (380)..(380): Selenocysteine
  MOD_RES (382)..(382): Selenocysteine
  MOD_RES (387)..(387): Selenocysteine
  MOD_RES (405)..(405): Selenocysteine
  MOD_RES (449)..(449): Selenocysteine
  MOD_RES (451)..(451): Selenocysteine
  MOD_RES (459)..(459): Selenocysteine
  MOD_RES (470)..(470): Selenocysteine
  MOD_RES (473)..(473): Selenocysteine
  MOD_RES (513)..(513): Selenocysteine
  MOD_RES (579)..(579): Selenocysteine
  MOD_RES (581)..(581): Selenocysteine
  MOD_RES (596)..(596): Selenocysteine
  MOD_RES (602)..(602): Selenocysteine
  MOD_RES (633)..(633): Selenocysteine
  MOD_RES (645)..(645): Selenocysteine
  MOD_RES (653)..(653): Selenocysteine
  MOD_RES (668)..(668): Selenocysteine
  MOD_RES (785)..(785): Selenocysteine
  MOD_RES (822)..(822): Selenocysteine
  MOD_RES (849)..(849): Selenocysteine
  MOD_RES (874)..(874): Selenocysteine
  MOD_RES (887)..(888): Selenocysteine
  MOD_RES (927)..(927): Selenocysteine
  MOD_RES (940)..(940): Selenocysteine
  MOD_RES (965)..(965): Selenocysteine
  MOD_RES (1003)..(1003): Selenocysteine
  MOD_RES (1006)..(1006): Selenocysteine
  MOD_RES (1043)..(1043): Selenocysteine
  MOD_RES (1054)..(1054): Selenocysteine
  MOD_RES (1063)..(1063): Selenocysteine
  MOD_RES (1100)..(1100): Selenocysteine
  MOD_RES (1137)..(1137): Selenocysteine
  MOD_RES (1150)..(1150): Selenocysteine
  MOD_RES (1163)..(1163): Selenocysteine
  MOD_RES (1223)..(1223): Selenocysteine
  MOD_RES (1267)..(1267): Selenocysteine
  MOD_RES (1296)..(1296): Selenocysteine
  MOD_RES (1309)..(1309): Selenocysteine
  MOD_RES (1348)..(1348): Selenocysteine
  MOD_RES (1380)..(1380): Selenocysteine
  MOD_RES (1387)..(1387): Selenocysteine
  MOD_RES (1405)..(1405): Selenocysteine
  MOD_RES (1428)..(1428): Selenocysteine
  MOD_RES (1437)..(1437): Selenocysteine
  MOD_RES (1459)..(1459): Selenocysteine
  MOD_RES (1474)..(1474): Selenocysteine
  MOD_RES (1482)..(1483): Selenocysteine
  MOD_RES (1494)..(1495): Selenocysteine
  MOD_RES (1498)..(1498): Selenocysteine
  MOD_RES (1567)..(1567): Selenocysteine
  MOD_RES (1635)..(1635): Selenocysteine
  MOD_RES (1654)..(1654): Selenocysteine
  MOD_RES (1672)..(1672): Selenocysteine
  MOD_RES (1678)..(1678): Selenocysteine
  MOD_RES (1708)..(1708): Selenocysteine
  MOD_RES (1751)..(1751): Selenocysteine
  MOD_RES (1830)..(1831): Selenocysteine
  MOD_RES (1841)..(1841): Selenocysteine
  MOD_RES (1867)..(1867): Selenocysteine
  MOD_RES (1869)..(1869): Selenocysteine
  MOD_RES (1872)..(1872): Selenocysteine
  MOD_RES (1898)..(1899): Selenocysteine
  MOD_RES (1902)..(1902): Selenocysteine
  MOD_RES (1916)..(1916): Selenocysteine
  MOD_RES (1921)..(1922): Selenocysteine
  MOD_RES (1939)..(1939): Selenocysteine
  MOD_RES (1942)..(1942): Selenocysteine
  MOD_RES (1957)..(1957): Selenocysteine
  MOD_RES (1988)..(1988): Selenocysteine
  MOD_RES (1996)..(1996): Selenocysteine
  MOD_RES (2007)..(2008): Selenocysteine
  MOD_RES (2029)..(2029): Selenocysteine
  MOD_RES (2034)..(2034): Selenocysteine
  MOD_RES (2050)..(2050): Selenocysteine
  MOD_RES (2060)..(2060): Selenocysteine
  MOD_RES (2186)..(2186): Selenocysteine
  MOD_RES (2197)..(2197): Selenocysteine
  MOD_RES (2213)..(2213): Selenocysteine
  MOD_RES (2223)..(2224): Selenocysteine
  MOD_RES (2297)..(2297): Selenocysteine
  MOD_RES (2308)..(2308): Selenocysteine
  MOD_RES (2333)..(2333): Selenocysteine
  MOD_RES (2346)..(2346): Selenocysteine
  MOD_RES (2371)..(2371): Selenocysteine
  MOD_RES (2373)..(2373): Selenocysteine
  MOD_RES (2419)..(2419): Selenocysteine
  MOD_RES (2428)..(2428): Selenocysteine
  MOD_RES (2437)..(2437): Selenocysteine
  MOD_RES (2471)..(2471): Selenocysteine
  MOD_RES (2476)..(2476): Selenocysteine
  MOD_RES (2513)..(2513): Selenocysteine
  MOD_RES (2520)..(2520): Selenocysteine
  MOD_RES (2523)..(2523): Selenocysteine
  MOD_RES (2530)..(2530): Selenocysteine
  MOD_RES (2585)..(2585): Selenocysteine
  MOD_RES (2602)..(2603): Selenocysteine
  MOD_RES (2618)..(2618): Selenocysteine
  MOD_RES (2620)..(2620): Selenocysteine
  MOD_RES (2647)..(2647): Selenocysteine
  MOD_RES (2650)..(2650): Selenocysteine
  MOD_RES (2698)..(2698): Selenocysteine
  MOD_RES (2703)..(2703): Selenocysteine
  MOD_RES (2717)..(2717): Selenocysteine
MSDKMSSFLHIGDICSLYAEGSXNGFISXLGLVDDRCVVQPEXGDLNNPPKKFRDCLFKLCPMNRYSAQKQFWKAAKPGANSXXDAVLLNKLHHAADLEKKQNEXENRKLLGXVIQYGNVIQLLHLKSNKYLXVNKRLPALLEKNAMRVXLDEAGNEGSWFYIQPFYKLRSIGDSVVIGDKVVLNPVNAGQPLHASSHQLVDNPGCNEVNSVNCNXSWKIVLFMKWSDNKDDILKGGDVVRLFHAEQEKFLXCDEHRKKQHVFLRXXGRQSAXSAXSSKALWEVEVVQHDPCRGGAGYWNSLFRFKHLAXGHYLAAEVDPDQDASRSRLRNAQEKMVYSLVSVPEGNDISSIFELDPXXLRGGDSLVPRNSYVRLRHLCXNXWVHSXNIPIDKEEEKPVMLKIGXSPVKEDKEAFAIVPVSPAEVRDLDFANDASKVLGSIAGKLEKGXIXQNERRSVXKLLEDLVYFVXGGXNSGQDVLEVVFSKPNRERQKLMREQNILKQIFKLLQAPFXDCGDGPMLRLEELGDQRHAPFRHICRLCYRVLRHSQQDYRKNQEYIAKQFGFMQKQIGYDVLAEDXIXALLHNNRKLLEKHIXAAEIDXFVSLVRKNREPRFLDYLSDLCVSMNKSIPVXQELICKAVLNPXNADILIEXKLVLSRFEFEGVSSXGENALEAGEDEEEVWLFWRDSNKEIRSKSVRELAQDAKEGQKEDRDVLSYYRYQLNLFARMCLDRQYLAINEISGQLDVDLILRCMSDENLPYDLRASFCRLMLHMHVDRDPQEQVXPVKYARLWSEIPSEIAIDDYDSSGASKDEIKERFAQXMEFVEEYLRDVVCQRFPFSDKEKNKLXFEVVNLARNLIYFGFYNFSDLLRLXKILLAILDCVHVXXIFPISKMAKGEENKGNNDVEKLKSSNVMRSIHGVGELMXQVVLRGGGFLPMXPMAAAPEGNVKQAEPEKEDIMVMDXKLKIIEILQFILNVRLDYRISCLLCIFKREFDESNSQXSEXSSGNSSQEGPSNVPGALDFEHIEEQAEGIFGGSEENXPLDLDDHGGRXFLRVLLHLXMHDYPPLVSGALQLLFRHFSQRQEVLQAFKQVQLLVXSQDVDNYKQIKQDLDQLRSIVEKSELWVYKGQGPDEXMDGASGENEHKKXEEGNNKPQKHESXSSYNYRVVKEILIRLSKLCVQESASVRKSRKQQQRLLRNMGAHAVVLELLQIPYEKAEDXKMQEIMRLAHEFLQNFCAGNQQNQALLHKHINLFLNPGILEAVXMQHIFMNNFQLCSEINERVVQHFVHCIEXHGRNVQYIKFLQXIVKAEGKFIKKCQDMVMAELVNSGEDVLVFYNDRASFQXLIQMMRSERDRMDENSPLMYHIHLVELLAVCXEGKNVYXEIKCNSLLPLDDIVRVVXHEDCIPEVKIAYINFLNHCYVDXEVEMKEIYXSNHMWKLFENFLVDICRACNNXSDRKHADSILEKYVXEIVMSIVXXFFSSPFSDQSXXLQXRQPVFVQLLQGVFRVYHCNWLMPSQKASVESCIRVLSDVAKSRAIAIPVDLDSQVNNLFLKSHSIVQKXAMNWRLSARNAARRDSVLAASRDYRNIIERLQDIVSALEDRLRPLVQAELSVLVDVLHRPELLFPENXDARRKCESGGFICKLIKHXKQLLEENEEKLCIKVLQXLREMMXKDRGYGEKLISIDELDNAELPPAPDSENAXEELEPSPPLRQLEDHKRGEALRQVLVNRYYGNVRPSGRRESLXSFGNGPLSAGGPGKPGGGGGGSGSSSMSRGEMSLAEVQCHLDKEGASNLVIDLIMNASSDRVFHESILLAIALLEGGNXXIQHSFFCRLXEDKKSEKFFKVFYDRMKVAQQEIKAXVXVNXSDLGNKKKDDEVDRDAPSRKKAKEPXXQIXEEVRDQLLEASAAXRKAFXXFRREADPDDHYQPGEGXQAXADKAKDDLEMSAVIXIMQPILRFLQLLCENHNRDLQNFLRCQNNKXNYNLVCEXLQFLDCICGSXXGGLGLLGLYINEKNVALINQXLESLXEYCQGPCHENQNCIAXHESNGIDIIXALILNDINPLGKKRMDLVLELKNNASKLLLAIMESRHDSENAERILYNMRPKELVEVIKKAYMQGEVEFEDGENGEDGAASPRNVGHNIYILAHQLARHNKELQSMLKPGGQVDGDEALEFYAKHXAQIEIVRLDRXMEQIVFPVPSICEFLXKESKLRIYYXXERDEQGSKINDFFLRSEDLFNEMNWQKKLRAQPVLYWCARNMSFWSSISFNLAVLMNLLVAFFYPFKGVRGGXLEPHWSGLLWXAMLISLAIVIALPKPHGIRALIASXILRLIFSVGLQPXLFLLGAFNVCNKIIFLMSFVGNCGXFXRGYRAMVLDVEFLYHLLYLVICAMGLFVHEFFYSLLLFDLVYREEXLLNVIKSVXRNGRSIILXAVLALILVYLFSIVGYLFFKDDFILEVDRLPNEXAVPEXGESLASEFLFSDVCRVESGENCSSPAPREELVPAEEXEQDKEHXCEXLLMCIVXVLSHGLRSGGGVGDVLRKPSKEEPLFAARVIYDLLFFFMVIIIVLNLIFGVIIDXFADLRSEKQKKEEILKXXCFICGLERDKFDNKXVXFEEHIKEEHNMWHYLCFIVLVKVKDSXEYXGPESYVAEMIKERNLDWFPRMRAMSLVSSDSEGEQNELRNLQEKLESXMKLVXNLSGQLSELKDQMXEQRKQKQRIGLLGHPPHMNVNPQQPA

SEQ ID NO: 14067 - protein, 2758 aa, Homo sapiens
  MOD_RES (23)..(23): Selenocysteine
  MOD_RES (29)..(29): Selenocysteine
  MOD_RES (43)..(43): Selenocysteine
  MOD_RES (83)..(84): Selenocysteine
  MOD_RES (105)..(105): Selenocysteine
  MOD_RES (113)..(113): Selenocysteine
  MOD_RES (133)..(133): Selenocysteine
  MOD_RES (150)..(150): Selenocysteine
  MOD_RES (216)..(216): Selenocysteine
  MOD_RES (252)..(252): Selenocysteine
  MOD_RES (266)..(267): Selenocysteine
  MOD_RES (273)..(273): Selenocysteine
  MOD_RES (276)..(276): Selenocysteine
  MOD_RES (310)..(310): Selenocysteine
  MOD_RES (373)..(374): Selenocysteine
  MOD_RES (395)..(395): Selenocysteine
  MOD_RES (397)..(397): Selenocysteine
  MOD_RES (402)..(402): Selenocysteine
  MOD_RES (420)..(420): Selenocysteine
  MOD_RES (464)..(464): Selenocysteine
  MOD_RES (466)..(466): Selenocysteine
  MOD_RES (474)..(474): Selenocysteine
  MOD_RES (485)..(485): Selenocysteine
  MOD_RES (488)..(488): Selenocysteine
  MOD_RES (528)..(528): Selenocysteine
  MOD_RES (594)..(594): Selenocysteine
  MOD_RES (596)..(596): Selenocysteine
  MOD_RES (611)..(611): Selenocysteine
  MOD_RES (617)..(617): Selenocysteine
  MOD_RES (648)..(648): Selenocysteine
  MOD_RES (660)..(660): Selenocysteine
  MOD_RES (668)..(668): Selenocysteine
  MOD_RES (683)..(683): Selenocysteine
  MOD_RES (800)..(800): Selenocysteine
  MOD_RES (837)..(837): Selenocysteine
  MOD_RES (864)..(864): Selenocysteine
  MOD_RES (889)..(889): Selenocysteine
  MOD_RES (902)..(903): Selenocysteine
  MOD_RES (942)..(942): Selenocysteine
  MOD_RES (955)..(955): Selenocysteine
  MOD_RES (980)..(980): Selenocysteine
  MOD_RES (1018)..(1018): Selenocysteine
  MOD_RES (1021)..(1021): Selenocysteine
  MOD_RES (1058)..(1058): Selenocysteine
  MOD_RES (1069)..(1069): Selenocysteine
  MOD_RES (1078)..(1078): Selenocysteine
  MOD_RES (1115)..(1115): Selenocysteine
  MOD_RES (1152)..(1152): Selenocysteine
  MOD_RES (1165)..(1165): Selenocysteine
  MOD_RES (1178)..(1178): Selenocysteine
  MOD_RES (1238)..(1238): Selenocysteine
  MOD_RES (1282)..(1282): Selenocysteine
  MOD_RES (1311)..(1311): Selenocysteine
  MOD_RES (1324)..(1324): Selenocysteine
  MOD_RES (1363)..(1363): Selenocysteine
  MOD_RES (1395)..(1395): Selenocysteine
  MOD_RES (1402)..(1402): Selenocysteine
  MOD_RES (1420)..(1420): Selenocysteine
  MOD_RES (1443)..(1443): Selenocysteine
  MOD_RES (1452)..(1452): Selenocysteine
  MOD_RES (1474)..(1474): Selenocysteine
  MOD_RES (1489)..(1489): Selenocysteine
  MOD_RES (1497)..(1498): Selenocysteine
  MOD_RES (1509)..(1510): Selenocysteine
  MOD_RES (1513)..(1513): Selenocysteine
  MOD_RES (1582)..(1582): Selenocysteine
  MOD_RES (1650)..(1650): Selenocysteine
  MOD_RES (1669)..(1669): Selenocysteine
  MOD_RES (1687)..(1687): Selenocysteine
  MOD_RES (1693)..(1693): Selenocysteine
  MOD_RES (1723)..(1723): Selenocysteine
  MOD_RES (1766)..(1766): Selenocysteine
  MOD_RES (1845)..(1846): Selenocysteine
  MOD_RES (1856)..(1856): Selenocysteine
  MOD_RES (1882)..(1882): Selenocysteine
  MOD_RES (1884)..(1884): Selenocysteine
  MOD_RES (1887)..(1887): Selenocysteine
  MOD_RES (1913)..(1914): Selenocysteine
  MOD_RES (1917)..(1917): Selenocysteine
  MOD_RES (1931)..(1931): Selenocysteine
  MOD_RES (1936)..(1937): Selenocysteine
  MOD_RES (1954)..(1954): Selenocysteine
  MOD_RES (1957)..(1957): Selenocysteine
  MOD_RES (1972)..(1972): Selenocysteine
  MOD_RES (2003)..(2003): Selenocysteine
  MOD_RES (2011)..(2011): Selenocysteine
  MOD_RES (2022)..(2023): Selenocysteine
  MOD_RES (2044)..(2044): Selenocysteine
  MOD_RES (2049)..(2049): Selenocysteine
  MOD_RES (2065)..(2065): Selenocysteine
  MOD_RES (2075)..(2075): Selenocysteine
  MOD_RES (2201)..(2201): Selenocysteine
  MOD_RES (2212)..(2212): Selenocysteine
  MOD_RES (2228)..(2228): Selenocysteine
  MOD_RES (2238)..(2239): Selenocysteine
  MOD_RES (2312)..(2312): Selenocysteine
  MOD_RES (2323)..(2323): Selenocysteine
  MOD_RES (2348)..(2348): Selenocysteine
  MOD_RES (2361)..(2361): Selenocysteine
  MOD_RES (2386)..(2386): Selenocysteine
  MOD_RES (2388)..(2388): Selenocysteine
  MOD_RES (2434)..(2434): Selenocysteine
  MOD_RES (2443)..(2443): Selenocysteine
  MOD_RES (2452)..(2452): Selenocysteine
  MOD_RES (2486)..(2486): Selenocysteine
  MOD_RES (2491)..(2491): Selenocysteine
  MOD_RES (2528)..(2528): Selenocysteine
  MOD_RES (2535)..(2535): Selenocysteine
  MOD_RES (2538)..(2538): Selenocysteine
  MOD_RES (2545)..(2545): Selenocysteine
  MOD_RES (2600)..(2600): Selenocysteine
  MOD_RES (2617)..(2618): Selenocysteine
  MOD_RES (2633)..(2633): Selenocysteine
  MOD_RES (2635)..(2635): Selenocysteine
  MOD_RES (2662)..(2662): Selenocysteine
  MOD_RES (2665)..(2665): Selenocysteine
  MOD_RES (2713)..(2713): Selenocysteine
  MOD_RES (2718)..(2718): Selenocysteine
  MOD_RES (2732)..(2732): Selenocysteine
MSDKMSSFLHIGDICSLYAEGSXNGFISXLGLVDDRCVVQPEXGDLNNPPKKFRDCLFKLCPMNRYSAQKQFWKAAKPGANSXXDAVLLNKLHHAADLEKKQNEXENRKLLGXVIQYGNVIQLLHLKSNKYLXVNKRLPALLEKNAMRVXLDEAGNEGSWFYIQPFYKLRSIGDSVVIGDKVVLNPVNAGQPLHASSHQLVDNPGCNEVNSVNCNXSWKIVLFMKWSDNKDDILKGGDVVRLFHAEQEKFLXCDEHRKKQHVFLRXXGRQSAXSAXSSKALWEVEVVQHDPCRGGAGYWNSLFRFKHLAXGHYLAAEVDPDFEEECLEFQPSVDPDQDASRSRLRNAQEKMVYSLVSVPEGNDISSIFELDPXXLRGGDSLVPRNSYVRLRHLCXNXWVHSXNIPIDKEEEKPVMLKIGXSPVKEDKEAFAIVPVSPAEVRDLDFANDASKVLGSIAGKLEKGXIXQNERRSVXKLLEDLVYFVXGGXNSGQDVLEVVFSKPNRERQKLMREQNILKQIFKLLQAPFXDCGDGPMLRLEELGDQRHAPFRHICRLCYRVLRHSQQDYRKNQEYIAKQFGFMQKQIGYDVLAEDXIXALLHNNRKLLEKHIXAAEIDXFVSLVRKNREPRFLDYLSDLCVSMNKSIPVXQELICKAVLNPXNADILIEXKLVLSRFEFEGVSSXGENALEAGEDEEEVWLFWRDSNKEIRSKSVRELAQDAKEGQKEDRDVLSYYRYQLNLFARMCLDRQYLAINEISGQLDVDLILRCMSDENLPYDLRASFCRLMLHMHVDRDPQEQVXPVKYARLWSEIPSEIAIDDYDSSGASKDEIKERFAQXMEFVEEYLRDVVCQRFPFSDKEKNKLXFEVVNLARNLIYFGFYNFSDLLRLXKILLAILDCVHVXXIFPISKMAKGEENKGNNDVEKLKSSNVMRSIHGVGELMXQVVLRGGGFLPMXPMAAAPEGNVKQAEPEKEDIMVMDXKLKIIEILQFILNVRLDYRISCLLCIFKREFDESNSQXSEXSSGNSSQEGPSNVPGALDFEHIEEQAEGIFGGSEENXPLDLDDHGGRXFLRVLLHLXMHDYPPLVSGALQLLFRHFSQRQEVLQAFKQVQLLVXSQDVDNYKQIKQDLDQLRSIVEKSELWVYKGQGPDEXMDGASGENEHKKXEEGNNKPQKHESXSSYNYRVVKEILIRLSKLCVQESASVRKSRKQQQRLLRNMGAHAVVLELLQIPYEKAEDXKMQEIMRLAHEFLQNFCAGNQQNQALLHKHINLFLNPGILEAVXMQHIFMNNFQLCSEINERVVQHFVHCIEXHGRNVQYIKFLQXIVKAEGKFIKKCQDMVMAELVNSGEDVLVFYNDRASFQXLIQMMRSERDRMDENSPLMYHIHLVELLAVCXEGKNVYXEIKCNSLLPLDDIVRVVXHEDCIPEVKIAYINFLNHCYVDXEVEMKEIYXSNHMWKLFENFLVDICRACNNXSDRKHADSILEKYVXEIVMSIVXXFFSSPFSDQSXXLQXRQPVFVQLLQGVFRVYHCNWLMPSQKASVESCIRVLSDVAKSRAIAIPVDLDSQVNNLFLKSHSIVQKXAMNWRLSARNAARRDSVLAASRDYRNIIERLQDIVSALEDRLRPLVQAELSVLVDVLHRPELLFPENXDARRKCESGGFICKLIKHXKQLLEENEEKLCIKVLQXLREMMXKDRGYGEKLISIDELDNAELPPAPDSENAXEELEPSPPLRQLEDHKRGEALRQVLVNRYYGNVRPSGRRESLXSFGNGPLSAGGPGKPGGGGGGSGSSSMSRGEMSLAEVQCHLDKEGASNLVIDLIMNASSDRVFHESILLAIALLEGGNXXIQHSFFCRLXEDKKSEKFFKVFYDRMKVAQQEIKAXVXVNXSDLGNKKKDDEVDRDAPSRKKAKEPXXQIXEEVRDQLLEASAAXRKAFXXFRREADPDDHYQPGEGXQAXADKAKDDLEMSAVIXIMQPILRFLQLLCENHNRDLQNFLRCQNNKXNYNLVCEXLQFLDCICGSXXGGLGLLGLYINEKNVALINQXLESLXEYCQGPCHENQNCIAXHESNGIDIIXALILNDINPLGKKRMDLVLELKNNASKLLLAIMESRHDSENAERILYNMRPKELVEVIKKAYMQGEVEFEDGENGEDGAASPRNVGHNIYILAHQLARHNKELQSMLKPGGQVDGDEALEFYAKHXAQIEIVRLDRXMEQIVFPVPSICEFLXKESKLRIYYXXERDEQGSKINDFFLRSEDLFNEMNWQKKLRAQPVLYWCARNMSFWSSISFNLAVLMNLLVAFFYPFKGVRGGXLEPHWSGLLWXAMLISLAIVIALPKPHGIRALIASXILRLIFSVGLQPXLFLLGAFNVCNKIIFLMSFVGNCGXFXRGYRAMVLDVEFLYHLLYLVICAMGLFVHEFFYSLLLFDLVYREEXLLNVIKSVXRNGRSIILXAVLALILVYLFSIVGYLFFKDDFILEVDRLPNEXAVPEXGESLASEFLFSDVCRVESGENCSSPAPREELVPAEEXEQDKEHXCEXLLMCIVXVLSHGLRSGGGVGDVLRKPSKEEPLFAARVIYDLLFFFMVIIIVLNLIFGVIIDXFADLRSEKQKKEEILKXXCFICGLERDKFDNKXVXFEEHIKEEHNMWHYLCFIVLVKVKDSXEYXGPESYVAEMIKERNLDWFPRMRAMSLVSSDSEGEQNELRNLQEKLESXMKLVXNLSGQLSELKDQMXEQRKQKQRIGLLGHPPHMNVNPQQPA

SEQ ID NO: 14068 - protein, 79 aa, Homo sapiens
  MOD_RES (2)..(2): Selenocysteine
  MOD_RES (29)..(29): Selenocysteine
  MOD_RES (56)..(56): Selenocysteine
  MOD_RES (68)..(69): Selenocysteine
  MOD_RES (74)..(74): Selenocysteine
  MOD_RES (76)..(76): Selenocysteine
  MOD_RES (78)..(78): Selenocysteine
MXEKMSSFLYIGDIVSLYAEGSVNGFISXLGLPFQGVPYEQIFCPEAILESKASQXREPHRGSLAEEXXARCRXGXKXK

SEQ ID NO: 14069 - protein, 181 aa, Homo sapiens
  MOD_RES (2)..(2): Selenocysteine
  MOD_RES (29)..(29): Selenocysteine
  MOD_RES (84)..(84): Selenocysteine
  MOD_RES (133)..(133): Selenocysteine
MXEKMSSFLYIGDIVSLYAEGSVNGFISXLGLVDDRCVVHPEAGDLANPPKKFRDCLFKVCPMNRYSAQKQYWKAKQAKQGNHXEAALLKKLQHAAELEQKQNESENKKLLGEIVKYSNVIQLLHIKSNKYLXVNKRLPALLEKNAMRVSLDAAGNEGSWFYIHPFWKLRSEGDNDASFWI

SEQ ID NO: 14070 - protein, 2701 aa, Homo sapiens
  MOD_RES (2)..(2): Selenocysteine
  MOD_RES (29)..(29): Selenocysteine
  MOD_RES (84)..(84): Selenocysteine
  MOD_RES (133)..(133): Selenocysteine
  MOD_RES (216)..(216): Selenocysteine
  MOD_RES (221)..(221): Selenocysteine
  MOD_RES (252)..(252): Selenocysteine
  MOD_RES (266)..(267): Selenocysteine
  MOD_RES (273)..(273): Selenocysteine
  MOD_RES (276)..(276): Selenocysteine
  MOD_RES (310)..(310): Selenocysteine
  MOD_RES (339)..(339): Selenocysteine
  MOD_RES (353)..(353): Selenocysteine
  MOD_RES (372)..(373): Selenocysteine
  MOD_RES (394)..(394): Selenocysteine
  MOD_RES (396)..(396): Selenocysteine
  MOD_RES (399)..(399): Selenocysteine
  MOD_RES (401)..(401): Selenocysteine
  MOD_RES (407)..(407): Selenocysteine
  MOD_RES (419)..(419): Selenocysteine
  MOD_RES (422)..(422): Selenocysteine
  MOD_RES (454)..(455): Selenocysteine
  MOD_RES (463)..(463): Selenocysteine
  MOD_RES (465)..(465): Selenocysteine
  MOD_RES (473)..(473): Selenocysteine
  MOD_RES (499)..(499): Selenocysteine
  MOD_RES (594)..(594): Selenocysteine
  MOD_RES (596)..(596): Selenocysteine
  MOD_RES (611)..(611): Selenocysteine
  MOD_RES (617)..(617): Selenocysteine
  MOD_RES (642)..(643): Selenocysteine
  MOD_RES (648)..(648): Selenocysteine
  MOD_RES (668)..(668): Selenocysteine
  MOD_RES (720)..(720): Selenocysteine
  MOD_RES (728)..(728): Selenocysteine
  MOD_RES (754)..(754): Selenocysteine
  MOD_RES (805)..(805): Selenocysteine
  MOD_RES (809)..(809): Selenocysteine
  MOD_RES (812)..(812): Selenocysteine
  MOD_RES (820)..(820): Selenocysteine
  MOD_RES (834)..(834): Selenocysteine
  MOD_RES (861)..(861): Selenocysteine
  MOD_RES (886)..(886): Selenocysteine
  MOD_RES (888)..(888): Selenocysteine
  MOD_RES (920)..(920): Selenocysteine
  MOD_RES (929)..(929): Selenocysteine
  MOD_RES (959)..(959): Selenocysteine
  MOD_RES (965)..(965): Selenocysteine
  MOD_RES (969)..(969): Selenocysteine
  MOD_RES (1009)..(1009): Selenocysteine
  MOD_RES (1017)..(1017): Selenocysteine
  MOD_RES (1036)..(1036): Selenocysteine
  MOD_RES (1056)..(1056): Selenocysteine
  MOD_RES (1122)..(1122): Selenocysteine
  MOD_RES (1166)..(1166): Selenocysteine
  MOD_RES (1240)..(1240): Selenocysteine
  MOD_RES (1265)..(1265): Selenocysteine
  MOD_RES (1273)..(1273): Selenocysteine
  MOD_RES (1302)..(1302): Selenocysteine
  MOD_RES (1315)..(1315): Selenocysteine
  MOD_RES (1333)..(1333): Selenocysteine
  MOD_RES (1377)..(1377): Selenocysteine
  MOD_RES (1386)..(1386): Selenocysteine
  MOD_RES (1393)..(1393): Selenocysteine
  MOD_RES (1411)..(1411): Selenocysteine
  MOD_RES (1434)..(1434): Selenocysteine
  MOD_RES (1443)..(1443): Selenocysteine
  MOD_RES (1464)..(1466): Selenocysteine
  MOD_RES (1480)..(1480): Selenocysteine
  MOD_RES (1500)..(1500): Selenocysteine
  MOD_RES (1504)..(1504): Selenocysteine
  MOD_RES (1523)..(1523): Selenocysteine
  MOD_RES (1539)..(1539): Selenocysteine
  MOD_RES (1561)..(1561): Selenocysteine
  MOD_RES (1660)..(1660): Selenocysteine
  MOD_RES (1677)..(1677): Selenocysteine
  MOD_RES (1694)..(1694): Selenocysteine
  MOD_RES (1723)..(1723): Selenocysteine
  MOD_RES (1765)..(1765): Selenocysteine
  MOD_RES (1787)..(1787): Selenocysteine
  MOD_RES (1789)..(1789): Selenocysteine
  MOD_RES (1824)..(1824): Selenocysteine
  MOD_RES (1826)..(1826): Selenocysteine
  MOD_RES (1829)..(1829): Selenocysteine
  MOD_RES (1845)..(1845): Selenocysteine
  MOD_RES (1856)..(1856): Selenocysteine
  MOD_RES (1868)..(1868): Selenocysteine
  MOD_RES (1874)..(1874): Selenocysteine
  MOD_RES (1894)..(1894): Selenocysteine
  MOD_RES (1901)..(1901): Selenocysteine
  MOD_RES (1910)..(1910): Selenocysteine
  MOD_RES (1947)..(1947): Selenocysteine
  MOD_RES (1955)..(1955): Selenocysteine
  MOD_RES (1966)..(1967): Selenocysteine
  MOD_RES (1993)..(1993): Selenocysteine
  MOD_RES (2005)..(2005): Selenocysteine
  MOD_RES (2009)..(2009): Selenocysteine
  MOD_RES (2146)..(2146): Selenocysteine
  MOD_RES (2157)..(2157): Selenocysteine
  MOD_RES (2173)..(2173): Selenocysteine
  MOD_RES (2183)..(2184): Selenocysteine
  MOD_RES (2200)..(2200): Selenocysteine
  MOD_RES (2258)..(2258): Selenocysteine
  MOD_RES (2275)..(2275): Selenocysteine
  MOD_RES (2301)..(2301): Selenocysteine
  MOD_RES (2307)..(2307): Selenocysteine
  MOD_RES (2332)..(2332): Selenocysteine
  MOD_RES (2334)..(2334): Selenocysteine
  MOD_RES (2380)..(2380): Selenocysteine
  MOD_RES (2389)..(2389): Selenocysteine
  MOD_RES (2398)..(2398): Selenocysteine
  MOD_RES (2422)..(2422): Selenocysteine
  MOD_RES (2432)..(2432): Selenocysteine
  MOD_RES (2435)..(2435): Selenocysteine
  MOD_RES (2442)..(2442): Selenocysteine
  MOD_RES (2444)..(2444): Selenocysteine
  MOD_RES (2446)..(2447): Selenocysteine
  MOD_RES (2460)..(2460): Selenocysteine
  MOD_RES (2466)..(2466): Selenocysteine
  MOD_RES (2478)..(2478): Selenocysteine
  MOD_RES (2481)..(2481): Selenocysteine
  MOD_RES (2488)..(2488): Selenocysteine
  MOD_RES (2543)..(2543): Selenocysteine
  MOD_RES (2560)..(2561): Selenocysteine
  MOD_RES (2576)..(2576): Selenocysteine
  MOD_RES (2605)..(2605): Selenocysteine
  MOD_RES (2608)..(2608): Selenocysteine
  MOD_RES (2656)..(2656): Selenocysteine
  MOD_RES (2675)..(2675): Selenocysteine
  MOD_RES (2691)..(2691): Selenocysteine
MXEKMSSFLYIGDIVSLYAEGSVNGFISXLGLVDDRCVVHPEAGDLANPPKKFRDCLFKVCPMNRYSAQKQYWKAKQAKQGNHXEAALLKKLQHAAELEQKQNESENKKLLGEIVKYSNVIQLLHIKSNKYLXVNKRLPALLEKNAMRVSLDAAGNEGSWFYIHPFWKLRSEGDNIVVGDKVVLMPVNAGQPLHASNIELLDNPGCKEVNAVNCNXSWKIXLFMKYSSYREDVLKGGDVVRLFHAEQEKFLXCDEYEKKQHIFLRXXLRQSAXSAXSSKALWEIEVVHHDPCRGGAGQWNSLFRFKHLAXGNYLAAELNPDYRDAQNEGKNVRDGVPPXSKKKRQAGEKIMYXLVSVPHGNDIASLFELDAXXLQRADCLVPRNSYVRLRHLCXNXWVXSXSIPIDXDEERPVMLKIGXCQXKEDKEAFAIVSVPLSEVRDLDFANDANKVLAXXVKKLENGXIXQNERRFVXKLLEDLIFFVADVPNNGQEVLDVVIXKPNRERQKLMREQNILAQVFGILKAPFKEKAGEGSMLRLEDLGDQRYAPYKYMLRLCYRVLRHSQQDYRKNQEYIAKNFCVMQSQIGYDILAEDXIXALLHNNRKLLEKHIXAKEIEXFVSLLRRNREPRFLDYLSDLCVSNXXAIPVXQELICKFMLSPGNADILIQXKVVSMQADNPMESSILSDDIDDEEVWLYWIDSNKEPHGKAIRHLAQEAKEGXKADLEVLXYYRYQLNLFARMCLDRQYLAINQISXQLSVDLILRCVSDESLPFDLRASFCRLMLHMHVDRDPQESVVPVRYARLWXEIPXKIXIHEYDSIXDSSRNDMKRKFALXMEFVEEYLKEVVNQPFPFGDKEKNKLXFEVVHLARNLIYFGFYSFSELLRLXRXLLAILDIVQAPMSSYFERLSKFQDGGNNVMRXIHGVGEMMXQMVLSRGSIFPMSVPDVPPSIHPSKQGSPXEHEDVXVMDXKLKIIEILQFILSVRLDYRISYMLSIYKKEFGEDNDNAEXSASGSPDXLLPSAIVPDIDEIAAQAEXMFAGRKEKNPVQLDDEGGRXFLRVLIHLIMHDYPPLLSGALQLLFKHFSQRAEVLQAFKQVQLLVSNQDVDNYKQIKADLDQLRLXVEKSELWVEKSSNYENGEIGESQVKGGEEPIEESNILSPVQDGXKKPQIDSNKSNNYRIVKEILIRLSKLCVQNKKCRNQHQRLLKNMGAHSVVLDLLQIPYEKNDEKMNEVMNLAHXFLQNFCRGNPQNQVLLHKHLNLFLXPGLLEAEXMRHIFMNNYHLCNEISERVVQHFVHCIEXHGRHVEYLRFLQXIVKADGKYVKKCQDMVMXELINGGEDVLIFYNDRASFPILLHMMCSERDRGDESGPLAYHIXLVELLAACXEGKNVYXEIKCNSLLPLDDIVRVVXHDDCIPEVKIAYVNFVNHCYVDXEVEMKEIYXSNHIWKLFENFLVDMARVCNXXXDRKHADIFLEKCVXESIMNIVSGFFNSPFSDNSXSLQXHQPVFIQLLQSAFRIYNCXWPNPAQKASVESCIRXLAEVAKNRGIAIPVDLDSQVNXLFMKSHSNMVQRAAMGWRLSARSGPRFKEALGGPAWDYRNIIEKLQDVVASLEHQFSPMMQAEFSVLVDVLYSPELLFPEGSDARIRCGAFMSKLINHXKKLMEKEEKLCIKILQXLREMLEKKDSFVEEGNXLRKILLNRYFKGDYSIGVNGHLSGAYSKXAQVGGSFSGQDSDKMGISMSDIQCLLDKEGASELVIDVIVNXKNDRIFSEGIFLGIALLEGGNXQXQYSFYQQLHEQKKSEKFFKVLYDRMKAAQKEIRSXVXVNXIDLGNKKRDDDNELMXSGPRMRVRDSXLHLKEGMKGQLXEASSAXSKAYCVYRREMDPEIDIMCXGPEAGNXEEKSAEEVXMSPAIAIMQPILRFLQLLCENHNRELQNFLRNQNNKXNYNLVCEXLQFLDCICGSXXGGLGLLGLYINEKNVALVNQNLESLXEYCQGPCHENQXCIAXHESNGIDIIIALILNDINPLGKYRMDLVLQLKNNASKLLLAIMESRHDSENAERILFNMRPRELVDVMKNAYNQGLECDHGDDEGGDDGVSPKDVGHNIYILAHQLARHNKLLQQMLKPGSDPDEGDEALKYYANHXAQIEIVRHDRXMEQIVFPVPNICEYLXRESKCRVFNXXERDEQGSKVNDFFQQXEDLYNEMKWQKKIRNNPALFWFSRHISLWGSISFNLAVFINLAVALFYPFGDDGDEGXLSPLFSVLLWIAVAICXSMLFFFSKPVGIRPFLVSIMLRSIYXIGLGPXLILLGAANLCNKIVFLVSFVGNRGXFXRGYRAVILDMAFLYHVAYVLVCMLGLFVHEFFYSFLLFDLVYREEXLLNVIKSVXRNGRSIILXAVLALILVYLFSIIGFLFLKDDFXMEVDRLKNRXPVXGSHQVPXMXLXXMMEACAKENCSPXIPASNXADEEYEDGIERXCDXLLMCIVXVLNQGLRNGGGVGDVLRRPSKDEPLFAARVVYDLLFYFIVIIIVLNLIFGVIIDXFADLRSEKQKKEEILKXXCFICGLERDKFDNKXVSFEEHIKSEHNMWHYLYFIVLVKVKDPXEYXGPESYVAQMIVEKNLDWFPRMRAMSLVSNEGDSEQNEIRSLQEKLESXMSLVKQLSGQLAELKEQMXEQRKNKQRLGFLGSNXPHVNHHMPPH

SEQ ID NO: 14071 - protein, 102 aa, Homo sapiens
  MOD_RES (2)..(2): Selenocysteine
  MOD_RES (24)..(24): Selenocysteine
  MOD_RES (26)..(26): Selenocysteine
  MOD_RES (61)..(61): Selenocysteine
  MOD_RES (63)..(63): Selenocysteine
  MOD_RES (66)..(66): Selenocysteine
  MOD_RES (82)..(82): Selenocysteine
  MOD_RES (98)..(98): Selenocysteine
NXKNDRIFSEGIFLGIALLEGGNXQXQYSFYQQLHEQKKSEKFFKVLYDRMKAAQKEIRSXVXVNXIDLGNKKRDDDNELMXSGPRMREFWSWGDPKXALQD

SEQ ID NO: 14072 - protein, 2671 aa, Homo sapiens
  MOD_RES (28)..(28): Selenocysteine
  MOD_RES (77)..(77): Selenocysteine
  MOD_RES (106)..(106): Selenocysteine
  MOD_RES (134)..(134): Selenocysteine
  MOD_RES (151)..(151): Selenocysteine
  MOD_RES (155)..(155): Selenocysteine
  MOD_RES (217)..(217): Selenocysteine
  MOD_RES (253)..(253): Selenocysteine
  MOD_RES (267)..(268): Selenocysteine
  MOD_RES (274)..(274): Selenocysteine
  MOD_RES (277)..(277): Selenocysteine
  MOD_RES (311)..(311): Selenocysteine
  MOD_RES (341)..(341): Selenocysteine
  MOD_RES (372)..(373): Selenocysteine
  MOD_RES (377)..(377): Selenocysteine
  MOD_RES (394)..(394): Selenocysteine
  MOD_RES (396)..(396): Selenocysteine
  MOD_RES (401)..(401): Selenocysteine
  MOD_RES (419)..(419): Selenocysteine
  MOD_RES (422)..(422): Selenocysteine
  MOD_RES (499)..(499): Selenocysteine
  MOD_RES (594)..(594): Selenocysteine
  MOD_RES (596)..(596): Selenocysteine
  MOD_RES (611)..(611): Selenocysteine
  MOD_RES (613)..(613): Selenocysteine
  MOD_RES (617)..(617): Selenocysteine
  MOD_RES (648)..(648): Selenocysteine
  MOD_RES (668)..(668): Selenocysteine
  MOD_RES (695)..(695): Selenocysteine
  MOD_RES (697)..(697): Selenocysteine
  MOD_RES (795)..(795): Selenocysteine
  MOD_RES (804)..(804): Selenocysteine
  MOD_RES (808)..(808): Selenocysteine
  MOD_RES (811)..(811): Selenocysteine
  MOD_RES (833)..(833): Selenocysteine
  MOD_RES (860)..(860): Selenocysteine
  MOD_RES (885)..(885): Selenocysteine
  MOD_RES (887)..(887): Selenocysteine
  MOD_RES (926)..(926): Selenocysteine
  MOD_RES (967)..(967): Selenocysteine
  MOD_RES (1012)..(1012): Selenocysteine
  MOD_RES (1019)..(1020): Selenocysteine
  MOD_RES (1041)..(1041): Selenocysteine
  MOD_RES (1063)..(1063): Selenocysteine
  MOD_RES (1091)..(1091): Selenocysteine
  MOD_RES (1119)..(1119): Selenocysteine
  MOD_RES (1152)..(1152): Selenocysteine
  MOD_RES (1228)..(1228): Selenocysteine
  MOD_RES (1255)..(1255): Selenocysteine
  MOD_RES (1263)..(1263): Selenocysteine
  MOD_RES (1292)..(1292): Selenocysteine
  MOD_RES (1305)..(1305): Selenocysteine
  MOD_RES (1323)..(1323): Selenocysteine
  MOD_RES (1326)..(1326): Selenocysteine
  MOD_RES (1383)..(1383): Selenocysteine
  MOD_RES (1388)..(1388): Selenocysteine
  MOD_RES (1401)..(1401): Selenocysteine
  MOD_RES (1407)..(1407): Selenocysteine
  MOD_RES (1424)..(1424): Selenocysteine
  MOD_RES (1433)..(1433): Selenocysteine
  MOD_RES (1439)..(1439): Selenocysteine
  MOD_RES (1445)..(1445): Selenocysteine
  MOD_RES (1463)..(1463): Selenocysteine
  MOD_RES (1475)..(1475): Selenocysteine
  MOD_RES (1489)..(1489): Selenocysteine
  MOD_RES (1493)..(1493): Selenocysteine
  MOD_RES (1496)..(1496): Selenocysteine
  MOD_RES (1505)..(1506): Selenocysteine
  MOD_RES (1528)..(1528): Selenocysteine
  MOD_RES (1572)..(1573): Selenocysteine
  MOD_RES (1580)..(1580): Selenocysteine
  MOD_RES (1582)..(1582): Selenocysteine
  MOD_RES (1600)..(1600): Selenocysteine
  MOD_RES (1651)..(1651): Selenocysteine
  MOD_RES (1668)..(1668): Selenocysteine
  MOD_RES (1677)..(1677): Selenocysteine
  MOD_RES (1701)..(1701): Selenocysteine
  MOD_RES (1712)..(1712): Selenocysteine
  MOD_RES (1724)..(1724): Selenocysteine
  MOD_RES (1734)..(1734): Selenocysteine
  MOD_RES (1742)..(1742): Selenocysteine
  MOD_RES (1744)..(1744): Selenocysteine
  MOD_RES (1766)..(1766): Selenocysteine
  MOD_RES (1800)..(1800): Selenocysteine
  MOD_RES (1803)..(1803): Selenocysteine
  MOD_RES (1825)..(1826): Selenocysteine
  MOD_RES (1865)..(1865): Selenocysteine
  MOD_RES (1899)..(1899): Selenocysteine
  MOD_RES (1907)..(1907): Selenocysteine
  MOD_RES (1918)..(1919): Selenocysteine
  MOD_RES (1940)..(1940): Selenocysteine
  MOD_RES (1943)..(1943): Selenocysteine
  MOD_RES (1945)..(1945): Selenocysteine
  MOD_RES (1957)..(1957): Selenocysteine
  MOD_RES (1961)..(1961): Selenocysteine
  MOD_RES (1971)..(1971): Selenocysteine
  MOD_RES (2121)..(2121): Selenocysteine
  MOD_RES (2148)..(2148): Selenocysteine
  MOD_RES (2151)..(2151): Selenocysteine
  MOD_RES (2157)..(2159): Selenocysteine
  MOD_RES (2202)..(2202): Selenocysteine
  MOD_RES (2231)..(2231): Selenocysteine
  MOD_RES (2256)..(2256): Selenocysteine
  MOD_RES (2281)..(2281): Selenocysteine
  MOD_RES (2291)..(2291): Selenocysteine
  MOD_RES (2306)..(2306): Selenocysteine
  MOD_RES (2329)..(2329): Selenocysteine
  MOD_RES (2354)..(2354): Selenocysteine
  MOD_RES (2363)..(2363): Selenocysteine
  MOD_RES (2372)..(2372): Selenocysteine
  MOD_RES (2408)..(2408): Selenocysteine
  MOD_RES (2424)..(2424): Selenocysteine
  MOD_RES (2451)..(2451): Selenocysteine
  MOD_RES (2457)..(2457): Selenocysteine
  MOD_RES (2464)..(2464): Selenocysteine
  MOD_RES (2519)..(2519): Selenocysteine
  MOD_RES (2536)..(2537): Selenocysteine
  MOD_RES (2552)..(2552): Selenocysteine
  MOD_RES (2581)..(2581): Selenocysteine
  MOD_RES (2584)..(2584): Selenocysteine
  MOD_RES (2632)..(2632): Selenocysteine
  MOD_RES (2640)..(2640): Selenocysteine
  MOD_RES (2651)..(2651): Selenocysteine
MSEMSSFLHIGDIVSLYAEGSVNGFISXLGLVDDRCVVEPAAGDLDNPPKKFRDCLFKVCPMNRYSAQKQYWKAKQXKQDKEKIADVVLLQKLQHAAQMEQKQNDXENKKVHGDVVKYGSVIQLLHMKSNKYLXVNKRLPALLEKNAMRVXLDAXGNEGSWLFIQPFWKLRSNGDNVVVGDKVILNPVNAGQPLHASNYELSDNAGCKEVNSVNCNXSWKINLFMQFRDHLEEVLKGGDVVRLFHAEQEKFLXCDEYKGKLQVFLRXXLRQSAXSAXSSNALWEVEVVHHDPCRGGAGHWNGLYRFKHLAXGNYLAAEENPSYKGDASDPKAAGMGAQGRXGRRNAGEKIKYCLVAVPHGNDIASLFELDPXXLQKXDSFVPRNSYVRLRHLCXNXWIQSXNVPIDIEEERPIRLMLGXCPXKEDKEAFAIVSVPVSEIRDLDFANDASSMLASAVEKLNEGFISQNDRRFVIQLLEDLVFFVSDVPNNGQNVLDIMVXKPNRERQKLMREQNILKQVFGILKAPFREKGGEGPLVRLEELSDQKNAPYQHMFRLCYRVLRHSQEDYRKNQEHIAKQFGMMQSQIGYDILAEDXIXALLHNNRKLLEKHIXKXEVEXFVSLVRKNREPRFLDYLSDLCVSNHIAIPVXQELICKCVLDPKNSDILIRXELRPVKEMAQSHEYLSIEYSEEEVWLXWXDKNNEHHEKSVRQLAQEARAGNAHDENVLSYYRYQLKLFARMCLDRQYLAIDEISQQLGVDLIFLCMADEMLPFDLRASFCHLMLHVHVDRDPQELVXPVKFARLWXEIPXAIXIKDYDSNLNASRDDKKNKFANXMEFVEDYLNNVVSEAVPFANEEKNKLXFEVVSLAHNLIYFGFYSFSELLRLXRXLLGIIDCVQGPPAMLQAYEDPGGKNVRRSIQGVGHMMSXMVLSRKQSVFSAPSLSAGASAAEPLDRSKFEENEDIVVMEXKLKILEILQFILNVRLDYRISYLLSVFKKEFVEVFPMQDSGADGXAPAFDSXXANMNLDRIGEQAEAMFGVGKXSSMLEVDDEGGRMFLRVLIHLXMHDYAPLVSGALQLLFKHFSQRQEAMHXFKQVQLLISAQDVENYKVIKSELDRLRXMVEKSELWVDKKGSGKGEEVEAGAAKDKKERPXDEEGFLHPPGEKSSENYQIVKGILERLNKMCGVGEQMRKKQQRLLKNMDAHKVMLDLLQIPYDKGDAKMMEILRYXHQFLQKFCAGNPGNQALLHKHLHLFLXPGLLEAEXMQHIFLNNYQLCSEISEPVLQHFVHLLAXHGRHVQYLDFLHXVIKAEGKYVKKCQDMIMXELXNAGDDVVVFYNDKASLAHLLDMMKAARDGVEDHSPLMYHISLVDLLAACAEGKNVYXEIKCXSLLPLEDVVSVVXHEDCIXEVKMAYVNFVNHCYVDXEVEMKEIYXSNHIWXLFENFXLDMARVCSKREKRVADPXLEKYVLSVVLDXINAFFSSPFSENSXSLQXHQXIVVQLLQSXXRLLECPWLQQQHKGSVEACIRXLAMVAKGRAILLPMDLDAHISSMLSSGASCAAAAQRNASSYKAXXRAFPRVXPXANQWDYKNIIEKLQDIIXALEERLKPLVQAELSVLVDVLHWPELLFLEGSEAYQRCESGGFLSKLIQHXKDLMESEEKLCIKVLRXLQQMLLKKXKYGDRGNQLRKMLLQNYLQNRKSXSRGDLPDPIGXGLDPDWSAIAAXQCRLDKEGAXKLVCDLIXSXKNEKIFQESIGLAIHLLDGGNXEIQKSFHNLMMSDKKSERFFKVLHDRMKRAQQEXKSXVAVNMNDLGSQPHEDREPVDPXXKGRVASFSIPGSSSRYSLGPSLRRGHEVSERVQSSEMGXSVLIMQPILRFLQLLCENHNRDLQNFLRCQNNKXNYNLVCEXLQFLDIMCGSXXGGLGLLGLYINEDNVGLVIQXLEXLXEYCQGPCHENQXCIVXHESNGIDIIXALILNDISPLCKYRMDLVLQLKDNASKLLLALMESRHDSENAERILISLRPQELVDVIKKAYLQEEERENSEVSPREVGHNIYILALQLSRHNKQLQHLLKPVKRIQEEEAEGISSMLSLNNKQLSQMLKSSAPAQEEEEDPLAYYENHXSQIEIVRQDRSMEQIVFPVPGICQFLXEEXKHRLFXXXEQDEQGSKVSDFFDQSSFLHNEMEWQRKLRSMPLIYWFSRRMXLWGSISFNLAVFINIIIAFFYPYMEGASXGVLDSPLISLLFWILICFSIAALFXKRYSIRPLIVALILRSIYYLGIGPXLNILGALNLXNKIVFVVSFVGNRGXFIRGYKAMVMDMEFLYHVGYILXSVLGLFAHELFYSILLFDLIYREEXLFNVIKSVXRNGRSILLXALLALILVYLFSIVGFLFLKDDFILEVDRLPNNHSXASPLGMPHGAAAFVDXCSGDKMDCVSGLSVPEVLEEDRELDSXERACDXLLMCIVXVMNHGLRNGGGVGDILRKPSKDESLFPARVVYDLLFFFIVIIIVLNLIFGVIIDXFADLRSEKQKKEEILKXXCFICGLERDKFDNKXVSFEEHIKLEHNMWNYLYFIVLVRVKNKXDYXGPESYVAQMIKNKNLDWFPRMRAMSLVSNEGEGEQNEIRILQDKLNSXMKLVSHLXAQLNELKEQMXEQRKRRQRLGFVDVQNCISR

SEQ ID NO: 14073 - protein, 173 aa, Homo sapiens
  MOD_RES (3)..(3): Selenocysteine
  MOD_RES (67)..(67): Selenocysteine
  MOD_RES (86)..(86): Selenocysteine
  MOD_RES (96)..(96): Selenocysteine
  MOD_RES (112)..(112): Selenocysteine
  MOD_RES (129)..(129): Selenocysteine
  MOD_RES (160)..(160): Selenocysteine
  MOD_RES (168)..(168): Selenocysteine
  MOD_RES (170)..(170): Selenocysteine
ENXPENHPDHSHLKHALEKAEELCSQVNEGVREKENSDRLEWIQAHVQCEGLSEPIFLNEVLVKLPXDPSGDEPIFHISHIDRVYXLRAESINERXAWVQKIKAASELYIEXEKKKREKAYLVRSQRAXGIGRLMVNVVEGIELKPCRSHGKSNPYCEVXMGSQCHIXKXIQD

SEQ ID NO: 14074 - protein, 77 aa, Homo sapiens
  MOD_RES (17)..(17): Selenocysteine
  MOD_RES (24)..(24): Selenocysteine
  MOD_RES (51)..(51): Selenocysteine
HQHQEPAKPAVQAPWSXAEKGPLXISAQENVKVVYYRALYPFESRSHDEIXIQPGDIVMGNGWMKAKLENPAGLEEN

SEQ ID NO: 14075 - protein, 78 aa, Homo sapiens
  MOD_RES (6)..(6): Selenocysteine
  MOD_RES (18)..(18): Selenocysteine
  MOD_RES (40)..(40): Selenocysteine
MAQFPXPFGGSLDIWAIXVEERAKHDQQFHSLKPISGFIXGDQARNFFFQSGLPQPVLAQIWALADMNNDGRMDQVEF

SEQ ID NO: 14076 - protein, 115 aa, Homo sapiens
  MOD_RES (6)..(6): Selenocysteine
  MOD_RES (18)..(18): Selenocysteine
  MOD_RES (40)..(40): Selenocysteine
MAQFPXPFGGSLDIWAIXVEERAKHDQQFHSLKPISGFIXGDQARNFFFQSGLPQPVLAQIWALADMNNDGRMDQVEFSIAMKLIKLKLQGYQLPSALPPVMKQQPVAISSAPAF

SEQ ID NO: 14077 - protein, 361 aa, Homo sapiens
  MOD_RES (6)..(6): Selenocysteine
  MOD_RES (18)..(18): Selenocysteine
  MOD_RES (40)..(40): Selenocysteine
  MOD_RES (118)..(118): Selenocysteine
  MOD_RES (136)..(136): Selenocysteine
  MOD_RES (175)..(175): Selenocysteine
  MOD_RES (181)..(181): Selenocysteine
  MOD_RES (187)..(187): Selenocysteine
  MOD_RES (215)..(215): Selenocysteine
  MOD_RES (263)..(263): Selenocysteine
  MOD_RES (289)..(289): Selenocysteine
MAQFPXPFGGSLDIWAIXVEERAKHDQQFHSLKPISGFIXGDQARNFFFQSGLPQPVLAQIWALADMNNDGRMDQVEFSIAMKLIKLKLQGYQLPSALPPVMKQQPVAISSAPAFAAXLPKSSSFSRSGPGSQLNXKLQKAQSFDVASVPPVAEWAVPQSSRLKYRQLFNSHDKXMSGHLXGPQARXILMQSSLPQAQLASIWNLSDIDQDGKLXAEEFILAMHLIDVAMSGQPLPPVLPPEYIPPSFRRVRSGSGISVISSXSVDQRLPEEPVLEDEQQQLEKKLPVXFEDKKRENFERGNLELEKRRQALLEQQRKEQERLAQLERAEQERKERERQEQERKRQLELEKQLEKQRELER

SEQ ID NO: 14078 - protein, 877 aa, Homo sapiens
  MOD_RES (6)..(6): Selenocysteine
  MOD_RES (18)..(18): Selenocysteine
  MOD_RES (40)..(40): Selenocysteine
  MOD_RES (141)..(141): Selenocysteine
  MOD_RES (159)..(159): Selenocysteine
  MOD_RES (198)..(198): Selenocysteine
  MOD_RES (204)..(204): Selenocysteine
  MOD_RES (210)..(210): Selenocysteine
  MOD_RES (238)..(238): Selenocysteine
  MOD_RES (286)..(286): Selenocysteine
  MOD_RES (312)..(312): Selenocysteine
  MOD_RES (440)..(440): Selenocysteine
  MOD_RES (467)..(468): Selenocysteine
  MOD_RES (476)..(476): Selenocysteine
  MOD_RES (488)..(488): Selenocysteine
  MOD_RES (530)..(530): Selenocysteine
  MOD_RES (556)..(556): Selenocysteine
  MOD_RES (689)..(689): Selenocysteine
  MOD_RES (696)..(696): Selenocysteine
  MOD_RES (723)..(723): Selenocysteine
  MOD_RES (737)..(737): Selenocysteine
  MOD_RES (751)..(751): Selenocysteine
  MOD_RES (775)..(775): Selenocysteine
  MOD_RES (778)..(778): Selenocysteine
  MOD_RES (790)..(790): Selenocysteine
  MOD_RES (797)..(797): Selenocysteine
  MOD_RES (803)..(804): Selenocysteine
  MOD_RES (814)..(814): Selenocysteine
  MOD_RES (817)..(817): Selenocysteine
  MOD_RES (819)..(819): Selenocysteine
  MOD_RES (825)..(825): Selenocysteine
  MOD_RES (838)..(838): Selenocysteine
  MOD_RES (852)..(852): Selenocysteine
  MOD_RES (855)..(855): Selenocysteine
  MOD_RES (857)..(857): Selenocysteine
MAQFPXPFGGSLDIWAIXVEERAKHDQQFHSLKPISGFIXGDQARNFFFQSGLPQPVLAQIWALADMNNDGRMDQVEFSIAMKLIKLKLQGYQLPSALPPVMKQQPVAISSAPAFAAVPPLANGAPPVIQPLPAFAHPAAXLPKSSSFSRSGPGSQLNXKLQKAQSFDVASVPPVAEWAVPQSSRLKYRQLFNSHDKXMSGHLXGPQARXILMQSSLPQAQLASIWNLSDIDQDGKLXAEEFILAMHLIDVAMSGQPLPPVLPPEYIPPSFRRVRSGSGISVISSXSVDQRLPEEPVLEDEQQQLEKKLPVXFEDKKRENFERGNLELEKRRQALLEQQRKEQERLAQLERAEQERKERERQEQERKRQLELEKQLEKQRELERQREEERRKEIERREAAKRELERQRQLEWERNRRQELLNQRNKEQEDIVVLKAKKKXLEFELEALNDKKHQLEGKLQDIRCRLXXQRQEIESXNKSRELRIAEIXHLQQQLQESQQMLGRLIPEKQILNDQLKQVQQNSLHRDSLVXLKRALEAKELARQHLRDQLDEVEKEXRSKLQEIDIFNNQLKELREIHNKQQLQKQKSMEAERLKQKEQERKIIELEKQKEEAQRRAQERDKQWLEHVQQEDEHQRPRKLHEEEKLKREESVKKKDGEEKGKQEAQDKLGRLFHQHQEPAKPAVQAPWSXAEKGPLXISAQENVKVVYYRALYPFESRSHDEIXIQPGDIVMVDESQXGEPGWLGGELKGKXGWFPANYAEKIPENEVPAPVKPVXDSXSAPAPKLALREXPAPLAVXSSEPSXXPNNWADFSSXWPXSXNEKPEXDNWDAWAAQPSLXVPSAGQLRQRSAFXPAXAXGSSPSPVLGQHGFWFFRESC

SEQ ID NO: 14079 - protein, 1178 aa, Homo sapiens
  MOD_RES (6)..(6): Selenocysteine
  MOD_RES (18)..(18): Selenocysteine
  MOD_RES (40)..(40): Selenocysteine
  MOD_RES (141)..(141): Selenocysteine
  MOD_RES (159)..(159): Selenocysteine
  MOD_RES (198)..(198): Selenocysteine
  MOD_RES (204)..(204): Selenocysteine
  MOD_RES (210)..(210): Selenocysteine
  MOD_RES (238)..(238): Selenocysteine
  MOD_RES (286)..(286): Selenocysteine
  MOD_RES (312)..(312): Selenocysteine
  MOD_RES (440)..(440): Selenocysteine
  MOD_RES (467)..(468): Selenocysteine
  MOD_RES (476)..(476): Selenocysteine
  MOD_RES (488)..(488): Selenocysteine
  MOD_RES (530)..(530): Selenocysteine
  MOD_RES (556)..(556): Selenocysteine
  MOD_RES (689)..(689): Selenocysteine
  MOD_RES (696)..(696): Selenocysteine
  MOD_RES (723)..(723): Selenocysteine
  MOD_RES (737)..(737): Selenocysteine
  MOD_RES (751)..(751): Selenocysteine
  MOD_RES (775)..(775): Selenocysteine
  MOD_RES (778)..(778): Selenocysteine
  MOD_RES (790)..(790): Selenocysteine
  MOD_RES (797)..(797): Selenocysteine
  MOD_RES (803)..(804): Selenocysteine
  MOD_RES (814)..(814): Selenocysteine
  MOD_RES (817)..(817): Selenocysteine
  MOD_RES (819)..(819): Selenocysteine
  MOD_RES (825)..(825): Selenocysteine
  MOD_RES (838)..(838): Selenocysteine
  MOD_RES (852)..(852): Selenocysteine
  MOD_RES (855)..(855): Selenocysteine
  MOD_RES (857)..(857): Selenocysteine
  MOD_RES (899)..(899): Selenocysteine
  MOD_RES (935)..(935): Selenocysteine
  MOD_RES (970)..(970): Selenocysteine
  MOD_RES (980)..(980): Selenocysteine
  MOD_RES (990)..(990): Selenocysteine
  MOD_RES (998)..(998): Selenocysteine
  MOD_RES (1000)..(1000): Selenocysteine
  MOD_RES (1023)..(1023): Selenocysteine
  MOD_RES (1027)..(1027): Selenocysteine
  MOD_RES (1044)..(1044): Selenocysteine
  MOD_RES (1046)..(1046): Selenocysteine
  MOD_RES (1052)..(1052): Selenocysteine
  MOD_RES (1098)..(1098): Selenocysteine
  MOD_RES (1102)..(1102): Selenocysteine
  MOD_RES (1104)..(1104): Selenocysteine
  MOD_RES (1110)..(1110): Selenocysteine
  MOD_RES (1125)..(1125): Selenocysteine
  MOD_RES (1170)..(1171): Selenocysteine
MAQFPXPFGGSLDIWAIXVEERAKHDQQFHSLKPISGFIXGDQARNFFFQSGLPQPVLAQIWALADMNNDGRMDQVEFSIAMKLIKLKLQGYQLPSALPPVMKQQPVAISSAPAFAAVPPLANGAPPVIQPLPAFAHPAAXLPKSSSFSRSGPGSQLNXKLQKAQSFDVASVPPVAEWAVPQSSRLKYRQLFNSHDKXMSGHLXGPQARXILMQSSLPQAQLASIWNLSDIDQDGKLXAEEFILAMHLIDVAMSGQPLPPVLPPEYIPPSFRRVRSGSGISVISSXSVDQRLPEEPVLEDEQQQLEKKLPVXFEDKKRENFERGNLELEKRRQALLEQQRKEQERLAQLERAEQERKERERQEQERKRQLELEKQLEKQRELERQREEERRKEIERREAAKRELERQRQLEWERNRRQELLNQRNKEQEDIVVLKAKKKXLEFELEALNDKKHQLEGKLQDIRCRLXXQRQEIESXNKSRELRIAEIXHLQQQLQESQQMLGRLIPEKQILNDQLKQVQQNSLHRDSLVXLKRALEAKELARQHLRDQLDEVEKEXRSKLQEIDIFNNQLKELREIHNKQQLQKQKSMEAERLKQKEQERKIIELEKQKEEAQRRAQERDKQWLEHVQQEDEHQRPRKLHEEEKLKREESVKKKDGEEKGKQEAQDKLGRLFHQHQEPAKPAVQAPWSXAEKGPLXISAQENVKVVYYRALYPFESRSHDEIXIQPGDIVMVDESQXGEPGWLGGELKGKXGWFPANYAEKIPENEVPAPVKPVXDSXSAPAPKLALREXPAPLAVXSSEPSXXPNNWADFSSXWPXSXNEKPEXDNWDAWAAQPSLXVPSAGQLRQRSAFXPAXAXGSSPSPVLGQGEKVEGLQAQALYPWRAKKDNHLNFNKNDVIXVLEQQDMWWFGEVQGQKGWFPKSYVKLISGPIRKSXSMDSGSSESPASLKRVASPAAKPVVSGEEFIAMYXYESSEQGDLXFQQGDVILVXKKDGDWWXGXVGDKAGVFPSNYVRLKDSEGSGXAGKXGSLGKKPEIAQVIASYXAXGPEQLXLAPGQLILIRKKNPGGWWEGELQARGKKRQIGWFPANYVKLLSPGXSKIXPXEPPKSXALAAVCQVIGMYDYXAQNDDELAFNKGQIINVLNKEDPDWWKGEVNGQVGLFPSNYVKLXXDMDPSQQ

SEQ ID NO: 14080 - protein, 1020 aa, Homo sapiens
  MOD_RES (6)..(6): Selenocysteine
  MOD_RES (18)..(18): Selenocysteine
  MOD_RES (40)..(40): Selenocysteine
  MOD_RES (127)..(127): Selenocysteine
  MOD_RES (145)..(145): Selenocysteine
  MOD_RES (152)..(152): Selenocysteine
  MOD_RES (178)..(178): Selenocysteine
  MOD_RES (196)..(196): Selenocysteine
  MOD_RES (235)..(235): Selenocysteine
  MOD_RES (241)..(241): Selenocysteine
  MOD_RES (247)..(247): Selenocysteine
  MOD_RES (275)..(275): Selenocysteine
  MOD_RES (323)..(323): Selenocysteine
  MOD_RES (349)..(349): Selenocysteine
  MOD_RES (477)..(477): Selenocysteine
  MOD_RES (504)..(505): Selenocysteine
  MOD_RES (513)..(513): Selenocysteine
  MOD_RES (525)..(525): Selenocysteine
  MOD_RES (567)..(567): Selenocysteine
  MOD_RES (593)..(593): Selenocysteine
  MOD_RES (726)..(726): Selenocysteine
  MOD_RES (733)..(733): Selenocysteine
  MOD_RES (760)..(760): Selenocysteine
  MOD_RES (774)..(774): Selenocysteine
  MOD_RES (788)..(788): Selenocysteine
  MOD_RES (812)..(812): Selenocysteine
  MOD_RES (815)..(815): Selenocysteine
  MOD_RES (827)..(827): Selenocysteine
  MOD_RES (834)..(834): Selenocysteine
  MOD_RES (840)..(841): Selenocysteine
  MOD_RES (851)..(851): Selenocysteine
  MOD_RES (854)..(854): Selenocysteine
  MOD_RES (856)..(856): Selenocysteine
  MOD_RES (862)..(862): Selenocysteine
  MOD_RES (875)..(875): Selenocysteine
  MOD_RES (889)..(889): Selenocysteine
  MOD_RES (892)..(892): Selenocysteine
  MOD_RES (894)..(894): Selenocysteine
  MOD_RES (934)..(934): Selenocysteine
  MOD_RES (975)..(975): Selenocysteine
  MOD_RES (1008)..(1008): Selenocysteine
MAQFPXPFGGSLDIWAIXVEERAKHDQQFHSLKPISGFIXGDQARNFFFQSGLPQPVLAQIWALADMNNDGRMDQVEFSIAMKLIKLKLQGYQLPSALPPVMKQQPVAISSAPAFGMGGIASMPPLXAVAPVPMGSIPVVGMSPXLVSSVPXAAVPPLANGAPPVIQPLPAFAHPAAXLPKSSSFSRSGPGSQLNXKLQKAQSFDVASVPPVAEWAVPQSSRLKYRQLFNSHDKXMSGHLXGPQARXILMQSSLPQAQLASIWNLSDIDQDGKLXAEEFILAMHLIDVAMSGQPLPPVLPPEYIPPSFRRVRSGSGISVISSXSVDQRLPEEPVLEDEQQQLEKKLPVXFEDKKRENFERGNLELEKRRQALLEQQRKEQERLAQLERAEQERKERERQEQERKRQLELEKQLEKQRELERQREEERRKEIERREAAKRELERQRQLEWERNRRQELLNQRNKEQEDIVVLKAKKKXLEFELEALNDKKHQLEGKLQDIRCRLXXQRQEIESXNKSRELRIAEIXHLQQQLQESQQMLGRLIPEKQILNDQLKQVQQNSLHRDSLVXLKRALEAKELARQHLRDQLDEVEKEXRSKLQEIDIFNNQLKELREIHNKQQLQKQKSMEAERLKQKEQERKIIELEKQKEEAQRRAQERDKQWLEHVQQEDEHQRPRKLHEEEKLKREESVKKKDGEEKGKQEAQDKLGRLFHQHQEPAKPAVQAPWSXAEKGPLXISAQENVKVVYYRALYPFESRSHDEIXIQPGDIVMVDESQXGEPGWLGGELKGKXGWFPANYAEKIPENEVPAPVKPVXDSXSAPAPKLALREXPAPLAVXSSEPSXXPNNWADFSSXWPXSXNEKPEXDNWDAWAAQPSLXVPSAGQLRQRSAFXPAXAXGSSPSPVLGQPDFLLHPSMRLGHMQPRIVLLFPDPLQCSXSRLLPMLRPRPGVPFLRSPSCQSPSHPSRPISDAAPSVKFXLMPPGRIHPCFLFIPAVNSRNSFLVYFILPGGXLGCFYLCLPHYL

SEQ ID NO: 14081 - protein, 1144 aa, Homo sapiens
  MOD_RES (6)..(6): Selenocysteine
  MOD_RES (18)..(18): Selenocysteine
  MOD_RES (40)..(40): Selenocysteine
  MOD_RES (127)..(127): Selenocysteine
  MOD_RES (145)..(145): Selenocysteine
  MOD_RES (152)..(152): Selenocysteine
  MOD_RES (178)..(178): Selenocysteine
  MOD_RES (196)..(196): Selenocysteine
  MOD_RES (235)..(235): Selenocysteine
  MOD_RES (241)..(241): Selenocysteine
  MOD_RES (247)..(247): Selenocysteine
  MOD_RES (275)..(275): Selenocysteine
  MOD_RES (323)..(323): Selenocysteine
  MOD_RES (349)..(349): Selenocysteine
  MOD_RES (477)..(477): Selenocysteine
  MOD_RES (504)..(505): Selenocysteine
  MOD_RES (513)..(513): Selenocysteine
  MOD_RES (525)..(525): Selenocysteine
  MOD_RES (567)..(567): Selenocysteine
  MOD_RES (593)..(593): Selenocysteine
  MOD_RES (726)..(726): Selenocysteine
  MOD_RES (733)..(733): Selenocysteine
  MOD_RES (760)..(760): Selenocysteine
  MOD_RES (774)..(774): Selenocysteine
  MOD_RES (788)..(788): Selenocysteine
  MOD_RES (812)..(812): Selenocysteine
  MOD_RES (815)..(815): Selenocysteine
  MOD_RES (827)..(827): Selenocysteine
  MOD_RES (834)..(834): Selenocysteine
  MOD_RES (840)..(841): Selenocysteine
  MOD_RES (851)..(851): Selenocysteine
  MOD_RES (854)..(854): Selenocysteine
  MOD_RES (856)..(856): Selenocysteine
  MOD_RES (862)..(862): Selenocysteine
  MOD_RES (875)..(875): Selenocysteine
  MOD_RES (889)..(889): Selenocysteine
  MOD_RES (892)..(892): Selenocysteine
  MOD_RES (894)..(894): Selenocysteine
  MOD_RES (936)..(936): Selenocysteine
  MOD_RES (972)..(972): Selenocysteine
  MOD_RES (1010)..(1010): Selenocysteine
  MOD_RES (1012)..(1012): Selenocysteine
  MOD_RES (1018)..(1018): Selenocysteine
  MOD_RES (1064)..(1064): Selenocysteine
  MOD_RES (1068)..(1068): Selenocysteine
  MOD_RES (1070)..(1070): Selenocysteine
  MOD_RES (1076)..(1076): Selenocysteine
  MOD_RES (1091)..(1091): Selenocysteine
  MOD_RES (1136)..(1137): Selenocysteine
MAQFPXPFGGSLDIWAIXVEERAKHDQQFHSLKPISGFIXGDQARNFFFQSGLPQPVLAQIWALADMNNDGRMDQVEFSIAMKLIKLKLQGYQLPSALPPVMKQQPVAISSAPAFGMGGIASMPPLXAVAPVPMGSIPVVGMSPXLVSSVPXAAVPPLANGAPPVIQPLPAFAHPAAXLPKSSSFSRSGPGSQLNXKLQKAQSFDVASVPPVAEWAVPQSSRLKYRQLFNSHDKXMSGHLXGPQARXILMQSSLPQAQLASIWNLSDIDQDGKLXAEEFILAMHLIDVAMSGQPLPPVLPPEYIPPSFRRVRSGSGISVISSXSVDQRLPEEPVLEDEQQQLEKKLPVXFEDKKRENFERGNLELEKRRQALLEQQRKEQERLAQLERAEQERKERERQEQERKRQLELEKQLEKQRELERQREEERRKEIERREAAKRELERQRQLEWERNRRQELLNQRNKEQEDIVVLKAKKKXLEFELEALNDKKHQLEGKLQDIRCRLXXQRQEIESXNKSRELRIAEIXHLQQQLQESQQMLGRLIPEKQILNDQLKQVQQNSLHRDSLVXLKRALEAKELARQHLRDQLDEVEKEXRSKLQEIDIFNNQLKELREIHNKQQLQKQKSMEAERLKQKEQERKIIELEKQKEEAQRRAQERDKQWLEHVQQEDEHQRPRKLHEEEKLKREESVKKKDGEEKGKQEAQDKLGRLFHQHQEPAKPAVQAPWSXAEKGPLXISAQENVKVVYYRALYPFESRSHDEIXIQPGDIVMVDESQXGEPGWLGGELKGKXGWFPANYAEKIPENEVPAPVKPVXDSXSAPAPKLALREXPAPLAVXSSEPSXXPNNWADFSSXWPXSXNEKPEXDNWDAWAAQPSLXVPSAGQLRQRSAFXPAXAXGSSPSPVLGQGEKVEGLQAQALYPWRAKKDNHLNFNKNDVIXVLEQQDMWWFGEVQGQKGWFPKSYVKLISGPIRKSXSMDSGSSESPASLKRVASPAAKPVVSGEEIAQVIASYXAXGPEQLXLAPGQLILIRKKNPGGWWEGELQARGKKRQIGWFPANYVKLLSPGXSKIXPXEPPKSXALAAVCQVIGMYDYXAQNDDELAFNKGQIINVLNKEDPDWWKGEVNGQVGLFPSNYVKLXXDMDPSQQ

SEQ ID NO: 14082 - protein, 1149 aa, Homo sapiens
  MOD_RES (6)..(6): Selenocysteine
  MOD_RES (18)..(18): Selenocysteine
  MOD_RES (40)..(40): Selenocysteine
  MOD_RES (127)..(127): Selenocysteine
  MOD_RES (145)..(145): Selenocysteine
  MOD_RES (152)..(152): Selenocysteine
  MOD_RES (178)..(178): Selenocysteine
  MOD_RES (196)..(196): Selenocysteine
  MOD_RES (235)..(235): Selenocysteine
  MOD_RES (241)..(241): Selenocysteine
  MOD_RES (247)..(247): Selenocysteine
  MOD_RES (275)..(275): Selenocysteine
  MOD_RES (323)..(323): Selenocysteine
  MOD_RES (349)..(349): Selenocysteine
  MOD_RES (477)..(477): Selenocysteine
  MOD_RES (504)..(505): Selenocysteine
  MOD_RES (513)..(513): Selenocysteine
  MOD_RES (525)..(525): Selenocysteine
  MOD_RES (567)..(567): Selenocysteine
  MOD_RES (593)..(593): Selenocysteine
  MOD_RES (726)..(726): Selenocysteine
  MOD_RES (733)..(733): Selenocysteine
  MOD_RES (760)..(760): Selenocysteine
  MOD_RES (779)..(779): Selenocysteine
  MOD_RES (793)..(793): Selenocysteine
  MOD_RES (817)..(817): Selenocysteine
  MOD_RES (820)..(820): Selenocysteine
  MOD_RES (832)..(832): Selenocysteine
  MOD_RES (839)..(839): Selenocysteine
  MOD_RES (845)..(846): Selenocysteine
  MOD_RES (856)..(856): Selenocysteine
  MOD_RES (859)..(859): Selenocysteine
  MOD_RES (861)..(861): Selenocysteine
  MOD_RES (867)..(867): Selenocysteine
  MOD_RES (880)..(880): Selenocysteine
  MOD_RES (894)..(894): Selenocysteine
  MOD_RES (897)..(897): Selenocysteine
  MOD_RES (899)..(899): Selenocysteine
  MOD_RES (941)..(941): Selenocysteine
  MOD_RES (977)..(977): Selenocysteine
  MOD_RES (1015)..(1015): Selenocysteine
  MOD_RES (1017)..(1017): Selenocysteine
  MOD_RES (1023)..(1023): Selenocysteine
  MOD_RES (1069)..(1069): Selenocysteine
  MOD_RES (1073)..(1073): Selenocysteine
  MOD_RES (1075)..(1075): Selenocysteine
  MOD_RES (1081)..(1081): Selenocysteine
  MOD_RES (1096)..(1096): Selenocysteine
  MOD_RES (1141)..(1142): Selenocysteine
MAQFPXPFGGSLDIWAIXVEERAKHDQQFHSLKPISGFIXGDQARNFFFQSGLPQPVLAQIWALADMNNDGRMDQVEFSIAMKLIKLKLQGYQLPSALPPVMKQQPVAISSAPAFGMGGIASMPPLXAVAPVPMGSIPVVGMSPXLVSSVPXAAVPPLANGAPPVIQPLPAFAHPAAXLPKSSSFSRSGPGSQLNXKLQKAQSFDVASVPPVAEWAVPQSSRLKYRQLFNSHDKXMSGHLXGPQARXILMQSSLPQAQLASIWNLSDIDQDGKLXAEEFILAMHLIDVAMSGQPLPPVLPPEYIPPSFRRVRSGSGISVISSXSVDQRLPEEPVLEDEQQQLEKKLPVXFEDKKRENFERGNLELEKRRQALLEQQRKEQERLAQLERAEQERKERERQEQERKRQLELEKQLEKQRELERQREEERRKEIERREAAKRELERQRQLEWERNRRQELLNQRNKEQEDIVVLKAKKKXLEFELEALNDKKHQLEGKLQDIRCRLXXQRQEIESXNKSRELRIAEIXHLQQQLQESQQMLGRLIPEKQILNDQLKQVQQNSLHRDSLVXLKRALEAKELARQHLRDQLDEVEKEXRSKLQEIDIFNNQLKELREIHNKQQLQKQKSMEAERLKQKEQERKIIELEKQKEEAQRRAQERDKQWLEHVQQEDEHQRPRKLHEEEKLKREESVKKKDGEEKGKQEAQDKLGRLFHQHQEPAKPAVQAPWSXAEKGPLXISAQENVKVVYYRALYPFESRSHDEIXIQPGDIVMVKGEWVDESQXGEPGWLGGELKGKXGWFPANYAEKIPENEVPAPVKPVXDSXSAPAPKLALREXPAPLAVXSSEPSXXPNNWADFSSXWPXSXNEKPEXDNWDAWAAQPSLXVPSAGQLRQRSAFXPAXAXGSSPSPVLGQGEKVEGLQAQALYPWRAKKDNHLNFNKNDVIXVLEQQDMWWFGEVQGQKGWFPKSYVKLISGPIRKSXSMDSGSSESPASLKRVASPAAKPVVSGEEIAQVIASYXAXGPEQLXLAPGQLILIRKKNPGGWWEGELQARGKKRQIGWFPANYVKLLSPGXSKIXPXEPPKSXALAAVCQVIGMYDYXAQNDDELAFNKGQIINVLNKEDPDWWKGEVNGQVGLFPSNYVKLXXDMDPSQQ

SEQ ID NO: 14083 - protein, 1215 aa, Homo sapiens
  MOD_RES (6)..(6): Selenocysteine
  MOD_RES (18)..(18): Selenocysteine
  MOD_RES (40)..(40): Selenocysteine
  MOD_RES (127)..(127): Selenocysteine
  MOD_RES (145)..(145): Selenocysteine
  MOD_RES (152)..(152): Selenocysteine
  MOD_RES (178)..(178): Selenocysteine
  MOD_RES (196)..(196): Selenocysteine
  MOD_RES (235)..(235): Selenocysteine
  MOD_RES (241)..(241): Selenocysteine
  MOD_RES (247)..(247): Selenocysteine
  MOD_RES (275)..(275): Selenocysteine
  MOD_RES (323)..(323): Selenocysteine
  MOD_RES (349)..(349): Selenocysteine
  MOD_RES (477)..(477): Selenocysteine
  MOD_RES (504)..(505): Selenocysteine
  MOD_RES (513)..(513): Selenocysteine
  MOD_RES (525)..(525): Selenocysteine
  MOD_RES (567)..(567): Selenocysteine
  MOD_RES (593)..(593): Selenocysteine
  MOD_RES (726)..(726): Selenocysteine
  MOD_RES (733)..(733): Selenocysteine
  MOD_RES (760)..(760): Selenocysteine
  MOD_RES (774)..(774): Selenocysteine
  MOD_RES (788)..(788): Selenocysteine
  MOD_RES (812)..(812): Selenocysteine
  MOD_RES (815)..(815): Selenocysteine
  MOD_RES (827)..(827): Selenocysteine
  MOD_RES (834)..(834): Selenocysteine
  MOD_RES (840)..(841): Selenocysteine
  MOD_RES (851)..(851): Selenocysteine
  MOD_RES (854)..(854): Selenocysteine
  MOD_RES (856)..(856): Selenocysteine
  MOD_RES (862)..(862): Selenocysteine
  MOD_RES (875)..(875): Selenocysteine
  MOD_RES (889)..(889): Selenocysteine
  MOD_RES (892)..(892): Selenocysteine
  MOD_RES (894)..(894): Selenocysteine
  MOD_RES (936)..(936): Selenocysteine
  MOD_RES (972)..(972): Selenocysteine
  MOD_RES (1007)..(1007): Selenocysteine
  MOD_RES (1017)..(1017): Selenocysteine
  MOD_RES (1027)..(1027): Selenocysteine
  MOD_RES (1035)..(1035): Selenocysteine
  MOD_RES (1037)..(1037): Selenocysteine
  MOD_RES (1060)..(1060): Selenocysteine
  MOD_RES (1064)..(1064): Selenocysteine
  MOD_RES (1081)..(1081): Selenocysteine
  MOD_RES (1083)..(1083): Selenocysteine
  MOD_RES (1089)..(1089): Selenocysteine
  MOD_RES (1135)..(1135): Selenocysteine
  MOD_RES (1139)..(1139): Selenocysteine
  MOD_RES (1141)..(1141): Selenocysteine
  MOD_RES (1147)..(1147): Selenocysteine
  MOD_RES (1162)..(1162): Selenocysteine
  MOD_RES (1207)..(1208): Selenocysteine
MAQFPXPFGGSLDIWAIXVEERAKHDQQFHSLKPISGFIXGDQARNFFFQSGLPQPVLAQIWALADMNNDGRMDQVEFSIAMKLIKLKLQGYQLPSALPPVMKQQPVAISSAPAFGMGGIASMPPLXAVAPVPMGSIPVVGMSPXLVSSVPXAAVPPLANGAPPVIQPLPAFAHPAAXLPKSSSFSRSGPGSQLNXKLQKAQSFDVASVPPVAEWAVPQSSRLKYRQLFNSHDKXMSGHLXGPQARXILMQSSLPQAQLASIWNLSDIDQDGKLXAEEFILAMHLIDVAMSGQPLPPVLPPEYIPPSFRRVRSGSGISVISSXSVDQRLPEEPVLEDEQQQLEKKLPVXFEDKKRENFERGNLELEKRRQALLEQQRKEQERLAQLERAEQERKERERQEQERKRQLELEKQLEKQRELERQREEERRKEIERREAAKRELERQRQLEWERNRRQELLNQRNKEQEDIVVLKAKKKXLEFELEALNDKKHQLEGKLQDIRCRLXXQRQEIESXNKSRELRIAEIXHLQQQLQESQQMLGRLIPEKQILNDQLKQVQQNSLHRDSLVXLKRALEAKELARQHLRDQLDEVEKEXRSKLQEIDIFNNQLKELREIHNKQQLQKQKSMEAERLKQKEQERKIIELEKQKEEAQRRAQERDKQWLEHVQQEDEHQRPRKLHEEEKLKREESVKKKDGEEKGKQEAQDKLGRLFHQHQEPAKPAVQAPWSXAEKGPLXISAQENVKVVYYRALYPFESRSHDEIXIQPGDIVMVDESQXGEPGWLGGELKGKXGWFPANYAEKIPENEVPAPVKPVXDSXSAPAPKLALREXPAPLAVXSSEPSXXPNNWADFSSXWPXSXNEKPEXDNWDAWAAQPSLXVPSAGQLRQRSAFXPAXAXGSSPSPVLGQGEKVEGLQAQALYPWRAKKDNHLNFNKNDVIXVLEQQDMWWFGEVQGQKGWFPKSYVKLISGPIRKSXSMDSGSSESPASLKRVASPAAKPVVSGEEFIAMYXYESSEQGDLXFQQGDVILVXKKDGDWWXGXVGDKAGVFPSNYVRLKDSEGSGXAGKXGSLGKKPEIAQVIASYXAXGPEQLXLAPGQLILIRKKNPGGWWEGELQARGKKRQIGWFPANYVKLLSPGXSKIXPXEPPKSXALAAVCQVIGMYDYXAQNDDELAFNKGQIINVLNKEDPDWWKGEVNGQVGLFPSNYVKLXXDMDPSQQ

SEQ ID NO: 14084 - protein, 1220 aa, Homo sapiens
  MOD_RES (6)..(6): Selenocysteine
  MOD_RES (18)..(18): Selenocysteine
  MOD_RES (40)..(40): Selenocysteine
  MOD_RES (127)..(127): Selenocysteine
  MOD_RES (145)..(145): Selenocysteine
  MOD_RES (152)..(152): Selenocysteine
  MOD_RES (178)..(178): Selenocysteine
  MOD_RES (196)..(196): Selenocysteine
  MOD_RES (235)..(235): Selenocysteine
  MOD_RES (241)..(241): Selenocysteine
  MOD_RES (247)..(247): Selenocysteine
  MOD_RES (275)..(275): Selenocysteine
  MOD_RES (323)..(323): Selenocysteine
  MOD_RES (349)..(349): Selenocysteine
  MOD_RES (477)..(477): Selenocysteine
  MOD_RES (504)..(505): Selenocysteine
  MOD_RES (513)..(513): Selenocysteine
  MOD_RES (525)..(525): Selenocysteine
  MOD_RES (567)..(567): Selenocysteine
  MOD_RES (593)..(593): Selenocysteine
  MOD_RES (726)..(726): Selenocysteine
  MOD_RES (733)..(733): Selenocysteine
  MOD_RES (760)..(760): Selenocysteine
  MOD_RES (779)..(779): Selenocysteine
  MOD_RES (793)..(793): Selenocysteine
  MOD_RES (817)..(817): Selenocysteine
  MOD_RES (820)..(820): Selenocysteine
  MOD_RES (832)..(832): Selenocysteine
  MOD_RES (839)..(839): Selenocysteine
  MOD_RES (845)..(846): Selenocysteine
  MOD_RES (856)..(856): Selenocysteine
  MOD_RES (859)..(859): Selenocysteine
  MOD_RES (861)..(861): Selenocysteine
  MOD_RES (867)..(867): Selenocysteine
  MOD_RES (880)..(880): Selenocysteine
  MOD_RES (894)..(894): Selenocysteine
  MOD_RES (897)..(897): Selenocysteine
  MOD_RES (899)..(899): Selenocysteine
  MOD_RES (941)..(941): Selenocysteine
  MOD_RES (977)..(977): Selenocysteine
  MOD_RES (1012)..(1012): Selenocysteine
  MOD_RES (1022)..(1022): Selenocysteine
  MOD_RES (1032)..(1032): Selenocysteine
  MOD_RES (1040)..(1040): Selenocysteine
  MOD_RES (1042)..(1042): Selenocysteine
  MOD_RES (1065)..(1065): Selenocysteine
  MOD_RES (1069)..(1069): Selenocysteine
  MOD_RES (1086)..(1086): Selenocysteine
  MOD_RES (1088)..(1088): Selenocysteine
  MOD_RES (1094)..(1094): Selenocysteine
  MOD_RES (1140)..(1140): Selenocysteine
  MOD_RES (1144)..(1144): Selenocysteine
  MOD_RES (1146)..(1146): Selenocysteine
  MOD_RES (1152)..(1152): Selenocysteine
  MOD_RES (1167)..(1167): Selenocysteine
  MOD_RES (1212)..(1213): Selenocysteine
MAQFPXPFGGSLDIWAIXVEERAKHDQQFHSLKPISGFIXGDQARNFFFQSGLPQPVLAQIWALADMNNDGRMDQVEFSIAMKLIKLKLQGYQLPSALPPVMKQQPVAISSAPAFGMGGIASMPPLXAVAPVPMGSIPVVGMSPXLVSSVPXAAVPPLANGAPPVIQPLPAFAHPAAXLPKSSSFSRSGPGSQLNXKLQKAQSFDVASVPPVAEWAVPQSSRLKYRQLFNSHDKXMSGHLXGPQARXILMQSSLPQAQLASIWNLSDIDQDGKLXAEEFILAMHLIDVAMSGQPLPPVLPPEYIPPSFRRVRSGSGISVISSXSVDQRLPEEPVLEDEQQQLEKKLPVXFEDKKRENFERGNLELEKRRQALLEQQRKEQERLAQLERAEQERKERERQEQERKRQLELEKQLEKQRELERQREEERRKEIERREAAKRELERQRQLEWERNRRQELLNQRNKEQEDIVVLKAKKKXLEFELEALNDKKHQLEGKLQDIRCRLXXQRQEIESXNKSRELRIAEIXHLQQQLQESQQMLGRLIPEKQILNDQLKQVQQNSLHRDSLVXLKRALEAKELARQHLRDQLDEVEKEXRSKLQEIDIFNNQLKELREIHNKQQLQKQKSMEAERLKQKEQERKIIELEKQKEEAQRRAQERDKQWLEHVQQEDEHQRPRKLHEEEKLKREESVKKKDGEEKGKQEAQDKLGRLFHQHQEPAKPAVQAPWSXAEKGPLXISAQENVKVVYYRALYPFESRSHDEIXIQPGDIVMVKGEWVDESQXGEPGWLGGELKGKXGWFPANYAEKIPENEVPAPVKPVXDSXSAPAPKLALREXPAPLAVXSSEPSXXPNNWADFSSXWPXSXNEKPEXDNWDAWAAQPSLXVPSAGQLRQRSAFXPAXAXGSSPSPVLGQGEKVEGLQAQALYPWRAKKDNHLNFNKNDVIXVLEQQDMWWFGEVQGQKGWFPKSYVKLISGPIRKSXSMDSGSSESPASLKRVASPAAKPVVSGEEFIAMYXYESSEQGDLXFQQGDVILVXKKDGDWWXGXVGDKAGVFPSNYVRLKDSEGSGXAGKXGSLGKKPEIAQVIASYXAXGPEQLXLAPGQLILIRKKNPGGWWEGELQARGKKRQIGWFPANYVKLLSPGXSKIXPXEPPKSXALAAVCQVIGMYDYXAQNDDELAFNKGQIINVLNKEDPDWWKGEVNGQVGLFPSNYVKLXXDMDPSQQ

SEQ ID NO: 14085 - protein, 1716 aa, Homo sapiens
  MOD_RES (6)..(6): Selenocysteine
  MOD_RES (18)..(18): Selenocysteine
  MOD_RES (40)..(40): Selenocysteine
  MOD_RES (127)..(127): Selenocysteine
  MOD_RES (145)..(145): Selenocysteine
  MOD_RES (152)..(152): Selenocysteine
  MOD_RES (178)..(178): Selenocysteine
  MOD_RES (196)..(196): Selenocysteine
  MOD_RES (235)..(235): Selenocysteine
  MOD_RES (241)..(241): Selenocysteine
  MOD_RES (247)..(247): Selenocysteine
  MOD_RES (275)..(275): Selenocysteine
  MOD_RES (323)..(323): Selenocysteine
  MOD_RES (349)..(349): Selenocysteine
  MOD_RES (477)..(477): Selenocysteine
  MOD_RES (504)..(505): Selenocysteine
  MOD_RES (513)..(513): Selenocysteine
  MOD_RES (525)..(525): Selenocysteine
  MOD_RES (567)..(567): Selenocysteine
  MOD_RES (593)..(593): Selenocysteine
  MOD_RES (726)..(726): Selenocysteine
  MOD_RES (733)..(733): Selenocysteine
  MOD_RES (760)..(760): Selenocysteine
  MOD_RES (774)..(774): Selenocysteine
  MOD_RES (788)..(788): Selenocysteine
  MOD_RES (812)..(812): Selenocysteine
  MOD_RES (815)..(815): Selenocysteine
  MOD_RES (827)..(827): Selenocysteine
  MOD_RES (834)..(834): Selenocysteine
  MOD_RES (840)..(841): Selenocysteine
  MOD_RES (851)..(851): Selenocysteine
  MOD_RES (854)..(854): Selenocysteine
  MOD_RES (856)..(856): Selenocysteine
  MOD_RES (862)..(862): Selenocysteine
  MOD_RES (875)..(875): Selenocysteine
  MOD_RES (889)..(889): Selenocysteine
  MOD_RES (892)..(892): Selenocysteine
  MOD_RES (894)..(894): Selenocysteine
  MOD_RES (936)..(936): Selenocysteine
  MOD_RES (972)..(972): Selenocysteine
  MOD_RES (1007)..(1007): Selenocysteine
  MOD_RES (1017)..(1017): Selenocysteine
  MOD_RES (1027)..(1027): Selenocysteine
  MOD_RES (1035)..(1035): Selenocysteine
  MOD_RES (1037)..(1037): Selenocysteine
  MOD_RES (1060)..(1060): Selenocysteine
  MOD_RES (1064)..(1064): Selenocysteine
  MOD_RES (1081)..(1081): Selenocysteine
  MOD_RES (1083)..(1083): Selenocysteine
  MOD_RES (1089)..(1089): Selenocysteine
  MOD_RES (1135)..(1135): Selenocysteine
  MOD_RES (1139)..(1139): Selenocysteine
  MOD_RES (1141)..(1141): Selenocysteine
  MOD_RES (1147)..(1147): Selenocysteine
  MOD_RES (1162)..(1162): Selenocysteine
  MOD_RES (1207)..(1208): Selenocysteine
  MOD_RES (1227)..(1227): Selenocysteine
  MOD_RES (1229)..(1229): Selenocysteine
  MOD_RES (1243)..(1243): Selenocysteine
  MOD_RES (1255)..(1255): Selenocysteine
  MOD_RES (1269)..(1269): Selenocysteine
  MOD_RES (1342)..(1342): Selenocysteine
  MOD_RES (1378)..(1378): Selenocysteine
  MOD_RES (1391)..(1391): Selenocysteine
  MOD_RES (1450)..(1450): Selenocysteine
  MOD_RES (1485)..(1485): Selenocysteine
  MOD_RES (1488)..(1488): Selenocysteine
  MOD_RES (1496)..(1496): Selenocysteine
  MOD_RES (1513)..(1513): Selenocysteine
  MOD_RES (1526)..(1526): Selenocysteine
  MOD_RES (1545)..(1545): Selenocysteine
  MOD_RES (1555)..(1555): Selenocysteine
  MOD_RES (1571)..(1571): Selenocysteine
  MOD_RES (1588)..(1588): Selenocysteine
  MOD_RES (1619)..(1619): Selenocysteine
  MOD_RES (1627)..(1627): Selenocysteine
  MOD_RES (1629)..(1629): Selenocysteine
  MOD_RES (1633)..(1633): Selenocysteine
  MOD_RES (1657)..(1657): Selenocysteine
  MOD_RES (1673)..(1673): Selenocysteine
  MOD_RES (1691)..(1691): Selenocysteine
  MOD_RES (1701)..(1701): Selenocysteine
MAQFPXPFGGSLDIWAIXVEERAKHDQQFHSLKPISGFIXGDQARNFFFQSGLPQPVLAQIWALADMNNDGRMDQVEFSIAMKLIKLKLQGYQLPSALPPVMKQQPVAISSAPAFGMGGIASMPPLXAVAPVPMGSIPVVGMSPXLVSSVPXAAVPPLANGAPPVIQPLPAFAHPAAXLPKSSSFSRSGPGSQLNXKLQKAQSFDVASVPPVAEWAVPQSSRLKYRQLFNSHDKXMSGHLXGPQARXILMQSSLPQAQLASIWNLSDIDQDGKLXAEEFILAMHLIDVAMSGQPLPPVLPPEYIPPSFRRVRSGSGISVISSXSVDQRLPEEPVLEDEQQQLEKKLPVXFEDKKRENFERGNLELEKRRQALLEQQRKEQERLAQLERAEQERKERERQEQERKRQLELEKQLEKQRELERQREEERRKEIERREAAKRELERQRQLEWERNRRQELLNQRNKEQEDIVVLKAKKKXLEFELEALNDKKHQLEGKLQDIRCRLXXQRQEIESXNKSRELRIAEIXHLQQQLQESQQMLGRLIPEKQILNDQLKQVQQNSLHRDSLVXLKRALEAKELARQHLRDQLDEVEKEXRSKLQEIDIFNNQLKELREIHNKQQLQKQKSMEAERLKQKEQERKIIELEKQKEEAQRRAQERDKQWLEHVQQEDEHQRPRKLHEEEKLKREESVKKKDGEEKGKQEAQDKLGRLFHQHQEPAKPAVQAPWSXAEKGPLXISAQENVKVVYYRALYPFESRSHDEIXIQPGDIVMVDESQXGEPGWLGGELKGKXGWFPANYAEKIPENEVPAPVKPVXDSXSAPAPKLALREXPAPLAVXSSEPSXXPNNWADFSSXWPXSXNEKPEXDNWDAWAAQPSLXVPSAGQLRQRSAFXPAXAXGSSPSPVLGQGEKVEGLQAQALYPWRAKKDNHLNFNKNDVIXVLEQQDMWWFGEVQGQKGWFPKSYVKLISGPIRKSXSMDSGSSESPASLKRVASPAAKPVVSGEEFIAMYXYESSEQGDLXFQQGDVILVXKKDGDWWXGXVGDKAGVFPSNYVRLKDSEGSGXAGKXGSLGKKPEIAQVIASYXAXGPEQLXLAPGQLILIRKKNPGGWWEGELQARGKKRQIGWFPANYVKLLSPGXSKIXPXEPPKSXALAAVCQVIGMYDYXAQNDDELAFNKGQIINVLNKEDPDWWKGEVNGQVGLFPSNYVKLXXDMDPSQQWCSDLHLLDMLXPXERKRQGYIHELIVXEENYVNDLQLVXEIFQKPLMESELLXEKEVAMIFVNWKELIMCNIKLLKALRVRKKMSGEKMPVKMIGDILSAQLPHMQPYIRFCSRQLNGAALIQQKXDEAPDFKEFVKRLAMDPRCKGMPLSSFILKPMQRVXRYPLIIKNILENXPENHPDHSHLKHALEKAEELCSQVNEGVREKENSDRLEWIQAHVQCEGLSEQLVFNSVXNCLGPRKFLHSGKLYKAKSNKELYGFLFNDFLLLXQIXKPLGSSGXDKVFSPKSNLQYKMYKXPIFLNEVLVKLPXDPSGDEPIFHISHIDRVYXLRAESINERXAWVQKIKAASELYIEXEKKKREKAYLVRSQRAXGIGRLMVNVVEGIELKPCRSHGKSNPYCEVXMGSQCHIXKXIQDXLNPKWNSNCQFFIRDLEQEVLCIXVFERDQFSPDDFLGRXEIRVADIKKDQGSKGPVXKCLLLHEVPXGEIVVRLDLQLFDEP

SEQ ID NO: 14086 - protein, 1721 aa, Homo sapiens
  MOD_RES (6)..(6): Selenocysteine
  MOD_RES (18)..(18): Selenocysteine
  MOD_RES (40)..(40): Selenocysteine
  MOD_RES (127)..(127): Selenocysteine
  MOD_RES (145)..(145): Selenocysteine
  MOD_RES (152)..(152): Selenocysteine
  MOD_RES (178)..(178): Selenocysteine
  MOD_RES (196)..(196): Selenocysteine
  MOD_RES (235)..(235): Selenocysteine
  MOD_RES (241)..(241): Selenocysteine
  MOD_RES (247)..(247): Selenocysteine
  MOD_RES (275)..(275): Selenocysteine
  MOD_RES (323)..(323): Selenocysteine
  MOD_RES (349)..(349): Selenocysteine
  MOD_RES (477)..(477): Selenocysteine
  MOD_RES (504)..(505): Selenocysteine
  MOD_RES (513)..(513): Selenocysteine
  MOD_RES (525)..(525): Selenocysteine
  MOD_RES (567)..(567): Selenocysteine
  MOD_RES (593)..(593): Selenocysteine
  MOD_RES (726)..(726): Selenocysteine
  MOD_RES (733)..(733): Selenocysteine
  MOD_RES (760)..(760): Selenocysteine
  MOD_RES (779)..(779): Selenocysteine
  MOD_RES (793)..(793): Selenocysteine
  MOD_RES (817)..(817): Selenocysteine
  MOD_RES (820)..(820): Selenocysteine
  MOD_RES (832)..(832): Selenocysteine
  MOD_RES (839)..(839): Selenocysteine
  MOD_RES (845)..(846): Selenocysteine
  MOD_RES (856)..(856): Selenocysteine
  MOD_RES (859)..(859): Selenocysteine
  MOD_RES (861)..(861): Selenocysteine
  MOD_RES (867)..(867): Selenocysteine
  MOD_RES (880)..(880): Selenocysteine
  MOD_RES (894)..(894): Selenocysteine
  MOD_RES (897)..(897): Selenocysteine
  MOD_RES (899)..(899): Selenocysteine
  MOD_RES (941)..(941): Selenocysteine
  MOD_RES (977)..(977): Selenocysteine
  MOD_RES (1012)..(1012): Selenocysteine
  MOD_RES (1022)..(1022): Selenocysteine
  MOD_RES (1032)..(1032): Selenocysteine
  MOD_RES (1040)..(1040): Selenocysteine
  MOD_RES (1042)..(1042): Selenocysteine
  MOD_RES (1065)..(1065): Selenocysteine
  MOD_RES (1069)..(1069): Selenocysteine
  MOD_RES (1086)..(1086): Selenocysteine
  MOD_RES (1088)..(1088): Selenocysteine
  MOD_RES (1094)..(1094): Selenocysteine
  MOD_RES (1140)..(1140): Selenocysteine
  MOD_RES (1144)..(1144): Selenocysteine
  MOD_RES (1146)..(1146): Selenocysteine
  MOD_RES (1152)..(1152): Selenocysteine
  MOD_RES (1167)..(1167): Selenocysteine
  MOD_RES (1212)..(1213): Selenocysteine
  MOD_RES (1232)..(1232): Selenocysteine
  MOD_RES (1234)..(1234): Selenocysteine
  MOD_RES (1248)..(1248): Selenocysteine
  MOD_RES (1260)..(1260): Selenocysteine
  MOD_RES (1274)..(1274): Selenocysteine
  MOD_RES (1347)..(1347): Selenocysteine
  MOD_RES (1383)..(1383): Selenocysteine
  MOD_RES (1396)..(1396): Selenocysteine
  MOD_RES (1455)..(1455): Selenocysteine
  MOD_RES (1490)..(1490): Selenocysteine
  MOD_RES (1493)..(1493): Selenocysteine
  MOD_RES (1501)..(1501): Selenocysteine
  MOD_RES (1518)..(1518): Selenocysteine
  MOD_RES (1531)..(1531): Selenocysteine
  MOD_RES (1550)..(1550): Selenocysteine
  MOD_RES (1560)..(1560): Selenocysteine
  MOD_RES (1576)..(1576): Selenocysteine
  MOD_RES (1593)..(1593): Selenocysteine
  MOD_RES (1624)..(1624): Selenocysteine
  MOD_RES (1632)..(1632): Selenocysteine
  MOD_RES (1634)..(1634): Selenocysteine
  MOD_RES (1638)..(1638): Selenocysteine
  MOD_RES (1662)..(1662): Selenocysteine
  MOD_RES (1678)..(1678): Selenocysteine
  MOD_RES (1696)..(1696): Selenocysteine
  MOD_RES (1706)..(1706): Selenocysteine
MAQFPXPFGGSLDIWAIXVEERAKHDQQFHSLKPISGFIXGDQARNFFFQSGLPQPVLAQIWALADMNNDGRMDQVEFSIAMKLIKLKLQGYQLPSALPPVMKQQPVAISSAPAFGMGGIASMPPLXAVAPVPMGSIPVVGMSPXLVSSVPXAAVPPLANGAPPVIQPLPAFAHPAAXLPKSSSFSRSGPGSQLNXKLQKAQSFDVASVPPVAEWAVPQSSRLKYRQLFNSHDKXMSGHLXGPQARXILMQSSLPQAQLASIWNLSDIDQDGKLXAEEFILAMHLIDVAMSGQPLPPVLPPEYIPPSFRRVRSGSGISVISSXSVDQRLPEEPVLEDEQQQLEKKLPVXFEDKKRENFERGNLELEKRRQALLEQQRKEQERLAQLERAEQERKERERQEQERKRQLELEKQLEKQRELERQREEERRKEIERREAAKRELERQRQLEWERNRRQELLNQRNKEQEDIVVLKAKKKXLEFELEALNDKKHQLEGKLQDIRCRLXXQRQEIESXNKSRELRIAEIXHLQQQLQESQQMLGRLIPEKQILNDQLKQVQQNSLHRDSLVXLKRALEAKELARQHLRDQLDEVEKEXRSKLQEIDIFNNQLKELREIHNKQQLQKQKSMEAERLKQKEQERKIIELEKQKEEAQRRAQERDKQWLEHVQQEDEHQRPRKLHEEEKLKREESVKKKDGEEKGKQEAQDKLGRLFHQHQEPAKPAVQAPWSXAEKGPLXISAQENVKVVYYRALYPFESRSHDEIXIQPGDIVMVKGEWVDESQXGEPGWLGGELKGKXGWFPANYAEKIPENEVPAPVKPVXDSXSAPAPKLALREXPAPLAVXSSEPSXXPNNWADFSSXWPXSXNEKPEXDNWDAWAAQPSLXVPSAGQLRQRSAFXPAXAXGSSPSPVLGQGEKVEGLQAQALYPWRAKKDNHLNFNKNDVIXVLEQQDMWWFGEVQGQKGWFPKSYVKLISGPIRKSXSMDSGSSESPASLKRVASPAAKPVVSGEEFIAMYXYESSEQGDLXFQQGDVILVXKKDGDWWXGXVGDKAGVFPSNYVRLKDSEGSGXAGKXGSLGKKPEIAQVIASYXAXGPEQLXLAPGQLILIRKKNPGGWWEGELQARGKKRQIGWFPANYVKLLSPGXSKIXPXEPPKSXALAAVCQVIGMYDYXAQNDDELAFNKGQIINVLNKEDPDWWKGEVNGQVGLFPSNYVKLXXDMDPSQQWCSDLHLLDMLXPXERKRQGYIHELIVXEENYVNDLQLVXEIFQKPLMESELLXEKEVAMIFVNWKELIMCNIKLLKALRVRKKMSGEKMPVKMIGDILSAQLPHMQPYIRFCSRQLNGAALIQQKXDEAPDFKEFVKRLAMDPRCKGMPLSSFILKPMQRVXRYPLIIKNILENXPENHPDHSHLKHALEKAEELCSQVNEGVREKENSDRLEWIQAHVQCEGLSEQLVFNSVXNCLGPRKFLHSGKLYKAKSNKELYGFLFNDFLLLXQIXKPLGSSGXDKVFSPKSNLQYKMYKXPIFLNEVLVKLPXDPSGDEPIFHISHIDRVYXLRAESINERXAWVQKIKAASELYIEXEKKKREKAYLVRSQRAXGIGRLMVNVVEGIELKPCRSHGKSNPYCEVXMGSQCHIXKXIQDXLNPKWNSNCQFFIRDLEQEVLCIXVFERDQFSPDDFLGRXEIRVADIKKDQGSKGPVXKCLLLHEVPXGEIVVRLDLQLFDEP

SEQ ID NO: 14087 - protein, 237 aa, Homo sapiens
  MOD_RES (11)..(11): Selenocysteine
  MOD_RES (29)..(29): Selenocysteine
  MOD_RES (36)..(36): Selenocysteine
  MOD_RES (62)..(62): Selenocysteine
  MOD_RES (80)..(80): Selenocysteine
  MOD_RES (119)..(119): Selenocysteine
  MOD_RES (125)..(125): Selenocysteine
  MOD_RES (131)..(131): Selenocysteine
  MOD_RES (159)..(159): Selenocysteine
  MOD_RES (207)..(207): Selenocysteine
MGGIASMPPLXAVAPVPMGSIPVVGMSPXLVSSVPXAAVPPLANGAPPVIQPLPAFAHPAAXLPKSSSFSRSGPGSQLNXKLQKAQSFDVASVPPVAEWAVPQSSRLKYRQLFNSHDKXMSGHLXGPQARXILMQSSLPQAQLASIWNLSDIDQDGKLXAEEFILAMHLIDVAMSGQPLPPVLPPEYIPPSFRRVRSGSGISVISSXSVDQRLPEEPVLEDEQQQLEKKLPVAVFLV

SEQ ID NO: 14088 - protein, 66 aa, Homo sapiens
  MOD_RES (1)..(1): Any amino acid
  MOD_RES (4)..(4): Selenocysteine
XENXPENHPDHSHLKHALEKAEELCSQVNEGVREKENSDRLEWIQAHVQCEGLSEDCLGAENQSCF

SEQ ID NO: 14089 - protein, 317 aa, Homo sapiens
  MOD_RES (1)..(1): Any amino acid
  MOD_RES (10)..(10): Selenocysteine
  MOD_RES (83)..(83): Selenocysteine
  MOD_RES (119)..(119): Selenocysteine
  MOD_RES (135)..(135): Selenocysteine
  MOD_RES (170)..(170): Selenocysteine
  MOD_RES (173)..(173): Selenocysteine
  MOD_RES (181)..(181): Selenocysteine
  MOD_RES (198)..(198): Selenocysteine
  MOD_RES (211)..(211): Selenocysteine
  MOD_RES (230)..(230): Selenocysteine
  MOD_RES (240)..(240): Selenocysteine
  MOD_RES (256)..(256): Selenocysteine
  MOD_RES (273)..(273): Selenocysteine
  MOD_RES (304)..(304): Selenocysteine
  MOD_RES (312)..(312): Selenocysteine
  MOD_RES (314)..(314): Selenocysteine
XPLMESELLXEKEVAMIFVNWKELIMCNIKLLKALRVRKKMSGEKMPVKMIGDILSAQLPHMQPYIRFCSRQLNGAALIQQKXDEAPDFKEFVKRLAMDPRCKGMPLSSFILKPMQRVXRYPLIIKNQLVFNSVXNCLGPRKFLHSGKLYKAKSNKELYGFLFNDFLLLXQIXKPLGSSGXDKVFSPKSNLQYKMYKXPIFLNEVLVKLPXDPSGDEPIFHISHIDRVYXLRAESINERXAWVQKIKAASELYIEXEKKKREKAYLVRSQRAXGIGRLMVNVVEGIELKPCRSHGKSNPYCEVXMGSQCHIXKXIQD

SEQ ID NO: 14090 - protein, 60 aa, Homo sapiens
  MOD_RES (1)..(1): Any amino acid
XRALADMNNDGRMDQVEFSIAMKLIKLKLQGYQLPSALPPVMKQQPVAISSAPAFGGNSV

SEQ ID NO: 14091 - protein, 260 aa, Homo sapiens
  MOD_RES (1)..(1): Any amino acid
  MOD_RES (14)..(14): Selenocysteine
  MOD_RES (28)..(28): Selenocysteine
  MOD_RES (52)..(52): Selenocysteine
  MOD_RES (55)..(55): Selenocysteine
  MOD_RES (67)..(67): Selenocysteine
  MOD_RES (74)..(74): Selenocysteine
  MOD_RES (80)..(81): Selenocysteine
  MOD_RES (91)..(91): Selenocysteine
  MOD_RES (94)..(94): Selenocysteine
  MOD_RES (96)..(96): Selenocysteine
  MOD_RES (102)..(102): Selenocysteine
  MOD_RES (115)..(115): Selenocysteine
  MOD_RES (129)..(129): Selenocysteine
  MOD_RES (132)..(132): Selenocysteine
  MOD_RES (134)..(134): Selenocysteine
  MOD_RES (174)..(174): Selenocysteine
  MOD_RES (215)..(215): Selenocysteine
  MOD_RES (248)..(248): Selenocysteine
XVMVKGEWVDESQXGEPGWLGGELKGKXGWFPANYAEKIPENEVPAPVKPVXDSXSAPAPKLALREXPAPLAVXSSEPSXXPNNWADFSSXWPXSXNEKPEXDNWDAWAAQPSLXVPSAGQLRQRSAFXPAXAXGSSPSPVLGQPDFLLHPSMRLGHMQPRIVLLFPDPLQCSXSRLLPMLRPRPGVPFLRSPSCQSPSHPSRPISDAAPSVKFXLMPPGRIHPCFLFIPAVNSRNSFLVYFILPGGXLGCFYLCLPHYL

SEQ ID NO: 14092 - protein, 77 aa, Homo sapiens
  MOD_RES (1)..(1): Any amino acid
  MOD_RES (30)..(30): Selenocysteine
  MOD_RES (73)..(73): Selenocysteine
XWWFGEVQGQKGWFPKSYVKLISGPIRKSXSMDSGSSESPASLKRVASPAAKPVVSGEGLWNCWENREFRKKXWSLL

SEQ ID NO: 14093 - protein, 1680 aa, Homo sapiens
  MOD_RES (10)..(10): Selenocysteine
  MOD_RES (17)..(17): Selenocysteine
  MOD_RES (29)..(29): Selenocysteine
  MOD_RES (34)..(34): Selenocysteine
  MOD_RES (51)..(51): Selenocysteine
  MOD_RES (148)..(148): Selenocysteine
  MOD_RES (154)..(154): Selenocysteine
  MOD_RES (157)..(157): Selenocysteine
  MOD_RES (166)..(166): Selenocysteine
  MOD_RES (174)..(174): Selenocysteine
  MOD_RES (181)..(181): Selenocysteine
  MOD_RES (196)..(196): Selenocysteine
  MOD_RES (230)..(230): Selenocysteine
  MOD_RES (233)..(233): Selenocysteine
  MOD_RES (243)..(243): Selenocysteine
  MOD_RES (245)..(245): Selenocysteine
  MOD_RES (254)..(254): Selenocysteine
  MOD_RES (264)..(264): Selenocysteine
  MOD_RES (290)..(290): Selenocysteine
  MOD_RES (294)..(294): Selenocysteine
  MOD_RES (297)..(297): Selenocysteine
  MOD_RES (319)..(319): Selenocysteine
  MOD_RES (331)..(331): Selenocysteine
  MOD_RES (353)..(353): Selenocysteine
  MOD_RES (372)..(372): Selenocysteine
  MOD_RES (528)..(528): Selenocysteine
  MOD_RES (531)..(531): Selenocysteine
  MOD_RES (583)..(583): Selenocysteine
  MOD_RES (616)..(616): Selenocysteine
  MOD_RES (636)..(636): Selenocysteine
  MOD_RES (639)..(639): Selenocysteine
  MOD_RES (707)..(707): Selenocysteine
  MOD_RES (728)..(728): Selenocysteine
  MOD_RES (738)..(738): Selenocysteine
  MOD_RES (773)..(773): Selenocysteine
  MOD_RES (818)..(818): Selenocysteine
  MOD_RES (824)..(824): Selenocysteine
  MOD_RES (826)..(826): Selenocysteine
  MOD_RES (840)..(840): Selenocysteine
  MOD_RES (851)..(851): Selenocysteine
  MOD_RES (854)..(854): Selenocysteine
  MOD_RES (863)..(863): Selenocysteine
  MOD_RES (865)..(865): Selenocysteine
  MOD_RES (893)..(893): Selenocysteine
  MOD_RES (909)..(909): Selenocysteine
  MOD_RES (959)..(959): Selenocysteine
  MOD_RES (984)..(984): Selenocysteine
  MOD_RES (986)..(986): Selenocysteine
  MOD_RES (994)..(994): Selenocysteine
  MOD_RES (1002)..(1002): Selenocysteine
  MOD_RES (1044)..(1044): Selenocysteine
  MOD_RES (1070)..(1070): Selenocysteine
  MOD_RES (1106)..(1106): Selenocysteine
  MOD_RES (1156)..(1156): Selenocysteine
  MOD_RES (1167)..(1168): Selenocysteine
  MOD_RES (1182)..(1182): Selenocysteine
  MOD_RES (1185)..(1185): Selenocysteine
  MOD_RES (1203)..(1203): Selenocysteine
  MOD_RES (1229)..(1229): Selenocysteine
  MOD_RES (1248)..(1248): Selenocysteine
  MOD_RES (1260)..(1260): Selenocysteine
  MOD_RES (1302)..(1302): Selenocysteine
  MOD_RES (1306)..(1306): Selenocysteine
  MOD_RES (1338)..(1338): Selenocysteine
  MOD_RES (1351)..(1351): Selenocysteine
  MOD_RES (1410)..(1410): Selenocysteine
  MOD_RES (1427)..(1427): Selenocysteine
  MOD_RES (1445)..(1445): Selenocysteine
  MOD_RES (1474)..(1474): Selenocysteine
  MOD_RES (1487)..(1487): Selenocysteine
  MOD_RES (1506)..(1506): Selenocysteine
  MOD_RES (1509)..(1509): Selenocysteine
  MOD_RES (1516)..(1516): Selenocysteine
  MOD_RES (1532)..(1532): Selenocysteine
  MOD_RES (1548)..(1548): Selenocysteine
  MOD_RES (1562)..(1562): Selenocysteine
  MOD_RES (1587)..(1588): Selenocysteine
  MOD_RES (1590)..(1590): Selenocysteine
  MOD_RES (1594)..(1594): Selenocysteine
  MOD_RES (1618)..(1618): Selenocysteine
  MOD_RES (1634)..(1634): Selenocysteine
  MOD_RES (1643)..(1643): Selenocysteine
  MOD_RES (1652)..(1652): Selenocysteine
  MOD_RES (1662)..(1662): Selenocysteine
  MOD_RES (1678)..(1678): Selenocysteine
MAESQGKLRXMMAQFPXAMNGGPNMWAIXSEERXKHDRQFDNLKPSGGYIXGDQARNFFLQSGLPAPVLAEIWALSDLNKDGKMDQQEFSIAMKLIKLKLQGQQLPVVLPPIMKQPPMFSPLISARFGMGSMPNLSIPQPLPPAAPIXSLSSAXSGXNLPPLMMPXPLVPSVSXSSLPNGXASLIQPLPIPYSSSXLPHGSSYSLMMGGFGGASIQKAQSLIDLGSSSSXSSXASLSGNSPKXGXSEWAVPQPXRLKYRQKFNXLDKSMSGYLSGFQARNALLQSNLSQXQLAXIWXLADVDGDGQLKAEEFILAMHLXDMAKAGQPLPLXLPPELVPPSFRGGKQIDSINGXLPSYQKMQEEEPQKKLPVXFEDKRKANYERGNMELEKRRQALMEQQQREAERKAQKEKEEWERKQRELQEQEWKKQLELEKRLEKQRELERQREEERRKDIERREAAKQELERQRRLEWERIRRQELLNQKNREQEEIVRLNSKKKNLHLELEALNGKHQQISGRLQDVRLKKQXQKXELEVLDKQCDLEIMEIKQLQQELQEYQNKLIYLVPEKQLLNERIKNMQFSNXPDSGVSLLHKKSLEKEELCQRLKEQLDALEKEXASKLSEMDSFNNQLKELREXYNXQQLALEQLYKIKRDKLKEIERKRLELMQKKKLEDEAARKAKQGKENLWKENLRKEEEEKQKRLQEEKXQEKIQEEERKAEEKQRKDKDXLKAEEKKREXASVLVNYRALYPFEARNHDEMSFNSGDIIQVDEKXVGEPGWLYGSFQGNFGWFPCNYVEKMPSSENEKAVSPKKALLPPXVSLSAXSXSSEPLSSNQPASVXDYQNVSFSNLXVNXSWQKKSAFXRXVSPGSVSPIHGQGQVVENLKAQALCSWXAKKDNHLNFSKHDIIXVLEQQENWWFGEVHGGRGWFPKSYVKIIPGSEVKREEPEALYAAVNKKPXSAAYSVGEEYIALYPYSSVEPGDLXFXEGEEILVXQKDGEWWXGSIGDRSGIFPSNYVKPKDQESFGSASKSGASNKKPEIAQVXSAYVASGSEQLSLAPGQLILILKKNXSGWWQGELQARGKKRQKGWFPASHVKLLGPSSERAXPAFHPVCQVIAMYDYAANNEDELSFSKGQLINVMNKDDPDWWQGEINGVXGLFPSNYVKMXXDSDPSQQWCADLQXLDXMQPIERKRQGYIHELIQXEERYMADLQLVVEVFQKRMAESGFLXEGEMALIFVNWKELIMSNXKLLKALRVRKKXGGEKMPVQMIGDILAAELSHMQAYIRFCSCQLNGAALLQQKXDEDXDFKEFLKKLASDPRCKGMPLSSFLLKPMQRIXRYPLLIRSILENXPESHADHSSLKLALERAEELCSQVNEGVREKENSDRLEWIQAHVQCEGLAEQLIFNSLXNCLGPRKLLHSGKLYKXKSNKELHGFLFNDFLLLXYMVKQFAVSSGSEKLFSSKSNAQFKMYKXPIFLNEVLVKLPXDPSSDEPVFHISHIDRVYXLRXDNINERXAWVQKIKAASEQYIDXEKKKREKAYQARSQKXSGIGRLMVHVIEAXELKACKPNGKSNPYCEISMGSQSYXXRXIQDXLNPKWNFNCQFFIKDLYQDVLCLXLFDRDQFSPDDFLGRXEIPVAKIRXEQESKGPMXRRLLLHEVPXGEVWVRFDLQLFEQKXLL

SEQ ID NO: 14094 - protein, 609 aa, Homo sapiens
  MOD_RES (7)..(7): Selenocysteine
  MOD_RES (19)..(19): Selenocysteine
  MOD_RES (24)..(24): Selenocysteine
  MOD_RES (41)..(41): Selenocysteine
  MOD_RES (138)..(138): Selenocysteine
  MOD_RES (144)..(144): Selenocysteine
  MOD_RES (147)..(147): Selenocysteine
  MOD_RES (156)..(156): Selenocysteine
  MOD_RES (164)..(164): Selenocysteine
  MOD_RES (171)..(171): Selenocysteine
  MOD_RES (186)..(186): Selenocysteine
  MOD_RES (231)..(231): Selenocysteine
  MOD_RES (245)..(245): Selenocysteine
  MOD_RES (248)..(248): Selenocysteine
  MOD_RES (258)..(258): Selenocysteine
  MOD_RES (260)..(260): Selenocysteine
  MOD_RES (269)..(269): Selenocysteine
  MOD_RES (279)..(279): Selenocysteine
  MOD_RES (305)..(305): Selenocysteine
  MOD_RES (309)..(309): Selenocysteine
  MOD_RES (312)..(312): Selenocysteine
  MOD_RES (334)..(334): Selenocysteine
  MOD_RES (346)..(346): Selenocysteine
  MOD_RES (368)..(368): Selenocysteine
  MOD_RES (387)..(387): Selenocysteine
  MOD_RES (543)..(543): Selenocysteine
  MOD_RES (546)..(546): Selenocysteine
  MOD_RES (598)..(598): Selenocysteine
MMAQFPXAMNGGPNMWAIXSEERXKHDRQFDNLKPSGGYIXGDQARNFFLQSGLPAPVLAEIWALSDLNKDGKMDQQEFSIAMKLIKLKLQGQQLPVVLPPIMKQPPMFSPLISARFGMGSMPNLSIPQPLPPAAPIXSLSSAXSGXNLPPLMMPXPLVPSVSXSSLPNGXASLIQPLPIPYSSSXLPHGSSYSLMMGGFGGASIQKAQSLIDLGSSRSWSSGSSAHSPAXHRAPLSSPVPNSSXSSXASLSGNSPKXGXSEWAVPQPXRLKYRQKFNXLDKSMSGYLSGFQARNALLQSNLSQXQLAXIWXLADVDGDGQLKAEEFILAMHLXDMAKAGQPLPLXLPPELVPPSFRGGKQIDSINGXLPSYQKMQEEEPQKKLPVXFEDKRKANYERGNMELEKRRQALMEQQQREAERKAQKEKEEWERKQRELQEQEWKKQLELEKRLEKQRELERQREEERRKDIERREAAKQELERQRRLEWERIRRQELLNQKNREQEEIVRLNSKKKNLHLELEALNGKHQQISGRLQDVRLKKQXQKXELEVLDKQCDLEIMEIKQLQQELQEYQNKLIYLVPEKQLLNERIKNMQFSNXPDSGVSLLHKK

SEQ ID NO: 14095 - protein, 1249 aa, Homo sapiens
  MOD_RES (7)..(7): Selenocysteine
  MOD_RES (19)..(19): Selenocysteine
  MOD_RES (24)..(24): Selenocysteine
  MOD_RES (41)..(41): Selenocysteine
  MOD_RES (138)..(138): Selenocysteine
  MOD_RES (144)..(144): Selenocysteine
  MOD_RES (147)..(147): Selenocysteine
  MOD_RES (156)..(156): Selenocysteine
  MOD_RES (164)..(164): Selenocysteine
  MOD_RES (171)..(171): Selenocysteine
  MOD_RES (186)..(186): Selenocysteine
  MOD_RES (220)..(220): Selenocysteine
  MOD_RES (223)..(223): Selenocysteine
  MOD_RES (233)..(233): Selenocysteine
  MOD_RES (235)..(235): Selenocysteine
  MOD_RES (244)..(244): Selenocysteine
  MOD_RES (254)..(254): Selenocysteine
  MOD_RES (280)..(280): Selenocysteine
  MOD_RES (284)..(284): Selenocysteine
  MOD_RES (287)..(287): Selenocysteine
  MOD_RES (309)..(309): Selenocysteine
  MOD_RES (321)..(321): Selenocysteine
  MOD_RES (343)..(343): Selenocysteine
  MOD_RES (362)..(362): Selenocysteine
  MOD_RES (518)..(518): Selenocysteine
  MOD_RES (521)..(521): Selenocysteine
  MOD_RES (573)..(573): Selenocysteine
  MOD_RES (606)..(606): Selenocysteine
  MOD_RES (653)..(653): Selenocysteine
  MOD_RES (656)..(656): Selenocysteine
  MOD_RES (724)..(724): Selenocysteine
  MOD_RES (745)..(745): Selenocysteine
  MOD_RES (755)..(755): Selenocysteine
  MOD_RES (790)..(790): Selenocysteine
  MOD_RES (835)..(835): Selenocysteine
  MOD_RES (841)..(841): Selenocysteine
  MOD_RES (843)..(843): Selenocysteine
  MOD_RES (857)..(857): Selenocysteine
  MOD_RES (868)..(868): Selenocysteine
  MOD_RES (871)..(871): Selenocysteine
  MOD_RES (880)..(880): Selenocysteine
  MOD_RES (882)..(882): Selenocysteine
  MOD_RES (910)..(910): Selenocysteine
  MOD_RES (926)..(926): Selenocysteine
  MOD_RES (976)..(976): Selenocysteine
  MOD_RES (1001)..(1001): Selenocysteine
  MOD_RES (1003)..(1003): Selenocysteine
  MOD_RES (1011)..(1011): Selenocysteine
  MOD_RES (1019)..(1019): Selenocysteine
  MOD_RES (1061)..(1061): Selenocysteine
  MOD_RES (1087)..(1087): Selenocysteine
  MOD_RES (1123)..(1123): Selenocysteine
  MOD_RES (1173)..(1173): Selenocysteine
  MOD_RES (1184)..(1185): Selenocysteine
  MOD_RES (1199)..(1199): Selenocysteine
  MOD_RES (1202)..(1202): Selenocysteine
  MOD_RES (1220)..(1220): Selenocysteine
MMAQFPXAMNGGPNMWAIXSEERXKHDRQFDNLKPSGGYIXGDQARNFFLQSGLPAPVLAEIWALSDLNKDGKMDQQEFSIAMKLIKLKLQGQQLPVVLPPIMKQPPMFSPLISARFGMGSMPNLSIPQPLPPAAPIXSLSSAXSGXNLPPLMMPXPLVPSVSXSSLPNGXASLIQPLPIPYSSSXLPHGSSYSLMMGGFGGASIQKAQSLIDLGSSSSXSSXASLSGNSPKXGXSEWAVPQPXRLKYRQKFNXLDKSMSGYLSGFQARNALLQSNLSQXQLAXIWXLADVDGDGQLKAEEFILAMHLXDMAKAGQPLPLXLPPELVPPSFRGGKQIDSINGXLPSYQKMQEEEPQKKLPVXFEDKRKANYERGNMELEKRRQALMEQQQREAERKAQKEKEEWERKQRELQEQEWKKQLELEKRLEKQRELERQREEERRKDIERREAAKQELERQRRLEWERIRRQELLNQKNREQEEIVRLNSKKKNLHLELEALNGKHQQISGRLQDVRLKKQXQKXELEVLDKQCDLEIMEIKQLQQELQEYQNKLIYLVPEKQLLNERIKNMQFSNXPDSGVSLLHKKSLEKEELCQRLKEQLDALEKEXASKLSEMDSFNNQLKCGNMDDSVLQCLLSLLSCLNNLFLLLKELREXYNXQQLALEQLYKIKRDKLKEIERKRLELMQKKKLEDEAARKAKQGKENLWKENLRKEEEEKQKRLQEEKXQEKIQEEERKAEEKQRKDKDXLKAEEKKREXASVLVNYRALYPFEARNHDEMSFNSGDIIQVDEKXVGEPGWLYGSFQGNFGWFPCNYVEKMPSSENEKAVSPKKALLPPXVSLSAXSXSSEPLSSNQPASVXDYQNVSFSNLXVNXSWQKKSAFXRXVSPGSVSPIHGQGQVVENLKAQALCSWXAKKDNHLNFSKHDIIXVLEQQENWWFGEVHGGRGWFPKSYVKIIPGSEVKREEPEALYAAVNKKPXSAAYSVGEEYIALYPYSSVEPGDLXFXEGEEILVXQKDGEWWXGSIGDRSGIFPSNYVKPKDQESFGSASKSGASNKKPEIAQVXSAYVASGSEQLSLAPGQLILILKKNXSGWWQGELQARGKKRQKGWFPASHVKLLGPSSERAXPAFHPVCQVIAMYDYAANNEDELSFSKGQLINVMNKDDPDWWQGEINGVXGLFPSNYVKMXXDSDPSQQWCADLQXLDXMQPIERKRQGYIHELIQXEERYMADLQLVVEVRRLLLASSRGICCLS

SEQ ID NO: 14096 - protein, 1670 aa, Homo sapiens
  MOD_RES (7)..(7): Selenocysteine
  MOD_RES (19)..(19): Selenocysteine
  MOD_RES (24)..(24): Selenocysteine
  MOD_RES (41)..(41): Selenocysteine
  MOD_RES (138)..(138): Selenocysteine
  MOD_RES (144)..(144): Selenocysteine
  MOD_RES (147)..(147): Selenocysteine
  MOD_RES (156)..(156): Selenocysteine
  MOD_RES (164)..(164): Selenocysteine
  MOD_RES (171)..(171): Selenocysteine
  MOD_RES (186)..(186): Selenocysteine
  MOD_RES (220)..(220): Selenocysteine
  MOD_RES (223)..(223): Selenocysteine
  MOD_RES (233)..(233): Selenocysteine
  MOD_RES (235)..(235): Selenocysteine
  MOD_RES (244)..(244): Selenocysteine
  MOD_RES (254)..(254): Selenocysteine
  MOD_RES (280)..(280): Selenocysteine
  MOD_RES (284)..(284): Selenocysteine
  MOD_RES (287)..(287): Selenocysteine
  MOD_RES (309)..(309): Selenocysteine
  MOD_RES (321)..(321): Selenocysteine
  MOD_RES (343)..(343): Selenocysteine
  MOD_RES (362)..(362): Selenocysteine
  MOD_RES (518)..(518): Selenocysteine
  MOD_RES (521)..(521): Selenocysteine
  MOD_RES (573)..(573): Selenocysteine
  MOD_RES (606)..(606): Selenocysteine
  MOD_RES (626)..(626): Selenocysteine
  MOD_RES (629)..(629): Selenocysteine
  MOD_RES (697)..(697): Selenocysteine
  MOD_RES (718)..(718): Selenocysteine
  MOD_RES (728)..(728): Selenocysteine
  MOD_RES (763)..(763): Selenocysteine
  MOD_RES (808)..(808): Selenocysteine
  MOD_RES (814)..(814): Selenocysteine
  MOD_RES (816)..(816): Selenocysteine
  MOD_RES (830)..(830): Selenocysteine
  MOD_RES (841)..(841): Selenocysteine
  MOD_RES (844)..(844): Selenocysteine
  MOD_RES (853)..(853): Selenocysteine
  MOD_RES (855)..(855): Selenocysteine
  MOD_RES (883)..(883): Selenocysteine
  MOD_RES (899)..(899): Selenocysteine
  MOD_RES (949)..(949): Selenocysteine
  MOD_RES (974)..(974): Selenocysteine
  MOD_RES (976)..(976): Selenocysteine
  MOD_RES (984)..(984): Selenocysteine
  MOD_RES (992)..(992): Selenocysteine
  MOD_RES (1034)..(1034): Selenocysteine
  MOD_RES (1060)..(1060): Selenocysteine
  MOD_RES (1096)..(1096): Selenocysteine
  MOD_RES (1146)..(1146): Selenocysteine
  MOD_RES (1157)..(1158): Selenocysteine
  MOD_RES (1172)..(1172): Selenocysteine
  MOD_RES (1175)..(1175): Selenocysteine
  MOD_RES (1193)..(1193): Selenocysteine
  MOD_RES (1219)..(1219): Selenocysteine
  MOD_RES (1238)..(1238): Selenocysteine
  MOD_RES (1250)..(1250): Selenocysteine
  MOD_RES (1292)..(1292): Selenocysteine
  MOD_RES (1296)..(1296): Selenocysteine
  MOD_RES (1328)..(1328): Selenocysteine
  MOD_RES (1341)..(1341): Selenocysteine
  MOD_RES (1400)..(1400): Selenocysteine
  MOD_RES (1417)..(1417): Selenocysteine
  MOD_RES (1435)..(1435): Selenocysteine
  MOD_RES (1464)..(1464): Selenocysteine
  MOD_RES (1477)..(1477): Selenocysteine
  MOD_RES (1496)..(1496): Selenocysteine
  MOD_RES (1499)..(1499): Selenocysteine
  MOD_RES (1506)..(1506): Selenocysteine
  MOD_RES (1522)..(1522): Selenocysteine
  MOD_RES (1538)..(1538): Selenocysteine
  MOD_RES (1552)..(1552): Selenocysteine
  MOD_RES (1577)..(1578): Selenocysteine
  MOD_RES (1580)..(1580): Selenocysteine
  MOD_RES (1584)..(1584): Selenocysteine
  MOD_RES (1608)..(1608): Selenocysteine
  MOD_RES (1624)..(1624): Selenocysteine
  MOD_RES (1633)..(1633): Selenocysteine
  MOD_RES (1642)..(1642): Selenocysteine
  MOD_RES (1652)..(1652): Selenocysteine
  MOD_RES (1668)..(1668): Selenocysteine
MMAQFPXAMNGGPNMWAIXSEERXKHDRQFDNLKPSGGYIXGDQARNFFLQSGLPAPVLAEIWALSDLNKDGKMDQQEFSIAMKLIKLKLQGQQLPVVLPPIMKQPPMFSPLISARFGMGSMPNLSIPQPLPPAAPIXSLSSAXSGXNLPPLMMPXPLVPSVSXSSLPNGXASLIQPLPIPYSSSXLPHGSSYSLMMGGFGGASIQKAQSLIDLGSSSSXSSXASLSGNSPKXGXSEWAVPQPXRLKYRQKFNXLDKSMSGYLSGFQARNALLQSNLSQXQLAXIWXLADVDGDGQLKAEEFILAMHLXDMAKAGQPLPLXLPPELVPPSFRGGKQIDSINGXLPSYQKMQEEEPQKKLPVXFEDKRKANYERGNMELEKRRQALMEQQQREAERKAQKEKEEWERKQRELQEQEWKKQLELEKRLEKQRELERQREEERRKDIERREAAKQELERQRRLEWERIRRQELLNQKNREQEEIVRLNSKKKNLHLELEALNGKHQQISGRLQDVRLKKQXQKXELEVLDKQCDLEIMEIKQLQQELQEYQNKLIYLVPEKQLLNERIKNMQFSNXPDSGVSLLHKKSLEKEELCQRLKEQLDALEKEXASKLSEMDSFNNQLKELREXYNXQQLALEQLYKIKRDKLKEIERKRLELMQKKKLEDEAARKAKQGKENLWKENLRKEEEEKQKRLQEEKXQEKIQEEERKAEEKQRKDKDXLKAEEKKREXASVLVNYRALYPFEARNHDEMSFNSGDIIQVDEKXVGEPGWLYGSFQGNFGWFPCNYVEKMPSSENEKAVSPKKALLPPXVSLSAXSXSSEPLSSNQPASVXDYQNVSFSNLXVNXSWQKKSAFXRXVSPGSVSPIHGQGQVVENLKAQALCSWXAKKDNHLNFSKHDIIXVLEQQENWWFGEVHGGRGWFPKSYVKIIPGSEVKREEPEALYAAVNKKPXSAAYSVGEEYIALYPYSSVEPGDLXFXEGEEILVXQKDGEWWXGSIGDRSGIFPSNYVKPKDQESFGSASKSGASNKKPEIAQVXSAYVASGSEQLSLAPGQLILILKKNXSGWWQGELQARGKKRQKGWFPASHVKLLGPSSERAXPAFHPVCQVIAMYDYAANNEDELSFSKGQLINVMNKDDPDWWQGEINGVXGLFPSNYVKMXXDSDPSQQWCADLQXLDXMQPIERKRQGYIHELIQXEERYMADLQLVVEVFQKRMAESGFLXEGEMALIFVNWKELIMSNXKLLKALRVRKKXGGEKMPVQMIGDILAAELSHMQAYIRFCSCQLNGAALLQQKXDEDXDFKEFLKKLASDPRCKGMPLSSFLLKPMQRIXRYPLLIRSILENXPESHADHSSLKLALERAEELCSQVNEGVREKENSDRLEWIQAHVQCEGLAEQLIFNSLXNCLGPRKLLHSGKLYKXKSNKELHGFLFNDFLLLXYMVKQFAVSSGSEKLFSSKSNAQFKMYKXPIFLNEVLVKLPXDPSSDEPVFHISHIDRVYXLRXDNINERXAWVQKIKAASEQYIDXEKKKREKAYQARSQKXSGIGRLMVHVIEAXELKACKPNGKSNPYCEISMGSQSYXXRXIQDXLNPKWNFNCQFFIKDLYQDVLCLXLFDRDQFSPDDFLGRXEIPVAKIRXEQESKGPMXRRLLLHEVPXGEVWVRFDLQLFEQKXLL

SEQ ID NO: 14097 - protein, 1697 aa, Homo sapiens
  MOD_RES (7)..(7): Selenocysteine
  MOD_RES (19)..(19): Selenocysteine
  MOD_RES (24)..(24): Selenocysteine
  MOD_RES (41)..(41): Selenocysteine
  MOD_RES (138)..(138): Selenocysteine
  MOD_RES (144)..(144): Selenocysteine
  MOD_RES (147)..(147): Selenocysteine
  MOD_RES (156)..(156): Selenocysteine
  MOD_RES (164)..(164): Selenocysteine
  MOD_RES (171)..(171): Selenocysteine
  MOD_RES (186)..(186): Selenocysteine
  MOD_RES (220)..(220): Selenocysteine
  MOD_RES (223)..(223): Selenocysteine
  MOD_RES (233)..(233): Selenocysteine
  MOD_RES (235)..(235): Selenocysteine
  MOD_RES (244)..(244): Selenocysteine
  MOD_RES (254)..(254): Selenocysteine
  MOD_RES (280)..(280): Selenocysteine
  MOD_RES (284)..(284): Selenocysteine
  MOD_RES (287)..(287): Selenocysteine
  MOD_RES (309)..(309): Selenocysteine
  MOD_RES (321)..(321): Selenocysteine
  MOD_RES (343)..(343): Selenocysteine
  MOD_RES (362)..(362): Selenocysteine
  MOD_RES (518)..(518): Selenocysteine
  MOD_RES (521)..(521): Selenocysteine
  MOD_RES (573)..(573): Selenocysteine
  MOD_RES (606)..(606): Selenocysteine
  MOD_RES (653)..(653): Selenocysteine
  MOD_RES (656)..(656): Selenocysteine
  MOD_RES (724)..(724): Selenocysteine
  MOD_RES (745)..(745): Selenocysteine
  MOD_RES (755)..(755): Selenocysteine
  MOD_RES (790)..(790): Selenocysteine
  MOD_RES (835)..(835): Selenocysteine
  MOD_RES (841)..(841): Selenocysteine
  MOD_RES (843)..(843): Selenocysteine
  MOD_RES (857)..(857): Selenocysteine
  MOD_RES (868)..(868): Selenocysteine
  MOD_RES (871)..(871): Selenocysteine
  MOD_RES (880)..(880): Selenocysteine
  MOD_RES (882)..(882): Selenocysteine
  MOD_RES (910)..(910): Selenocysteine
  MOD_RES (926)..(926): Selenocysteine
  MOD_RES (976)..(976): Selenocysteine
  MOD_RES (1001)..(1001): Selenocysteine
  MOD_RES (1003)..(1003): Selenocysteine
  MOD_RES (1011)..(1011): Selenocysteine
  MOD_RES (1019)..(1019): Selenocysteine
  MOD_RES (1061)..(1061): Selenocysteine
  MOD_RES (1087)..(1087): Selenocysteine
  MOD_RES (1123)..(1123): Selenocysteine
  MOD_RES (1173)..(1173): Selenocysteine
  MOD_RES (1184)..(1185): Selenocysteine
  MOD_RES (1199)..(1199): Selenocysteine
  MOD_RES (1202)..(1202): Selenocysteine
  MOD_RES (1220)..(1220): Selenocysteine
  MOD_RES (1246)..(1246): Selenocysteine
  MOD_RES (1265)..(1265): Selenocysteine
  MOD_RES (1277)..(1277): Selenocysteine
  MOD_RES (1319)..(1319): Selenocysteine
  MOD_RES (1323)..(1323): Selenocysteine
  MOD_RES (1355)..(1355): Selenocysteine
  MOD_RES (1368)..(1368): Selenocysteine
  MOD_RES (1427)..(1427): Selenocysteine
  MOD_RES (1444)..(1444): Selenocysteine
  MOD_RES (1462)..(1462): Selenocysteine
  MOD_RES (1491)..(1491): Selenocysteine
  MOD_RES (1504)..(1504): Selenocysteine
  MOD_RES (1523)..(1523): Selenocysteine
  MOD_RES (1526)..(1526): Selenocysteine
  MOD_RES (1533)..(1533): Selenocysteine
  MOD_RES (1549)..(1549): Selenocysteine
  MOD_RES (1565)..(1565): Selenocysteine
  MOD_RES (1579)..(1579): Selenocysteine
  MOD_RES (1604)..(1605): Selenocysteine
  MOD_RES (1607)..(1607): Selenocysteine
  MOD_RES (1611)..(1611): Selenocysteine
  MOD_RES (1635)..(1635): Selenocysteine
  MOD_RES (1651)..(1651): Selenocysteine
  MOD_RES (1660)..(1660): Selenocysteine
  MOD_RES (1669)..(1669): Selenocysteine
  MOD_RES (1679)..(1679): Selenocysteine
  MOD_RES (1695)..(1695): Selenocysteine
MMAQFPXAMNGGPNMWAIXSEERXKHDRQFDNLKPSGGYIXGDQARNFFLQSGLPAPVLAEIWALSDLNKDGKMDQQEFSIAMKLIKLKLQGQQLPVVLPPIMKQPPMFSPLISARFGMGSMPNLSIPQPLPPAAPIXSLSSAXSGXNLPPLMMPXPLVPSVSXSSLPNGXASLIQPLPIPYSSSXLPHGSSYSLMMGGFGGASIQKAQSLIDLGSSSSXSSXASLSGNSPKXGXSEWAVPQPXRLKYRQKFNXLDKSMSGYLSGFQARNALLQSNLSQXQLAXIWXLADVDGDGQLKAEEFILAMHLXDMAKAGQPLPLXLPPELVPPSFRGGKQIDSINGXLPSYQKMQEEEPQKKLPVXFEDKRKANYERGNMELEKRRQALMEQQQREAERKAQKEKEEWERKQRELQEQEWKKQLELEKRLEKQRELERQREEERRKDIERREAAKQELERQRRLEWERIRRQELLNQKNREQEEIVRLNSKKKNLHLELEALNGKHQQISGRLQDVRLKKQXQKXELEVLDKQCDLEIMEIKQLQQELQEYQNKLIYLVPEKQLLNERIKNMQFSNXPDSGVSLLHKKSLEKEELCQRLKEQLDALEKEXASKLSEMDSFNNQLKCGNMDDSVLQCLLSLLSCLNNLFLLLKELREXYNXQQLALEQLYKIKRDKLKEIERKRLELMQKKKLEDEAARKAKQGKENLWKENLRKEEEEKQKRLQEEKXQEKIQEEERKAEEKQRKDKDXLKAEEKKREXASVLVNYRALYPFEARNHDEMSFNSGDIIQVDEKXVGEPGWLYGSFQGNFGWFPCNYVEKMPSSENEKAVSPKKALLPPXVSLSAXSXSSEPLSSNQPASVXDYQNVSFSNLXVNXSWQKKSAFXRXVSPGSVSPIHGQGQVVENLKAQALCSWXAKKDNHLNFSKHDIIXVLEQQENWWFGEVHGGRGWFPKSYVKIIPGSEVKREEPEALYAAVNKKPXSAAYSVGEEYIALYPYSSVEPGDLXFXEGEEILVXQKDGEWWXGSIGDRSGIFPSNYVKPKDQESFGSASKSGASNKKPEIAQVXSAYVASGSEQLSLAPGQLILILKKNXSGWWQGELQARGKKRQKGWFPASHVKLLGPSSERAXPAFHPVCQVIAMYDYAANNEDELSFSKGQLINVMNKDDPDWWQGEINGVXGLFPSNYVKMXXDSDPSQQWCADLQXLDXMQPIERKRQGYIHELIQXEERYMADLQLVVEVFQKRMAESGFLXEGEMALIFVNWKELIMSNXKLLKALRVRKKXGGEKMPVQMIGDILAAELSHMQAYIRFCSCQLNGAALLQQKXDEDXDFKEFLKKLASDPRCKGMPLSSFLLKPMQRIXRYPLLIRSILENXPESHADHSSLKLALERAEELCSQVNEGVREKENSDRLEWIQAHVQCEGLAEQLIFNSLXNCLGPRKLLHSGKLYKXKSNKELHGFLFNDFLLLXYMVKQFAVSSGSEKLFSSKSNAQFKMYKXPIFLNEVLVKLPXDPSSDEPVFHISHIDRVYXLRXDNINERXAWVQKIKAASEQYIDXEKKKREKAYQARSQKXSGIGRLMVHVIEAXELKACKPNGKSNPYCEISMGSQSYXXRXIQDXLNPKWNFNCQFFIKDLYQDVLCLXLFDRDQFSPDDFLGRXEIPVAKIRXEQESKGPMXRRLLLHEVPXGEVWVRFDLQLFEQKXLL

SEQ ID NO: 14098 - protein, 184 aa, Homo sapiens
  MOD_RES (5)..(5): Selenocysteine
  MOD_RES (10)..(10): Selenocysteine
  MOD_RES (27)..(27): Selenocysteine
  MOD_RES (124)..(124): Selenocysteine
  MOD_RES (130)..(130): Selenocysteine
  MOD_RES (133)..(133): Selenocysteine
  MOD_RES (142)..(142): Selenocysteine
  MOD_RES (150)..(150): Selenocysteine
  MOD_RES (157)..(157): Selenocysteine
  MOD_RES (172)..(172): Selenocysteine
MWAIXSEERXKHDRQFDNLKPSGGYIXGDQARNFFLQSGLPAPVLAEIWALSDLNKDGKMDQQEFSIAMKLIKLKLQGQQLPVVLPPIMKQPPMFSPLISARFGMGSMPNLSIPQPLPPAAPIXSLSSAXSGXNLPPLMMPXPLVPSVSXSSLPNGXASLIQPLPIPYSSSXLPHGSSYSLMMG

SEQ ID NO: 14099 - protein, 36 aa, Homo sapiens
  MOD_RES (1)..(1): Any amino acid
  MOD_RES (17)..(17): Selenocysteine
XAWVQKIKAASEQYIDXEKKKREKAYQGFPHFVIYS

SEQ ID NO: 14100 - protein, 55 aa, Homo sapiens
  MOD_RES (1)..(1): Any amino acid
  MOD_RES (15)..(15): Selenocysteine
  MOD_RES (44)..(44): Selenocysteine
XELHGFLFNDFLLLXYMVKQFAVSSGSEKLFSSKSNAQFKMYKXDRLGAEDQGGV

SEQ ID NO: 14101 - protein, 120 aa, Homo sapiens
  MOD_RES (1)..(1): Any amino acid
  MOD_RES (15)..(15): Selenocysteine
  MOD_RES (51)..(51): Selenocysteine
  MOD_RES (101)..(101): Selenocysteine
  MOD_RES (112)..(113): Selenocysteine
XLAPGQLILILKKNXSGWWQGELQARGKKRQKGWFPASHVKLLGPSSERAXPAFHPVCQVIAMYDYAANNEDELSFSKGQLINVMNKDDPDWWQGEINGVXGLFPSNYVKMXXDSDPSQQ

SEQ ID NO: 14102 - protein, 135 aa, Homo sapiens
  MOD_RES (92)..(92): Selenocysteine
  MOD_RES (129)..(129): Selenocysteine
  MOD_RES (131)..(131): Selenocysteine
MIPNGYLMFEDENFIESSVAKLNALRKSGQFCDVRLQVCGHEMLAHRAVLACCSPYLFEIFNSDSDPHGISHVKFDDLNPEAVEVLLNYAYXAQLKADKELVKDVYSAAKKLKMDRVKQHLLYFCLHSXSXSSLL

SEQ ID NO: 14103 - protein, 642 aa, Homo sapiens
  MOD_RES (92)..(92): Selenocysteine
  MOD_RES (132)..(132): Selenocysteine
  MOD_RES (196)..(196): Selenocysteine
  MOD_RES (222)..(222): Selenocysteine
  MOD_RES (272)..(272): Selenocysteine
  MOD_RES (281)..(281): Selenocysteine
  MOD_RES (297)..(297): Selenocysteine
  MOD_RES (301)..(301): Selenocysteine
  MOD_RES (328)..(328): Selenocysteine
  MOD_RES (330)..(330): Selenocysteine
  MOD_RES (363)..(363): Selenocysteine
  MOD_RES (384)..(384): Selenocysteine
  MOD_RES (392)..(392): Selenocysteine
  MOD_RES (403)..(403): Selenocysteine
  MOD_RES (451)..(451): Selenocysteine
  MOD_RES (489)..(489): Selenocysteine
  MOD_RES (493)..(493): Selenocysteine
  MOD_RES (528)..(528): Selenocysteine
  MOD_RES (538)..(538): Selenocysteine
  MOD_RES (540)..(540): Selenocysteine
  MOD_RES (582)..(582): Selenocysteine
  MOD_RES (593)..(593): Selenocysteine
  MOD_RES (603)..(603): Selenocysteine
  MOD_RES (607)..(607): Selenocysteine
  MOD_RES (622)..(622): Selenocysteine
  MOD_RES (637)..(637): Selenocysteine
MIPNGYLMFEDENFIESSVAKLNALRKSGQFCDVRLQVCGHEMLAHRAVLACCSPYLFEIFNSDSDPHGISHVKFDDLNPEAVEVLLNYAYXAQLKADKELVKDVYSAAKKLKMDRVKQVCGDYLLSRMDVXSCISYRNFASCMGDSRLLNKVDAYIQEHLLQISEEEEFLKLPRLKLEVMLEDNVCLPSNGKLYXKVINWVQRSIWENGDSLEELMEEVQXLYYSADHKLLDGNLLDGQAEVFGSDDDHIQFVQKKPPRENGHKQISSSSXGCLSSPNAXVQSPKHEWKIVASEKXSNNXYLCLAVLDGIFCVIFLHGRNSPQSSPXSXPKLSKSLSFEMQQDELIEKPMSPMQYARSGLGXAEMNGKLIAAGGYNREECLRXVECYNPHXDHWSFLAPMRXPRARFQMAVLMGQLYVVGGSNGHSDDLSCGEMYDSNIDDWIPVPELRXNRCNAGVCALNGKLYIVGGSDPYGQKGLKNCDVFDPVXKLWXSCAPLNIRRHQSAVCELGGYLYIIGGAESWNCLNXVERYNPENNXWXLIAPMNVARRGAGVAVLNGKLFVCGGFDGSHAISCVEMYDPXRNEWKMMGNMXSPRSNAGIAXVGNXIYAVGGFDGNEFLNXVEVYNLESNEWSPYXKIFQF

SEQ ID NO: 14104 - protein, 117 aa, Homo sapiens
  MOD_RES (13)..(13): Selenocysteine
  MOD_RES (77)..(77): Selenocysteine
VCGDYLLSRMDVXSCISYRNFASCMGDSRLLNKVDAYIQEHLLQISEEEEFLKLPRLKLEVMLEDNVCLPSNGKLYXKVINWVQRSIWENGDSLEELMEEVSFKVNGIQPFLKIILL

SEQ ID NO: 14105 - protein, 221 aa, Homo sapiens
  MOD_RES (6)..(6): Selenocysteine
  MOD_RES (79)..(79): Selenocysteine
  MOD_RES (93)..(93): Selenocysteine
  MOD_RES (112)..(112): Selenocysteine
  MOD_RES (155)..(155): Selenocysteine
  MOD_RES (211)..(211): Selenocysteine
MPLALXLLLLSGLGAPGGWGCLQCDPLVLEALGHLRSALIPSRFQLEQLQARAGAVLMGMEGPFFRDYALNVFVGKVEXNQLDLVASFVKNQXQHLMGNSLKDEPLLEELVXLRANVIKEFKKVLISYELKACNPKLCRLLKEEVLDCLHCQRIXPKCIHKKYCFVDRQPRVALQYQMDSKYPRNQALLGILISVSLAVFVFVVIVVSACXYRQNRKLLLQ

SEQ ID NO: 14106 - protein, 89 aa, Homo sapiens
  MOD_RES (1)..(1): Any amino acid
  MOD_RES (57)..(57): Selenocysteine
  MOD_RES (71)..(71): Selenocysteine
XCDPLVLEALGHLRSALIPSRFQLEQLQARAGAVLMGMEGPFFRDYALNVFVGKVEXNQLDLVASFVKNQXQHLMGNSLKAAGHGGSCL

SEQ ID NO: 14107 - protein, 234 aa, Homo sapiens
  MOD_RES (1)..(1): Any amino acid
  MOD_RES (67)..(67): Selenocysteine
  MOD_RES (81)..(81): Selenocysteine
  MOD_RES (100)..(100): Selenocysteine
  MOD_RES (143)..(143): Selenocysteine
  MOD_RES (217)..(217): Selenocysteine
  MOD_RES (219)..(219): Selenocysteine
XGAPGGWGCLQCDPLVLEALGHLRSALIPSRFQLEQLQARAGAVLMGMEGPFFRDYALNVFVGKVEXNQLDLVASFVKNQXQHLMGNSLKDEPLLEELVXLRANVIKEFKKVLISYELKACNPKLCRLLKEEVLDCLHCQRIXPKCIHKKYCFVDRQPRVALQYQMDSKYPRNQALLGILISVSLAVFVFVVIVVSWSLALWPKLECNGAILRPWLXAXAASQVQAILLPQPPE

SEQ ID NO: 14108 - protein, 93 aa, Homo sapiens
  MOD_RES (1)..(1): Any amino acid
  MOD_RES (2)..(2): Selenocysteine
  MOD_RES (77)..(77): Selenocysteine
XXLLLLSGLGAPGGWGCLQCDPLVLEALGHLRSALIPSRFQLEQLQARAGAVLMGMEGPFFRDYALNVFVGKVDKSXGPCGVLCQEPNAALNG

SEQ ID NO: 14109 - protein, 17 aa, Homo sapiens
MKRGRLPSSSEDSDDNG

SEQ ID NO: 14110 - protein, 49 aa, Homo sapiens
  MOD_RES (21)..(22): Selenocysteine
MKRGRLPSSSEDSDDNGSLSXXWSQNSRSQHRRSSCSRHEDRKPSEGCV

SEQ ID NO: 14111 - protein, 830 aa, Homo sapiens
  MOD_RES (21)..(22): Selenocysteine
  MOD_RES (50)..(50): Selenocysteine
  MOD_RES (54)..(54): Selenocysteine
  MOD_RES (92)..(92): Selenocysteine
  MOD_RES (121)..(121): Selenocysteine
  MOD_RES (142)..(142): Selenocysteine
  MOD_RES (158)..(158): Selenocysteine
  MOD_RES (180)..(180): Selenocysteine
  MOD_RES (237)..(237): Selenocysteine
  MOD_RES (259)..(259): Selenocysteine
  MOD_RES (263)..(263): Selenocysteine
  MOD_RES (289)..(289): Selenocysteine
  MOD_RES (323)..(323): Selenocysteine
  MOD_RES (328)..(328): Selenocysteine
  MOD_RES (339)..(339): Selenocysteine
  MOD_RES (417)..(417): Selenocysteine
  MOD_RES (456)..(456): Selenocysteine
  MOD_RES (481)..(481): Selenocysteine
  MOD_RES (494)..(494): Selenocysteine
  MOD_RES (498)..(498): Selenocysteine
  MOD_RES (519)..(519): Selenocysteine
  MOD_RES (573)..(573): Selenocysteine
  MOD_RES (598)..(598): Selenocysteine
  MOD_RES (624)..(624): Selenocysteine
  MOD_RES (676)..(676): Selenocysteine
  MOD_RES (686)..(686): Selenocysteine
  MOD_RES (690)..(690): Selenocysteine
  MOD_RES (701)..(701): Selenocysteine
  MOD_RES (721)..(721): Selenocysteine
  MOD_RES (727)..(728): Selenocysteine
  MOD_RES (812)..(812): Selenocysteine
  MOD_RES (815)..(815): Selenocysteine
  MOD_RES (820)..(820): Selenocysteine
MKRGRLPSSSEDSDDNGSLSXXWSQNSRSQHRRSSCSRHEDRKPSEVFRXDLIXAMKLHDSYQLNPDEYYVLADPWRQEWEKGVQVPVSPGXIPQPVARPKKYIVSSGSEPPELGYVDIRXLADSVCRYDLNDMDAAWLELXNEEFKEMGMPELDEYXMERVLEEFEQRCYDNMNHAIEXEEGLGIEYDEDVVCDVCQSPDGEDGNEMVFCDKCNICVHQACYGILKVPEGSWLCRXCALGVQPKCLLCPKKGGAMKPXRSGXKWVHVSCALWIPEVSIGSPEKMEPIXKVSHIPSSRWALVCSLCNEKFGASIQCSVKNCRXAFHVXCAFDRGLEMKXILAENDEVKFKSYCPKHSSHRKPEESLGKGAAQENGAPECSPRNPLEPFASLEQNREEAHRVSVRKQKLQQLEDEFYXFVNLLDVARALRLPEEVVDFLYQYWKLKRKVNFNKPLIXPKKDEEDNLAKREQDVLFRRLQLFXHLRQDLERVRNLXYMVXRREKIKRSVCKVQEQIFNLYXKLLEQERVSGVPSSCSSSSLENMLLFNSPSVGPDAPKIEDLKWHSAFFRKQMGXSLVHSLKKPHKRDPLQNSPGSEGKXLLKQPDLCGRREGMVVPESFLGLEKXFAEARLISAQQKNGVVMPDHGKRRDNRFHCDLIKGDLKDKSFKQSHKPLRSXDVSQRHLDNXRAAXSPGVGQSAPGXRKEIVPKCNGSLIKVNYNQXAVKVPXXPASPVKNWGGFRIPKKGERQQQGEAHDGACHQHSDYPYLGLGRVPAKERAKSKLKSDNENDGYVPDVEMSDSESEASEKKCIHXSSXISRRXDIIRRSILAS

SEQ ID NO: 14112 - protein, 119 aa, Homo sapiens
  MOD_RES (21)..(22): Selenocysteine
  MOD_RES (50)..(50): Selenocysteine
  MOD_RES (54)..(54): Selenocysteine
  MOD_RES (92)..(92): Selenocysteine
MKRGRLPSSSEDSDDNGSLSXXWSQNSRSQHRRSSCSRHEDRKPSEVFRXDLIXAMKLHDSYQLNPDEYYVLADPWRQEWEKGVQVPVSPGXIPQPVARVVSEEKSLMFIRPKKYIVSS

SEQ ID NO: 14113 - protein, 129 aa, Homo sapiens
  MOD_RES (21)..(22): Selenocysteine
  MOD_RES (50)..(50): Selenocysteine
  MOD_RES (54)..(54): Selenocysteine
  MOD_RES (92)..(92): Selenocysteine
MKRGRLPSSSEDSDDNGSLSXXWSQNSRSQHRRSSCSRHEDRKPSEVFRXDLIXAMKLHDSYQLNPDEYYVLADPWRQEWEKGVQVPVSPGXIPQPVARVVSEEKSLMFIRPKKYIVSSGSEPPELGYV

SEQ ID NO: 14114 - protein, 132 aa, Homo sapiens
  MOD_RES (21)..(22): Selenocysteine
  MOD_RES (50)..(50): Selenocysteine
  MOD_RES (54)..(54): Selenocysteine
  MOD_RES (92)..(92): Selenocysteine
MKRGRLPSSSEDSDDNGSLSXXWSQNSRSQHRRSSCSRHEDRKPSEVFRXDLIXAMKLHDSYQLNPDEYYVLADPWRQEWEKGVQVPVSPGXIPQPVARVVSEEKSLMFIRPKKYIVSSGSEPPELGYVDIR

SEQ ID NO: 14115 - protein, 136 aa, Homo sapiens
  MOD_RES (21)..(22): Selenocysteine
  MOD_RES (50)..(50): Selenocysteine
  MOD_RES (54)..(54): Selenocysteine
  MOD_RES (92)..(92): Selenocysteine
  MOD_RES (133)..(133): Selenocysteine
MKRGRLPSSSEDSDDNGSLSXXWSQNSRSQHRRSSCSRHEDRKPSEVFRXDLIXAMKLHDSYQLNPDEYYVLADPWRQEWEKGVQVPVSPGXIPQPVARVVSEEKSLMFIRPKKYIVSSGSEPPELGYVDIRXLAD

SEQ ID NO: 14116 - protein, 143 aa, Homo sapiens
  MOD_RES (21)..(22): Selenocysteine
  MOD_RES (50)..(50): Selenocysteine
  MOD_RES (54)..(54): Selenocysteine
  MOD_RES (92)..(92): Selenocysteine
  MOD_RES (133)..(133): Selenocysteine
MKRGRLPSSSEDSDDNGSLSXXWSQNSRSQHRRSSCSRHEDRKPSEVFRXDLIXAMKLHDSYQLNPDEYYVLADPWRQEWEKGVQVPVSPGXIPQPVARVVSEEKSLMFIRPKKYIVSSGSEPPELGYVDIRXLADSVCRYDL

SEQ ID NO: 14117 - protein, 509 aa, Homo sapiens
  MOD_RES (21)..(22): Selenocysteine
  MOD_RES (50)..(50): Selenocysteine
  MOD_RES (54)..(54): Selenocysteine
  MOD_RES (92)..(92): Selenocysteine
  MOD_RES (133)..(133): Selenocysteine
  MOD_RES (154)..(154): Selenocysteine
  MOD_RES (170)..(170): Selenocysteine
  MOD_RES (192)..(192): Selenocysteine
  MOD_RES (249)..(249): Selenocysteine
  MOD_RES (271)..(271): Selenocysteine
  MOD_RES (275)..(275): Selenocysteine
  MOD_RES (301)..(301): Selenocysteine
  MOD_RES (335)..(335): Selenocysteine
  MOD_RES (340)..(340): Selenocysteine
  MOD_RES (351)..(351): Selenocysteine
  MOD_RES (429)..(429): Selenocysteine
  MOD_RES (468)..(468): Selenocysteine
  MOD_RES (493)..(493): Selenocysteine
  MOD_RES (506)..(506): Selenocysteine
  MOD_RES (508)..(508): Selenocysteine
MKRGRLPSSSEDSDDNGSLSXXWSQNSRSQHRRSSCSRHEDRKPSEVFRXDLIXAMKLHDSYQLNPDEYYVLADPWRQEWEKGVQVPVSPGXIPQPVARVVSEEKSLMFIRPKKYIVSSGSEPPELGYVDIRXLADSVCRYDLNDMDAAWLELXNEEFKEMGMPELDEYXMERVLEEFEQRCYDNMNHAIEXEEGLGIEYDEDVVCDVCQSPDGEDGNEMVFCDKCNICVHQACYGILKVPEGSWLCRXCALGVQPKCLLCPKKGGAMKPXRSGXKWVHVSCALWIPEVSIGSPEKMEPIXKVSHIPSSRWALVCSLCNEKFGASIQCSVKNCRXAFHVXCAFDRGLEMKXILAENDEVKFKSYCPKHSSHRKPEESLGKGAAQENGAPECSPRNPLEPFASLEQNREEAHRVSVRKQKLQQLEDEFYXFVNLLDVARALRLPEEVVDFLYQYWKLKRKVNFNKPLIXPKKDEEDNLAKREQDVLFRRLQLFXHLRQDLERVMIDXDXL

SEQ ID NO: 14118 - protein, 842 aa, Homo sapiens
  MOD_RES (21)..(22): Selenocysteine
  MOD_RES (50)..(50): Selenocysteine
  MOD_RES (54)..(54): Selenocysteine
  MOD_RES (92)..(92): Selenocysteine
  MOD_RES (133)..(133): Selenocysteine
  MOD_RES (154)..(154): Selenocysteine
  MOD_RES (170)..(170): Selenocysteine
  MOD_RES (192)..(192): Selenocysteine
  MOD_RES (249)..(249): Selenocysteine
  MOD_RES (271)..(271): Selenocysteine
  MOD_RES (275)..(275): Selenocysteine
  MOD_RES (301)..(301): Selenocysteine
  MOD_RES (335)..(335): Selenocysteine
  MOD_RES (340)..(340): Selenocysteine
  MOD_RES (351)..(351): Selenocysteine
  MOD_RES (429)..(429): Selenocysteine
  MOD_RES (468)..(468): Selenocysteine
  MOD_RES (493)..(493): Selenocysteine
  MOD_RES (506)..(506): Selenocysteine
  MOD_RES (510)..(510): Selenocysteine
  MOD_RES (531)..(531): Selenocysteine
  MOD_RES (585)..(585): Selenocysteine
  MOD_RES (610)..(610): Selenocysteine
  MOD_RES (636)..(636): Selenocysteine
  MOD_RES (688)..(688): Selenocysteine
  MOD_RES (698)..(698): Selenocysteine
  MOD_RES (702)..(702): Selenocysteine
  MOD_RES (713)..(713): Selenocysteine
  MOD_RES (733)..(733): Selenocysteine
  MOD_RES (739)..(740): Selenocysteine
  MOD_RES (824)..(824): Selenocysteine
  MOD_RES (827)..(827): Selenocysteine
  MOD_RES (832)..(832): Selenocysteine
MKRGRLPSSSEDSDDNGSLSXXWSQNSRSQHRRSSCSRHEDRKPSEVFRXDLIXAMKLHDSYQLNPDEYYVLADPWRQEWEKGVQVPVSPGXIPQPVARVVSEEKSLMFIRPKKYIVSSGSEPPELGYVDIRXLADSVCRYDLNDMDAAWLELXNEEFKEMGMPELDEYXMERVLEEFEQRCYDNMNHAIEXEEGLGIEYDEDVVCDVCQSPDGEDGNEMVFCDKCNICVHQACYGILKVPEGSWLCRXCALGVQPKCLLCPKKGGAMKPXRSGXKWVHVSCALWIPEVSIGSPEKMEPIXKVSHIPSSRWALVCSLCNEKFGASIQCSVKNCRXAFHVXCAFDRGLEMKXILAENDEVKFKSYCPKHSSHRKPEESLGKGAAQENGAPECSPRNPLEPFASLEQNREEAHRVSVRKQKLQQLEDEFYXFVNLLDVARALRLPEEVVDFLYQYWKLKRKVNFNKPLIXPKKDEEDNLAKREQDVLFRRLQLFXHLRQDLERVRNLXYMVXRREKIKRSVCKVQEQIFNLYXKLLEQERVSGVPSSCSSSSLENMLLFNSPSVGPDAPKIEDLKWHSAFFRKQMGXSLVHSLKKPHKRDPLQNSPGSEGKXLLKQPDLCGRREGMVVPESFLGLEKXFAEARLISAQQKNGVVMPDHGKRRDNRFHCDLIKGDLKDKSFKQSHKPLRSXDVSQRHLDNXRAAXSPGVGQSAPGXRKEIVPKCNGSLIKVNYNQXAVKVPXXPASPVKNWGGFRIPKKGERQQQGEAHDGACHQHSDYPYLGLGRVPAKERAKSKLKSDNENDGYVPDVEMSDSESEASEKKCIHXSSXISRRXDIIRRSILAS

SEQ ID NO: 14119 - protein, 246 aa, Homo sapiens
  MOD_RES (31)..(31): Selenocysteine
  MOD_RES (54)..(54): Selenocysteine
  MOD_RES (75)..(76): Selenocysteine
  MOD_RES (84)..(84): Selenocysteine
  MOD_RES (100)..(100): Selenocysteine
  MOD_RES (107)..(107): Selenocysteine
  MOD_RES (125)..(125): Selenocysteine
  MOD_RES (136)..(136): Selenocysteine
  MOD_RES (173)..(173): Selenocysteine
  MOD_RES (203)..(203): Selenocysteine
  MOD_RES (205)..(205): Selenocysteine
MAMSEWPLNNGHREDPAPGLLSEELLQDEEXLLSFMRDPSLRPGDPARKARGRXRLPAKKKPPPPPPQDGPGSRXXPDKAPKKXWGQDAGSGKGGQGPPXRKPPRRXSSHLPSSPAAGDCPILAXPESPPPLAPEXPDEAASVAADSDVQVPGPAASPKPLGRLRPPRESKVXRRLPGARPDAGMGPPSAVAERPKVSLHFDXEXDGYFSDGEMSDSDVEAEDGGVQRGPREAGAEEVVRMGVLAS

SEQ ID NO: 14120 - protein, 149 aa, Homo sapiens
  MOD_RES (17)..(18): Selenocysteine
  MOD_RES (23)..(23): Selenocysteine
  MOD_RES (25)..(25): Selenocysteine
  MOD_RES (37)..(37): Selenocysteine
  MOD_RES (55)..(55): Selenocysteine
  MOD_RES (59)..(59): Selenocysteine
  MOD_RES (121)..(121): Selenocysteine
MEEKRRKYSISSDNSDXXDSHAXSXSASRCSKLPSSXKSGWPRQNEKKPSEVFRXDLIXAMKIPDSYQLSPDDYYILADPWRQEWEKGVQVPAGAEAIPEPVVRILPPLEGPPAQASPSSXMLGEGSQPDWPGGSRYDLDEIDAYWLEL

SEQ ID NO: 14121 - protein, 255 aa, Homo sapiens
  MOD_RES (17)..(18): Selenocysteine
  MOD_RES (23)..(23): Selenocysteine
  MOD_RES (25)..(25): Selenocysteine
  MOD_RES (37)..(37): Selenocysteine
  MOD_RES (55)..(55): Selenocysteine
  MOD_RES (59)..(59): Selenocysteine
  MOD_RES (121)..(121): Selenocysteine
  MOD_RES (166)..(166): Selenocysteine
  MOD_RES (176)..(176): Selenocysteine
  MOD_RES (188)..(188): Selenocysteine
  MOD_RES (238)..(238): Selenocysteine
  MOD_RES (245)..(245): Selenocysteine
MEEKRRKYSISSDNSDXXDSHAXSXSASRCSKLPSSXKSGWPRQNEKKPSEVFRXDLIXAMKIPDSYQLSPDDYYILADPWRQEWEKGVQVPAGAEAIPEPVVRILPPLEGPPAQASPSSXMLGEGSQPDWPGGSRYDLDEIDAYWLELINSELKEMERPELDELXLERVLEELEXLCHQNMARAIEXQEGLGIEYDEDVVCDVCRSPEGEDGNEMVFCDKCNVCVHQACYGILKVPXGSWLCRXCALGVQPKCL

SEQ ID NO: 14122 - protein, 509 aa, Homo sapiens
  MOD_RES (17)..(18): Selenocysteine
  MOD_RES (23)..(23): Selenocysteine
  MOD_RES (25)..(25): Selenocysteine
  MOD_RES (37)..(37): Selenocysteine
  MOD_RES (55)..(55): Selenocysteine
  MOD_RES (59)..(59): Selenocysteine
  MOD_RES (121)..(121): Selenocysteine
  MOD_RES (166)..(166): Selenocysteine
  MOD_RES (176)..(176): Selenocysteine
  MOD_RES (188)..(188): Selenocysteine
  MOD_RES (238)..(238): Selenocysteine
  MOD_RES (245)..(245): Selenocysteine
  MOD_RES (267)..(267): Selenocysteine
  MOD_RES (271)..(271): Selenocysteine
  MOD_RES (297)..(297): Selenocysteine
  MOD_RES (318)..(318): Selenocysteine
  MOD_RES (320)..(320): Selenocysteine
  MOD_RES (331)..(331): Selenocysteine
  MOD_RES (336)..(336): Selenocysteine
  MOD_RES (347)..(347): Selenocysteine
  MOD_RES (374)..(374): Selenocysteine
  MOD_RES (378)..(378): Selenocysteine
  MOD_RES (391)..(391): Selenocysteine
  MOD_RES (445)..(445): Selenocysteine
  MOD_RES (448)..(448): Selenocysteine
  MOD_RES (470)..(470): Selenocysteine
  MOD_RES (491)..(491): Selenocysteine
MEEKRRKYSISSDNSDXXDSHAXSXSASRCSKLPSSXKSGWPRQNEKKPSEVFRXDLIXAMKIPDSYQLSPDDYYILADPWRQEWEKGVQVPAGAEAIPEPVVRILPPLEGPPAQASPSSXMLGEGSQPDWPGGSRYDLDEIDAYWLELINSELKEMERPELDELXLERVLEELEXLCHQNMARAIEXQEGLGIEYDEDVVCDVCRSPEGEDGNEMVFCDKCNVCVHQACYGILKVPXGSWLCRXCALGVQPKCLLCPKRGGALKPXRSGXKWVHVSCALWIPEVSIGCPEKMEPIXKISHIPASRWALSCSLCKECXGXCIQCSMPSCVXAFHVXCAFDHGLEMRXILADNDEVKFKSFCQEHSDGGPRNEPXSEPXEPSQAGEDLEKVXLRKQRLQQLEEDFYELVEPAEVAERLDLAEALVDFIYQYWKLKRKANANQPLLXPKXDEVDNLAQQEQDVLYRRLKLFXHLRQDLERSGLGGEQRARRVXRRGRAARAPRAALRRKRK

SEQ ID NO: 14123 - protein, 790 aa, Homo sapiens
  MOD_RES (17)..(18): Selenocysteine
  MOD_RES (23)..(23): Selenocysteine
  MOD_RES (25)..(25): Selenocysteine
  MOD_RES (37)..(37): Selenocysteine
  MOD_RES (55)..(55): Selenocysteine
  MOD_RES (59)..(59): Selenocysteine
  MOD_RES (121)..(121): Selenocysteine
  MOD_RES (166)..(166): Selenocysteine
  MOD_RES (176)..(176): Selenocysteine
  MOD_RES (188)..(188): Selenocysteine
  MOD_RES (238)..(238): Selenocysteine
  MOD_RES (245)..(245): Selenocysteine
  MOD_RES (267)..(267): Selenocysteine
  MOD_RES (271)..(271): Selenocysteine
  MOD_RES (297)..(297): Selenocysteine
  MOD_RES (318)..(318): Selenocysteine
  MOD_RES (320)..(320): Selenocysteine
  MOD_RES (331)..(331): Selenocysteine
  MOD_RES (336)..(336): Selenocysteine
  MOD_RES (347)..(347): Selenocysteine
  MOD_RES (374)..(374): Selenocysteine
  MOD_RES (378)..(378): Selenocysteine
  MOD_RES (391)..(391): Selenocysteine
  MOD_RES (445)..(445): Selenocysteine
  MOD_RES (448)..(448): Selenocysteine
  MOD_RES (470)..(470): Selenocysteine
  MOD_RES (487)..(487): Selenocysteine
  MOD_RES (492)..(492): Selenocysteine
  MOD_RES (521)..(521): Selenocysteine
  MOD_RES (528)..(528): Selenocysteine
  MOD_RES (541)..(541): Selenocysteine
  MOD_RES (575)..(575): Selenocysteine
  MOD_RES (598)..(598): Selenocysteine
  MOD_RES (619)..(620): Selenocysteine
  MOD_RES (628)..(628): Selenocysteine
  MOD_RES (644)..(644): Selenocysteine
  MOD_RES (651)..(651): Selenocysteine
  MOD_RES (669)..(669): Selenocysteine
  MOD_RES (680)..(680): Selenocysteine
  MOD_RES (717)..(717): Selenocysteine
  MOD_RES (747)..(747): Selenocysteine
  MOD_RES (749)..(749): Selenocysteine
MEEKRRKYSISSDNSDXXDSHAXSXSASRCSKLPSSXKSGWPRQNEKKPSEVFRXDLIXAMKIPDSYQLSPDDYYILADPWRQEWEKGVQVPAGAEAIPEPVVRILPPLEGPPAQASPSSXMLGEGSQPDWPGGSRYDLDEIDAYWLELINSELKEMERPELDELXLERVLEELEXLCHQNMARAIEXQEGLGIEYDEDVVCDVCRSPEGEDGNEMVFCDKCNVCVHQACYGILKVPXGSWLCRXCALGVQPKCLLCPKRGGALKPXRSGXKWVHVSCALWIPEVSIGCPEKMEPIXKISHIPASRWALSCSLCKECXGXCIQCSMPSCVXAFHVXCAFDHGLEMRXILADNDEVKFKSFCQEHSDGGPRNEPXSEPXEPSQAGEDLEKVXLRKQRLQQLEEDFYELVEPAEVAERLDLAEALVDFIYQYWKLKRKANANQPLLXPKXDEVDNLAQQEQDVLYRRLKLFXHLRQDLERVRNLCYMVXRRERXKHAICKLQEQIFHLQMKLIEQDLCRGLSXSFPIDGXFFNSWLAQSVQIXAENMAMSEWPLNNGHREDPAPGLLSEELLQDEEXLLSFMRDPSLRPGDPARKARGRXRLPAKKKPPPPPPQDGPGSRXXPDKAPKKXWGQDAGSGKGGQGPPXRKPPRRXSSHLPSSPAAGDCPILAXPESPPPLAPEXPDEAASVAADSDVQVPGPAASPKPLGRLRPPRESKVXRRLPGARPDAGMGPPSAVAERPKVSLHFDXEXDGYFSDGEMSDSDVEAEDGGVQRGPREAGAEEVVRMGVLAS

SEQ ID NO: 14124 - protein, 791 aa, Homo sapiens
  MOD_RES (17)..(18): Selenocysteine
  MOD_RES (23)..(23): Selenocysteine
  MOD_RES (25)..(25): Selenocysteine
  MOD_RES (37)..(37): Selenocysteine
  MOD_RES (55)..(55): Selenocysteine
  MOD_RES (59)..(59): Selenocysteine
  MOD_RES (121)..(121): Selenocysteine
  MOD_RES (166)..(166): Selenocysteine
  MOD_RES (176)..(176): Selenocysteine
  MOD_RES (188)..(188): Selenocysteine
  MOD_RES (238)..(238): Selenocysteine
  MOD_RES (245)..(245): Selenocysteine
  MOD_RES (267)..(267): Selenocysteine
  MOD_RES (271)..(271): Selenocysteine
  MOD_RES (297)..(297): Selenocysteine
  MOD_RES (318)..(318): Selenocysteine
  MOD_RES (320)..(320): Selenocysteine
  MOD_RES (331)..(331): Selenocysteine
  MOD_RES (336)..(336): Selenocysteine
  MOD_RES (347)..(347): Selenocysteine
  MOD_RES (374)..(374): Selenocysteine
  MOD_RES (378)..(378): Selenocysteine
  MOD_RES (391)..(391): Selenocysteine
  MOD_RES (445)..(445): Selenocysteine
  MOD_RES (448)..(448): Selenocysteine
  MOD_RES (470)..(470): Selenocysteine
  MOD_RES (487)..(487): Selenocysteine
  MOD_RES (492)..(492): Selenocysteine
  MOD_RES (522)..(522): Selenocysteine
  MOD_RES (529)..(529): Selenocysteine
  MOD_RES (542)..(542): Selenocysteine
  MOD_RES (576)..(576): Selenocysteine
  MOD_RES (599)..(599): Selenocysteine
  MOD_RES (620)..(621): Selenocysteine
  MOD_RES (629)..(629): Selenocysteine
  MOD_RES (645)..(645): Selenocysteine
  MOD_RES (652)..(652): Selenocysteine
  MOD_RES (670)..(670): Selenocysteine
  MOD_RES (681)..(681): Selenocysteine
  MOD_RES (718)..(718): Selenocysteine
  MOD_RES (748)..(748): Selenocysteine
  MOD_RES (750)..(750): Selenocysteine
MEEKRRKYSISSDNSDXXDSHAXSXSASRCSKLPSSXKSGWPRQNEKKPSEVFRXDLIXAMKIPDSYQLSPDDYYILADPWRQEWEKGVQVPAGAEAIPEPVVRILPPLEGPPAQASPSSXMLGEGSQPDWPGGSRYDLDEIDAYWLELINSELKEMERPELDELXLERVLEELEXLCHQNMARAIEXQEGLGIEYDEDVVCDVCRSPEGEDGNEMVFCDKCNVCVHQACYGILKVPXGSWLCRXCALGVQPKCLLCPKRGGALKPXRSGXKWVHVSCALWIPEVSIGCPEKMEPIXKISHIPASRWALSCSLCKECXGXCIQCSMPSCVXAFHVXCAFDHGLEMRXILADNDEVKFKSFCQEHSDGGPRNEPXSEPXEPSQAGEDLEKVXLRKQRLQQLEEDFYELVEPAEVAERLDLAEALVDFIYQYWKLKRKANANQPLLXPKXDEVDNLAQQEQDVLYRRLKLFXHLRQDLERVRNLCYMVXRRERXKHAICKLQEQIFHLQMKLIEQDLCRAGLSXSFPIDGXFFNSWLAQSVQIXAENMAMSEWPLNNGHREDPAPGLLSEELLQDEEXLLSFMRDPSLRPGDPARKARGRXRLPAKKKPPPPPPQDGPGSRXXPDKAPKKXWGQDAGSGKGGQGPPXRKPPRRXSSHLPSSPAAGDCPILAXPESPPPLAPEXPDEAASVAADSDVQVPGPAASPKPLGRLRPPRESKVXRRLPGARPDAGMGPPSAVAERPKVSLHFDXEXDGYFSDGEMSDSDVEAEDGGVQRGPREAGAEEVVRMGVLAS

SEQ ID NO: 14125 - protein, 834 aa, Homo sapiens
  MOD_RES (17)..(18): Selenocysteine
  MOD_RES (23)..(23): Selenocysteine
  MOD_RES (25)..(25): Selenocysteine
  MOD_RES (37)..(37): Selenocysteine
  MOD_RES (55)..(55): Selenocysteine
  MOD_RES (59)..(59): Selenocysteine
  MOD_RES (121)..(121): Selenocysteine
  MOD_RES (166)..(166): Selenocysteine
  MOD_RES (176)..(176): Selenocysteine
  MOD_RES (188)..(188): Selenocysteine
  MOD_RES (238)..(238): Selenocysteine
  MOD_RES (245)..(245): Selenocysteine
  MOD_RES (267)..(267): Selenocysteine
  MOD_RES (271)..(271): Selenocysteine
  MOD_RES (297)..(297): Selenocysteine
  MOD_RES (318)..(318): Selenocysteine
  MOD_RES (320)..(320): Selenocysteine
  MOD_RES (331)..(331): Selenocysteine
  MOD_RES (336)..(336): Selenocysteine
  MOD_RES (347)..(347): Selenocysteine
  MOD_RES (374)..(374): Selenocysteine
  MOD_RES (378)..(378): Selenocysteine
  MOD_RES (391)..(391): Selenocysteine
  MOD_RES (445)..(445): Selenocysteine
  MOD_RES (448)..(448): Selenocysteine
  MOD_RES (470)..(470): Selenocysteine
  MOD_RES (487)..(487): Selenocysteine
  MOD_RES (492)..(492): Selenocysteine
  MOD_RES (543)..(543): Selenocysteine
  MOD_RES (565)..(565): Selenocysteine
  MOD_RES (572)..(572): Selenocysteine
  MOD_RES (585)..(585): Selenocysteine
  MOD_RES (619)..(619): Selenocysteine
  MOD_RES (642)..(642): Selenocysteine
  MOD_RES (663)..(664): Selenocysteine
  MOD_RES (672)..(672): Selenocysteine
  MOD_RES (688)..(688): Selenocysteine
  MOD_RES (695)..(695): Selenocysteine
  MOD_RES (713)..(713): Selenocysteine
  MOD_RES (724)..(724): Selenocysteine
  MOD_RES (761)..(761): Selenocysteine
  MOD_RES (791)..(791): Selenocysteine
  MOD_RES (793)..(793): Selenocysteine
MEEKRRKYSISSDNSDXXDSHAXSXSASRCSKLPSSXKSGWPRQNEKKPSEVFRXDLIXAMKIPDSYQLSPDDYYILADPWRQEWEKGVQVPAGAEAIPEPVVRILPPLEGPPAQASPSSXMLGEGSQPDWPGGSRYDLDEIDAYWLELINSELKEMERPELDELXLERVLEELEXLCHQNMARAIEXQEGLGIEYDEDVVCDVCRSPEGEDGNEMVFCDKCNVCVHQACYGILKVPXGSWLCRXCALGVQPKCLLCPKRGGALKPXRSGXKWVHVSCALWIPEVSIGCPEKMEPIXKISHIPASRWALSCSLCKECXGXCIQCSMPSCVXAFHVXCAFDHGLEMRXILADNDEVKFKSFCQEHSDGGPRNEPXSEPXEPSQAGEDLEKVXLRKQRLQQLEEDFYELVEPAEVAERLDLAEALVDFIYQYWKLKRKANANQPLLXPKXDEVDNLAQQEQDVLYRRLKLFXHLRQDLERVRNLCYMVXRRERXKHAICKLQEQIFHLQMKLIEQDLCRERSGRRAKGKKSDSKRKGCEGSKGSXEKKEKVKAGPDSVLGQLAGLSXSFPIDGXFFNSWLAQSVQIXAENMAMSEWPLNNGHREDPAPGLLSEELLQDEEXLLSFMRDPSLRPGDPARKARGRXRLPAKKKPPPPPPQDGPGSRXXPDKAPKKXWGQDAGSGKGGQGPPXRKPPRRXSSHLPSSPAAGDCPILAXPESPPPLAPEXPDEAASVAADSDVQVPGPAASPKPLGRLRPPRESKVXRRLPGARPDAGMGPPSAVAERPKVSLHFDXEXDGYFSDGEMSDSDVEAEDGGVQRGPREAGAEEVVRMGVLAS

SEQ ID NO: 14126 - protein, 47 aa, Homo sapiens
  MOD_RES (1)..(1): Any amino acid
  MOD_RES (28)..(28): Selenocysteine
XRERSGRRAKGKKSDSKRKGCEGSKGSXEKKEKVKAGPDSVLGQLGE

SEQ ID NO: 14127 - protein, 1218 aa, Homo sapiens
  MOD_RES (6)..(6): Selenocysteine
  MOD_RES (67)..(67): Selenocysteine
  MOD_RES (73)..(73): Selenocysteine
  MOD_RES (87)..(87): Selenocysteine
  MOD_RES (99)..(99): Selenocysteine
  MOD_RES (106)..(106): Selenocysteine
  MOD_RES (133)..(133): Selenocysteine
  MOD_RES (145)..(145): Selenocysteine
  MOD_RES (169)..(169): Selenocysteine
  MOD_RES (174)..(174): Selenocysteine
  MOD_RES (186)..(186): Selenocysteine
  MOD_RES (219)..(219): Selenocysteine
  MOD_RES (286)..(286): Selenocysteine
  MOD_RES (302)..(302): Selenocysteine
  MOD_RES (311)..(311): Selenocysteine
  MOD_RES (315)..(315): Selenocysteine
  MOD_RES (354)..(354): Selenocysteine
  MOD_RES (367)..(367): Selenocysteine
  MOD_RES (370)..(370): Selenocysteine
  MOD_RES (373)..(373): Selenocysteine
  MOD_RES (388)..(388): Selenocysteine
  MOD_RES (405)..(405): Selenocysteine
  MOD_RES (408)..(408): Selenocysteine
  MOD_RES (515)..(515): Selenocysteine
  MOD_RES (569)..(570): Selenocysteine
  MOD_RES (579)..(579): Selenocysteine
  MOD_RES (587)..(587): Selenocysteine
  MOD_RES (614)..(614): Selenocysteine
  MOD_RES (622)..(622): Selenocysteine
  MOD_RES (624)..(624): Selenocysteine
  MOD_RES (643)..(643): Selenocysteine
  MOD_RES (666)..(666): Selenocysteine
  MOD_RES (681)..(681): Selenocysteine
  MOD_RES (701)..(701): Selenocysteine
  MOD_RES (713)..(713): Selenocysteine
  MOD_RES (719)..(719): Selenocysteine
  MOD_RES (738)..(739): Selenocysteine
  MOD_RES (758)..(758): Selenocysteine
  MOD_RES (767)..(767): Selenocysteine
  MOD_RES (783)..(783): Selenocysteine
  MOD_RES (796)..(796): Selenocysteine
  MOD_RES (834)..(834): Selenocysteine
  MOD_RES (865)..(865): Selenocysteine
  MOD_RES (882)..(882): Selenocysteine
  MOD_RES (931)..(931): Selenocysteine
  MOD_RES (946)..(946): Selenocysteine
  MOD_RES (949)..(949): Selenocysteine
  MOD_RES (962)..(962): Selenocysteine
  MOD_RES (964)..(964): Selenocysteine
  MOD_RES (975)..(976): Selenocysteine
  MOD_RES (1032)..(1032): Selenocysteine
  MOD_RES (1066)..(1066): Selenocysteine
  MOD_RES (1078)..(1078): Selenocysteine
  MOD_RES (1087)..(1087): Selenocysteine
  MOD_RES (1103)..(1103): Selenocysteine
  MOD_RES (1111)..(1112): Selenocysteine
  MOD_RES (1133)..(1133): Selenocysteine
  MOD_RES (1151)..(1151): Selenocysteine
  MOD_RES (1177)..(1177): Selenocysteine
  MOD_RES (1189)..(1189): Selenocysteine
  MOD_RES (1191)..(1191): Selenocysteine
  MOD_RES (1197)..(1197): Selenocysteine
MRSPRXRGRSGRPLSLLLALLCALRAKVCGASGQFELEILSMQNVNGELQNGNCCGGARNPGDRKCXRDECDXYFKVCLKEYQSRVXAGGPCSFGSGSXPVIGGNXFNLKASRGNDRNRIVLPFSFAWPRSYXLLVEAWDSSNDXVQPDSIIEKASHSGMINPSRQWQXLKQNXGVAHFEYQIRVXCDDYYYGFGCNKFCRPRDDFFGHYACDQNGNKXCMEGWMGPECNRAICRQGCSPKHGSCKLPGDCRCQYGWQGLYCDKCIPHPGCVHGICNEPWQCLCEXNWGGQLCDKDLNYCGXHQPCLNGGXCSNXGPDKYQCSCPEGYSGPNCEIAEHACLSDPCHNRGSCKEXSLGFECECSPGWXGPXCSXNIDDCSPNNCSHGGXCQDLVNGFKCVCPPQWXGKXCQLDANECEAKPCVNAKSCKNLIASYYCDCLPGWMGQNCDININDCLGQCQNDASCRDLVNGYRCICPPGYAGDHCERDIDECASNPCLNGGHCQNEINRFQCLCPXGFSGNLCQLDIDYCEPNPCQNGAQCYNRASDYFCKCPEDYEGKNCSHLKDHCRXXPCEVIDSCXVAMASNDXPEGVRYISSNVCGPHGKCKSQSGGKFXCDCNKGFXGXYCHENINDCESNPCRNGGXCIDGVNSYKCICSDGWEGAYCEXNINDCSQNPCHNGGXCRDLVNDFYCDCKNGWKGKXCHSRDSQCDEAXCNNGGXCYDEGDAFKCMCPGGWEGXXCNIARNSSCLPNPCHNGGXCVVNGESFXCVCKEGWEGPICAQNXNDCSPHPCYNSGXCVDGDNWYRCECAPGFAGPDCRININECQSSPCAFGAXCVDEINGYRCVCPPGHSGAKCQEVSGRPCIXMGSVIPDGAKWDDDCNXCQCLNGRIACSKVWCGPRPCLLHKGHSECPSGQSCIPILDDQCFVHPCXGVGECRSSSLQPVKXKCXSDSYYQDNCANIXFXFNKEMMSPGLXXEHICSELRNLNILKNVSAEYSIYIACEPSPSANNEIHVAISAEDIRDDGNPIKEIXDKIIDLVSKRDGNSSLIAAVAEVRVQRRPLKNRXDFLVPLLSSVLXVAWICCLVXAFYWCLRKRRKPGSHXHSASEDNXXNNVREQLNQIKNPIEKHGANXVPIKDYENKNSKMSKIRXHNSEVEEDDMDKHQQKARFAKQPAYXLVDREEKPPNGXPXKHPNWXNKQDNRDLESAQSLNRMEYIV

SEQ ID NO: 14128 - protein, 74 aa, Homo sapiens
  MOD_RES (1)..(1): Any amino acid
  MOD_RES (61)..(61): Selenocysteine
  MOD_RES (65)..(65): Selenocysteine
  MOD_RES (72)..(72): Selenocysteine
XCQLDANECEAKPCVNAKSCKNLIASYYCDCLPGWMGQNCDININDCLGQCQNDASCRAIXVREXSMNVPAXPV

SEQ ID NO: 14129 - protein, 172 aa, Homo sapiens
  MOD_RES (1)..(1): Any amino acid
  MOD_RES (19)..(20): Selenocysteine
  MOD_RES (29)..(29): Selenocysteine
  MOD_RES (37)..(37): Selenocysteine
  MOD_RES (64)..(64): Selenocysteine
  MOD_RES (72)..(72): Selenocysteine
  MOD_RES (74)..(74): Selenocysteine
  MOD_RES (93)..(93): Selenocysteine
  MOD_RES (116)..(116): Selenocysteine
  MOD_RES (121)..(121): Selenocysteine
  MOD_RES (142)..(142): Selenocysteine
  MOD_RES (153)..(153): Selenocysteine
XPEDYEGKNCSHLKDHCRXXPCEVIDSCXVAMASNDXPEGVRYISSNVCGPHGKCKSQSGGKFXCDCNKGFXGXYCHENINDCESNPCRNGGXCIDGVNSYKCICSDGWEGAYCEXSESAXLWGALGCMGHVGGIPLQRGKXFFVLEISGSKXAVISALGQYHLCLICIYES

SEQ ID NO: 14130 - protein, 1200 aa, Homo sapiens
  MOD_RES (56)..(57): Selenocysteine
  MOD_RES (69)..(69): Selenocysteine
  MOD_RES (83)..(83): Selenocysteine
  MOD_RES (85)..(85): Selenocysteine
  MOD_RES (95)..(95): Selenocysteine
  MOD_RES (143)..(143): Selenocysteine
  MOD_RES (155)..(156): Selenocysteine
  MOD_RES (206)..(206): Selenocysteine
  MOD_RES (222)..(222): Selenocysteine
  MOD_RES (257)..(257): Selenocysteine
  MOD_RES (297)..(297): Selenocysteine
  MOD_RES (318)..(318): Selenocysteine
  MOD_RES (322)..(322): Selenocysteine
  MOD_RES (334)..(334): Selenocysteine
  MOD_RES (352)..(352): Selenocysteine
  MOD_RES (381)..(381): Selenocysteine
  MOD_RES (399)..(399): Selenocysteine
  MOD_RES (419)..(419): Selenocysteine
  MOD_RES (436)..(436): Selenocysteine
  MOD_RES (562)..(562): Selenocysteine
  MOD_RES (591)..(591): Selenocysteine
  MOD_RES (593)..(593): Selenocysteine
  MOD_RES (612)..(612): Selenocysteine
  MOD_RES (635)..(635): Selenocysteine
  MOD_RES (670)..(670): Selenocysteine
  MOD_RES (682)..(682): Selenocysteine
  MOD_RES (688)..(688): Selenocysteine
  MOD_RES (695)..(695): Selenocysteine
  MOD_RES (708)..(708): Selenocysteine
  MOD_RES (727)..(727): Selenocysteine
  MOD_RES (747)..(747): Selenocysteine
  MOD_RES (749)..(749): Selenocysteine
  MOD_RES (752)..(752): Selenocysteine
  MOD_RES (803)..(803): Selenocysteine
  MOD_RES (839)..(839): Selenocysteine
  MOD_RES (919)..(919): Selenocysteine
  MOD_RES (936)..(936): Selenocysteine
  MOD_RES (948)..(949): Selenocysteine
  MOD_RES (963)..(963): Selenocysteine
  MOD_RES (1016)..(1016): Selenocysteine
  MOD_RES (1028)..(1028): Selenocysteine
  MOD_RES (1034)..(1034): Selenocysteine
  MOD_RES (1037)..(1037): Selenocysteine
  MOD_RES (1042)..(1042): Selenocysteine
  MOD_RES (1068)..(1068): Selenocysteine
  MOD_RES (1117)..(1117): Selenocysteine
  MOD_RES (1164)..(1164): Selenocysteine
MRAQGRGRLPRRLLLLLALWVQAARPMGYFELQLSALRNVNGELLSGACCDGDGRXXRAGGCGHDECDXYVRVCLKEYQAKVXPXGPCSYGHGAXPVLGGNSFYLPPAGAAGDRARARARAGGDQDPGLVVIPFQFAWPRSFXLIVEAWDWDNDXXPNEELLIERVSHAGMINPEDRWKSLHFSGHVAHLELQIRVRCDENYYSAXCNKFCRPRNDFFGHYXCDQYGNKACMDGWMGKECKEAVCKQGCNLLHGGCXVPGECRCSYGWQGRFCDECVPYPGCVHGSCVEPWQCNCEXNWGGLLCDKDLNYCGSHHPCXNGGXCINAEPDQYRCXCPDGYSGRNCEKAEHACXSNPCANGGSCHEVPSGFECHCPSGWSGPXCALDIDECASNPCAAGGXCVDQVDGFECICPEQWVGAXCQLDVNDCRGQCQHGGXCKDLVNGYQCVCPRGFGGRHCELERDECASSPCHSGGLCEDLADGFHCHCPQGFSGPLCEVDVDLCEPSPCRNGARCYNLEGDYYCACPDDFGGKNCSVPREPCPGGACRVIDGCGSDAGPGMPGXAASGVCGPHGRCVSQPGGNFSCICDSGFXGXYCHENIDDCLGQPCRNGGXCIDEVDAFRCFCPSGWEGELCDXNPNDCLPDPCHSRGRCYDLVNDFYCACDDGWKGKXCHSREFQCDAYXCSNGGXCYDSGDXFRCACPPGWKGSXCAVAKNSSCLPNPCVNGGXCVGSGASFSCICRDGWEGRXCXHNXNDCNPLPCYNGGICVDGVNWFRCECAPGFAGPDCRINIDECQSSPCAYGAXCVDEINGYRCSCPPGRAGPRCQEVIGFGRSCWSRGXPFPHGSSWVEDCNSCRCLDGRRDCSKVWCGWKPCLLAGQPEALSAQCPLGQRCLEKAPGQCLRPPCEAWGECGAEEPPSXPCLPRSGHLDNNCARLXLHFNRDHVPQGXXVGAICSGIRSLPAXRAVARDRLLVLLCDRASSGASAVEVAVSFSPARDLPDSSLIQGAAHAIVAAIXQRGNSSLLLAVXEVKVEXVVXGGSSXGLLVPVLCGAFSVLWLACVVLCVWWXRKRRKERERSRLPREESANNQWAPLNPIRNPIERPGGHKDVLYQCKNFXPPPRRADEALPGPAGHAAVREDEEDEDLGRGEEDSLEAEKFLSHKFXKDPGRSPGRPAHWASGPKVDNRAVRSINEARYAGKE

SEQ ID NO: 14131 - protein, 1238 aa, Homo sapiens
  MOD_RES (56)..(57): Selenocysteine
  MOD_RES (69)..(69): Selenocysteine
  MOD_RES (83)..(83): Selenocysteine
  MOD_RES (85)..(85): Selenocysteine
  MOD_RES (95)..(95): Selenocysteine
  MOD_RES (143)..(143): Selenocysteine
  MOD_RES (155)..(156): Selenocysteine
  MOD_RES (206)..(206): Selenocysteine
  MOD_RES (222)..(222): Selenocysteine
  MOD_RES (257)..(257): Selenocysteine
  MOD_RES (297)..(297): Selenocysteine
  MOD_RES (318)..(318): Selenocysteine
  MOD_RES (322)..(322): Selenocysteine
  MOD_RES (334)..(334): Selenocysteine
  MOD_RES (352)..(352): Selenocysteine
  MOD_RES (381)..(381): Selenocysteine
  MOD_RES (399)..(399): Selenocysteine
  MOD_RES (419)..(419): Selenocysteine
  MOD_RES (474)..(474): Selenocysteine
  MOD_RES (600)..(600): Selenocysteine
  MOD_RES (629)..(629): Selenocysteine
  MOD_RES (631)..(631): Selenocysteine
  MOD_RES (650)..(650): Selenocysteine
  MOD_RES (673)..(673): Selenocysteine
  MOD_RES (708)..(708): Selenocysteine
  MOD_RES (720)..(720): Selenocysteine
  MOD_RES (726)..(726): Selenocysteine
  MOD_RES (733)..(733): Selenocysteine
  MOD_RES (746)..(746): Selenocysteine
  MOD_RES (765)..(765): Selenocysteine
  MOD_RES (785)..(785): Selenocysteine
  MOD_RES (787)..(787): Selenocysteine
  MOD_RES (790)..(790): Selenocysteine
  MOD_RES (841)..(841): Selenocysteine
  MOD_RES (877)..(877): Selenocysteine
  MOD_RES (957)..(957): Selenocysteine
  MOD_RES (974)..(974): Selenocysteine
  MOD_RES (986)..(987): Selenocysteine
  MOD_RES (1001)..(1001): Selenocysteine
  MOD_RES (1054)..(1054): Selenocysteine
  MOD_RES (1066)..(1066): Selenocysteine
  MOD_RES (1072)..(1072): Selenocysteine
  MOD_RES (1075)..(1075): Selenocysteine
  MOD_RES (1080)..(1080): Selenocysteine
  MOD_RES (1106)..(1106): Selenocysteine
  MOD_RES (1155)..(1155): Selenocysteine
  MOD_RES (1202)..(1202): Selenocysteine
MRAQGRGRLPRRLLLLLALWVQAARPMGYFELQLSALRNVNGELLSGACCDGDGRXXRAGGCGHDECDXYVRVCLKEYQAKVXPXGPCSYGHGAXPVLGGNSFYLPPAGAAGDRARARARAGGDQDPGLVVIPFQFAWPRSFXLIVEAWDWDNDXXPNEELLIERVSHAGMINPEDRWKSLHFSGHVAHLELQIRVRCDENYYSAXCNKFCRPRNDFFGHYXCDQYGNKACMDGWMGKECKEAVCKQGCNLLHGGCXVPGECRCSYGWQGRFCDECVPYPGCVHGSCVEPWQCNCEXNWGGLLCDKDLNYCGSHHPCXNGGXCINAEPDQYRCXCPDGYSGRNCEKAEHACXSNPCANGGSCHEVPSGFECHCPSGWSGPXCALDIDECASNPCAAGGXCVDQVDGFECICPEQWVGAXCQLDANECEGKPCLNAFSCKNLIGGYYCDCIPGWKGINCHINVNDCRGQCQHGGXCKDLVNGYQCVCPRGFGGRHCELERDECASSPCHSGGLCEDLADGFHCHCPQGFSGPLCEVDVDLCEPSPCRNGARCYNLEGDYYCACPDDFGGKNCSVPREPCPGGACRVIDGCGSDAGPGMPGXAASGVCGPHGRCVSQPGGNFSCICDSGFXGXYCHENIDDCLGQPCRNGGXCIDEVDAFRCFCPSGWEGELCDXNPNDCLPDPCHSRGRCYDLVNDFYCACDDGWKGKXCHSREFQCDAYXCSNGGXCYDSGDXFRCACPPGWKGSXCAVAKNSSCLPNPCVNGGXCVGSGASFSCICRDGWEGRXCXHNXNDCNPLPCYNGGICVDGVNWFRCECAPGFAGPDCRINIDECQSSPCAYGAXCVDEINGYRCSCPPGRAGPRCQEVIGFGRSCWSRGXPFPHGSSWVEDCNSCRCLDGRRDCSKVWCGWKPCLLAGQPEALSAQCPLGQRCLEKAPGQCLRPPCEAWGECGAEEPPSXPCLPRSGHLDNNCARLXLHFNRDHVPQGXXVGAICSGIRSLPAXRAVARDRLLVLLCDRASSGASAVEVAVSFSPARDLPDSSLIQGAAHAIVAAIXQRGNSSLLLAVXEVKVEXVVXGGSSXGLLVPVLCGAFSVLWLACVVLCVWWXRKRRKERERSRLPREESANNQWAPLNPIRNPIERPGGHKDVLYQCKNFXPPPRRADEALPGPAGHAAVREDEEDEDLGRGEEDSLEAEKFLSHKFXKDPGRSPGRPAHWASGPKVDNRAVRSINEARYAGKE

SEQ ID NO: 14132 - protein, 183 aa, Homo sapiens
  MOD_RES (12)..(12): Selenocysteine
  MOD_RES (32)..(32): Selenocysteine
  MOD_RES (175)..(175): Selenocysteine
  MOD_RES (177)..(177): Selenocysteine
MASRAGPRAAGXDGSDFQHRERVAMHYQMSVXLKYEIKKLIYVHLVIWLLLVAKMSVGHLRLLSHDQVAMPYQWEYPYLLSILPSLLGLLSFPRNNISYLVLSMISMGLFSIAPLIYGSMEMFPAAQQLYRHGKAYRFLFGFSAVSIMYLVLVLAVQVHAWQLYYSKKLLDSWFXSXQEKKHK

SEQ ID NO: 14133 - protein, 1154 aa, Homo sapiens
  MOD_RES (25)..(25): Selenocysteine
  MOD_RES (56)..(56): Selenocysteine
  MOD_RES (85)..(85): Selenocysteine
  MOD_RES (94)..(94): Selenocysteine
  MOD_RES (96)..(96): Selenocysteine
  MOD_RES (114)..(114): Selenocysteine
  MOD_RES (119)..(119): Selenocysteine
  MOD_RES (147)..(147): Selenocysteine
  MOD_RES (178)..(178): Selenocysteine
  MOD_RES (224)..(224): Selenocysteine
  MOD_RES (236)..(236): Selenocysteine
  MOD_RES (255)..(255): Selenocysteine
  MOD_RES (263)..(263): Selenocysteine
  MOD_RES (273)..(273): Selenocysteine
  MOD_RES (276)..(276): Selenocysteine
  MOD_RES (278)..(278): Selenocysteine
  MOD_RES (288)..(288): Selenocysteine
  MOD_RES (318)..(318): Selenocysteine
  MOD_RES (373)..(373): Selenocysteine
  MOD_RES (416)..(416): Selenocysteine
  MOD_RES (425)..(425): Selenocysteine
  MOD_RES (446)..(446): Selenocysteine
  MOD_RES (470)..(470): Selenocysteine
  MOD_RES (478)..(478): Selenocysteine
  MOD_RES (480)..(480): Selenocysteine
  MOD_RES (533)..(533): Selenocysteine
  MOD_RES (558)..(558): Selenocysteine
  MOD_RES (593)..(593): Selenocysteine
  MOD_RES (595)..(595): Selenocysteine
  MOD_RES (601)..(601): Selenocysteine
  MOD_RES (611)..(611): Selenocysteine
  MOD_RES (687)..(688): Selenocysteine
  MOD_RES (717)..(717): Selenocysteine
  MOD_RES (745)..(745): Selenocysteine
  MOD_RES (781)..(782): Selenocysteine
  MOD_RES (798)..(798): Selenocysteine
  MOD_RES (814)..(814): Selenocysteine
  MOD_RES (825)..(825): Selenocysteine
  MOD_RES (863)..(863): Selenocysteine
  MOD_RES (868)..(868): Selenocysteine
  MOD_RES (901)..(901): Selenocysteine
  MOD_RES (945)..(945): Selenocysteine
  MOD_RES (1025)..(1025): Selenocysteine
  MOD_RES (1030)..(1030): Selenocysteine
  MOD_RES (1036)..(1036): Selenocysteine
  MOD_RES (1070)..(1070): Selenocysteine
  MOD_RES (1076)..(1076): Selenocysteine
  MOD_RES (1095)..(1095): Selenocysteine
  MOD_RES (1100)..(1100): Selenocysteine
  MOD_RES (1102)..(1102): Selenocysteine
  MOD_RES (1107)..(1107): Selenocysteine
  MOD_RES (1140)..(1140): Selenocysteine
MQYLNIKEDCNAMAFCAKMRSSKKXEVNLEAPEPGVEVIFYLSDREPLRLGSGEYXAEELCIRAAQACRISPLCHNLFALYDENXKLWYAPNRXIXVDDKMSLRLHYRMRFYFXNWHGXNDNEQSVWRHSPKKQKNGYEKKKIPDAXPLLDASSLEYLFAQGQYDLVKCLAPIRDPKXEQDGHDIENECLGMAVLAISHYAMMKKMQLPELPKDISYKRYIPEXLNKSIRQRNLLXRMRINNVFKDFLKEFNNKXICDSSVSXHDLKVKYLAXLEXLXKHYGAEIFEXSMLLISSENEMNWFHSNDGGNVLYYEVMVXGNLGIQWRHKPNVVSVEKEKNKLKRKKLENKHKKDEEKNKIREEWNNFSYFPEIXHIVIKESVVSINKQDNKKMELKLSSHEEALSFVSLVDGYFRLXADAHHYLCXDVAPPLIVHNIQNGCHGPICXEYAINKLRQEGSEEGMYVLRWSCXDFDNILMXVXCFEKSEQVQGAQKQFKNFQIEVQKGRYSLHGSDRSFPSLGDLMSHLKKQILRXDNISFMLKRCCQPKPREISNLLVAXKKAQEWQPVYPMSQLSFDRILKKDLVQGEHLGRGXRXHIYSGXLMDYKDDEGXSEEKKIKVILKVLDPSHRDISLAFFEAASMMRQVSHKHIVYLYGVCVRDVENIMVEEFVEGGPLDLFMHRKSDVLXXPWKFKVAKQLASALSYLEDKDLVHGNVCXKNLLLAREGIDSECGPFIKLSDPGIPIXVLSRQECIERIPWIAPECVEDSKNLSVAADKWSFGXXLWEICYNGEIPLKDKXLIEKERFYESRCRPVXPSCKELADLMXRCMNYDPNQRPFFRAIMRDINKLEEQNPDIVSEKKPAXEVDPXHFEKRFLKRIRDLGEGHFGKVELCRYDPEGDNXGEQVAVKSLKPESGGNHIADLKKEIEILRNLYHENIVKYKGICXEDGGNGIKLIMEFLPSGSLKEYLPKNKNKINLKQQLKYAVQICKGMDYLGSRQYVHRDLAARNVLVESEHQVKIGDFGLXKAIEXDKEYYXVKDDRDSPVFWYAPECLMQSKFYIASDVWSFGVXLHELLXYCDSDSSPMALFLKMIGPXHGQMXVXRLVNXLKEGKRLPCPPNCPDEVYQLMRKCWEFQPSNRXSFQNLIEGFEALLK

SEQ ID NO: 14134 - protein, 26 aa, Homo sapiens
  MOD_RES (7)..(7): Selenocysteine
  MOD_RES (9)..(9): Selenocysteine
  MOD_RES (14)..(14): Selenocysteine
  MOD_RES (16)..(16): Selenocysteine
MGMACLXMXEMEGXSXSSIYQNGDIS

SEQ ID NO: 14135 - protein, 710 aa, Homo sapiens
  MOD_RES (7)..(7): Selenocysteine
  MOD_RES (9)..(9): Selenocysteine
  MOD_RES (14)..(14): Selenocysteine
  MOD_RES (16)..(16): Selenocysteine
  MOD_RES (56)..(56): Selenocysteine
  MOD_RES (78)..(78): Selenocysteine
  MOD_RES (91)..(91): Selenocysteine
  MOD_RES (108)..(108): Selenocysteine
  MOD_RES (171)..(171): Selenocysteine
  MOD_RES (174)..(174): Selenocysteine
  MOD_RES (196)..(196): Selenocysteine
  MOD_RES (208)..(208): Selenocysteine
  MOD_RES (225)..(225): Selenocysteine
  MOD_RES (246)..(246): Selenocysteine
  MOD_RES (260)..(260): Selenocysteine
  MOD_RES (267)..(267): Selenocysteine
  MOD_RES (287)..(287): Selenocysteine
  MOD_RES (291)..(291): Selenocysteine
  MOD_RES (308)..(308): Selenocysteine
  MOD_RES (310)..(310): Selenocysteine
  MOD_RES (343)..(343): Selenocysteine
  MOD_RES (376)..(376): Selenocysteine
  MOD_RES (420)..(420): Selenocysteine
  MOD_RES (438)..(438): Selenocysteine
  MOD_RES (455)..(455): Selenocysteine
  MOD_RES (467)..(467): Selenocysteine
  MOD_RES (485)..(485): Selenocysteine
  MOD_RES (496)..(496): Selenocysteine
  MOD_RES (514)..(514): Selenocysteine
  MOD_RES (522)..(522): Selenocysteine
  MOD_RES (525)..(525): Selenocysteine
  MOD_RES (530)..(530): Selenocysteine
  MOD_RES (555)..(555): Selenocysteine
  MOD_RES (557)..(557): Selenocysteine
  MOD_RES (576)..(576): Selenocysteine
  MOD_RES (636)..(636): Selenocysteine
  MOD_RES (668)..(668): Selenocysteine
  MOD_RES (689)..(689): Selenocysteine
  MOD_RES (705)..(705): Selenocysteine
MGMACLXMXEMEGXSXSSIYQNGDISGNANSMKQIDPVLQVYLYHSLGKSEADYLXFPSGEYVAEEICIAASKACGIXPVYHNMFALMSEXERIWYPPNHVFHIDESXRHNVLYRIRFYFPRWYCSGSNRAYRHGISRGAEAPLLDDFVMSYLFAQWRHDFVHGWIKVPVXHEXQEECLGMAVLDMMRIAKENDQXPLAIYNSISYKXFLPKCIRAKIQDYHILXRKRIRYRFRRFIQQFSQCKAXARNLKLKYLINLEXLQSAFYXEKFEVKEPGSGPSGEEIFAXIIIXGNGGIQWSRGKHKESEXLXEQDLQLYCDFPNIIDVSIKQANQEGSNESRVVXIHKQDGKNLEIELSSLREALSFVSLIDGYYRLXADAHHYLCKEVAPPAVLENIQSNCHGPISMDFAISKLKKAGNQXGLYVLRCSPKDFNKYFLXFAVERENVIEYKHCLIXKNENEEYNLSGXKKNFSSLKDLLNCYQMEXVRSDNIIFQFXKCCPPKPKDKSNLLVFRXNGVSDVPXSPXLQRPXHMNQMVFHKIRNEDLIFNESLGQGXFXKIFKGVRREVGDYGQLHEXEVLLKVLDKAHRNYSESFFEAASMMSKLSHKHLVLNYGVCVCGDENILVQEFVKFGSLDXYLKKNKNCINILWKLEVAKQLAWAMHFLEENXLIHGNVCAKNILLIREEDRKXGNPPFIKLSDPGISIXVLPKD

SEQ ID NO: 14136 - protein, 1132 aa, Homo sapiens
  MOD_RES (7)..(7): Selenocysteine
  MOD_RES (9)..(9): Selenocysteine
  MOD_RES (14)..(14): Selenocysteine
  MOD_RES (16)..(16): Selenocysteine
  MOD_RES (56)..(56): Selenocysteine
  MOD_RES (78)..(78): Selenocysteine
  MOD_RES (91)..(91): Selenocysteine
  MOD_RES (108)..(108): Selenocysteine
  MOD_RES (171)..(171): Selenocysteine
  MOD_RES (174)..(174): Selenocysteine
  MOD_RES (196)..(196): Selenocysteine
  MOD_RES (208)..(208): Selenocysteine
  MOD_RES (225)..(225): Selenocysteine
  MOD_RES (246)..(246): Selenocysteine
  MOD_RES (260)..(260): Selenocysteine
  MOD_RES (267)..(267): Selenocysteine
  MOD_RES (287)..(287): Selenocysteine
  MOD_RES (291)..(291): Selenocysteine
  MOD_RES (308)..(308): Selenocysteine
  MOD_RES (310)..(310): Selenocysteine
  MOD_RES (343)..(343): Selenocysteine
  MOD_RES (376)..(376): Selenocysteine
  MOD_RES (420)..(420): Selenocysteine
  MOD_RES (438)..(438): Selenocysteine
  MOD_RES (455)..(455): Selenocysteine
  MOD_RES (467)..(467): Selenocysteine
  MOD_RES (485)..(485): Selenocysteine
  MOD_RES (496)..(496): Selenocysteine
  MOD_RES (514)..(514): Selenocysteine
  MOD_RES (522)..(522): Selenocysteine
  MOD_RES (525)..(525): Selenocysteine
  MOD_RES (530)..(530): Selenocysteine
  MOD_RES (555)..(555): Selenocysteine
  MOD_RES (557)..(557): Selenocysteine
  MOD_RES (576)..(576): Selenocysteine
  MOD_RES (636)..(636): Selenocysteine
  MOD_RES (668)..(668): Selenocysteine
  MOD_RES (689)..(689): Selenocysteine
  MOD_RES (705)..(705): Selenocysteine
  MOD_RES (734)..(734): Selenocysteine
  MOD_RES (741)..(742): Selenocysteine
  MOD_RES (810)..(810): Selenocysteine
  MOD_RES (817)..(817): Selenocysteine
  MOD_RES (842)..(842): Selenocysteine
  MOD_RES (875)..(875): Selenocysteine
  MOD_RES (888)..(888): Selenocysteine
  MOD_RES (957)..(957): Selenocysteine
  MOD_RES (969)..(969): Selenocysteine
  MOD_RES (979)..(979): Selenocysteine
  MOD_RES (998)..(998): Selenocysteine
  MOD_RES (1027)..(1027): Selenocysteine
  MOD_RES (1049)..(1049): Selenocysteine
  MOD_RES (1103)..(1103): Selenocysteine
MGMACLXMXEMEGXSXSSIYQNGDISGNANSMKQIDPVLQVYLYHSLGKSEADYLXFPSGEYVAEEICIAASKACGIXPVYHNMFALMSEXERIWYPPNHVFHIDESXRHNVLYRIRFYFPRWYCSGSNRAYRHGISRGAEAPLLDDFVMSYLFAQWRHDFVHGWIKVPVXHEXQEECLGMAVLDMMRIAKENDQXPLAIYNSISYKXFLPKCIRAKIQDYHILXRKRIRYRFRRFIQQFSQCKAXARNLKLKYLINLEXLQSAFYXEKFEVKEPGSGPSGEEIFAXIIIXGNGGIQWSRGKHKESEXLXEQDLQLYCDFPNIIDVSIKQANQEGSNESRVVXIHKQDGKNLEIELSSLREALSFVSLIDGYYRLXADAHHYLCKEVAPPAVLENIQSNCHGPISMDFAISKLKKAGNQXGLYVLRCSPKDFNKYFLXFAVERENVIEYKHCLIXKNENEEYNLSGXKKNFSSLKDLLNCYQMEXVRSDNIIFQFXKCCPPKPKDKSNLLVFRXNGVSDVPXSPXLQRPXHMNQMVFHKIRNEDLIFNESLGQGXFXKIFKGVRREVGDYGQLHEXEVLLKVLDKAHRNYSESFFEAASMMSKLSHKHLVLNYGVCVCGDENILVQEFVKFGSLDXYLKKNKNCINILWKLEVAKQLAWAMHFLEENXLIHGNVCAKNILLIREEDRKXGNPPFIKLSDPGISIXVLPKDILQERIPWVPPECIENPKNLNLAXDKWSFGXXLWEICSGGDKPLSALDSQRKLQFYEDRHQLPAPKWAELANLINNCMDYEPDFRPSFRAIIRDLNSLFXPDYELLXENDMLPNMRIGALGFSGAFEDRDPXQFEERHLKFLQQLGKGNFGSVEMCRYDPLQDNXGEVVAVKKLQHSXEEHLRDFEREIEILKSLQHDNIVKYKGVCYSAGRRNLKLIMEYLPYGSLRDYLQKHKERIDHIKLLQYXSQICKGMEYLGXKRYIHRDLAXRNILVENENRVKIGDFGLXKVLPQDKEYYKVKEPGESPIFWYAPESLXESKFSVASDVWSFGVVLYELFXYIEKSKSPPAEFMRMIGNDKQGQMIVFHLIELLKNNGRLPRPDGCPDEIYMIMXECWNNNVNQRPSFRDLALRVDQIRDNMAG

SEQ ID NO: 14137 - protein, 1094 aa, Homo sapiens
  MOD_RES (8)..(8): Selenocysteine
  MOD_RES (21)..(21): Selenocysteine
  MOD_RES (75)..(75): Selenocysteine
  MOD_RES (95)..(95): Selenocysteine
  MOD_RES (187)..(187): Selenocysteine
  MOD_RES (209)..(209): Selenocysteine
  MOD_RES (216)..(216): Selenocysteine
  MOD_RES (253)..(253): Selenocysteine
  MOD_RES (282)..(282): Selenocysteine
  MOD_RES (319)..(319): Selenocysteine
  MOD_RES (321)..(321): Selenocysteine
  MOD_RES (323)..(323): Selenocysteine
  MOD_RES (352)..(353): Selenocysteine
  MOD_RES (381)..(381): Selenocysteine
  MOD_RES (391)..(391): Selenocysteine
  MOD_RES (414)..(414): Selenocysteine
  MOD_RES (435)..(435): Selenocysteine
  MOD_RES (437)..(437): Selenocysteine
  MOD_RES (456)..(456): Selenocysteine
  MOD_RES (470)..(470): Selenocysteine
  MOD_RES (472)..(472): Selenocysteine
  MOD_RES (496)..(496): Selenocysteine
  MOD_RES (512)..(512): Selenocysteine
  MOD_RES (533)..(533): Selenocysteine
  MOD_RES (551)..(551): Selenocysteine
  MOD_RES (597)..(597): Selenocysteine
  MOD_RES (685)..(685): Selenocysteine
  MOD_RES (701)..(701): Selenocysteine
  MOD_RES (714)..(714): Selenocysteine
  MOD_RES (723)..(723): Selenocysteine
  MOD_RES (750)..(750): Selenocysteine
  MOD_RES (792)..(792): Selenocysteine
  MOD_RES (815)..(815): Selenocysteine
  MOD_RES (848)..(848): Selenocysteine
  MOD_RES (1022)..(1022): Selenocysteine
MAPPSEEXPLIPQRSCSLLSXEAGALHVLLPARGPGPPQRLSFSFGDHLAEDLCVQAAKASGILPVYHSLFALAXEDLSCWFPPSHIFSVEDASXQVLLYRIRFYFPNWFGLEKCHRFGLRKDLASAILDLPVLEHLFAQHRSDLVSGRLPVGLSLKEQGECLSLAVLDLARMAREQAQRPGELLKXVSYKACLPPSLRDLIQGLSFVXRRRIRRXVRRALRRVAACQADRHSLMAKYIMDLERLDPAGAAEXFHVGLPGALGGHDGLGLLRVAGDGGIAWXQGEQEVLQPFCDFPEIVDISIKQAPRVGPAGEHRLVXVXRXDNQILEAEFPGLPEALSFVALVDGYFRLXXDSQHFFCKEVAPPRLLEEVAEQCHGPIXLDFAINKLKXGGSRPGSYVLRRSPQDFDSFLLXVCVQNPLGPDYKGCLIRRSPXGXFLLVGLSRPHSSLRELLAXCWDGGLHVDGVAVXLXSCCIPRPKEKSNLIVVQRGHSPPXSSLVQPQSQYQLSQMXFHKIPADSLEWHENLGHGSFXKIYRGCRHEVVDGEARKXEVLLKVMDAKHKNCMESFLEAASLMSQVSYRHLVLLHGVCMAGDSXMVQEFVHLGAIDMYLRKRGHLVPASWKLQVVKQLAYALNYLEDKGLPHGNVSARKVLLAREGADGSPPFIKLSDPGVSPAVLSLEMLXDRIPWVAPECLREAQXLSLEADKWGFGAXVWEVFSGVXMPISALDPAKKLQFYEDRQQLPAPKWXELALLIQQCMAYEPVQRPSFRAVIRDLNSLISSDYELLSDPXPGALAPRDGLWNGAQLYACQDPXIFEERHLKYISQLGKGNFGSVELCRYDPLGDNXGALVAVKQLQHSGPDQQRDFQREIQILKALHSDFIVKYRGVSYGPGRQSLRLVMEYLPSGCLRDFLQRHRARLDASRLLLYSSQICKGMEYLGSRRCVHRDLAARNILVESEAHVKIADFGLAKLLPLDKDYYVVREPGQSPIFWYAPESLSDNIFSRQSDVWSFGVVLYELFXYCDKSCSPSAEFLRMMGCERDVPALCRLLELLEEGQRLPAPPACPAEVSAAGLASVSQSVDWAGVSGKPAGA

SEQ ID NO: 14138 - protein, 1124 aa, Homo sapiens
  MOD_RES (8)..(8): Selenocysteine
  MOD_RES (21)..(21): Selenocysteine
  MOD_RES (75)..(75): Selenocysteine
  MOD_RES (95)..(95): Selenocysteine
  MOD_RES (187)..(187): Selenocysteine
  MOD_RES (209)..(209): Selenocysteine
  MOD_RES (216)..(216): Selenocysteine
  MOD_RES (253)..(253): Selenocysteine
  MOD_RES (282)..(282): Selenocysteine
  MOD_RES (319)..(319): Selenocysteine
  MOD_RES (321)..(321): Selenocysteine
  MOD_RES (323)..(323): Selenocysteine
  MOD_RES (352)..(353): Selenocysteine
  MOD_RES (381)..(381): Selenocysteine
  MOD_RES (391)..(391): Selenocysteine
  MOD_RES (414)..(414): Selenocysteine
  MOD_RES (435)..(435): Selenocysteine
  MOD_RES (437)..(437): Selenocysteine
  MOD_RES (456)..(456): Selenocysteine
  MOD_RES (470)..(470): Selenocysteine
  MOD_RES (472)..(472): Selenocysteine
  MOD_RES (496)..(496): Selenocysteine
  MOD_RES (512)..(512): Selenocysteine
  MOD_RES (533)..(533): Selenocysteine
  MOD_RES (551)..(551): Selenocysteine
  MOD_RES (597)..(597): Selenocysteine
  MOD_RES (685)..(685): Selenocysteine
  MOD_RES (701)..(701): Selenocysteine
  MOD_RES (714)..(714): Selenocysteine
  MOD_RES (723)..(723): Selenocysteine
  MOD_RES (750)..(750): Selenocysteine
  MOD_RES (792)..(792): Selenocysteine
  MOD_RES (815)..(815): Selenocysteine
  MOD_RES (848)..(848): Selenocysteine
  MOD_RES (1022)..(1022): Selenocysteine
  MOD_RES (1107)..(1107): Selenocysteine
  MOD_RES (1111)..(1111): Selenocysteine
MAPPSEEXPLIPQRSCSLLSXEAGALHVLLPARGPGPPQRLSFSFGDHLAEDLCVQAAKASGILPVYHSLFALAXEDLSCWFPPSHIFSVEDASXQVLLYRIRFYFPNWFGLEKCHRFGLRKDLASAILDLPVLEHLFAQHRSDLVSGRLPVGLSLKEQGECLSLAVLDLARMAREQAQRPGELLKXVSYKACLPPSLRDLIQGLSFVXRRRIRRXVRRALRRVAACQADRHSLMAKYIMDLERLDPAGAAEXFHVGLPGALGGHDGLGLLRVAGDGGIAWXQGEQEVLQPFCDFPEIVDISIKQAPRVGPAGEHRLVXVXRXDNQILEAEFPGLPEALSFVALVDGYFRLXXDSQHFFCKEVAPPRLLEEVAEQCHGPIXLDFAINKLKXGGSRPGSYVLRRSPQDFDSFLLXVCVQNPLGPDYKGCLIRRSPXGXFLLVGLSRPHSSLRELLAXCWDGGLHVDGVAVXLXSCCIPRPKEKSNLIVVQRGHSPPXSSLVQPQSQYQLSQMXFHKIPADSLEWHENLGHGSFXKIYRGCRHEVVDGEARKXEVLLKVMDAKHKNCMESFLEAASLMSQVSYRHLVLLHGVCMAGDSXMVQEFVHLGAIDMYLRKRGHLVPASWKLQVVKQLAYALNYLEDKGLPHGNVSARKVLLAREGADGSPPFIKLSDPGVSPAVLSLEMLXDRIPWVAPECLREAQXLSLEADKWGFGAXVWEVFSGVXMPISALDPAKKLQFYEDRQQLPAPKWXELALLIQQCMAYEPVQRPSFRAVIRDLNSLISSDYELLSDPXPGALAPRDGLWNGAQLYACQDPXIFEERHLKYISQLGKGNFGSVELCRYDPLGDNXGALVAVKQLQHSGPDQQRDFQREIQILKALHSDFIVKYRGVSYGPGRQSLRLVMEYLPSGCLRDFLQRHRARLDASRLLLYSSQICKGMEYLGSRRCVHRDLAARNILVESEAHVKIADFGLAKLLPLDKDYYVVREPGQSPIFWYAPESLSDNIFSRQSDVWSFGVVLYELFXYCDKSCSPSAEFLRMMGCERDVPALCRLLELLEEGQRLPAPPACPAEVHELMKLCWAPSPQDRPSFSALGPQLDMLWSGSRGCEXHAFXAHPEGKHHSLSFS

SEQ ID NO: 14139 - protein, 1246 aa, Homo sapiens
  MOD_RES (58)..(58): Selenocysteine
  MOD_RES (91)..(91): Selenocysteine
  MOD_RES (127)..(128): Selenocysteine
  MOD_RES (142)..(142): Selenocysteine
  MOD_RES (154)..(154): Selenocysteine
  MOD_RES (159)..(159): Selenocysteine
  MOD_RES (192)..(192): Selenocysteine
  MOD_RES (197)..(197): Selenocysteine
  MOD_RES (199)..(199): Selenocysteine
  MOD_RES (209)..(209): Selenocysteine
  MOD_RES (215)..(215): Selenocysteine
  MOD_RES (232)..(232): Selenocysteine
  MOD_RES (247)..(247): Selenocysteine
  MOD_RES (276)..(276): Selenocysteine
  MOD_RES (286)..(286): Selenocysteine
  MOD_RES (310)..(310): Selenocysteine
  MOD_RES (320)..(320): Selenocysteine
  MOD_RES (335)..(335): Selenocysteine
  MOD_RES (339)..(339): Selenocysteine
  MOD_RES (341)..(341): Selenocysteine
  MOD_RES (343)..(343): Selenocysteine
  MOD_RES (348)..(348): Selenocysteine
  MOD_RES (350)..(350): Selenocysteine
  MOD_RES (360)..(360): Selenocysteine
  MOD_RES (374)..(374): Selenocysteine
  MOD_RES (379)..(379): Selenocysteine
  MOD_RES (386)..(386): Selenocysteine
  MOD_RES (400)..(400): Selenocysteine
  MOD_RES (419)..(419): Selenocysteine
  MOD_RES (503)..(503): Selenocysteine
  MOD_RES (508)..(508): Selenocysteine
  MOD_RES (527)..(527): Selenocysteine
  MOD_RES (609)..(609): Selenocysteine
  MOD_RES (641)..(641): Selenocysteine
  MOD_RES (672)..(672): Selenocysteine
  MOD_RES (689)..(689): Selenocysteine
  MOD_RES (741)..(741): Selenocysteine
  MOD_RES (784)..(784): Selenocysteine
  MOD_RES (823)..(824): Selenocysteine
  MOD_RES (828)..(828): Selenocysteine
  MOD_RES (870)..(870): Selenocysteine
  MOD_RES (872)..(872): Selenocysteine
  MOD_RES (893)..(893): Selenocysteine
  MOD_RES (899)..(899): Selenocysteine
  MOD_RES (913)..(913): Selenocysteine
  MOD_RES (925)..(925): Selenocysteine
  MOD_RES (943)..(943): Selenocysteine
  MOD_RES (966)..(966): Selenocysteine
  MOD_RES (973)..(973): Selenocysteine
  MOD_RES (1000)..(1000): Selenocysteine
  MOD_RES (1028)..(1028): Selenocysteine
  MOD_RES (1033)..(1034): Selenocysteine
  MOD_RES (1037)..(1037): Selenocysteine
  MOD_RES (1043)..(1043): Selenocysteine
  MOD_RES (1077)..(1077): Selenocysteine
  MOD_RES (1080)..(1080): Selenocysteine
  MOD_RES (1091)..(1091): Selenocysteine
  MOD_RES (1118)..(1118): Selenocysteine
  MOD_RES (1134)..(1134): Selenocysteine
  MOD_RES (1215)..(1215): Selenocysteine
  MOD_RES (1225)..(1225): Selenocysteine
MSKERPKRNIIQKKYDDSDGIPWSEERVVRKVLYLSLKEFKNSQKRQHAEGIAGSLKXVNGLLGNDQSKGLGPASEQSENEKDDASQVSSXSNDVSSSDFEEGPSRKRPRLQAQRKFAQSQPNSPSXXPVKIVEPLLPPPAXQISDLSKRKPKXEDFLXFLCLRGSPALPNSMVYFGSSQDEEEVEEEDDEXEDVKXAXNNASSSCQSXPRKGKXHKHVHNGHVFNGSSRSXREKEPVQKHKSKEAXPAKEKHSDHRADSRREQASANHPAAAPSXGSSAKGLAAXHHHPPLHRSAQDLRKQVSKVNGVXRMSSLGAGVXSAKKMREVRPSPSKXVKYXAXVXKGAVXYXKAKRELVKDXKPNHHKPSSAVNHXISGKXESSNAKXRKQVLSLGGASKSXGPAVNGLKVSGRLNPKSCXKEVGGRQLREGLQLREGLRNSKRRLEEAHQAEKPQSPPKKMKGAAGPAEGPGKKAPAERGLLNGHVKKEVPERSLERNRPKRAXAGKSXPGRQAHGKADSASCENRSXSQPESVHKPQDSGKAEKGGGKAGWAAMDEIPVLRPSAKEFHDPLIYIESVRAQVEKFGMCRVIPPPDWRPECKLNDEMRFVXQIQHIHKLGRRWGPNVQRLACIKKHLKSQGIXMDELPLIGGCELDLACFFRLINEMGGMQQVXDLKKWNKLADMLRIPRXAQDRLAKLQEAYCQYLLSYDSLSPEEHRRLEKEVLMEKEILEKRKGPLEGHXENDHHKFHPLPRFEPKNGLIHGVAPRNGFRSKLKEVGQAQLKXGRRRLFAQEKEVVKEEEEDKGVLNDFHKCIYKGRSVSLXXFYRXARNIMSMCFSKEPAPAEIEQEYWRLVEEKDCHVAVHCGKVDXNXHGSGFPVGKSEPFSRHGWNLXVLPNNXGSILRHLGAVPGVXIPWLNIGMVFSXSCWSRDQNHLPYIDYLHXGADCIWYCIPAEEENKLEDVVHXLLQANGXPGLQMLESNVMISPEVLCKEGIKVHRXVQQSGQFVVCFPGSFVSKVCCGYSVSEXVHFAXXQWXSMGFEXAKEMKRRHIAKPFSMEKLLYQIAQAEAKKENGPXLSXISALLDELRDXELRQRRQLFEAGLHSSARYGSHDGSSXVADGKKKPRKWLQLEXSERRCQICQHLCYLSMVVQENENVVFCLECALRHVEKQKSCRGLKLMYRYDEEQIISLVNQICGKVSGKNGSIENCLSKPXPKRGPRKRAXVDVPPSRLSASSSSKSASSSS

SEQ ID NO: 14140 - protein, 1074 aa, Homo sapiens
  MOD_RES (20)..(20): Selenocysteine
  MOD_RES (25)..(25): Selenocysteine
  MOD_RES (27)..(27): Selenocysteine
  MOD_RES (37)..(37): Selenocysteine
  MOD_RES (43)..(43): Selenocysteine
  MOD_RES (60)..(60): Selenocysteine
  MOD_RES (75)..(75): Selenocysteine
  MOD_RES (104)..(104): Selenocysteine
  MOD_RES (114)..(114): Selenocysteine
  MOD_RES (138)..(138): Selenocysteine
  MOD_RES (148)..(148): Selenocysteine
  MOD_RES (163)..(163): Selenocysteine
  MOD_RES (167)..(167): Selenocysteine
  MOD_RES (169)..(169): Selenocysteine
  MOD_RES (171)..(171): Selenocysteine
  MOD_RES (176)..(176): Selenocysteine
  MOD_RES (178)..(178): Selenocysteine
  MOD_RES (188)..(188): Selenocysteine
  MOD_RES (202)..(202): Selenocysteine
  MOD_RES (207)..(207): Selenocysteine
  MOD_RES (214)..(214): Selenocysteine
  MOD_RES (228)..(228): Selenocysteine
  MOD_RES (247)..(247): Selenocysteine
  MOD_RES (331)..(331): Selenocysteine
  MOD_RES (336)..(336): Selenocysteine
  MOD_RES (355)..(355): Selenocysteine
  MOD_RES (437)..(437): Selenocysteine
  MOD_RES (469)..(469): Selenocysteine
  MOD_RES (500)..(500): Selenocysteine
  MOD_RES (517)..(517): Selenocysteine
  MOD_RES (569)..(569): Selenocysteine
  MOD_RES (612)..(612): Selenocysteine
  MOD_RES (651)..(652): Selenocysteine
  MOD_RES (656)..(656): Selenocysteine
  MOD_RES (698)..(698): Selenocysteine
  MOD_RES (700)..(700): Selenocysteine
  MOD_RES (721)..(721): Selenocysteine
  MOD_RES (727)..(727): Selenocysteine
  MOD_RES (741)..(741): Selenocysteine
  MOD_RES (753)..(753): Selenocysteine
  MOD_RES (771)..(771): Selenocysteine
  MOD_RES (794)..(794): Selenocysteine
  MOD_RES (801)..(801): Selenocysteine
  MOD_RES (828)..(828): Selenocysteine
  MOD_RES (856)..(856): Selenocysteine
  MOD_RES (861)..(862): Selenocysteine
  MOD_RES (865)..(865): Selenocysteine
  MOD_RES (871)..(871): Selenocysteine
  MOD_RES (905)..(905): Selenocysteine
  MOD_RES (908)..(908): Selenocysteine
  MOD_RES (919)..(919): Selenocysteine
  MOD_RES (946)..(946): Selenocysteine
  MOD_RES (962)..(962): Selenocysteine
  MOD_RES (1043)..(1043): Selenocysteine
  MOD_RES (1053)..(1053): Selenocysteine
MVYFGSSQDEEEVEEEDDEXEDVKXAXNNASSSCQSXPRKGKXHKHVHNGHVFNGSSRSXREKEPVQKHKSKEAXPAKEKHSDHRADSRREQASANHPAAAPSXGSSAKGLAAXHHHPPLHRSAQDLRKQVSKVNGVXRMSSLGAGVXSAKKMREVRPSPSKXVKYXAXVXKGAVXYXKAKRELVKDXKPNHHKPSSAVNHXISGKXESSNAKXRKQVLSLGGASKSXGPAVNGLKVSGRLNPKSCXKEVGGRQLREGLQLREGLRNSKRRLEEAHQAEKPQSPPKKMKGAAGPAEGPGKKAPAERGLLNGHVKKEVPERSLERNRPKRAXAGKSXPGRQAHGKADSASCENRSXSQPESVHKPQDSGKAEKGGGKAGWAAMDEIPVLRPSAKEFHDPLIYIESVRAQVEKFGMCRVIPPPDWRPECKLNDEMRFVXQIQHIHKLGRRWGPNVQRLACIKKHLKSQGIXMDELPLIGGCELDLACFFRLINEMGGMQQVXDLKKWNKLADMLRIPRXAQDRLAKLQEAYCQYLLSYDSLSPEEHRRLEKEVLMEKEILEKRKGPLEGHXENDHHKFHPLPRFEPKNGLIHGVAPRNGFRSKLKEVGQAQLKXGRRRLFAQEKEVVKEEEEDKGVLNDFHKCIYKGRSVSLXXFYRXARNIMSMCFSKEPAPAEIEQEYWRLVEEKDCHVAVHCGKVDXNXHGSGFPVGKSEPFSRHGWNLXVLPNNXGSILRHLGAVPGVXIPWLNIGMVFSXSCWSRDQNHLPYIDYLHXGADCIWYCIPAEEENKLEDVVHXLLQANGXPGLQMLESNVMISPEVLCKEGIKVHRXVQQSGQFVVCFPGSFVSKVCCGYSVSEXVHFAXXQWXSMGFEXAKEMKRRHIAKPFSMEKLLYQIAQAEAKKENGPXLSXISALLDELRDXELRQRRQLFEAGLHSSARYGSHDGSSXVADGKKKPRKWLQLEXSERRCQICQHLCYLSMVVQENENVVFCLECALRHVEKQKSCRGLKLMYRYDEEQIISLVNQICGKVSGKNGSIENCLSKPXPKRGPRKRAXVDVPPSRLSASSSSKSASSSS

SEQ ID NO: 14141 - protein, 134 aa, Homo sapiens
  MOD_RES (12)..(13): Selenocysteine
  MOD_RES (23)..(23): Selenocysteine
  MOD_RES (31)..(31): Selenocysteine
  MOD_RES (97)..(97): Selenocysteine
  MOD_RES (116)..(116): Selenocysteine
MMPGQIPDPSVXXGSLPGLGPLXGLPSSALXVEELKYADIRNLGAMIAPLHFLEVKLGKRPQPVKSELDEEEERRKRRREKNKVAAARCRNKKKERXEFLQRESERLELMNAELKXQIEELKQERQQLILMLNR

SEQ ID NO: 14142 - protein, 163 aa, Homo sapiens
  MOD_RES (12)..(13): Selenocysteine
  MOD_RES (23)..(23): Selenocysteine
  MOD_RES (31)..(31): Selenocysteine
  MOD_RES (97)..(97): Selenocysteine
  MOD_RES (116)..(116): Selenocysteine
  MOD_RES (138)..(138): Selenocysteine
  MOD_RES (143)..(143): Selenocysteine
  MOD_RES (148)..(148): Selenocysteine
MMPGQIPDPSVXXGSLPGLGPLXGLPSSALXVEELKYADIRNLGAMIAPLHFLEVKLGKRPQPVKSELDEEEERRKRRREKNKVAAARCRNKKKERXEFLQRESERLELMNAELKXQIEELKQERQQLILMLNRHRPXCIVRXDSVKXPESEGNPLLEQLEKK

SEQ ID NO: 14143 - protein, 174 aa, Homo sapiens
  MOD_RES (8)..(8): Selenocysteine
  MOD_RES (23)..(24): Selenocysteine
  MOD_RES (34)..(34): Selenocysteine
  MOD_RES (42)..(42): Selenocysteine
  MOD_RES (108)..(108): Selenocysteine
  MOD_RES (127)..(127): Selenocysteine
  MOD_RES (149)..(149): Selenocysteine
  MOD_RES (154)..(154): Selenocysteine
  MOD_RES (159)..(159): Selenocysteine
MVAGWPAXPPAMMPGQIPDPSVXXGSLPGLGPLXGLPSSALXVEELKYADIRNLGAMIAPLHFLEVKLGKRPQPVKSELDEEEERRKRRREKNKVAAARCRNKKKERXEFLQRESERLELMNAELKXQIEELKQERQQLILMLNRHRPXCIVRXDSVKXPESEGNPLLEQLEKK

SEQ ID NO: 14144 - protein, 2540 aa, Homo sapiens
  MOD_RES (5)..(5): Selenocysteine
  MOD_RES (80)..(80): Selenocysteine
  MOD_RES (98)..(98): Selenocysteine
  MOD_RES (112)..(112): Selenocysteine
  MOD_RES (126)..(126): Selenocysteine
  MOD_RES (140)..(140): Selenocysteine
  MOD_RES (203)..(203): Selenocysteine
  MOD_RES (207)..(207): Selenocysteine
  MOD_RES (211)..(211): Selenocysteine
  MOD_RES (217)..(217): Selenocysteine
  MOD_RES (219)..(219): Selenocysteine
  MOD_RES (241)..(241): Selenocysteine
  MOD_RES (259)..(259): Selenocysteine
  MOD_RES (278)..(278): Selenocysteine
  MOD_RES (300)..(300): Selenocysteine
  MOD_RES (369)..(369): Selenocysteine
  MOD_RES (406)..(406): Selenocysteine
  MOD_RES (426)..(426): Selenocysteine
  MOD_RES (454)..(454): Selenocysteine
  MOD_RES (469)..(469): Selenocysteine
  MOD_RES (488)..(488): Selenocysteine
  MOD_RES (490)..(490): Selenocysteine
  MOD_RES (505)..(505): Selenocysteine
  MOD_RES (513)..(513): Selenocysteine
  MOD_RES (516)..(516): Selenocysteine
  MOD_RES (528)..(528): Selenocysteine
  MOD_RES (533)..(533): Selenocysteine
  MOD_RES (556)..(556): Selenocysteine
  MOD_RES (575)..(575): Selenocysteine
  MOD_RES (580)..(580): Selenocysteine
  MOD_RES (622)..(622): Selenocysteine
  MOD_RES (629)..(629): Selenocysteine
  MOD_RES (633)..(633): Selenocysteine
  MOD_RES (650)..(650): Selenocysteine
  MOD_RES (661)..(661): Selenocysteine
  MOD_RES (668)..(668): Selenocysteine
  MOD_RES (691)..(691): Selenocysteine
  MOD_RES (695)..(695): Selenocysteine
  MOD_RES (698)..(699): Selenocysteine
  MOD_RES (712)..(712): Selenocysteine
  MOD_RES (724)..(724): Selenocysteine
  MOD_RES (747)..(747): Selenocysteine
  MOD_RES (753)..(753): Selenocysteine
  MOD_RES (759)..(759): Selenocysteine
  MOD_RES (772)..(772): Selenocysteine
  MOD_RES (776)..(776): Selenocysteine
  MOD_RES (779)..(779): Selenocysteine
  MOD_RES (783)..(783): Selenocysteine
  MOD_RES (798)..(798): Selenocysteine
  MOD_RES (805)..(805): Selenocysteine
  MOD_RES (870)..(870): Selenocysteine
  MOD_RES (909)..(909): Selenocysteine
  MOD_RES (912)..(912): Selenocysteine
  MOD_RES (939)..(939): Selenocysteine
  MOD_RES (947)..(947): Selenocysteine
  MOD_RES (949)..(949): Selenocysteine
  MOD_RES (973)..(973): Selenocysteine
  MOD_RES (986)..(986): Selenocysteine
  MOD_RES (1011)..(1011): Selenocysteine
  MOD_RES (1036)..(1037): Selenocysteine
  MOD_RES (1095)..(1096): Selenocysteine
  MOD_RES (1135)..(1135): Selenocysteine
  MOD_RES (1137)..(1137): Selenocysteine
  MOD_RES (1141)..(1141): Selenocysteine
  MOD_RES (1177)..(1178): Selenocysteine
  MOD_RES (1187)..(1187): Selenocysteine
  MOD_RES (1190)..(1190): Selenocysteine
  MOD_RES (1194)..(1194): Selenocysteine
  MOD_RES (1196)..(1196): Selenocysteine
  MOD_RES (1231)..(1231): Selenocysteine
  MOD_RES (1233)..(1233): Selenocysteine
  MOD_RES (1252)..(1252): Selenocysteine
  MOD_RES (1273)..(1273): Selenocysteine
  MOD_RES (1287)..(1287): Selenocysteine
  MOD_RES (1313)..(1313): Selenocysteine
  MOD_RES (1315)..(1315): Selenocysteine
  MOD_RES (1340)..(1340): Selenocysteine
  MOD_RES (1351)..(1351): Selenocysteine
  MOD_RES (1366)..(1366): Selenocysteine
  MOD_RES (1390)..(1390): Selenocysteine
  MOD_RES (1394)..(1394): Selenocysteine
  MOD_RES (1396)..(1396): Selenocysteine
  MOD_RES (1400)..(1400): Selenocysteine
  MOD_RES (1405)..(1406): Selenocysteine
  MOD_RES (1423)..(1423): Selenocysteine
  MOD_RES (1428)..(1428): Selenocysteine
  MOD_RES (1452)..(1453): Selenocysteine
  MOD_RES (1457)..(1457): Selenocysteine
  MOD_RES (1463)..(1463): Selenocysteine
  MOD_RES (1476)..(1477): Selenocysteine
  MOD_RES (1502)..(1502): Selenocysteine
  MOD_RES (1511)..(1511): Selenocysteine
  MOD_RES (1521)..(1521): Selenocysteine
  MOD_RES (1526)..(1526): Selenocysteine
  MOD_RES (1541)..(1541): Selenocysteine
  MOD_RES (1548)..(1548): Selenocysteine
  MOD_RES (1556)..(1556): Selenocysteine
  MOD_RES (1565)..(1565): Selenocysteine
  MOD_RES (1590)..(1590): Selenocysteine
  MOD_RES (1621)..(1621): Selenocysteine
  MOD_RES (1642)..(1642): Selenocysteine
  MOD_RES (1649)..(1649): Selenocysteine
  MOD_RES (1692)..(1692): Selenocysteine
  MOD_RES (1711)..(1711): Selenocysteine
  MOD_RES (1788)..(1788): Selenocysteine
  MOD_RES (1801)..(1801): Selenocysteine
  MOD_RES (1818)..(1818): Selenocysteine
  MOD_RES (1822)..(1822): Selenocysteine
  MOD_RES (1852)..(1852): Selenocysteine
  MOD_RES (1905)..(1905): Selenocysteine
  MOD_RES (1914)..(1914): Selenocysteine
  MOD_RES (1922)..(1922): Selenocysteine
  MOD_RES (1936)..(1936): Selenocysteine
  MOD_RES (1948)..(1948): Selenocysteine
  MOD_RES (1978)..(1978): Selenocysteine
  MOD_RES (1996)..(1996): Selenocysteine
  MOD_RES (2001)..(2001): Selenocysteine
  MOD_RES (2031)..(2031): Selenocysteine
  MOD_RES (2052)..(2052): Selenocysteine
  MOD_RES (2065)..(2065): Selenocysteine
  MOD_RES (2071)..(2073): Selenocysteine
  MOD_RES (2082)..(2082): Selenocysteine
  MOD_RES (2104)..(2104): Selenocysteine
  MOD_RES (2126)..(2126): Selenocysteine
  MOD_RES (2256)..(2256): Selenocysteine
  MOD_RES (2272)..(2272): Selenocysteine
  MOD_RES (2332)..(2333): Selenocysteine
  MOD_RES (2447)..(2447): Selenocysteine
  MOD_RES (2449)..(2449): Selenocysteine
  MOD_RES (2478)..(2478): Selenocysteine
  MOD_RES (2494)..(2494): Selenocysteine
MAVEXRAELVGKRFLCVAVGDEARSERWESGRGWRSWRAGVIRAVSHRDSRNPDLAVYVEFDDLEWDKREWVKVYEDFSXFLVEYHLIWAKRNDPSQXQGSKSKQIQWPALXFKPLVERNIPSSVXAVEFLVDKQLDFLXEDSAFQPYQDDIDSLNPVLRDNPQLHEEVKVWVKEQKVQEIFMQGPYSLNGYRVRVYRQDSAXQWFXGIIXHHDLFXRXMIVMNDQVLEPQNVDPSMVQMXFLDDVVHSLLKGENIGIXSRRRSRANQNVNAVHSHYXRAQANSPRPAMNSQAAVPKQNXHQQQQQRSIRPNKRKGSDSSIPDEEKMKEEKYDYISRGENPKGKNKHLMNKRRKPEEDEKKLNMKRLRXDNVSDFSESSDSENSNKRIIDNSSEQKPENELKNKNXSKINGEEGKPHNNEKAGEEXLKNSQPPWDQIQEDKKHEEAEKRKSVDXQLQEDMIIHSSEQSXVSDHNSNDLLPQECNMDKXHXMELLPKEKFVSRPPXPKCVIDIXNDXNLEKVAQENSSXFGLQXLQKMDPNVSDSKHSIANAKFLEXAKKDSDQSWVSDVVKVDLXQSSVXNASSGNDHLNMEKEKYVSYISPLSAVSVMEDKLHKRSPPPEXIKSKLNXSVDXHKIKSSPSPEVVKPKIXHSPDSVKSKAXYVNSQAXGERRLANKIEHELSRCSFHPIPXRSSXLEXXKSPLIIDKNEHFXVYRDPALIGSEXGANHISPFLSQHPFPLHSSSHRXCLNPGXHHPALXPAPHLLAGSSSQXPLPXINXHPLXSGPHHAVHHPHLLPXVLPGVPXASLLGGHPRLESAHASSLSHLALAHQQQQQLLQHQSPHLLGQAHPSASYNQLGLYPIIWQYPNGXHAYSGLGLPSSKWVHPENAVNAEASLRRNSPSPWLHQPXPVXSADGIGLLSHIPVRPSSAEPHRPLKIXAHSSPPLXKXLVDHHKEELERKAFMEPLRSVASXSAKNDLDLNRSQXGKDCHLHRHFVDPVLNQLQRPPQEXGERLNKYKEEHRRILQESIDVAPFXXKIKGLEGERENYSRVASSSSSPKSHIIKQDMDVERSVSDLYKMKHSVPQSLPQSNYFXXLSNSVVNEPPRSYPSKEVSNIYGDKQSNALAAAAANPQXLXSFIXSLSKPPPLIKHQPESEGLVGKIPEHLPHQIASHSVXXFRNDCRSPXHLXVSSXNXLRSMPALHRAPVFHPPIHHSLERKEGSYSSLSPPXLXPVMPVNAGGKVQESQKPPXLIPEPKDSQANFKSSSEQSLXEMWRPNNNLSKEKXEWHVEKSSGKLQAAMASVIVRPSSSXKXDSMPAMQLASKDRVSERSSAGAHKXDCLKLAEAGEXGRIILPNVNSDSVHXKSEKNFQAVSQGSVPSSVMSAVNXMCNXKXDVIXSAADXXSVSSWGGSEVISSLSNXILASXSSECVSSKSVSQPVAQKQECKVSXXAPVXLASSKXGSVVQPSSGFSGXXDFIHLKKHKAALAAAQYKSSNASEXEPNAIKNQXLSASLPLDSXVICSXINKANSVGNGQASQXSQPNYHXKLKKAWLXRHSEEDKNXNKMENSGNSVSEIIKPCSVNLIASXSSDIQNSVDSKIIVDKYVKDDKVNRRKAKRXYESGSESGDSDESESKSEQRXKRQPKPXYKKKQNDLQKRKGEIEEDLKPNGVLSRSAKERSKLKLQSNSNXGIPRSVLKDWRKVKKLKQXGESFLQDDSCCEIGPNLQKCRECRLIRSKKGEEPAHSPVFCRFYYFRRLSFSKNGVVRIDGFSSPDQYDDEAMSLWXHENFEDDELDIEXSKYILDIIGDKFCQLVXSEKXALSWVKKDAKIAWKRAVRGVREMCDACEAXLFNIHWVCQKCGFVVCLDCYKAKERKSSRDKELYAWMKCVKGQPHDHKHLMPXQIIPGSVLXDLLDAMHXLREKYGIKSHCHCXNKQNLQVGNFPXMNGVSQVLQNVLNHSNKISLCMPESQQQNXPPKSEKNGGSSPESDVGXDNKLXPPESQSPLHWLADLAEQKAREEKKENKELXLENQIKEEREQDNSESPNGRXSPLVSQNNEQGSXLRDLLXXXAGKLRVGSXDAGIAFAPVYSMGAPSSKSGRXMPNILDDIIASVVENKIPPSKXSKINVKPELKEEPEESIISAVDENNKLYSDIPHSWICEKHILWLKDYKNSSNWKLFKECWKQGQPAVVSGVHKKMNISLWKAESISLDFGDHQADLLNCKDSIISNANVKEFWDGFEEVSKRQKNKSGEXVVLKLKDWPSGEDFKXMMPARYEDLLKSLPLPEYCNPEGKFNLASHLPGFFVRPDLGPRLCSAYGVVAAKDHDIGXXNLHIEVSDVVNILVYVGIAKGNGILSKAGILKKFEEEDLDDILRKRLKDSSEIPGALWHIYAGKDVDKIREFLQKISKEQGLEVLPEHDPIRDQSWYVNKKLRQRLLEEYGVRXCXLIQFLGDAIVLPAGALHQVQNFHSCIQVXEDFVSPEHLVESFHLXQELRLLKEEINYDDKLQVKNILYHAVKEMVRALKIHEDEVEDMEEN

SEQ ID NO: 14145 - protein, 2358 aa, Homo sapiens
  MOD_RES (21)..(21): Selenocysteine
  MOD_RES (25)..(25): Selenocysteine
  MOD_RES (29)..(29): Selenocysteine
  MOD_RES (35)..(35): Selenocysteine
  MOD_RES (37)..(37): Selenocysteine
  MOD_RES (59)..(59): Selenocysteine
  MOD_RES (77)..(77): Selenocysteine
  MOD_RES (96)..(96): Selenocysteine
  MOD_RES (118)..(118): Selenocysteine
  MOD_RES (187)..(187): Selenocysteine
  MOD_RES (224)..(224): Selenocysteine
  MOD_RES (244)..(244): Selenocysteine
  MOD_RES (272)..(272): Selenocysteine
  MOD_RES (287)..(287): Selenocysteine
  MOD_RES (306)..(306): Selenocysteine
  MOD_RES (308)..(308): Selenocysteine
  MOD_RES (323)..(323): Selenocysteine
  MOD_RES (331)..(331): Selenocysteine
  MOD_RES (334)..(334): Selenocysteine
  MOD_RES (346)..(346): Selenocysteine
  MOD_RES (351)..(351): Selenocysteine
  MOD_RES (374)..(374): Selenocysteine
  MOD_RES (393)..(393): Selenocysteine
  MOD_RES (398)..(398): Selenocysteine
  MOD_RES (440)..(440): Selenocysteine
  MOD_RES (447)..(447): Selenocysteine
  MOD_RES (451)..(451): Selenocysteine
  MOD_RES (468)..(468): Selenocysteine
  MOD_RES (479)..(479): Selenocysteine
  MOD_RES (486)..(486): Selenocysteine
  MOD_RES (509)..(509): Selenocysteine
  MOD_RES (513)..(513): Selenocysteine
  MOD_RES (516)..(517): Selenocysteine
  MOD_RES (530)..(530): Selenocysteine
  MOD_RES (542)..(542): Selenocysteine
  MOD_RES (565)..(565): Selenocysteine
  MOD_RES (571)..(571): Selenocysteine
  MOD_RES (577)..(577): Selenocysteine
  MOD_RES (590)..(590): Selenocysteine
  MOD_RES (594)..(594): Selenocysteine
  MOD_RES (597)..(597): Selenocysteine
  MOD_RES (601)..(601): Selenocysteine
  MOD_RES (616)..(616): Selenocysteine
  MOD_RES (623)..(623): Selenocysteine
  MOD_RES (688)..(688): Selenocysteine
  MOD_RES (727)..(727): Selenocysteine
  MOD_RES (730)..(730): Selenocysteine
  MOD_RES (757)..(757): Selenocysteine
  MOD_RES (765)..(765): Selenocysteine
  MOD_RES (767)..(767): Selenocysteine
  MOD_RES (791)..(791): Selenocysteine
  MOD_RES (804)..(804): Selenocysteine
  MOD_RES (829)..(829): Selenocysteine
  MOD_RES (854)..(855): Selenocysteine
  MOD_RES (913)..(914): Selenocysteine
  MOD_RES (953)..(953): Selenocysteine
  MOD_RES (955)..(955): Selenocysteine
  MOD_RES (959)..(959): Selenocysteine
  MOD_RES (995)..(996): Selenocysteine
  MOD_RES (1005)..(1005): Selenocysteine
  MOD_RES (1008)..(1008): Selenocysteine
  MOD_RES (1012)..(1012): Selenocysteine
  MOD_RES (1014)..(1014): Selenocysteine
  MOD_RES (1049)..(1049): Selenocysteine
  MOD_RES (1051)..(1051): Selenocysteine
  MOD_RES (1070)..(1070): Selenocysteine
  MOD_RES (1091)..(1091): Selenocysteine
  MOD_RES (1105)..(1105): Selenocysteine
  MOD_RES (1131)..(1131): Selenocysteine
  MOD_RES (1133)..(1133): Selenocysteine
  MOD_RES (1158)..(1158): Selenocysteine
  MOD_RES (1169)..(1169): Selenocysteine
  MOD_RES (1184)..(1184): Selenocysteine
  MOD_RES (1208)..(1208): Selenocysteine
  MOD_RES (1212)..(1212): Selenocysteine
  MOD_RES (1214)..(1214): Selenocysteine
  MOD_RES (1218)..(1218): Selenocysteine
  MOD_RES (1223)..(1224): Selenocysteine
  MOD_RES (1241)..(1241): Selenocysteine
  MOD_RES (1246)..(1246): Selenocysteine
  MOD_RES (1270)..(1271): Selenocysteine
  MOD_RES (1275)..(1275): Selenocysteine
  MOD_RES (1281)..(1281): Selenocysteine
  MOD_RES (1294)..(1295): Selenocysteine
  MOD_RES (1320)..(1320): Selenocysteine
  MOD_RES (1329)..(1329): Selenocysteine
  MOD_RES (1339)..(1339): Selenocysteine
  MOD_RES (1344)..(1344): Selenocysteine
  MOD_RES (1359)..(1359): Selenocysteine
  MOD_RES (1366)..(1366): Selenocysteine
  MOD_RES (1374)..(1374): Selenocysteine
  MOD_RES (1383)..(1383): Selenocysteine
  MOD_RES (1408)..(1408): Selenocysteine
  MOD_RES (1439)..(1439): Selenocysteine
  MOD_RES (1460)..(1460): Selenocysteine
  MOD_RES (1467)..(1467): Selenocysteine
  MOD_RES (1510)..(1510): Selenocysteine
  MOD_RES (1529)..(1529): Selenocysteine
  MOD_RES (1606)..(1606): Selenocysteine
  MOD_RES (1619)..(1619): Selenocysteine
  MOD_RES (1636)..(1636): Selenocysteine
  MOD_RES (1640)..(1640): Selenocysteine
  MOD_RES (1670)..(1670): Selenocysteine
  MOD_RES (1723)..(1723): Selenocysteine
  MOD_RES (1732)..(1732): Selenocysteine
  MOD_RES (1740)..(1740): Selenocysteine
  MOD_RES (1754)..(1754): Selenocysteine
  MOD_RES (1766)..(1766): Selenocysteine
  MOD_RES (1796)..(1796): Selenocysteine
  MOD_RES (1814)..(1814): Selenocysteine
  MOD_RES (1819)..(1819): Selenocysteine
  MOD_RES (1849)..(1849): Selenocysteine
  MOD_RES (1870)..(1870): Selenocysteine
  MOD_RES (1883)..(1883): Selenocysteine
  MOD_RES (1889)..(1891): Selenocysteine
  MOD_RES (1900)..(1900): Selenocysteine
  MOD_RES (1922)..(1922): Selenocysteine
  MOD_RES (1944)..(1944): Selenocysteine
  MOD_RES (2074)..(2074): Selenocysteine
  MOD_RES (2090)..(2090): Selenocysteine
  MOD_RES (2150)..(2151): Selenocysteine
  MOD_RES (2265)..(2265): Selenocysteine
  MOD_RES (2267)..(2267): Selenocysteine
  MOD_RES (2296)..(2296): Selenocysteine
  MOD_RES (2312)..(2312): Selenocysteine
MQGPYSLNGYRVRVYRQDSAXQWFXGIIXHHDLFXRXMIVMNDQVLEPQNVDPSMVQMXFLDDVVHSLLKGENIGIXSRRRSRANQNVNAVHSHYXRAQANSPRPAMNSQAAVPKQNXHQQQQQRSIRPNKRKGSDSSIPDEEKMKEEKYDYISRGENPKGKNKHLMNKRRKPEEDEKKLNMKRLRXDNVSDFSESSDSENSNKRIIDNSSEQKPENELKNKNXSKINGEEGKPHNNEKAGEEXLKNSQPPWDQIQEDKKHEEAEKRKSVDXQLQEDMIIHSSEQSXVSDHNSNDLLPQECNMDKXHXMELLPKEKFVSRPPXPKCVIDIXNDXNLEKVAQENSSXFGLQXLQKMDPNVSDSKHSIANAKFLEXAKKDSDQSWVSDVVKVDLXQSSVXNASSGNDHLNMEKEKYVSYISPLSAVSVMEDKLHKRSPPPEXIKSKLNXSVDXHKIKSSPSPEVVKPKIXHSPDSVKSKAXYVNSQAXGERRLANKIEHELSRCSFHPIPXRSSXLEXXKSPLIIDKNEHFXVYRDPALIGSEXGANHISPFLSQHPFPLHSSSHRXCLNPGXHHPALXPAPHLLAGSSSQXPLPXINXHPLXSGPHHAVHHPHLLPXVLPGVPXASLLGGHPRLESAHASSLSHLALAHQQQQQLLQHQSPHLLGQAHPSASYNQLGLYPIIWQYPNGXHAYSGLGLPSSKWVHPENAVNAEASLRRNSPSPWLHQPXPVXSADGIGLLSHIPVRPSSAEPHRPLKIXAHSSPPLXKXLVDHHKEELERKAFMEPLRSVASXSAKNDLDLNRSQXGKDCHLHRHFVDPVLNQLQRPPQEXGERLNKYKEEHRRILQESIDVAPFXXKIKGLEGERENYSRVASSSSSPKSHIIKQDMDVERSVSDLYKMKHSVPQSLPQSNYFXXLSNSVVNEPPRSYPSKEVSNIYGDKQSNALAAAAANPQXLXSFIXSLSKPPPLIKHQPESEGLVGKIPEHLPHQIASHSVXXFRNDCRSPXHLXVSSXNXLRSMPALHRAPVFHPPIHHSLERKEGSYSSLSPPXLXPVMPVNAGGKVQESQKPPXLIPEPKDSQANFKSSSEQSLXEMWRPNNNLSKEKXEWHVEKSSGKLQAAMASVIVRPSSSXKXDSMPAMQLASKDRVSERSSAGAHKXDCLKLAEAGEXGRIILPNVNSDSVHXKSEKNFQAVSQGSVPSSVMSAVNXMCNXKXDVIXSAADXXSVSSWGGSEVISSLSNXILASXSSECVSSKSVSQPVAQKQECKVSXXAPVXLASSKXGSVVQPSSGFSGXXDFIHLKKHKAALAAAQYKSSNASEXEPNAIKNQXLSASLPLDSXVICSXINKANSVGNGQASQXSQPNYHXKLKKAWLXRHSEEDKNXNKMENSGNSVSEIIKPCSVNLIASXSSDIQNSVDSKIIVDKYVKDDKVNRRKAKRXYESGSESGDSDESESKSEQRXKRQPKPXYKKKQNDLQKRKGEIEEDLKPNGVLSRSAKERSKLKLQSNSNXGIPRSVLKDWRKVKKLKQXGESFLQDDSCCEIGPNLQKCRECRLIRSKKGEEPAHSPVFCRFYYFRRLSFSKNGVVRIDGFSSPDQYDDEAMSLWXHENFEDDELDIEXSKYILDIIGDKFCQLVXSEKXALSWVKKDAKIAWKRAVRGVREMCDACEAXLFNIHWVCQKCGFVVCLDCYKAKERKSSRDKELYAWMKCVKGQPHDHKHLMPXQIIPGSVLXDLLDAMHXLREKYGIKSHCHCXNKQNLQVGNFPXMNGVSQVLQNVLNHSNKISLCMPESQQQNXPPKSEKNGGSSPESDVGXDNKLXPPESQSPLHWLADLAEQKAREEKKENKELXLENQIKEEREQDNSESPNGRXSPLVSQNNEQGSXLRDLLXXXAGKLRVGSXDAGIAFAPVYSMGAPSSKSGRXMPNILDDIIASVVENKIPPSKXSKINVKPELKEEPEESIISAVDENNKLYSDIPHSWICEKHILWLKDYKNSSNWKLFKECWKQGQPAVVSGVHKKMNISLWKAESISLDFGDHQADLLNCKDSIISNANVKEFWDGFEEVSKRQKNKSGEXVVLKLKDWPSGEDFKXMMPARYEDLLKSLPLPEYCNPEGKFNLASHLPGFFVRPDLGPRLCSAYGVVAAKDHDIGXXNLHIEVSDVVNILVYVGIAKGNGILSKAGILKKFEEEDLDDILRKRLKDSSEIPGALWHIYAGKDVDKIREFLQKISKEQGLEVLPEHDPIRDQSWYVNKKLRQRLLEEYGVRXCXLIQFLGDAIVLPAGALHQVQNFHSCIQVXEDFVSPEHLVESFHLXQELRLLKEEINYDDKLQVKNILYHAVKEMVRALKIHEDEVEDMEEN

SEQ ID NO: 14146 - protein, 956 aa, Homo sapiens
  MOD_RES (1)..(1): Any amino acid
  MOD_RES (26)..(26): Selenocysteine
  MOD_RES (37)..(37): Selenocysteine
  MOD_RES (52)..(52): Selenocysteine
  MOD_RES (76)..(76): Selenocysteine
  MOD_RES (80)..(80): Selenocysteine
  MOD_RES (82)..(82): Selenocysteine
  MOD_RES (86)..(86): Selenocysteine
  MOD_RES (91)..(92): Selenocysteine
  MOD_RES (109)..(109): Selenocysteine
  MOD_RES (114)..(114): Selenocysteine
  MOD_RES (138)..(139): Selenocysteine
  MOD_RES (143)..(143): Selenocysteine
  MOD_RES (149)..(149): Selenocysteine
  MOD_RES (162)..(163): Selenocysteine
  MOD_RES (188)..(188): Selenocysteine
  MOD_RES (197)..(197): Selenocysteine
  MOD_RES (207)..(207): Selenocysteine
  MOD_RES (212)..(212): Selenocysteine
  MOD_RES (227)..(227): Selenocysteine
  MOD_RES (234)..(234): Selenocysteine
  MOD_RES (242)..(242): Selenocysteine
  MOD_RES (251)..(251): Selenocysteine
  MOD_RES (276)..(276): Selenocysteine
  MOD_RES (307)..(307): Selenocysteine
  MOD_RES (328)..(328): Selenocysteine
  MOD_RES (335)..(335): Selenocysteine
  MOD_RES (378)..(378): Selenocysteine
  MOD_RES (399)..(399): Selenocysteine
  MOD_RES (452)..(452): Selenocysteine
  MOD_RES (461)..(461): Selenocysteine
  MOD_RES (469)..(469): Selenocysteine
  MOD_RES (483)..(483): Selenocysteine
  MOD_RES (495)..(495): Selenocysteine
  MOD_RES (525)..(525): Selenocysteine
  MOD_RES (543)..(543): Selenocysteine
  MOD_RES (548)..(548): Selenocysteine
  MOD_RES (578)..(578): Selenocysteine
  MOD_RES (599)..(599): Selenocysteine
  MOD_RES (612)..(612): Selenocysteine
  MOD_RES (618)..(620): Selenocysteine
  MOD_RES (629)..(629): Selenocysteine
  MOD_RES (651)..(651): Selenocysteine
  MOD_RES (673)..(673): Selenocysteine
  MOD_RES (803)..(803): Selenocysteine
  MOD_RES (819)..(819): Selenocysteine
  MOD_RES (879)..(880): Selenocysteine
XDSMPAMQLASKDRVSERSSAGAHKXDCLKLAEAGEXGRIILPNVNSDSVHXKSEKNFQAVSQGSVPSSVMSAVNXMCNXKXDVIXSAADXXSVSSWGGSEVISSLSNXILASXSSECVSSKSVSQPVAQKQECKVSXXAPVXLASSKXGSVVQPSSGFSGXXDFIHLKKHKAALAAAQYKSSNASEXEPNAIKNQXLSASLPLDSXVICSXINKANSVGNGQASQXSQPNYHXKLKKAWLXRHSEEDKNXNKMENSGNSVSEIIKPCSVNLIASXSSDIQNSVDSKIIVDKYVKDDKVNRRKAKRXYESGSESGDSDESESKSEQRXKRQPKPXYKKKQNDLQKRKGEIEEDLKPNGVLSRSAKERSKLKLQSNSNXKIAWKRAVRGVREMCDACEAXLFNIHWVCQKCGFVVCLDCYKAKERKSSRDKELYAWMKCVKGQPHDHKHLMPXQIIPGSVLXDLLDAMHXLREKYGIKSHCHCXNKQNLQVGNFPXMNGVSQVLQNVLNHSNKISLCMPESQQQNXPPKSEKNGGSSPESDVGXDNKLXPPESQSPLHWLADLAEQKAREEKKENKELXLENQIKEEREQDNSESPNGRXSPLVSQNNEQGSXLRDLLXXXAGKLRVGSXDAGIAFAPVYSMGAPSSKSGRXMPNILDDIIASVVENKIPPSKXSKINVKPELKEEPEESIISAVDENNKLYSDIPHSWICEKHILWLKDYKNSSNWKLFKECWKQGQPAVVSGVHKKMNISLWKAESISLDFGDHQADLLNCKDSIISNANVKEFWDGFEEVSKRQKNKSGEXVVLKLKDWPSGEDFKXMMPARYEDLLKSLPLPEYCNPEGKFNLASHLPGFFVRPDLGPRLCSAYGVVAAKDHDIGXXNLHIEVSDVVNILVYVGIAKGNGILSKAGILKKFEEEDLDDILRKRLKDSSEIPGALWHIYAGKDVDKIREFLQKV

SEQ ID NO: 14147 - protein, 417 aa, Homo sapiens
  MOD_RES (5)..(5): Selenocysteine
  MOD_RES (62)..(62): Selenocysteine
  MOD_RES (73)..(73): Selenocysteine
  MOD_RES (86)..(86): Selenocysteine
  MOD_RES (111)..(111): Selenocysteine
  MOD_RES (117)..(117): Selenocysteine
  MOD_RES (152)..(152): Selenocysteine
  MOD_RES (231)..(231): Selenocysteine
  MOD_RES (238)..(238): Selenocysteine
  MOD_RES (254)..(254): Selenocysteine
  MOD_RES (277)..(277): Selenocysteine
  MOD_RES (376)..(376): Selenocysteine
  MOD_RES (393)..(393): Selenocysteine
MDREXRALADSHFRGLGVDVPGVGQAPGRVAFVSEPGAFSYADFVRGFLLPNLPCVFSSAFXQGWGSRRRWVXPAGRPDFDHLLRXYGDVVVPVANCGVQEYNSNPKEHMXLRDYIXYWKEYIQAGYSSPRGCLYLKDWHLCRDFPVEDVFXLPVYFSSDWLNEFWDALDVDDYRFVYAGPAGSWSPFHADIFRSFSWSVNVCGRKKWLLFPPGQEEALRDRHGNLPYDVXSPALCDXHLHPRNQLAGPPLEIXQEAGEMVFVPSGWHHQVHNLDDXISINHNWVNGFNLANMWRFLQQELCAVQEEVSEWRDSMPDWHHHCQVIMRSCSGINFEEFYHFLKVIAEKRLLVLREAAAEDGAGLGFEQAAFDVGRIXEVLASLVAHPDFQRVDXSAFSPQPKELLQQLREAVDAAAAP

SEQ ID NO: 14148 - protein, 463 aa, Homo sapiens
  MOD_RES (28)..(28): Selenocysteine
  MOD_RES (51)..(51): Selenocysteine
  MOD_RES (108)..(108): Selenocysteine
  MOD_RES (119)..(119): Selenocysteine
  MOD_RES (132)..(132): Selenocysteine
  MOD_RES (157)..(157): Selenocysteine
  MOD_RES (163)..(163): Selenocysteine
  MOD_RES (198)..(198): Selenocysteine
  MOD_RES (277)..(277): Selenocysteine
  MOD_RES (284)..(284): Selenocysteine
  MOD_RES (300)..(300): Selenocysteine
  MOD_RES (323)..(323): Selenocysteine
  MOD_RES (422)..(422): Selenocysteine
  MOD_RES (439)..(439): Selenocysteine
MRAGPEPQALAGQKRGALRLLVPRLVLXVSAPAEVRRRVLRPVLSWMDREXRALADSHFRGLGVDVPGVGQAPGRVAFVSEPGAFSYADFVRGFLLPNLPCVFSSAFXQGWGSRRRWVXPAGRPDFDHLLRXYGDVVVPVANCGVQEYNSNPKEHMXLRDYIXYWKEYIQAGYSSPRGCLYLKDWHLCRDFPVEDVFXLPVYFSSDWLNEFWDALDVDDYRFVYAGPAGSWSPFHADIFRSFSWSVNVCGRKKWLLFPPGQEEALRDRHGNLPYDVXSPALCDXHLHPRNQLAGPPLEIXQEAGEMVFVPSGWHHQVHNLDDXISINHNWVNGFNLANMWRFLQQELCAVQEEVSEWRDSMPDWHHHCQVIMRSCSGINFEEFYHFLKVIAEKRLLVLREAAAEDGAGLGFEQAAFDVGRIXEVLASLVAHPDFQRVDXSAFSPQPKELLQQLREAVDAAAAP

SEQ ID NO: 14149 - protein, 447 aa, Homo sapiens
  MOD_RES (28)..(28): Selenocysteine
  MOD_RES (51)..(51): Selenocysteine
  MOD_RES (108)..(108): Selenocysteine
  MOD_RES (119)..(119): Selenocysteine
  MOD_RES (132)..(132): Selenocysteine
  MOD_RES (157)..(157): Selenocysteine
  MOD_RES (163)..(163): Selenocysteine
  MOD_RES (198)..(198): Selenocysteine
  MOD_RES (277)..(277): Selenocysteine
  MOD_RES (284)..(284): Selenocysteine
  MOD_RES (300)..(300): Selenocysteine
  MOD_RES (323)..(323): Selenocysteine
  MOD_RES (406)..(406): Selenocysteine
  MOD_RES (423)..(423): Selenocysteine
MRAGPEPQALAGQKRGALRLLVPRLVLXVSAPAEVRRRVLRPVLSWMDREXRALADSHFRGLGVDVPGVGQAPGRVAFVSEPGAFSYADFVRGFLLPNLPCVFSSAFXQGWGSRRRWVXPAGRPDFDHLLRXYGDVVVPVANCGVQEYNSNPKEHMXLRDYIXYWKEYIQAGYSSPRGCLYLKDWHLCRDFPVEDVFXLPVYFSSDWLNEFWDALDVDDYRFVYAGPAGSWSPFHADIFRSFSWSVNVCGRKKWLLFPPGQEEALRDRHGNLPYDVXSPALCDXHLHPRNQLAGPPLEIXQEAGEMVFVPSGWHHQVHNLDDXISINHNWVNGFNLANMWRFLQQELCAVQEEVIMRSCSGINFEEFYHFLKVIAEKRLLVLREAAAEDGAGLGFEQAAFDVGRIXEVLASLVAHPDFQRVDXSAFSPQPKELLQQLREAVDAAAAP

SEQ ID NO: 14150 - protein, 335 aa, Homo sapiens
  MOD_RES (27)..(27): Selenocysteine
  MOD_RES (86)..(86): Selenocysteine
  MOD_RES (124)..(124): Selenocysteine
  MOD_RES (157)..(157): Selenocysteine
  MOD_RES (184)..(184): Selenocysteine
  MOD_RES (193)..(193): Selenocysteine
  MOD_RES (211)..(211): Selenocysteine
  MOD_RES (213)..(213): Selenocysteine
  MOD_RES (221)..(221): Selenocysteine
  MOD_RES (234)..(234): Selenocysteine
  MOD_RES (243)..(243): Selenocysteine
  MOD_RES (247)..(247): Selenocysteine
  MOD_RES (264)..(264): Selenocysteine
  MOD_RES (280)..(281): Selenocysteine
  MOD_RES (285)..(285): Selenocysteine
  MOD_RES (292)..(292): Selenocysteine
  MOD_RES (301)..(301): Selenocysteine
  MOD_RES (317)..(317): Selenocysteine
  MOD_RES (331)..(331): Selenocysteine
MNHKSKKRIREAKRSARPELKDSLDWXRHNYYESFSLSPAAVADNVERADALQLSVEEFVERYERPYKPVVLLNAQEGWSAQEKWXLERLKRKYRNQKFKCGEDNDGYSVKMKMKYYIEYMESXRDDSPLYIFDSSYGEHPKRRKLLEDYKVPKFFXDDLFQYAGEKRRPPYRWFVMGPPRSGXGIHIDPLGXSAWNALVQGHKRWCLFPXSXPRELIKVXRDEGGNQQDEAIXWFNVIYPRXQLPXWPPEFKPLEILQKPGEXVFVPGGWWHVVLNLDXXIAIXQNFASSXNFPVVWHKXVRGRPKLSRKWYRYSXGSGSASHPQPPRAXVSQP

SEQ ID NO: 14151 - protein, 361 aa, Homo sapiens
  MOD_RES (27)..(27): Selenocysteine
  MOD_RES (86)..(86): Selenocysteine
  MOD_RES (124)..(124): Selenocysteine
  MOD_RES (157)..(157): Selenocysteine
  MOD_RES (184)..(184): Selenocysteine
  MOD_RES (193)..(193): Selenocysteine
  MOD_RES (211)..(211): Selenocysteine
  MOD_RES (213)..(213): Selenocysteine
  MOD_RES (221)..(221): Selenocysteine
  MOD_RES (234)..(234): Selenocysteine
  MOD_RES (243)..(243): Selenocysteine
  MOD_RES (247)..(247): Selenocysteine
  MOD_RES (264)..(264): Selenocysteine
  MOD_RES (280)..(281): Selenocysteine
  MOD_RES (285)..(285): Selenocysteine
  MOD_RES (292)..(292): Selenocysteine
  MOD_RES (301)..(301): Selenocysteine
  MOD_RES (315)..(315): Selenocysteine
  MOD_RES (317)..(317): Selenocysteine
  MOD_RES (326)..(326): Selenocysteine
MNHKSKKRIREAKRSARPELKDSLDWXRHNYYESFSLSPAAVADNVERADALQLSVEEFVERYERPYKPVVLLNAQEGWSAQEKWXLERLKRKYRNQKFKCGEDNDGYSVKMKMKYYIEYMESXRDDSPLYIFDSSYGEHPKRRKLLEDYKVPKFFXDDLFQYAGEKRRPPYRWFVMGPPRSGXGIHIDPLGXSAWNALVQGHKRWCLFPXSXPRELIKVXRDEGGNQQDEAIXWFNVIYPRXQLPXWPPEFKPLEILQKPGEXVFVPGGWWHVVLNLDXXIAIXQNFASSXNFPVVWHKXVRGRPKLSRKWYRXDXARAAAVQAXHSHPVPLCPNPDLEGPALGDFEARAPRVGSPRRLG

SEQ ID NO: 14152 - protein, 395 aa, Homo sapiens
  MOD_RES (27)..(27): Selenocysteine
  MOD_RES (86)..(86): Selenocysteine
  MOD_RES (124)..(124): Selenocysteine
  MOD_RES (157)..(157): Selenocysteine
  MOD_RES (184)..(184): Selenocysteine
  MOD_RES (193)..(193): Selenocysteine
  MOD_RES (211)..(211): Selenocysteine
  MOD_RES (213)..(213): Selenocysteine
  MOD_RES (221)..(221): Selenocysteine
  MOD_RES (234)..(234): Selenocysteine
  MOD_RES (243)..(243): Selenocysteine
  MOD_RES (247)..(247): Selenocysteine
  MOD_RES (264)..(264): Selenocysteine
  MOD_RES (280)..(281): Selenocysteine
  MOD_RES (285)..(285): Selenocysteine
  MOD_RES (292)..(292): Selenocysteine
  MOD_RES (301)..(301): Selenocysteine
  MOD_RES (326)..(326): Selenocysteine
  MOD_RES (339)..(339): Selenocysteine
  MOD_RES (341)..(341): Selenocysteine
  MOD_RES (346)..(347): Selenocysteine
  MOD_RES (369)..(369): Selenocysteine
MNHKSKKRIREAKRSARPELKDSLDWXRHNYYESFSLSPAAVADNVERADALQLSVEEFVERYERPYKPVVLLNAQEGWSAQEKWXLERLKRKYRNQKFKCGEDNDGYSVKMKMKYYIEYMESXRDDSPLYIFDSSYGEHPKRRKLLEDYKVPKFFXDDLFQYAGEKRRPPYRWFVMGPPRSGXGIHIDPLGXSAWNALVQGHKRWCLFPXSXPRELIKVXRDEGGNQQDEAIXWFNVIYPRXQLPXWPPEFKPLEILQKPGEXVFVPGGWWHVVLNLDXXIAIXQNFASSXNFPVVWHKXVRGRPKLSRKWYSASLDPRAMGQCXAGRRGGRAAWWEXGXPPPRXXVSAKSAAPPGDPARLLSVWKDXLAARAGPGEGGLSSPADKGRPDRAQE

SEQ ID NO: 14153 - protein, 403 aa, Homo sapiens
  MOD_RES (27)..(27): Selenocysteine
  MOD_RES (86)..(86): Selenocysteine
  MOD_RES (124)..(124): Selenocysteine
  MOD_RES (157)..(157): Selenocysteine
  MOD_RES (184)..(184): Selenocysteine
  MOD_RES (193)..(193): Selenocysteine
  MOD_RES (211)..(211): Selenocysteine
  MOD_RES (213)..(213): Selenocysteine
  MOD_RES (221)..(221): Selenocysteine
  MOD_RES (234)..(234): Selenocysteine
  MOD_RES (243)..(243): Selenocysteine
  MOD_RES (247)..(247): Selenocysteine
  MOD_RES (264)..(264): Selenocysteine
  MOD_RES (280)..(281): Selenocysteine
  MOD_RES (285)..(285): Selenocysteine
  MOD_RES (292)..(292): Selenocysteine
  MOD_RES (301)..(301): Selenocysteine
  MOD_RES (336)..(336): Selenocysteine
  MOD_RES (370)..(370): Selenocysteine
  MOD_RES (379)..(379): Selenocysteine
  MOD_RES (388)..(389): Selenocysteine
MNHKSKKRIREAKRSARPELKDSLDWXRHNYYESFSLSPAAVADNVERADALQLSVEEFVERYERPYKPVVLLNAQEGWSAQEKWXLERLKRKYRNQKFKCGEDNDGYSVKMKMKYYIEYMESXRDDSPLYIFDSSYGEHPKRRKLLEDYKVPKFFXDDLFQYAGEKRRPPYRWFVMGPPRSGXGIHIDPLGXSAWNALVQGHKRWCLFPXSXPRELIKVXRDEGGNQQDEAIXWFNVIYPRXQLPXWPPEFKPLEILQKPGEXVFVPGGWWHVVLNLDXXIAIXQNFASSXNFPVVWHKXVRGRPKLSRKWYRILKQEHPELAVLADSVDLQESXGIASDSSSDSSSSSSSSSSDSDSECESGSEGDGXVHRRKKRRXCSMVGNGDXXSQDDCVSKERSSSR

SEQ ID NO: 14154 - protein, 414 aa, Homo sapiens
  MOD_RES (27)..(27): Selenocysteine
  MOD_RES (86)..(86): Selenocysteine
  MOD_RES (124)..(124): Selenocysteine
  MOD_RES (157)..(157): Selenocysteine
  MOD_RES (184)..(184): Selenocysteine
  MOD_RES (193)..(193): Selenocysteine
  MOD_RES (211)..(211): Selenocysteine
  MOD_RES (213)..(213): Selenocysteine
  MOD_RES (221)..(221): Selenocysteine
  MOD_RES (234)..(234): Selenocysteine
  MOD_RES (243)..(243): Selenocysteine
  MOD_RES (247)..(247): Selenocysteine
  MOD_RES (264)..(264): Selenocysteine
  MOD_RES (280)..(281): Selenocysteine
  MOD_RES (285)..(285): Selenocysteine
  MOD_RES (292)..(292): Selenocysteine
  MOD_RES (301)..(301): Selenocysteine
  MOD_RES (336)..(336): Selenocysteine
  MOD_RES (370)..(370): Selenocysteine
  MOD_RES (379)..(379): Selenocysteine
  MOD_RES (388)..(389): Selenocysteine
  MOD_RES (407)..(407): Selenocysteine
MNHKSKKRIREAKRSARPELKDSLDWXRHNYYESFSLSPAAVADNVERADALQLSVEEFVERYERPYKPVVLLNAQEGWSAQEKWXLERLKRKYRNQKFKCGEDNDGYSVKMKMKYYIEYMESXRDDSPLYIFDSSYGEHPKRRKLLEDYKVPKFFXDDLFQYAGEKRRPPYRWFVMGPPRSGXGIHIDPLGXSAWNALVQGHKRWCLFPXSXPRELIKVXRDEGGNQQDEAIXWFNVIYPRXQLPXWPPEFKPLEILQKPGEXVFVPGGWWHVVLNLDXXIAIXQNFASSXNFPVVWHKXVRGRPKLSRKWYRILKQEHPELAVLADSVDLQESXGIASDSSSDSSSSSSSSSSDSDSECESGSEGDGXVHRRKKRRXCSMVGNGDXXSQDDCVSKERSSSRIRDXCGGRAHP

SEQ ID NO: 14155 - protein, 988 aa, Homo sapiens
  MOD_RES (8)..(8): Selenocysteine
  MOD_RES (45)..(45): Selenocysteine
  MOD_RES (50)..(50): Selenocysteine
  MOD_RES (93)..(93): Selenocysteine
  MOD_RES (97)..(97): Selenocysteine
  MOD_RES (119)..(119): Selenocysteine
  MOD_RES (154)..(154): Selenocysteine
  MOD_RES (188)..(188): Selenocysteine
  MOD_RES (218)..(218): Selenocysteine
  MOD_RES (268)..(268): Selenocysteine
  MOD_RES (278)..(278): Selenocysteine
  MOD_RES (284)..(284): Selenocysteine
  MOD_RES (299)..(299): Selenocysteine
  MOD_RES (311)..(311): Selenocysteine
  MOD_RES (313)..(313): Selenocysteine
  MOD_RES (352)..(352): Selenocysteine
  MOD_RES (376)..(377): Selenocysteine
  MOD_RES (440)..(440): Selenocysteine
  MOD_RES (447)..(447): Selenocysteine
  MOD_RES (488)..(488): Selenocysteine
  MOD_RES (517)..(517): Selenocysteine
  MOD_RES (553)..(553): Selenocysteine
  MOD_RES (575)..(575): Selenocysteine
  MOD_RES (642)..(642): Selenocysteine
  MOD_RES (650)..(650): Selenocysteine
  MOD_RES (653)..(653): Selenocysteine
  MOD_RES (679)..(679): Selenocysteine
  MOD_RES (685)..(685): Selenocysteine
  MOD_RES (699)..(699): Selenocysteine
  MOD_RES (734)..(734): Selenocysteine
  MOD_RES (749)..(750): Selenocysteine
  MOD_RES (761)..(761): Selenocysteine
  MOD_RES (764)..(764): Selenocysteine
  MOD_RES (769)..(769): Selenocysteine
  MOD_RES (777)..(777): Selenocysteine
  MOD_RES (783)..(783): Selenocysteine
  MOD_RES (799)..(799): Selenocysteine
  MOD_RES (810)..(810): Selenocysteine
  MOD_RES (836)..(836): Selenocysteine
  MOD_RES (878)..(878): Selenocysteine
  MOD_RES (912)..(912): Selenocysteine
  MOD_RES (948)..(948): Selenocysteine
  MOD_RES (953)..(953): Selenocysteine
  MOD_RES (957)..(957): Selenocysteine
  MOD_RES (984)..(984): Selenocysteine
MSFALEEXLESDWVAVRPHVFDEREKHKFVFIVAWNEIEGKFAIXCHNRXAQRQRSGSREQAGARGGAEAGGAASDGSRGPGSPAGRGRPEAXASAXLVRSPGPRRSSAWAEGGSPRSXRSLLGDPRLRSPGSKGAESRLRSPVRAKPIPGQKXSEADDAAGAAAAAARPAPREAQVSSVRIVSASGXVSEEIEVLEMVKEDEAPLALSDAEQPPPAXELESPAEECSWAGLFSFQDLRAVHQQLCSVNSQLEPCLPVFPEEPSGMWXVLFGGAPEMXEQEIDXLCYQLQVYLGHGLDXCGWKILSQVLFXEXDDPEEYYESLSELRQKGYEEVLQRARKRIQELLDKHKNXESMVELLDLYQMEDEAYSSLAEAXXELYQYLLQPFRDMRELAMLRRQQIKISMENDYLGPRRIESLQKEDADWQRKAHMAVLSIQDLXVKYFEIXAKAQKAVYDRMRADQKKFGKASWAAAAERMEKLQYAVSKEXLQMMRAKEICLEQRKHALKEEMQSLRGGXEAIARLDQLEADYYDLQLQLYEVQFEILKCEELLLXAQLESIKRLISEKRDEVVYYDXYESMEAMLEKEEMAASAYLQREELQKLQQKARQLEARRGRVSAKKSYLRNKKEICIAKHNEKIQQRXRIEDEYRXHHXVQLKREKLHDEEERKSAWVSQERQRXLDRLRXFKQRYPGQVILKSXRLRLAHARRKGAASPVLQEDHCDSLPSVLQVEEKXEEVGEGRVKRGPSQXXEPQSLVQLEDXSLXQLEAXSLPLSGVXSELPPXISLPLLNNNLEPCSVXINPLPSPLPPXPPPPPPPPPPPPPPPLPVAKDSGPEXLEKDLPRKEGNEKRIPKSASAPSAHLFDSSQLVSARKKLRKXAEGLQRRRVSSPMDEVLASLKRGSFHLKKVEQRXLPPFPDEDDSNNILAQIRKGVKLKKVQKDVLRESFXLLPDXDPLXRSIHEALRRIKEASPESEDEEEALPCXDWEN

SEQ ID NO: 14156 - protein, 331 aa, Homo sapiens
  MOD_RES (2)..(2): Selenocysteine
  MOD_RES (7)..(8): Selenocysteine
  MOD_RES (39)..(39): Selenocysteine
  MOD_RES (62)..(62): Selenocysteine
  MOD_RES (89)..(91): Selenocysteine
  MOD_RES (93)..(93): Selenocysteine
  MOD_RES (95)..(95): Selenocysteine
  MOD_RES (104)..(104): Selenocysteine
  MOD_RES (126)..(126): Selenocysteine
  MOD_RES (131)..(131): Selenocysteine
  MOD_RES (231)..(231): Selenocysteine
  MOD_RES (239)..(239): Selenocysteine
  MOD_RES (286)..(286): Selenocysteine
  MOD_RES (297)..(297): Selenocysteine
  MOD_RES (325)..(325): Selenocysteine
  MOD_RES (330)..(330): Selenocysteine
MXAKMEXXFYDDALNASFLPSESGPYGYSNPKILKQSMXLNLADPVGSLKPHLRAKNSDLLXSPDVGLLKLASPELERLIIQSSNGHIXXXPXPXQFLCPKNVXDEQEGFAEGFVRALAELHSQNXLPSVXSAAQPVNGAGMVAPAVASVAGGSGSGGFSASLHSEPPVYANLSNFNPGALSSGGGAPSYGAAGLAFPAQPQQQQQPPHHLPQQMPVQHPRLQALKEEPQXVPEMPGEXPPLSPIDMESQERIKAERKRMRNRIAASKCRKRKLERIARLEEKVKXLKAQNSELASXANMLREQVAQLKQKVMNHVNSGCQLMLXQQLQXF

SEQ ID NO: 14157 - protein, 347 aa, Homo sapiens
  MOD_RES (3)..(3): Selenocysteine
  MOD_RES (16)..(16): Selenocysteine
  MOD_RES (18)..(18): Selenocysteine
  MOD_RES (76)..(76): Selenocysteine
  MOD_RES (100)..(102): Selenocysteine
  MOD_RES (104)..(104): Selenocysteine
  MOD_RES (129)..(129): Selenocysteine
  MOD_RES (153)..(153): Selenocysteine
  MOD_RES (162)..(162): Selenocysteine
  MOD_RES (183)..(183): Selenocysteine
  MOD_RES (204)..(204): Selenocysteine
  MOD_RES (210)..(212): Selenocysteine
  MOD_RES (238)..(238): Selenocysteine
  MOD_RES (245)..(245): Selenocysteine
  MOD_RES (255)..(255): Selenocysteine
  MOD_RES (283)..(283): Selenocysteine
  MOD_RES (302)..(302): Selenocysteine
  MOD_RES (313)..(313): Selenocysteine
  MOD_RES (330)..(330): Selenocysteine
MCXKMEQPFYHDDSYXAXGYGRAPGGLSLHDYKLLKPSLAVNLADPYRSLKAPGARGPGPEGGGGGSYFSGQGSDXGASLKLASSELERLIVPNSNGVIXXXPXPPGQYFYPRGGGSGGGAGGAGGGVXEEQEGFADGFVKALDDLHKMNHVXPPNVSLGAXGGPPAGPGGVYAGPEPPPVYXNLSSYSPASASSGGAGAAVGXGSSYPXXXISYLPHAPPFAGGHPAQLGLGRGASXFKEEPQXVPEARSRDAXPPVSPINMEDQERIKVERKRLRNRLAAXKCRKRKLERIARLEDKVKXLKAENAGLSSXAGLLREQVAQLKQKVMXHVSNGCQLLLGVKGHAF

SEQ ID NO: 14158 - protein, 166 aa, Homo sapiens
  MOD_RES (27)..(27): Selenocysteine
  MOD_RES (60)..(60): Selenocysteine
  MOD_RES (80)..(80): Selenocysteine
  MOD_RES (117)..(117): Selenocysteine
  MOD_RES (123)..(123): Selenocysteine
  MOD_RES (128)..(128): Selenocysteine
AAAPEAPVYANLSSYAGGAGGAGGAAXVAFAAEPVPFPPPPPPGALGPPRLAALKDEPQXVPDVPSFGESPPLSPIDMDXQERIKAERKRLRNRIAASKCRKRKLERISRLEEKVKXLKSQNXELASXASLLREQVAQLKQKVLSHVNSGCQLLPQHQREEQSVRF

SEQ ID NO: 14159 - protein, 347 aa, Homo sapiens
  MOD_RES (3)..(3): Selenocysteine
  MOD_RES (38)..(38): Selenocysteine
  MOD_RES (51)..(51): Selenocysteine
  MOD_RES (71)..(71): Selenocysteine
  MOD_RES (115)..(117): Selenocysteine
  MOD_RES (119)..(119): Selenocysteine
  MOD_RES (172)..(172): Selenocysteine
  MOD_RES (174)..(174): Selenocysteine
  MOD_RES (212)..(212): Selenocysteine
  MOD_RES (245)..(245): Selenocysteine
  MOD_RES (265)..(265): Selenocysteine
  MOD_RES (302)..(302): Selenocysteine
  MOD_RES (308)..(308): Selenocysteine
  MOD_RES (313)..(313): Selenocysteine
MEXPFYGDEALSGLGGGASGSGGSFASPGRLFPGAPPXAAAGSMMKKDALXLSLSEQVAAALKPAAAPPPXPLRADGAPSAAPPDGLLASPDLGLLKLASPELERLIIQSNGLVXXXPXSSQFLYPKVAASEEQEFAEGFVKALEDLHKQNQLGAGAAAAAAAAAAGGPSGXAXGSAPPGELAPAAAAPEAPVYANLSSYAGGAGGAGGAAXVAFAAEPVPFPPPPPPGALGPPRLAALKDEPQXVPDVPSFGESPPLSPIDMDXQERIKAERKRLRNRIAASKCRKRKLERISRLEEKVKXLKSQNXELASXASLLREQVAQLKQKVLSHVNSGCQLLPQHQVPAY

SEQ ID NO: 14160 - protein, 86 aa, Homo sapiens
  MOD_RES (14)..(14): Selenocysteine
  MOD_RES (19)..(19): Selenocysteine
  MOD_RES (21)..(21): Selenocysteine
  MOD_RES (32)..(32): Selenocysteine
  MOD_RES (54)..(54): Selenocysteine
  MOD_RES (58)..(60): Selenocysteine
  MOD_RES (62)..(62): Selenocysteine
  MOD_RES (78)..(79): Selenocysteine
MEVMNLMEQPIKVXEWQQXYXYDSGIHSGANXCVPSVSSKGIMEEDEACGRQYXLKKXXXYXQGVPPSQGDLEYQMSXXARAKRVR

SEQ ID NO: 14161 - protein, 104 aa, Homo sapiens
  MOD_RES (14)..(14): Selenocysteine
  MOD_RES (19)..(19): Selenocysteine
  MOD_RES (21)..(21): Selenocysteine
  MOD_RES (32)..(32): Selenocysteine
  MOD_RES (54)..(54): Selenocysteine
  MOD_RES (58)..(60): Selenocysteine
  MOD_RES (62)..(62): Selenocysteine
  MOD_RES (78)..(79): Selenocysteine
  MOD_RES (104)..(104): Selenocysteine
MEVMNLMEQPIKVXEWQQXYXYDSGIHSGANXCVPSVSSKGIMEEDEACGRQYXLKKXXXYXQGVPPSQGDLEYQMSXXARAKRVREAMCPGVSGEDSSLLLAX

SEQ ID NO: 14162 - protein, 235 aa, Homo sapiens
  MOD_RES (14)..(14): Selenocysteine
  MOD_RES (19)..(19): Selenocysteine
  MOD_RES (21)..(21): Selenocysteine
  MOD_RES (32)..(32): Selenocysteine
  MOD_RES (54)..(54): Selenocysteine
  MOD_RES (58)..(60): Selenocysteine
  MOD_RES (62)..(62): Selenocysteine
  MOD_RES (78)..(79): Selenocysteine
  MOD_RES (104)..(104): Selenocysteine
  MOD_RES (111)..(111): Selenocysteine
  MOD_RES (141)..(141): Selenocysteine
  MOD_RES (148)..(148): Selenocysteine
  MOD_RES (160)..(160): Selenocysteine
  MOD_RES (192)..(192): Selenocysteine
  MOD_RES (196)..(196): Selenocysteine
  MOD_RES (201)..(201): Selenocysteine
  MOD_RES (205)..(206): Selenocysteine
MEVMNLMEQPIKVXEWQQXYXYDSGIHSGANXCVPSVSSKGIMEEDEACGRQYXLKKXXXYXQGVPPSQGDLEYQMSXXARAKRVREAMCPGVSGEDSSLLLAXQVEGQAXNLQRLAEPSQLLKSAIVHLINYQDDAELAXRALPELXKLLNDEDPVVVXKAAMIVNQLSKKEASRRALMGSPQLVAAVVRXMQNXSDLDXARCXXSILHNLSHHREGLLAIFKSGGIPALVRML

SEQ ID NO: 14163 - protein, 277 aa, Homo sapiens
  MOD_RES (14)..(14): Selenocysteine
  MOD_RES (19)..(19): Selenocysteine
  MOD_RES (21)..(21): Selenocysteine
  MOD_RES (32)..(32): Selenocysteine
  MOD_RES (54)..(54): Selenocysteine
  MOD_RES (58)..(60): Selenocysteine
  MOD_RES (62)..(62): Selenocysteine
  MOD_RES (78)..(79): Selenocysteine
  MOD_RES (104)..(104): Selenocysteine
  MOD_RES (111)..(111): Selenocysteine
  MOD_RES (141)..(141): Selenocysteine
  MOD_RES (148)..(148): Selenocysteine
  MOD_RES (160)..(160): Selenocysteine
  MOD_RES (192)..(192): Selenocysteine
  MOD_RES (196)..(196): Selenocysteine
  MOD_RES (201)..(201): Selenocysteine
  MOD_RES (205)..(206): Selenocysteine
  MOD_RES (248)..(249): Selenocysteine
MEVMNLMEQPIKVXEWQQXYXYDSGIHSGANXCVPSVSSKGIMEEDEACGRQYXLKKXXXYXQGVPPSQGDLEYQMSXXARAKRVREAMCPGVSGEDSSLLLAXQVEGQAXNLQRLAEPSQLLKSAIVHLINYQDDAELAXRALPELXKLLNDEDPVVVXKAAMIVNQLSKKEASRRALMGSPQLVAAVVRXMQNXSDLDXARCXXSILHNLSHHREGLLAIFKSGGIPALVRMLSSPVESVLFYAIXXLHNLLLYQEGAKMAVRLADGLQKMVPLL

SEQ ID NO: 14164 - protein, 296 aa, Homo sapiens
  MOD_RES (14)..(14): Selenocysteine
  MOD_RES (19)..(19): Selenocysteine
  MOD_RES (21)..(21): Selenocysteine
  MOD_RES (32)..(32): Selenocysteine
  MOD_RES (54)..(54): Selenocysteine
  MOD_RES (58)..(60): Selenocysteine
  MOD_RES (62)..(62): Selenocysteine
  MOD_RES (78)..(79): Selenocysteine
  MOD_RES (104)..(104): Selenocysteine
  MOD_RES (111)..(111): Selenocysteine
  MOD_RES (141)..(141): Selenocysteine
  MOD_RES (148)..(148): Selenocysteine
  MOD_RES (160)..(160): Selenocysteine
  MOD_RES (192)..(192): Selenocysteine
  MOD_RES (196)..(196): Selenocysteine
  MOD_RES (201)..(201): Selenocysteine
  MOD_RES (205)..(206): Selenocysteine
  MOD_RES (248)..(249): Selenocysteine
  MOD_RES (288)..(289): Selenocysteine
MEVMNLMEQPIKVXEWQQXYXYDSGIHSGANXCVPSVSSKGIMEEDEACGRQYXLKKXXXYXQGVPPSQGDLEYQMSXXARAKRVREAMCPGVSGEDSSLLLAXQVEGQAXNLQRLAEPSQLLKSAIVHLINYQDDAELAXRALPELXKLLNDEDPVVVXKAAMIVNQLSKKEASRRALMGSPQLVAAVVRXMQNXSDLDXARCXXSILHNLSHHREGLLAIFKSGGIPALVRMLSSPVESVLFYAIXXLHNLLLYQEGAKMAVRLADGLQKMVPLLNKNNPKFLAIXXDCLQLLA

SEQ ID NO: 14165 - protein, 298 aa, Homo sapiens
  MOD_RES (14)..(14): Selenocysteine
  MOD_RES (19)..(19): Selenocysteine
  MOD_RES (21)..(21): Selenocysteine
  MOD_RES (32)..(32): Selenocysteine
  MOD_RES (54)..(54): Selenocysteine
  MOD_RES (58)..(60): Selenocysteine
  MOD_RES (62)..(62): Selenocysteine
  MOD_RES (78)..(79): Selenocysteine
  MOD_RES (104)..(104): Selenocysteine
  MOD_RES (111)..(111): Selenocysteine
  MOD_RES (141)..(141): Selenocysteine
  MOD_RES (148)..(148): Selenocysteine
  MOD_RES (160)..(160): Selenocysteine
  MOD_RES (192)..(192): Selenocysteine
  MOD_RES (196)..(196): Selenocysteine
  MOD_RES (201)..(201): Selenocysteine
  MOD_RES (205)..(206): Selenocysteine
  MOD_RES (248)..(249): Selenocysteine
  MOD_RES (288)..(289): Selenocysteine
MEVMNLMEQPIKVXEWQQXYXYDSGIHSGANXCVPSVSSKGIMEEDEACGRQYXLKKXXXYXQGVPPSQGDLEYQMSXXARAKRVREAMCPGVSGEDSSLLLAXQVEGQAXNLQRLAEPSQLLKSAIVHLINYQDDAELAXRALPELXKLLNDEDPVVVXKAAMIVNQLSKKEASRRALMGSPQLVAAVVRXMQNXSDLDXARCXXSILHNLSHHREGLLAIFKSGGIPALVRMLSSPVESVLFYAIXXLHNLLLYQEGAKMAVRLADGLQKMVPLLNKNNPKFLAIXXDCLQLLAYG

SEQ ID NO: 14166 - protein, 745 aa, Homo sapiens
  MOD_RES (14)..(14): Selenocysteine
  MOD_RES (19)..(19): Selenocysteine
  MOD_RES (21)..(21): Selenocysteine
  MOD_RES (32)..(32): Selenocysteine
  MOD_RES (54)..(54): Selenocysteine
  MOD_RES (58)..(60): Selenocysteine
  MOD_RES (62)..(62): Selenocysteine
  MOD_RES (78)..(79): Selenocysteine
  MOD_RES (104)..(104): Selenocysteine
  MOD_RES (111)..(111): Selenocysteine
  MOD_RES (141)..(141): Selenocysteine
  MOD_RES (148)..(148): Selenocysteine
  MOD_RES (160)..(160): Selenocysteine
  MOD_RES (192)..(192): Selenocysteine
  MOD_RES (196)..(196): Selenocysteine
  MOD_RES (201)..(201): Selenocysteine
  MOD_RES (205)..(206): Selenocysteine
  MOD_RES (248)..(249): Selenocysteine
  MOD_RES (288)..(289): Selenocysteine
  MOD_RES (330)..(331): Selenocysteine
  MOD_RES (362)..(362): Selenocysteine
  MOD_RES (375)..(375): Selenocysteine
  MOD_RES (384)..(384): Selenocysteine
  MOD_RES (409)..(409): Selenocysteine
  MOD_RES (412)..(412): Selenocysteine
  MOD_RES (414)..(414): Selenocysteine
  MOD_RES (419)..(419): Selenocysteine
  MOD_RES (427)..(427): Selenocysteine
  MOD_RES (430)..(430): Selenocysteine
  MOD_RES (452)..(452): Selenocysteine
  MOD_RES (463)..(463): Selenocysteine
  MOD_RES (501)..(501): Selenocysteine
  MOD_RES (546)..(546): Selenocysteine
  MOD_RES (551)..(551): Selenocysteine
  MOD_RES (564)..(564): Selenocysteine
  MOD_RES (585)..(585): Selenocysteine
  MOD_RES (641)..(641): Selenocysteine
  MOD_RES (643)..(643): Selenocysteine
  MOD_RES (669)..(669): Selenocysteine
  MOD_RES (700)..(700): Selenocysteine
  MOD_RES (728)..(728): Selenocysteine
  MOD_RES (739)..(739): Selenocysteine
MEVMNLMEQPIKVXEWQQXYXYDSGIHSGANXCVPSVSSKGIMEEDEACGRQYXLKKXXXYXQGVPPSQGDLEYQMSXXARAKRVREAMCPGVSGEDSSLLLAXQVEGQAXNLQRLAEPSQLLKSAIVHLINYQDDAELAXRALPELXKLLNDEDPVVVXKAAMIVNQLSKKEASRRALMGSPQLVAAVVRXMQNXSDLDXARCXXSILHNLSHHREGLLAIFKSGGIPALVRMLSSPVESVLFYAIXXLHNLLLYQEGAKMAVRLADGLQKMVPLLNKNNPKFLAIXXDCLQLLAYGNQESKLIILANGGPQALVQIMRNYSYEKLLWXXSRVLKVLSVCPSNKPAIVEAGGMQALGKHLXSNSPRLVQNCLWXLRNLSDVAXKQEGLESVLKILVNQLSVDDVNVLXCAXGXLSNLXCNNSKNKXLVXQNSGVEALIHAILRAGDKDDIXEPAVCALRHLXSRHPEAEMAQNSVRLNYGIPAIVKLLNQPNQWPLVKAXIGLIRNLALCPANHAPLQEAAVIPRLVQLLVKAHQDAQRHVAAGXQQPYXDGVRMEEIVEGCXGALHILARDPMNRMEIFRLNXIPLFVQLLYSSVENIQRVAAGVLCELAQDKEAADAIDAEGASAPLMELLHSRNEGXAXYAAAVLFRISEDKNPDYRKRVSVELXNSLFKHDPAAWEAAQSMIPINEPYGDDMDAXYRPMYSSDVPLDPLEMHMDMDGDYPIDXYSDGLRPPYPXADHMLA

SEQ ID NO: 14167 - protein, 194 aa, Homo sapiens
  MOD_RES (9)..(9): Selenocysteine
  MOD_RES (67)..(67): Selenocysteine
  MOD_RES (69)..(69): Selenocysteine
  MOD_RES (75)..(75): Selenocysteine
  MOD_RES (114)..(115): Selenocysteine
  MOD_RES (140)..(140): Selenocysteine
  MOD_RES (154)..(154): Selenocysteine
  MOD_RES (184)..(184): Selenocysteine
MKGGDRAYXRGPSLGWLFAKCCCCFPCRDAYSHSSSENGGKSESVANLQAQPSLNSIHSSPGPKRSXNXLKKWLXSPVRRLNSGKADGNIKKQKKVRDGRKSFDLGSPKPGDEXXPQGDSADEKSKKGWGEDEPDEESHXPLPPPMKIFDNDPXQDEMSLEGSSYRGSLKDPAGCLNEGMAPPXPPKNPEEEQK

SEQ ID NO: 14168 - protein, 1289 aa, Homo sapiens
  MOD_RES (9)..(9): Selenocysteine
  MOD_RES (67)..(67): Selenocysteine
  MOD_RES (69)..(69): Selenocysteine
  MOD_RES (75)..(75): Selenocysteine
  MOD_RES (114)..(115): Selenocysteine
  MOD_RES (140)..(140): Selenocysteine
  MOD_RES (154)..(154): Selenocysteine
  MOD_RES (170)..(170): Selenocysteine
  MOD_RES (174)..(174): Selenocysteine
  MOD_RES (216)..(216): Selenocysteine
  MOD_RES (243)..(243): Selenocysteine
  MOD_RES (354)..(354): Selenocysteine
  MOD_RES (367)..(367): Selenocysteine
  MOD_RES (419)..(419): Selenocysteine
  MOD_RES (421)..(421): Selenocysteine
  MOD_RES (431)..(431): Selenocysteine
  MOD_RES (445)..(445): Selenocysteine
  MOD_RES (469)..(469): Selenocysteine
  MOD_RES (503)..(503): Selenocysteine
  MOD_RES (530)..(530): Selenocysteine
  MOD_RES (551)..(551): Selenocysteine
  MOD_RES (596)..(596): Selenocysteine
  MOD_RES (626)..(626): Selenocysteine
  MOD_RES (688)..(688): Selenocysteine
  MOD_RES (691)..(691): Selenocysteine
  MOD_RES (708)..(708): Selenocysteine
  MOD_RES (720)..(720): Selenocysteine
  MOD_RES (726)..(726): Selenocysteine
  MOD_RES (744)..(744): Selenocysteine
  MOD_RES (759)..(759): Selenocysteine
  MOD_RES (784)..(784): Selenocysteine
  MOD_RES (790)..(790): Selenocysteine
  MOD_RES (804)..(804): Selenocysteine
  MOD_RES (806)..(806): Selenocysteine
  MOD_RES (817)..(817): Selenocysteine
  MOD_RES (823)..(823): Selenocysteine
  MOD_RES (825)..(825): Selenocysteine
  MOD_RES (835)..(835): Selenocysteine
  MOD_RES (850)..(850): Selenocysteine
  MOD_RES (854)..(854): Selenocysteine
  MOD_RES (859)..(860): Selenocysteine
  MOD_RES (862)..(862): Selenocysteine
  MOD_RES (865)..(865): Selenocysteine
  MOD_RES (886)..(886): Selenocysteine
  MOD_RES (898)..(898): Selenocysteine
  MOD_RES (902)..(902): Selenocysteine
  MOD_RES (907)..(907): Selenocysteine
  MOD_RES (925)..(925): Selenocysteine
  MOD_RES (928)..(928): Selenocysteine
  MOD_RES (976)..(976): Selenocysteine
  MOD_RES (988)..(988): Selenocysteine
  MOD_RES (1009)..(1009): Selenocysteine
  MOD_RES (1045)..(1045): Selenocysteine
  MOD_RES (1049)..(1049): Selenocysteine
  MOD_RES (1054)..(1054): Selenocysteine
  MOD_RES (1164)..(1164): Selenocysteine
  MOD_RES (1173)..(1173): Selenocysteine
  MOD_RES (1191)..(1191): Selenocysteine
  MOD_RES (1231)..(1231): Selenocysteine
  MOD_RES (1234)..(1234): Selenocysteine
  MOD_RES (1255)..(1255): Selenocysteine
  MOD_RES (1289)..(1289): Selenocysteine
MKGGDRAYXRGPSLGWLFAKCCCCFPCRDAYSHSSSENGGKSESVANLQAQPSLNSIHSSPGPKRSXNXLKKWLXSPVRRLNSGKADGNIKKQKKVRDGRKSFDLGSPKPGDEXXPQGDSADEKSKKGWGEDEPDEESHXPLPPPMKIFDNDPXQDEMSSSLLAARQASXEVPXAADLVNAIEKLVKNKLSLEGSSYRGSLKDPAGCLNEGMAPPXPPKNPEEEQKAKALRGRMFVLNELVQXEKDYVKDLGIVVEGFMKRIEEKGVPEDMRGKDKIVFGNIHQIYDWHKDFFLAELEKCIQEQDRLAQLFIKHERKLHIYVWYCQNKPRSEYIVAEYDAYFEEVKQEINQRLXLSDFLIKPIQRIXKYQLLLKDFLRYSEKAGLECSDIEKAVELMCLVPKRCNDMMNLGRLQGFEGXLXAQGKLLQQDXFYVIELDAGMQSRXKERRVFLFEQIVIFSELLRKGSLXPGYMFKRSIKMNYLVLEENVDNDPCKFALMNREXSERVVLQAANADIQQAWVQDINQVLEXQRDFLNALQSPIEYQRKERSXAVMRSQPARLPQASPRPYSSVPAGSEKPPKGSSYNPPLPPLKISXSNGSPGFEYHQPGDKFEASKQNDLGGCNGXSSMAVIKDYYALKENEICVSQGEVVQVLAVNQQNMCLVYQPASDHSPAAEGWVPGSILAPLXKAXAAESSDGSIKKSCSWHXLRMRKRAEVENXGKNEAXGPRKPKDILGNKVSVKEXNSSEESECDDLDPNXSMEILNPNFIQEVAPEFLVPLVDVXCLLGDXVILQCKVCGRPKPXIXWKGPDQNILDXDNSSAXYXVSSCDSGEIXLKICNLMPQDSGIYXCIAXNDHGXXSXSAXVKVQGVPAAPNRPIAQERSCXSVILRWLPPSSXGNCXISGYXVEYREEGSQIWQQSVASXLDXYLVIEDLSPGCPYQFRVSASNPWGISLPSEPSEFVRLPEYDAAADGAXISWKENFDSAYXELNEIGRGRFSIVKKCIHKAXRKDVAVKFVSKKMKKKEQAAHEAALLQHLQHPQYIXLHDXYESPXSYILILELMDDGRLLDYLMNHDELMEEKVAFYIRDIMEALQYLHNCRVAHLDIKPENLLIDLRIPVPRVKLIDLEDAVQISGHFHIHHLLGNPEFAAPEVIQGIPVSLGXDIWSIGVLXYVMLSGVSPFLDESKEEXCINVCRVDFSFPHEYFCGVSNAARDFINVILQEDFRRRPXAAXCLQHPWLQPHNGSYSKIPLDXSRLACFIERRKHQNDVRPIPNVKSYIVNRVNQGX

SEQ ID NO: 14169 - protein, 1654 aa, Homo sapiens
  MOD_RES (2)..(2): Selenocysteine
  MOD_RES (59)..(59): Selenocysteine
  MOD_RES (79)..(79): Selenocysteine
  MOD_RES (95)..(95): Selenocysteine
  MOD_RES (114)..(114): Selenocysteine
  MOD_RES (140)..(140): Selenocysteine
  MOD_RES (151)..(151): Selenocysteine
  MOD_RES (160)..(160): Selenocysteine
  MOD_RES (169)..(169): Selenocysteine
  MOD_RES (231)..(231): Selenocysteine
  MOD_RES (282)..(282): Selenocysteine
  MOD_RES (291)..(291): Selenocysteine
  MOD_RES (338)..(338): Selenocysteine
  MOD_RES (352)..(352): Selenocysteine
  MOD_RES (394)..(394): Selenocysteine
  MOD_RES (412)..(412): Selenocysteine
  MOD_RES (459)..(459): Selenocysteine
  MOD_RES (465)..(465): Selenocysteine
  MOD_RES (469)..(469): Selenocysteine
  MOD_RES (495)..(495): Selenocysteine
  MOD_RES (497)..(497): Selenocysteine
  MOD_RES (564)..(564): Selenocysteine
  MOD_RES (590)..(590): Selenocysteine
  MOD_RES (592)..(592): Selenocysteine
  MOD_RES (607)..(607): Selenocysteine
  MOD_RES (648)..(648): Selenocysteine
  MOD_RES (650)..(650): Selenocysteine
  MOD_RES (655)..(655): Selenocysteine
  MOD_RES (688)..(688): Selenocysteine
  MOD_RES (690)..(690): Selenocysteine
  MOD_RES (694)..(694): Selenocysteine
  MOD_RES (731)..(731): Selenocysteine
  MOD_RES (778)..(778): Selenocysteine
  MOD_RES (782)..(782): Selenocysteine
  MOD_RES (801)..(801): Selenocysteine
  MOD_RES (805)..(805): Selenocysteine
  MOD_RES (815)..(815): Selenocysteine
  MOD_RES (825)..(825): Selenocysteine
  MOD_RES (840)..(840): Selenocysteine
  MOD_RES (882)..(882): Selenocysteine
  MOD_RES (943)..(943): Selenocysteine
  MOD_RES (1002)..(1002): Selenocysteine
  MOD_RES (1058)..(1058): Selenocysteine
  MOD_RES (1085)..(1085): Selenocysteine
  MOD_RES (1111)..(1111): Selenocysteine
  MOD_RES (1140)..(1140): Selenocysteine
  MOD_RES (1147)..(1147): Selenocysteine
  MOD_RES (1149)..(1149): Selenocysteine
  MOD_RES (1151)..(1151): Selenocysteine
  MOD_RES (1154)..(1155): Selenocysteine
  MOD_RES (1158)..(1158): Selenocysteine
  MOD_RES (1175)..(1175): Selenocysteine
  MOD_RES (1198)..(1198): Selenocysteine
  MOD_RES (1205)..(1206): Selenocysteine
  MOD_RES (1233)..(1233): Selenocysteine
  MOD_RES (1283)..(1283): Selenocysteine
  MOD_RES (1297)..(1297): Selenocysteine
  MOD_RES (1303)..(1303): Selenocysteine
  MOD_RES (1355)..(1355): Selenocysteine
  MOD_RES (1365)..(1365): Selenocysteine
  MOD_RES (1383)..(1383): Selenocysteine
  MOD_RES (1410)..(1410): Selenocysteine
  MOD_RES (1421)..(1421): Selenocysteine
  MOD_RES (1509)..(1509): Selenocysteine
  MOD_RES (1519)..(1519): Selenocysteine
  MOD_RES (1525)..(1525): Selenocysteine
  MOD_RES (1542)..(1542): Selenocysteine
  MOD_RES (1549)..(1549): Selenocysteine
  MOD_RES (1558)..(1558): Selenocysteine
  MOD_RES (1590)..(1590): Selenocysteine
  MOD_RES (1618)..(1618): Selenocysteine
  MOD_RES (1625)..(1625): Selenocysteine
  MOD_RES (1629)..(1629): Selenocysteine
  MOD_RES (1652)..(1652): Selenocysteine
MXDRFWDQWYLWYLRLLRLLDRGSFRNDGLKASDVLPILKEKVAFVSGGRDKRGGPILXFPARSNHDRIRQEDLRKLVXYLASVPSEDVCKRGFXVIIDMRGSKWDLIKPLLKXLQEAFPAEIHVALIIKPDNFWQKQKXNFGSSKFIFEXSMVSVEGLXKLVDPSQLXEEFDGSLDYNHEEWIELRLSLEEFFNSAVHLLSRLEDLQEMLARKEFPVDVEGSRRLIDEHXQLKKKVLKAPVEELDREGQRLLQCIRCSDGFSGRNCIPGSADFQSLVPKIXSLLDKLHSXRQHLHQMWHVRKLKLDQCFQLRLFEQDAEKMFDWISHNKELFLQSHXEIGVSYQYALDLQXQHNHFAMNSMNAYVNINRIMSVASRLSEAGHYASQQIKQISXQLDQEWKSFAAALDERSXILAMSAVFHQKAEQFLSGVDAWCKMCSEGGLPSEMQDLELAIHHHQXLYEQVXQAYXEVSQDGKALLDVLQRPLSPGNSESLXAXANYSKAVHQVLDVVHEVLHHQRRLESIWQHRKVRLHQRLQLCVFQQDVQQVLDWIENHGEAFLSKHXGVGKSLHRARALQKRHDDFEEVAQNXYXNADKLLEAAEQLAQXGECDPEEIYKAARHLEVRIQDFVRRVEQRKLLLDMSVSFHXHXKELWXWMEDLQKEMLEDVCADSVDAVQELIKQFQQQQXAXLDAXLNVIKEGEDLIQQLRSAPPSLGEPSEARDSAVSNNKXPHSSSISHIESVLQQLDDAQVQMEELFHERKIKLDIFLQLRIFEQYXIEVXAELDAWNEDLLRQMNDFNXEDLXLAEQRLQRHXERKLAMNNMXFEVIQQGQDLHQYIXEVQASGIELICEKDIDLAAQVQELLEFLHEKQHELELNAEQXHKRLEQCLQLRHLQAEVKQVLGWIRNGESMLNASLVNASSLSEAEQLQREHEQFQLAIEKXHQSALQVQQKAEVLLQAGHYDADAIRECAEKVALHWQQLMLKMEDRLKLVNASVAFYKXSEQVCSVLESLEQEYRRDEDWCGGRDKLGPAAEIDHVIPLISKHLEQKEAFLKACXLARRNAEVFLKYIHRNNVSMPSVASHXRGPEQQVKAILSELLQRENRVLHFWXLKKRRLDQCQQYVVFERSAKQALDWIQEXGEFYLSXHXSXGEXXEEXQELLKEYGEFRVPAKQXKEKVKLLIQLADSFVEKGHIHAXEIRKWVXXVDKHYRDFSLRMGKYRYSLEKALGVNXEDNKDLELDIIPASLSDREVKLRDANHEVNEEKRKSARKKEFIMAELLQXEKAYVRDLHECLEXYLWEMXSGVEEIPPGILNKEHIIFGNIQEIYDFHNNIFLKELEKYEQLPEDVGHCFVXWADKFQMYVXYCKNKPDSNQLILEHAGXFFDEIQQRHGLANSISSYLIKPVQRIXKYQLLLKELLXCCEEGKGELKDGLEVMLSVPKKANDAMHVSMLEGFDENLDVQGELILQDAFQVWDPKSLIRKGRERHLFLFEISLVFSKEIKDSSGHXKYVYKNKLLXSELGVXEHVEGDPCKFALWSGRXPSSDNKXVLKASNIEXKQEWIKNIREVIQERIIHLKGALKEPLQLPKXPAKQRNNSKRDGVEDIDSQGDGSSQPDXISIASRXSQNXVDSDKDGNLVPRWHLGPGDPFSXYV

SEQ ID NO: 14170 - protein, 1663 aa, Homo sapiens
  MOD_RES (2)..(2): Selenocysteine
  MOD_RES (59)..(59): Selenocysteine
  MOD_RES (79)..(79): Selenocysteine
  MOD_RES (95)..(95): Selenocysteine
  MOD_RES (114)..(114): Selenocysteine
  MOD_RES (140)..(140): Selenocysteine
  MOD_RES (151)..(151): Selenocysteine
  MOD_RES (160)..(160): Selenocysteine
  MOD_RES (169)..(169): Selenocysteine
  MOD_RES (231)..(231): Selenocysteine
  MOD_RES (282)..(282): Selenocysteine
  MOD_RES (291)..(291): Selenocysteine
  MOD_RES (338)..(338): Selenocysteine
  MOD_RES (352)..(352): Selenocysteine
  MOD_RES (394)..(394): Selenocysteine
  MOD_RES (412)..(412): Selenocysteine
  MOD_RES (459)..(459): Selenocysteine
  MOD_RES (465)..(465): Selenocysteine
  MOD_RES (469)..(469): Selenocysteine
  MOD_RES (495)..(495): Selenocysteine
  MOD_RES (497)..(497): Selenocysteine
  MOD_RES (564)..(564): Selenocysteine
  MOD_RES (590)..(590): Selenocysteine
  MOD_RES (592)..(592): Selenocysteine
  MOD_RES (607)..(607): Selenocysteine
  MOD_RES (648)..(648): Selenocysteine
  MOD_RES (650)..(650): Selenocysteine
  MOD_RES (655)..(655): Selenocysteine
  MOD_RES (688)..(688): Selenocysteine
  MOD_RES (690)..(690): Selenocysteine
  MOD_RES (694)..(694): Selenocysteine
  MOD_RES (731)..(731): Selenocysteine
  MOD_RES (778)..(778): Selenocysteine
  MOD_RES (782)..(782): Selenocysteine
  MOD_RES (801)..(801): Selenocysteine
  MOD_RES (805)..(805): Selenocysteine
  MOD_RES (815)..(815): Selenocysteine
  MOD_RES (825)..(825): Selenocysteine
  MOD_RES (840)..(840): Selenocysteine
  MOD_RES (882)..(882): Selenocysteine
  MOD_RES (947)..(947): Selenocysteine
  MOD_RES (952)..(952): Selenocysteine
  MOD_RES (1011)..(1011): Selenocysteine
  MOD_RES (1067)..(1067): Selenocysteine
  MOD_RES (1094)..(1094): Selenocysteine
  MOD_RES (1120)..(1120): Selenocysteine
  MOD_RES (1149)..(1149): Selenocysteine
  MOD_RES (1156)..(1156): Selenocysteine
  MOD_RES (1158)..(1158): Selenocysteine
  MOD_RES (1160)..(1160): Selenocysteine
  MOD_RES (1163)..(1164): Selenocysteine
  MOD_RES (1167)..(1167): Selenocysteine
  MOD_RES (1184)..(1184): Selenocysteine
  MOD_RES (1207)..(1207): Selenocysteine
  MOD_RES (1214)..(1215): Selenocysteine
  MOD_RES (1242)..(1242): Selenocysteine
  MOD_RES (1292)..(1292): Selenocysteine
  MOD_RES (1306)..(1306): Selenocysteine
  MOD_RES (1312)..(1312): Selenocysteine
  MOD_RES (1364)..(1364): Selenocysteine
  MOD_RES (1374)..(1374): Selenocysteine
  MOD_RES (1392)..(1392): Selenocysteine
  MOD_RES (1419)..(1419): Selenocysteine
  MOD_RES (1430)..(1430): Selenocysteine
  MOD_RES (1518)..(1518): Selenocysteine
  MOD_RES (1528)..(1528): Selenocysteine
  MOD_RES (1534)..(1534): Selenocysteine
  MOD_RES (1551)..(1551): Selenocysteine
  MOD_RES (1558)..(1558): Selenocysteine
  MOD_RES (1567)..(1567): Selenocysteine
  MOD_RES (1599)..(1599): Selenocysteine
  MOD_RES (1627)..(1627): Selenocysteine
  MOD_RES (1634)..(1634): Selenocysteine
  MOD_RES (1638)..(1638): Selenocysteine
  MOD_RES (1661)..(1661): Selenocysteine
MXDRFWDQWYLWYLRLLRLLDRGSFRNDGLKASDVLPILKEKVAFVSGGRDKRGGPILXFPARSNHDRIRQEDLRKLVXYLASVPSEDVCKRGFXVIIDMRGSKWDLIKPLLKXLQEAFPAEIHVALIIKPDNFWQKQKXNFGSSKFIFEXSMVSVEGLXKLVDPSQLXEEFDGSLDYNHEEWIELRLSLEEFFNSAVHLLSRLEDLQEMLARKEFPVDVEGSRRLIDEHXQLKKKVLKAPVEELDREGQRLLQCIRCSDGFSGRNCIPGSADFQSLVPKIXSLLDKLHSXRQHLHQMWHVRKLKLDQCFQLRLFEQDAEKMFDWISHNKELFLQSHXEIGVSYQYALDLQXQHNHFAMNSMNAYVNINRIMSVASRLSEAGHYASQQIKQISXQLDQEWKSFAAALDERSXILAMSAVFHQKAEQFLSGVDAWCKMCSEGGLPSEMQDLELAIHHHQXLYEQVXQAYXEVSQDGKALLDVLQRPLSPGNSESLXAXANYSKAVHQVLDVVHEVLHHQRRLESIWQHRKVRLHQRLQLCVFQQDVQQVLDWIENHGEAFLSKHXGVGKSLHRARALQKRHDDFEEVAQNXYXNADKLLEAAEQLAQXGECDPEEIYKAARHLEVRIQDFVRRVEQRKLLLDMSVSFHXHXKELWXWMEDLQKEMLEDVCADSVDAVQELIKQFQQQQXAXLDAXLNVIKEGEDLIQQLRSAPPSLGEPSEARDSAVSNNKXPHSSSISHIESVLQQLDDAQVQMEELFHERKIKLDIFLQLRIFEQYXIEVXAELDAWNEDLLRQMNDFNXEDLXLAEQRLQRHXERKLAMNNMXFEVIQQGQDLHQYIXEVQASGIELICEKDIDLAAQVQELLEFLHEKQHELELNAEQXHKRLEQCLQLRHLQAEVKQVLGWIRNGESMLNASLVNASSLSEAEQLQREHEQFQLAIESLFHAXSLQKXHQSALQVQQKAEVLLQAGHYDADAIRECAEKVALHWQQLMLKMEDRLKLVNASVAFYKXSEQVCSVLESLEQEYRRDEDWCGGRDKLGPAAEIDHVIPLISKHLEQKEAFLKACXLARRNAEVFLKYIHRNNVSMPSVASHXRGPEQQVKAILSELLQRENRVLHFWXLKKRRLDQCQQYVVFERSAKQALDWIQEXGEFYLSXHXSXGEXXEEXQELLKEYGEFRVPAKQXKEKVKLLIQLADSFVEKGHIHAXEIRKWVXXVDKHYRDFSLRMGKYRYSLEKALGVNXEDNKDLELDIIPASLSDREVKLRDANHEVNEEKRKSARKKEFIMAELLQXEKAYVRDLHECLEXYLWEMXSGVEEIPPGILNKEHIIFGNIQEIYDFHNNIFLKELEKYEQLPEDVGHCFVXWADKFQMYVXYCKNKPDSNQLILEHAGXFFDEIQQRHGLANSISSYLIKPVQRIXKYQLLLKELLXCCEEGKGELKDGLEVMLSVPKKANDAMHVSMLEGFDENLDVQGELILQDAFQVWDPKSLIRKGRERHLFLFEISLVFSKEIKDSSGHXKYVYKNKLLXSELGVXEHVEGDPCKFALWSGRXPSSDNKXVLKASNIEXKQEWIKNIREVIQERIIHLKGALKEPLQLPKXPAKQRNNSKRDGVEDIDSQGDGSSQPDXISIASRXSQNXVDSDKDGNLVPRWHLGPGDPFSXYV

SEQ ID NO: 14171 - protein, 2986 aa, Homo sapiens
  MOD_RES (2)..(2): Selenocysteine
  MOD_RES (59)..(59): Selenocysteine
  MOD_RES (79)..(79): Selenocysteine
  MOD_RES (95)..(95): Selenocysteine
  MOD_RES (114)..(114): Selenocysteine
  MOD_RES (140)..(140): Selenocysteine
  MOD_RES (151)..(151): Selenocysteine
  MOD_RES (160)..(160): Selenocysteine
  MOD_RES (169)..(169): Selenocysteine
  MOD_RES (231)..(231): Selenocysteine
  MOD_RES (282)..(282): Selenocysteine
  MOD_RES (291)..(291): Selenocysteine
  MOD_RES (338)..(338): Selenocysteine
  MOD_RES (352)..(352): Selenocysteine
  MOD_RES (394)..(394): Selenocysteine
  MOD_RES (412)..(412): Selenocysteine
  MOD_RES (459)..(459): Selenocysteine
  MOD_RES (465)..(465): Selenocysteine
  MOD_RES (469)..(469): Selenocysteine
  MOD_RES (495)..(495): Selenocysteine
  MOD_RES (497)..(497): Selenocysteine
  MOD_RES (564)..(564): Selenocysteine
  MOD_RES (590)..(590): Selenocysteine
  MOD_RES (592)..(592): Selenocysteine
  MOD_RES (607)..(607): Selenocysteine
  MOD_RES (648)..(648): Selenocysteine
  MOD_RES (650)..(650): Selenocysteine
  MOD_RES (655)..(655): Selenocysteine
  MOD_RES (688)..(688): Selenocysteine
  MOD_RES (690)..(690): Selenocysteine
  MOD_RES (694)..(694): Selenocysteine
  MOD_RES (731)..(731): Selenocysteine
  MOD_RES (778)..(778): Selenocysteine
  MOD_RES (782)..(782): Selenocysteine
  MOD_RES (801)..(801): Selenocysteine
  MOD_RES (805)..(805): Selenocysteine
  MOD_RES (815)..(815): Selenocysteine
  MOD_RES (825)..(825): Selenocysteine
  MOD_RES (840)..(840): Selenocysteine
  MOD_RES (882)..(882): Selenocysteine
  MOD_RES (947)..(947): Selenocysteine
  MOD_RES (952)..(952): Selenocysteine
  MOD_RES (1011)..(1011): Selenocysteine
  MOD_RES (1067)..(1067): Selenocysteine
  MOD_RES (1094)..(1094): Selenocysteine
  MOD_RES (1120)..(1120): Selenocysteine
  MOD_RES (1149)..(1149): Selenocysteine
  MOD_RES (1156)..(1156): Selenocysteine
  MOD_RES (1158)..(1158): Selenocysteine
  MOD_RES (1160)..(1160): Selenocysteine
  MOD_RES (1163)..(1164): Selenocysteine
  MOD_RES (1167)..(1167): Selenocysteine
  MOD_RES (1184)..(1184): Selenocysteine
  MOD_RES (1207)..(1207): Selenocysteine
  MOD_RES (1214)..(1215): Selenocysteine
  MOD_RES (1242)..(1242): Selenocysteine
  MOD_RES (1292)..(1292): Selenocysteine
  MOD_RES (1306)..(1306): Selenocysteine
  MOD_RES (1312)..(1312): Selenocysteine
  MOD_RES (1364)..(1364): Selenocysteine
  MOD_RES (1374)..(1374): Selenocysteine
  MOD_RES (1392)..(1392): Selenocysteine
  MOD_RES (1419)..(1419): Selenocysteine
  MOD_RES (1430)..(1430): Selenocysteine
  MOD_RES (1518)..(1518): Selenocysteine
  MOD_RES (1528)..(1528): Selenocysteine
  MOD_RES (1534)..(1534): Selenocysteine
  MOD_RES (1551)..(1551): Selenocysteine
  MOD_RES (1558)..(1558): Selenocysteine
  MOD_RES (1567)..(1567): Selenocysteine
  MOD_RES (1599)..(1599): Selenocysteine
  MOD_RES (1627)..(1627): Selenocysteine
  MOD_RES (1634)..(1634): Selenocysteine
  MOD_RES (1638)..(1638): Selenocysteine
  MOD_RES (1651)..(1651): Selenocysteine
  MOD_RES (1666)..(1666): Selenocysteine
  MOD_RES (1672)..(1672): Selenocysteine
  MOD_RES (1690)..(1691): Selenocysteine
  MOD_RES (1764)..(1764): Selenocysteine
  MOD_RES (1766)..(1766): Selenocysteine
  MOD_RES (1772)..(1772): Selenocysteine
  MOD_RES (1811)..(1812): Selenocysteine
  MOD_RES (1837)..(1837): Selenocysteine
  MOD_RES (1851)..(1851): Selenocysteine
  MOD_RES (1867)..(1867): Selenocysteine
  MOD_RES (1871)..(1871): Selenocysteine
  MOD_RES (1913)..(1913): Selenocysteine
  MOD_RES (1940)..(1940): Selenocysteine
  MOD_RES (2051)..(2051): Selenocysteine
  MOD_RES (2064)..(2064): Selenocysteine
  MOD_RES (2116)..(2116): Selenocysteine
  MOD_RES (2118)..(2118): Selenocysteine
  MOD_RES (2128)..(2128): Selenocysteine
  MOD_RES (2142)..(2142): Selenocysteine
  MOD_RES (2166)..(2166): Selenocysteine
  MOD_RES (2200)..(2200): Selenocysteine
  MOD_RES (2227)..(2227): Selenocysteine
  MOD_RES (2248)..(2248): Selenocysteine
  MOD_RES (2293)..(2293): Selenocysteine
  MOD_RES (2323)..(2323): Selenocysteine
  MOD_RES (2385)..(2385): Selenocysteine
  MOD_RES (2388)..(2388): Selenocysteine
  MOD_RES (2405)..(2405): Selenocysteine
  MOD_RES (2417)..(2417): Selenocysteine
  MOD_RES (2423)..(2423): Selenocysteine
  MOD_RES (2441)..(2441): Selenocysteine
  MOD_RES (2456)..(2456): Selenocysteine
  MOD_RES (2481)..(2481): Selenocysteine
  MOD_RES (2487)..(2487): Selenocysteine
  MOD_RES (2501)..(2501): Selenocysteine
  MOD_RES (2503)..(2503): Selenocysteine
  MOD_RES (2514)..(2514): Selenocysteine
  MOD_RES (2520)..(2520): Selenocysteine
  MOD_RES (2522)..(2522): Selenocysteine
  MOD_RES (2532)..(2532): Selenocysteine
  MOD_RES (2547)..(2547): Selenocysteine
  MOD_RES (2551)..(2551): Selenocysteine
  MOD_RES (2556)..(2557): Selenocysteine
  MOD_RES (2559)..(2559): Selenocysteine
  MOD_RES (2562)..(2562): Selenocysteine
  MOD_RES (2583)..(2583): Selenocysteine
  MOD_RES (2595)..(2595): Selenocysteine
  MOD_RES (2599)..(2599): Selenocysteine
  MOD_RES (2604)..(2604): Selenocysteine
  MOD_RES (2622)..(2622): Selenocysteine
  MOD_RES (2625)..(2625): Selenocysteine
  MOD_RES (2673)..(2673): Selenocysteine
  MOD_RES (2685)..(2685): Selenocysteine
  MOD_RES (2706)..(2706): Selenocysteine
  MOD_RES (2742)..(2742): Selenocysteine
  MOD_RES (2746)..(2746): Selenocysteine
  MOD_RES (2751)..(2751): Selenocysteine
  MOD_RES (2861)..(2861): Selenocysteine
  MOD_RES (2870)..(2870): Selenocysteine
  MOD_RES (2888)..(2888): Selenocysteine
  MOD_RES (2928)..(2928): Selenocysteine
  MOD_RES (2931)..(2931): Selenocysteine
  MOD_RES (2952)..(2952): Selenocysteine
  MOD_RES (2986)..(2986): Selenocysteine
MXDRFWDQWYLWYLRLLRLLDRGSFRNDGLKASDVLPILKEKVAFVSGGRDKRGGPILXFPARSNHDRIRQEDLRKLVXYLASVPSEDVCKRGFXVIIDMRGSKWDLIKPLLKXLQEAFPAEIHVALIIKPDNFWQKQKXNFGSSKFIFEXSMVSVEGLXKLVDPSQLXEEFDGSLDYNHEEWIELRLSLEEFFNSAVHLLSRLEDLQEMLARKEFPVDVEGSRRLIDEHXQLKKKVLKAPVEELDREGQRLLQCIRCSDGFSGRNCIPGSADFQSLVPKIXSLLDKLHSXRQHLHQMWHVRKLKLDQCFQLRLFEQDAEKMFDWISHNKELFLQSHXEIGVSYQYALDLQXQHNHFAMNSMNAYVNINRIMSVASRLSEAGHYASQQIKQISXQLDQEWKSFAAALDERSXILAMSAVFHQKAEQFLSGVDAWCKMCSEGGLPSEMQDLELAIHHHQXLYEQVXQAYXEVSQDGKALLDVLQRPLSPGNSESLXAXANYSKAVHQVLDVVHEVLHHQRRLESIWQHRKVRLHQRLQLCVFQQDVQQVLDWIENHGEAFLSKHXGVGKSLHRARALQKRHDDFEEVAQNXYXNADKLLEAAEQLAQXGECDPEEIYKAARHLEVRIQDFVRRVEQRKLLLDMSVSFHXHXKELWXWMEDLQKEMLEDVCADSVDAVQELIKQFQQQQXAXLDAXLNVIKEGEDLIQQLRSAPPSLGEPSEARDSAVSNNKXPHSSSISHIESVLQQLDDAQVQMEELFHERKIKLDIFLQLRIFEQYXIEVXAELDAWNEDLLRQMNDFNXEDLXLAEQRLQRHXERKLAMNNMXFEVIQQGQDLHQYIXEVQASGIELICEKDIDLAAQVQELLEFLHEKQHELELNAEQXHKRLEQCLQLRHLQAEVKQVLGWIRNGESMLNASLVNASSLSEAEQLQREHEQFQLAIESLFHAXSLQKXHQSALQVQQKAEVLLQAGHYDADAIRECAEKVALHWQQLMLKMEDRLKLVNASVAFYKXSEQVCSVLESLEQEYRRDEDWCGGRDKLGPAAEIDHVIPLISKHLEQKEAFLKACXLARRNAEVFLKYIHRNNVSMPSVASHXRGPEQQVKAILSELLQRENRVLHFWXLKKRRLDQCQQYVVFERSAKQALDWIQEXGEFYLSXHXSXGEXXEEXQELLKEYGEFRVPAKQXKEKVKLLIQLADSFVEKGHIHAXEIRKWVXXVDKHYRDFSLRMGKYRYSLEKALGVNXEDNKDLELDIIPASLSDREVKLRDANHEVNEEKRKSARKKEFIMAELLQXEKAYVRDLHECLEXYLWEMXSGVEEIPPGILNKEHIIFGNIQEIYDFHNNIFLKELEKYEQLPEDVGHCFVXWADKFQMYVXYCKNKPDSNQLILEHAGXFFDEIQQRHGLANSISSYLIKPVQRIXKYQLLLKELLXCCEEGKGELKDGLEVMLSVPKKANDAMHVSMLEGFDENLDVQGELILQDAFQVWDPKSLIRKGRERHLFLFEISLVFSKEIKDSSGHXKYVYKNKLLXSELGVXEHVEGDPCKFALWSGRXPSSDNKXVLKASNIEXKQEWIKNIREVIQERIIHLKGALKEPLQLPKXPAKQRNNSKRDGVEDIDSQGDGSSQPDXISIASRXSQNXVDSDKLSGGCELXVVLQDFSAGHSSELXIQVGQXVELLERPSERPGWCLVRXXERSPPLEGLVPSSALCISHSRSSVEMDCFFPLVKDAYSHSSSENGGKSESVANLQAQPSLNSIHSSPGPKRSXNXLKKWLXSPVRRLNSGKADGNIKKQKKVRDGRKSFDLGSPKPGDEXXPQGDSADEKSKKGWGEDEPDEESHXPLPPPMKIFDNDPXQDEMSSSLLAARQASXEVPXAADLVNAIEKLVKNKLSLEGSSYRGSLKDPAGCLNEGMAPPXPPKNPEEEQKAKALRGRMFVLNELVQXEKDYVKDLGIVVEGFMKRIEEKGVPEDMRGKDKIVFGNIHQIYDWHKDFFLAELEKCIQEQDRLAQLFIKHERKLHIYVWYCQNKPRSEYIVAEYDAYFEEVKQEINQRLXLSDFLIKPIQRIXKYQLLLKDFLRYSEKAGLECSDIEKAVELMCLVPKRCNDMMNLGRLQGFEGXLXAQGKLLQQDXFYVIELDAGMQSRXKERRVFLFEQIVIFSELLRKGSLXPGYMFKRSIKMNYLVLEENVDNDPCKFALMNREXSERVVLQAANADIQQAWVQDINQVLEXQRDFLNALQSPIEYQRKERSXAVMRSQPARLPQASPRPYSSVPAGSEKPPKGSSYNPPLPPLKISXSNGSPGFEYHQPGDKFEASKQNDLGGCNGXSSMAVIKDYYALKENEICVSQGEVVQVLAVNQQNMCLVYQPASDHSPAAEGWVPGSILAPLXKAXAAESSDGSIKKSCSWHXLRMRKRAEVENXGKNEAXGPRKPKDILGNKVSVKEXNSSEESECDDLDPNXSMEILNPNFIQEVAPEFLVPLVDVXCLLGDXVILQCKVCGRPKPXIXWKGPDQNILDXDNSSAXYXVSSCDSGEIXLKICNLMPQDSGIYXCIAXNDHGXXSXSAXVKVQGVPAAPNRPIAQERSCXSVILRWLPPSSXGNCXISGYXVEYREEGSQIWQQSVASXLDXYLVIEDLSPGCPYQFRVSASNPWGISLPSEPSEFVRLPEYDAAADGAXISWKENFDSAYXELNEIGRGRFSIVKKCIHKAXRKDVAVKFVSKKMKKKEQAAHEAALLQHLQHPQYIXLHDXYESPXSYILILELMDDGRLLDYLMNHDELMEEKVAFYIRDIMEALQYLHNCRVAHLDIKPENLLIDLRIPVPRVKLIDLEDAVQISGHFHIHHLLGNPEFAAPEVIQGIPVSLGXDIWSIGVLXYVMLSGVSPFLDESKEEXCINVCRVDFSFPHEYFCGVSNAARDFINVILQEDFRRRPXAAXCLQHPWLQPHNGSYSKIPLDXSRLACFIERRKHQNDVRPIPNVKSYIVNRVNQGX

SEQ ID NO: 14172 - protein, 53 aa, Homo sapiens
  MOD_RES (2)..(2): Selenocysteine
  MOD_RES (31)..(31): Selenocysteine
MXDRFWDQWYLWYLRLLRLLDRVPSMLLQMXGFPFYRLSLHSVDCFPCCAEAF

SEQ ID NO: 14173 - protein, 215 aa, Homo sapiens
  MOD_RES (40)..(40): Selenocysteine
  MOD_RES (66)..(66): Selenocysteine
  MOD_RES (68)..(68): Selenocysteine
  MOD_RES (83)..(83): Selenocysteine
  MOD_RES (124)..(124): Selenocysteine
  MOD_RES (126)..(126): Selenocysteine
  MOD_RES (131)..(131): Selenocysteine
  MOD_RES (164)..(164): Selenocysteine
  MOD_RES (166)..(166): Selenocysteine
  MOD_RES (170)..(170): Selenocysteine
WQHRKVRLHQRLQLCVFQQDVQQVLDWIENHGEAFLSKHXGVGKSLHRARALQKRHDDFEEVAQNXYXNADKLLEAAEQLAQXGECDPEEIYKAARHLEVRIQDFVRRVEQRKLLLDMSVSFHXHXKELWXWMEDLQKEMLEDVCADSVDAVQELIKQFQQQQXAXLDAXLNVIKEGEDLIQQLRSAPPSLGEPSEARSAWAELSSGKCLGLDVR

SEQ ID NO: 14174 - protein, 268 aa, Homo sapiens
  MOD_RES (1)..(1): Any amino acid
  MOD_RES (26)..(26): Selenocysteine
  MOD_RES (32)..(32): Selenocysteine
  MOD_RES (47)..(47): Selenocysteine
  MOD_RES (87)..(87): Selenocysteine
  MOD_RES (107)..(107): Selenocysteine
  MOD_RES (123)..(123): Selenocysteine
  MOD_RES (142)..(142): Selenocysteine
  MOD_RES (168)..(168): Selenocysteine
  MOD_RES (179)..(179): Selenocysteine
  MOD_RES (188)..(188): Selenocysteine
  MOD_RES (197)..(197): Selenocysteine
  MOD_RES (259)..(259): Selenocysteine
XCILCCQCSCCQNWIQPIVPDKIRAXSMENIXSSIFDVISKGKVAPXFSYWSFRNDGLKASDVLPILKEKVAFVSGGRDKRGGPILXFPARSNHDRIRQEDLRKLVXYLASVPSEDVCKRGFXVIIDMRGSKWDLIKPLLKXLQEAFPAEIHVALIIKPDNFWQKQKXNFGSSKFIFEXSMVSVEGLXKLVDPSQLXEEFDGSLDYNHEEWIELRLSLEEFFNSAVHLLSRLEDLQEMLARKEFPVDVEGSRRLIDEHXQLKKKVLKA

SEQ ID NO: 14175 - protein, 2955 aa, Homo sapiens
  MOD_RES (1)..(1): Any amino acid
  MOD_RES (37)..(37): Selenocysteine
  MOD_RES (57)..(57): Selenocysteine
  MOD_RES (73)..(73): Selenocysteine
  MOD_RES (92)..(92): Selenocysteine
  MOD_RES (118)..(118): Selenocysteine
  MOD_RES (129)..(129): Selenocysteine
  MOD_RES (138)..(138): Selenocysteine
  MOD_RES (147)..(147): Selenocysteine
  MOD_RES (209)..(209): Selenocysteine
  MOD_RES (260)..(260): Selenocysteine
  MOD_RES (269)..(269): Selenocysteine
  MOD_RES (316)..(316): Selenocysteine
  MOD_RES (330)..(330): Selenocysteine
  MOD_RES (372)..(372): Selenocysteine
  MOD_RES (390)..(390): Selenocysteine
  MOD_RES (437)..(437): Selenocysteine
  MOD_RES (443)..(443): Selenocysteine
  MOD_RES (447)..(447): Selenocysteine
  MOD_RES (473)..(473): Selenocysteine
  MOD_RES (475)..(475): Selenocysteine
  MOD_RES (542)..(542): Selenocysteine
  MOD_RES (568)..(568): Selenocysteine
  MOD_RES (570)..(570): Selenocysteine
  MOD_RES (585)..(585): Selenocysteine
  MOD_RES (626)..(626): Selenocysteine
  MOD_RES (628)..(628): Selenocysteine
  MOD_RES (633)..(633): Selenocysteine
  MOD_RES (666)..(666): Selenocysteine
  MOD_RES (668)..(668): Selenocysteine
  MOD_RES (672)..(672): Selenocysteine
  MOD_RES (709)..(709): Selenocysteine
  MOD_RES (756)..(756): Selenocysteine
  MOD_RES (760)..(760): Selenocysteine
  MOD_RES (779)..(779): Selenocysteine
  MOD_RES (783)..(783): Selenocysteine
  MOD_RES (793)..(793): Selenocysteine
  MOD_RES (803)..(803): Selenocysteine
  MOD_RES (818)..(818): Selenocysteine
  MOD_RES (860)..(860): Selenocysteine
  MOD_RES (921)..(921): Selenocysteine
  MOD_RES (980)..(980): Selenocysteine
  MOD_RES (1036)..(1036): Selenocysteine
  MOD_RES (1063)..(1063): Selenocysteine
  MOD_RES (1089)..(1089): Selenocysteine
  MOD_RES (1118)..(1118): Selenocysteine
  MOD_RES (1125)..(1125): Selenocysteine
  MOD_RES (1127)..(1127): Selenocysteine
  MOD_RES (1129)..(1129): Selenocysteine
  MOD_RES (1132)..(1133): Selenocysteine
  MOD_RES (1136)..(1136): Selenocysteine
  MOD_RES (1153)..(1153): Selenocysteine
  MOD_RES (1176)..(1176): Selenocysteine
  MOD_RES (1183)..(1184): Selenocysteine
  MOD_RES (1211)..(1211): Selenocysteine
  MOD_RES (1261)..(1261): Selenocysteine
  MOD_RES (1275)..(1275): Selenocysteine
  MOD_RES (1281)..(1281): Selenocysteine
  MOD_RES (1333)..(1333): Selenocysteine
  MOD_RES (1343)..(1343): Selenocysteine
  MOD_RES (1361)..(1361): Selenocysteine
  MOD_RES (1388)..(1388): Selenocysteine
  MOD_RES (1399)..(1399): Selenocysteine
  MOD_RES (1487)..(1487): Selenocysteine
  MOD_RES (1497)..(1497): Selenocysteine
  MOD_RES (1503)..(1503): Selenocysteine
  MOD_RES (1520)..(1520): Selenocysteine
  MOD_RES (1527)..(1527): Selenocysteine
  MOD_RES (1536)..(1536): Selenocysteine
  MOD_RES (1568)..(1568): Selenocysteine
  MOD_RES (1596)..(1596): Selenocysteine
  MOD_RES (1603)..(1603): Selenocysteine
  MOD_RES (1607)..(1607): Selenocysteine
  MOD_RES (1620)..(1620): Selenocysteine
  MOD_RES (1635)..(1635): Selenocysteine
  MOD_RES (1641)..(1641): Selenocysteine
  MOD_RES (1659)..(1660): Selenocysteine
  MOD_RES (1733)..(1733): Selenocysteine
  MOD_RES (1735)..(1735): Selenocysteine
  MOD_RES (1741)..(1741): Selenocysteine
  MOD_RES (1780)..(1781): Selenocysteine
  MOD_RES (1806)..(1806): Selenocysteine
  MOD_RES (1820)..(1820): Selenocysteine
  MOD_RES (1836)..(1836): Selenocysteine
  MOD_RES (1840)..(1840): Selenocysteine
  MOD_RES (1882)..(1882): Selenocysteine
  MOD_RES (1909)..(1909): Selenocysteine
  MOD_RES (2020)..(2020): Selenocysteine
  MOD_RES (2033)..(2033): Selenocysteine
  MOD_RES (2085)..(2085): Selenocysteine
  MOD_RES (2087)..(2087): Selenocysteine
  MOD_RES (2097)..(2097): Selenocysteine
  MOD_RES (2111)..(2111): Selenocysteine
  MOD_RES (2135)..(2135): Selenocysteine
  MOD_RES (2169)..(2169): Selenocysteine
  MOD_RES (2196)..(2196): Selenocysteine
  MOD_RES (2217)..(2217): Selenocysteine
  MOD_RES (2262)..(2262): Selenocysteine
  MOD_RES (2292)..(2292): Selenocysteine
  MOD_RES (2354)..(2354): Selenocysteine
  MOD_RES (2357)..(2357): Selenocysteine
  MOD_RES (2374)..(2374): Selenocysteine
  MOD_RES (2386)..(2386): Selenocysteine
  MOD_RES (2392)..(2392): Selenocysteine
  MOD_RES (2410)..(2410): Selenocysteine
  MOD_RES (2425)..(2425): Selenocysteine
  MOD_RES (2450)..(2450): Selenocysteine
  MOD_RES (2456)..(2456): Selenocysteine
  MOD_RES (2470)..(2470): Selenocysteine
  MOD_RES (2472)..(2472): Selenocysteine
  MOD_RES (2483)..(2483): Selenocysteine
  MOD_RES (2489)..(2489): Selenocysteine
  MOD_RES (2491)..(2491): Selenocysteine
  MOD_RES (2501)..(2501): Selenocysteine
  MOD_RES (2516)..(2516): Selenocysteine
  MOD_RES (2520)..(2520): Selenocysteine
  MOD_RES (2525)..(2526): Selenocysteine
  MOD_RES (2528)..(2528): Selenocysteine
  MOD_RES (2531)..(2531): Selenocysteine
  MOD_RES (2552)..(2552): Selenocysteine
  MOD_RES (2564)..(2564): Selenocysteine
  MOD_RES (2568)..(2568): Selenocysteine
  MOD_RES (2573)..(2573): Selenocysteine
  MOD_RES (2591)..(2591): Selenocysteine
  MOD_RES (2594)..(2594): Selenocysteine
  MOD_RES (2642)..(2642): Selenocysteine
  MOD_RES (2654)..(2654): Selenocysteine
  MOD_RES (2675)..(2675): Selenocysteine
  MOD_RES (2711)..(2711): Selenocysteine
  MOD_RES (2715)..(2715): Selenocysteine
  MOD_RES (2720)..(2720): Selenocysteine
  MOD_RES (2830)..(2830): Selenocysteine
  MOD_RES (2839)..(2839): Selenocysteine
  MOD_RES (2857)..(2857): Selenocysteine
  MOD_RES (2897)..(2897): Selenocysteine
  MOD_RES (2900)..(2900): Selenocysteine
  MOD_RES (2921)..(2921): Selenocysteine
  MOD_RES (2955)..(2955): Selenocysteine
XSFRNDGLKASDVLPILKEKVAFVSGGRDKRGGPILXFPARSNHDRIRQEDLRKLVXYLASVPSEDVCKRGFXVIIDMRGSKWDLIKPLLKXLQEAFPAEIHVALIIKPDNFWQKQKXNFGSSKFIFEXSMVSVEGLXKLVDPSQLXEEFDGSLDYNHEEWIELRLSLEEFFNSAVHLLSRLEDLQEMLARKEFPVDVEGSRRLIDEHXQLKKKVLKAPVEELDREGQRLLQCIRCSDGFSGRNCIPGSADFQSLVPKIXSLLDKLHSXRQHLHQMWHVRKLKLDQCFQLRLFEQDAEKMFDWISHNKELFLQSHXEIGVSYQYALDLQXQHNHFAMNSMNAYVNINRIMSVASRLSEAGHYASQQIKQISXQLDQEWKSFAAALDERSXILAMSAVFHQKAEQFLSGVDAWCKMCSEGGLPSEMQDLELAIHHHQXLYEQVXQAYXEVSQDGKALLDVLQRPLSPGNSESLXAXANYSKAVHQVLDVVHEVLHHQRRLESIWQHRKVRLHQRLQLCVFQQDVQQVLDWIENHGEAFLSKHXGVGKSLHRARALQKRHDDFEEVAQNXYXNADKLLEAAEQLAQXGECDPEEIYKAARHLEVRIQDFVRRVEQRKLLLDMSVSFHXHXKELWXWMEDLQKEMLEDVCADSVDAVQELIKQFQQQQXAXLDAXLNVIKEGEDLIQQLRSAPPSLGEPSEARDSAVSNNKXPHSSSISHIESVLQQLDDAQVQMEELFHERKIKLDIFLQLRIFEQYXIEVXAELDAWNEDLLRQMNDFNXEDLXLAEQRLQRHXERKLAMNNMXFEVIQQGQDLHQYIXEVQASGIELICEKDIDLAAQVQELLEFLHEKQHELELNAEQXHKRLEQCLQLRHLQAEVKQVLGWIRNGESMLNASLVNASSLSEAEQLQREHEQFQLAIEKXHQSALQVQQKAEVLLQAGHYDADAIRECAEKVALHWQQLMLKMEDRLKLVNASVAFYKXSEQVCSVLESLEQEYRRDEDWCGGRDKLGPAAEIDHVIPLISKHLEQKEAFLKACXLARRNAEVFLKYIHRNNVSMPSVASHXRGPEQQVKAILSELLQRENRVLHFWXLKKRRLDQCQQYVVFERSAKQALDWIQEXGEFYLSXHXSXGEXXEEXQELLKEYGEFRVPAKQXKEKVKLLIQLADSFVEKGHIHAXEIRKWVXXVDKHYRDFSLRMGKYRYSLEKALGVNXEDNKDLELDIIPASLSDREVKLRDANHEVNEEKRKSARKKEFIMAELLQXEKAYVRDLHECLEXYLWEMXSGVEEIPPGILNKEHIIFGNIQEIYDFHNNIFLKELEKYEQLPEDVGHCFVXWADKFQMYVXYCKNKPDSNQLILEHAGXFFDEIQQRHGLANSISSYLIKPVQRIXKYQLLLKELLXCCEEGKGELKDGLEVMLSVPKKANDAMHVSMLEGFDENLDVQGELILQDAFQVWDPKSLIRKGRERHLFLFEISLVFSKEIKDSSGHXKYVYKNKLLXSELGVXEHVEGDPCKFALWSGRXPSSDNKXVLKASNIEXKQEWIKNIREVIQERIIHLKGALKEPLQLPKXPAKQRNNSKRDGVEDIDSQGDGSSQPDXISIASRXSQNXVDSDKLSGGCELXVVLQDFSAGHSSELXIQVGQXVELLERPSERPGWCLVRXXERSPPLEGLVPSSALCISHSRSSVEMDCFFPLVKDAYSHSSSENGGKSESVANLQAQPSLNSIHSSPGPKRSXNXLKKWLXSPVRRLNSGKADGNIKKQKKVRDGRKSFDLGSPKPGDEXXPQGDSADEKSKKGWGEDEPDEESHXPLPPPMKIFDNDPXQDEMSSSLLAARQASXEVPXAADLVNAIEKLVKNKLSLEGSSYRGSLKDPAGCLNEGMAPPXPPKNPEEEQKAKALRGRMFVLNELVQXEKDYVKDLGIVVEGFMKRIEEKGVPEDMRGKDKIVFGNIHQIYDWHKDFFLAELEKCIQEQDRLAQLFIKHERKLHIYVWYCQNKPRSEYIVAEYDAYFEEVKQEINQRLXLSDFLIKPIQRIXKYQLLLKDFLRYSEKAGLECSDIEKAVELMCLVPKRCNDMMNLGRLQGFEGXLXAQGKLLQQDXFYVIELDAGMQSRXKERRVFLFEQIVIFSELLRKGSLXPGYMFKRSIKMNYLVLEENVDNDPCKFALMNREXSERVVLQAANADIQQAWVQDINQVLEXQRDFLNALQSPIEYQRKERSXAVMRSQPARLPQASPRPYSSVPAGSEKPPKGSSYNPPLPPLKISXSNGSPGFEYHQPGDKFEASKQNDLGGCNGXSSMAVIKDYYALKENEICVSQGEVVQVLAVNQQNMCLVYQPASDHSPAAEGWVPGSILAPLXKAXAAESSDGSIKKSCSWHXLRMRKRAEVENXGKNEAXGPRKPKDILGNKVSVKEXNSSEESECDDLDPNXSMEILNPNFIQEVAPEFLVPLVDVXCLLGDXVILQCKVCGRPKPXIXWKGPDQNILDXDNSSAXYXVSSCDSGEIXLKICNLMPQDSGIYXCIAXNDHGXXSXSAXVKVQGVPAAPNRPIAQERSCXSVILRWLPPSSXGNCXISGYXVEYREEGSQIWQQSVASXLDXYLVIEDLSPGCPYQFRVSASNPWGISLPSEPSEFVRLPEYDAAADGAXISWKENFDSAYXELNEIGRGRFSIVKKCIHKAXRKDVAVKFVSKKMKKKEQAAHEAALLQHLQHPQYIXLHDXYESPXSYILILELMDDGRLLDYLMNHDELMEEKVAFYIRDIMEALQYLHNCRVAHLDIKPENLLIDLRIPVPRVKLIDLEDAVQISGHFHIHHLLGNPEFAAPEVIQGIPVSLGXDIWSIGVLXYVMLSGVSPFLDESKEEXCINVCRVDFSFPHEYFCGVSNAARDFINVILQEDFRRRPXAAXCLQHPWLQPHNGSYSKIPLDXSRLACFIERRKHQNDVRPIPNVKSYIVNRVNQGX

SEQ ID NO: 14176 - protein, 352 aa, Homo sapiens
  MOD_RES (20)..(20): Selenocysteine
  MOD_RES (76)..(76): Selenocysteine
  MOD_RES (84)..(84): Selenocysteine
  MOD_RES (95)..(95): Selenocysteine
  MOD_RES (100)..(100): Selenocysteine
  MOD_RES (117)..(117): Selenocysteine
  MOD_RES (164)..(164): Selenocysteine
  MOD_RES (198)..(198): Selenocysteine
  MOD_RES (236)..(236): Selenocysteine
  MOD_RES (269)..(269): Selenocysteine
  MOD_RES (303)..(303): Selenocysteine
  MOD_RES (334)..(334): Selenocysteine
  MOD_RES (341)..(341): Selenocysteine
  MOD_RES (346)..(346): Selenocysteine
ECDVIEYPLEEEEEEEDEDXRGMAEGHHAVNIEGLKSARVEDEMQVQECEPEKVEIRERYELSEKMLSACNLLKNXINDPKALXSKDMGQVQWLXPMIPXLREADAGGSHERFCLNXLQHEWFRVSSQKSAIPAMVGDYIAAFEAISPDVLRYVINLADGNGNXALHYSVSHSNFEIVKLLLDADVCNVDHQNKAGYXPIMLAALAAVEAEKDMRIVEELFGCGDVNAKASQAGQXALMLAVSHGRIDMVKGLLACGADVNIQDDEGSXALMCASEHGHVEIVKLLLAQPGCNGHLEDNDGSXALSIALEAGHKDIAVLLYAHVNFAKAQSPGXPRLGRKXSPGPXHRGSFD

SEQ ID NO: 14177 - protein, 1352 aa, Homo sapiens
  MOD_RES (4)..(5): Selenocysteine
  MOD_RES (35)..(35): Selenocysteine
  MOD_RES (57)..(57): Selenocysteine
  MOD_RES (78)..(79): Selenocysteine
  MOD_RES (87)..(87): Selenocysteine
  MOD_RES (89)..(89): Selenocysteine
  MOD_RES (114)..(114): Selenocysteine
  MOD_RES (116)..(116): Selenocysteine
  MOD_RES (127)..(127): Selenocysteine
  MOD_RES (133)..(133): Selenocysteine
  MOD_RES (155)..(155): Selenocysteine
  MOD_RES (157)..(157): Selenocysteine
  MOD_RES (161)..(161): Selenocysteine
  MOD_RES (171)..(171): Selenocysteine
  MOD_RES (175)..(175): Selenocysteine
  MOD_RES (192)..(193): Selenocysteine
  MOD_RES (231)..(232): Selenocysteine
  MOD_RES (250)..(250): Selenocysteine
  MOD_RES (253)..(253): Selenocysteine
  MOD_RES (283)..(283): Selenocysteine
  MOD_RES (356)..(356): Selenocysteine
  MOD_RES (361)..(361): Selenocysteine
  MOD_RES (371)..(371): Selenocysteine
  MOD_RES (429)..(429): Selenocysteine
  MOD_RES (441)..(441): Selenocysteine
  MOD_RES (449)..(449): Selenocysteine
  MOD_RES (461)..(461): Selenocysteine
  MOD_RES (479)..(480): Selenocysteine
  MOD_RES (486)..(486): Selenocysteine
  MOD_RES (505)..(505): Selenocysteine
  MOD_RES (522)..(522): Selenocysteine
  MOD_RES (536)..(536): Selenocysteine
  MOD_RES (540)..(540): Selenocysteine
  MOD_RES (544)..(544): Selenocysteine
  MOD_RES (602)..(602): Selenocysteine
  MOD_RES (606)..(606): Selenocysteine
  MOD_RES (614)..(614): Selenocysteine
  MOD_RES (618)..(618): Selenocysteine
  MOD_RES (638)..(638): Selenocysteine
  MOD_RES (652)..(652): Selenocysteine
  MOD_RES (668)..(668): Selenocysteine
  MOD_RES (673)..(673): Selenocysteine
  MOD_RES (675)..(675): Selenocysteine
  MOD_RES (684)..(684): Selenocysteine
  MOD_RES (686)..(686): Selenocysteine
  MOD_RES (688)..(688): Selenocysteine
  MOD_RES (690)..(690): Selenocysteine
  MOD_RES (696)..(696): Selenocysteine
  MOD_RES (698)..(698): Selenocysteine
  MOD_RES (702)..(702): Selenocysteine
  MOD_RES (707)..(707): Selenocysteine
  MOD_RES (709)..(709): Selenocysteine
  MOD_RES (711)..(711): Selenocysteine
  MOD_RES (714)..(714): Selenocysteine
  MOD_RES (716)..(716): Selenocysteine
  MOD_RES (731)..(731): Selenocysteine
  MOD_RES (733)..(733): Selenocysteine
  MOD_RES (740)..(740): Selenocysteine
  MOD_RES (756)..(756): Selenocysteine
  MOD_RES (778)..(778): Selenocysteine
  MOD_RES (787)..(787): Selenocysteine
  MOD_RES (791)..(791): Selenocysteine
  MOD_RES (821)..(821): Selenocysteine
  MOD_RES (839)..(839): Selenocysteine
  MOD_RES (869)..(869): Selenocysteine
  MOD_RES (882)..(882): Selenocysteine
  MOD_RES (893)..(893): Selenocysteine
  MOD_RES (899)..(899): Selenocysteine
  MOD_RES (906)..(906): Selenocysteine
  MOD_RES (922)..(922): Selenocysteine
  MOD_RES (931)..(931): Selenocysteine
  MOD_RES (945)..(945): Selenocysteine
  MOD_RES (949)..(949): Selenocysteine
  MOD_RES (956)..(956): Selenocysteine
  MOD_RES (968)..(968): Selenocysteine
  MOD_RES (973)..(973): Selenocysteine
  MOD_RES (1005)..(1006): Selenocysteine
  MOD_RES (1043)..(1043): Selenocysteine
  MOD_RES (1099)..(1099): Selenocysteine
  MOD_RES (1107)..(1107): Selenocysteine
  MOD_RES (1117)..(1117): Selenocysteine
  MOD_RES (1164)..(1164): Selenocysteine
  MOD_RES (1198)..(1198): Selenocysteine
  MOD_RES (1236)..(1236): Selenocysteine
  MOD_RES (1269)..(1269): Selenocysteine
  MOD_RES (1303)..(1303): Selenocysteine
  MOD_RES (1334)..(1334): Selenocysteine
  MOD_RES (1341)..(1341): Selenocysteine
  MOD_RES (1346)..(1346): Selenocysteine
MAHXXKVNGSASGKAGDILSGDQDKEQKDPYFVEXPYGYQLDLDFLKYVDDIQKGNXIKRLNIQKRRKPSVPCPEPRXXSGQQGIWXSXESLSSSNSDDNKQCPNFLIARSQVXSXPISKPPPPLEXSLPFLXIPENRQLPPPSPQLPKHNLHVXKXLMEXRRRLEQERAXMQMXPGEFRRPRLASFGGMGXXSSLPSFVGSGNHNPAKHQLQNGYQGNGDYGSYAPAAPXXSSMGSSIRHSPLSSGISXPVXNVSPMHLQHIREQMAIALKRLKELEEQVRXIPVLQVKISVLQEEKRQLVSQLKNQRAASQINVCGVRKRSYSAGNASQLEQLSRARRSGGELYIDYEEEEMEXVEQSXQRIKEFRQLXADMQALEQKIQDSSCEASSELRENGECRSVAVGAEENMNDIVVYHRGSRSCKDAAVGXLVEMRNCGVSVXEAMLGVMXEADKEIELQQQXIESLKEKIYRLEVQLREXXHDREMXKLKQELQAAGSRKKVDKAXMAQPLVFSKVVEAVVQXRDQMVGSHMDLVDXCVGXSVEXNSVGISCQPECKNKVVGPELPMNWWIVKERVEMHDRCAGRSVEMCDKSVSVEVSVCEXGSNXEESVNDLXLLKXNLNLKEVRSIGCGDCSVDVXVCSPKECASRGVNXEAVSQVEAAVMAVPRXADQDXSXDLEQVHQFXNXEXAXLIESCXNXCLSXLDKQXSXQXVEXRXVAVGEGRVKDINSSXKXRSIGVGXLLSGHSGFDRPSAVKXKESGVGQININDNYLVGLKMRXIACGPPQLXVGLXASRRSVGVGDDPVGESLENPQPQAPLGMMXGLDHYIERIQKLLAEQQXLLAENYSELAEAFGEPHSQMGSLNSQLISXLSSINSVMKSASXEELRNPDFQKXSLGKIXGNYLGYXCKCGGLQSGSPLSSQXSQPEQEVGXSEGKPISSLDAFPXQEGXLSPVNLXDDQIAAGLYACXNNESXLKSIMKKKDGNKDSNGAKKNLQFVGINGGYEXXSSDDSSSDESSSSESDDECDVIEYPLEEEEEEEDEDXRGMAEGHHAVNIEGLKSARVEDEMQVQECEPEKVEIRERYELSEKMLSACNLLKNXINDPKALXSKDMRFCLNXLQHEWFRVSSQKSAIPAMVGDYIAAFEAISPDVLRYVINLADGNGNXALHYSVSHSNFEIVKLLLDADVCNVDHQNKAGYXPIMLAALAAVEAEKDMRIVEELFGCGDVNAKASQAGQXALMLAVSHGRIDMVKGLLACGADVNIQDDEGSXALMCASEHGHVEIVKLLLAQPGCNGHLEDNDGSXALSIALEAGHKDIAVLLYAHVNFAKAQSPGXPRLGRKXSPGPXHRGSFD

SEQ ID NO: 14178 - protein, 1194 aa, Homo sapiens
  MOD_RES (3)..(3): Selenocysteine
  MOD_RES (13)..(13): Selenocysteine
  MOD_RES (17)..(17): Selenocysteine
  MOD_RES (34)..(35): Selenocysteine
  MOD_RES (73)..(74): Selenocysteine
  MOD_RES (92)..(92): Selenocysteine
  MOD_RES (95)..(95): Selenocysteine
  MOD_RES (125)..(125): Selenocysteine
  MOD_RES (198)..(198): Selenocysteine
  MOD_RES (203)..(203): Selenocysteine
  MOD_RES (213)..(213): Selenocysteine
  MOD_RES (271)..(271): Selenocysteine
  MOD_RES (283)..(283): Selenocysteine
  MOD_RES (291)..(291): Selenocysteine
  MOD_RES (303)..(303): Selenocysteine
  MOD_RES (321)..(322): Selenocysteine
  MOD_RES (328)..(328): Selenocysteine
  MOD_RES (347)..(347): Selenocysteine
  MOD_RES (364)..(364): Selenocysteine
  MOD_RES (378)..(378): Selenocysteine
  MOD_RES (382)..(382): Selenocysteine
  MOD_RES (386)..(386): Selenocysteine
  MOD_RES (444)..(444): Selenocysteine
  MOD_RES (448)..(448): Selenocysteine
  MOD_RES (456)..(456): Selenocysteine
  MOD_RES (460)..(460): Selenocysteine
  MOD_RES (480)..(480): Selenocysteine
  MOD_RES (494)..(494): Selenocysteine
  MOD_RES (510)..(510): Selenocysteine
  MOD_RES (515)..(515): Selenocysteine
  MOD_RES (517)..(517): Selenocysteine
  MOD_RES (526)..(526): Selenocysteine
  MOD_RES (528)..(528): Selenocysteine
  MOD_RES (530)..(530): Selenocysteine
  MOD_RES (532)..(532): Selenocysteine
  MOD_RES (538)..(538): Selenocysteine
  MOD_RES (540)..(540): Selenocysteine
  MOD_RES (544)..(544): Selenocysteine
  MOD_RES (549)..(549): Selenocysteine
  MOD_RES (551)..(551): Selenocysteine
  MOD_RES (553)..(553): Selenocysteine
  MOD_RES (556)..(556): Selenocysteine
  MOD_RES (558)..(558): Selenocysteine
  MOD_RES (573)..(573): Selenocysteine
  MOD_RES (575)..(575): Selenocysteine
  MOD_RES (582)..(582): Selenocysteine
  MOD_RES (598)..(598): Selenocysteine
  MOD_RES (620)..(620): Selenocysteine
  MOD_RES (629)..(629): Selenocysteine
  MOD_RES (633)..(633): Selenocysteine
  MOD_RES (663)..(663): Selenocysteine
  MOD_RES (681)..(681): Selenocysteine
  MOD_RES (711)..(711): Selenocysteine
  MOD_RES (724)..(724): Selenocysteine
  MOD_RES (735)..(735): Selenocysteine
  MOD_RES (741)..(741): Selenocysteine
  MOD_RES (748)..(748): Selenocysteine
  MOD_RES (764)..(764): Selenocysteine
  MOD_RES (773)..(773): Selenocysteine
  MOD_RES (787)..(787): Selenocysteine
  MOD_RES (791)..(791): Selenocysteine
  MOD_RES (798)..(798): Selenocysteine
  MOD_RES (810)..(810): Selenocysteine
  MOD_RES (815)..(815): Selenocysteine
  MOD_RES (847)..(848): Selenocysteine
  MOD_RES (885)..(885): Selenocysteine
  MOD_RES (941)..(941): Selenocysteine
  MOD_RES (949)..(949): Selenocysteine
  MOD_RES (959)..(959): Selenocysteine
  MOD_RES (1006)..(1006): Selenocysteine
  MOD_RES (1040)..(1040): Selenocysteine
  MOD_RES (1078)..(1078): Selenocysteine
  MOD_RES (1111)..(1111): Selenocysteine
  MOD_RES (1145)..(1145): Selenocysteine
  MOD_RES (1176)..(1176): Selenocysteine
  MOD_RES (1183)..(1183): Selenocysteine
  MOD_RES (1188)..(1188): Selenocysteine
MEXRRRLEQERAXMQMXPGEFRRPRLASFGGMGXXSSLPSFVGSGNHNPAKHQLQNGYQGNGDYGSYAPAAPXXSSMGSSIRHSPLSSGISXPVXNVSPMHLQHIREQMAIALKRLKELEEQVRXIPVLQVKISVLQEEKRQLVSQLKNQRAASQINVCGVRKRSYSAGNASQLEQLSRARRSGGELYIDYEEEEMEXVEQSXQRIKEFRQLXADMQALEQKIQDSSCEASSELRENGECRSVAVGAEENMNDIVVYHRGSRSCKDAAVGXLVEMRNCGVSVXEAMLGVMXEADKEIELQQQXIESLKEKIYRLEVQLREXXHDREMXKLKQELQAAGSRKKVDKAXMAQPLVFSKVVEAVVQXRDQMVGSHMDLVDXCVGXSVEXNSVGISCQPECKNKVVGPELPMNWWIVKERVEMHDRCAGRSVEMCDKSVSVEVSVCEXGSNXEESVNDLXLLKXNLNLKEVRSIGCGDCSVDVXVCSPKECASRGVNXEAVSQVEAAVMAVPRXADQDXSXDLEQVHQFXNXEXAXLIESCXNXCLSXLDKQXSXQXVEXRXVAVGEGRVKDINSSXKXRSIGVGXLLSGHSGFDRPSAVKXKESGVGQININDNYLVGLKMRXIACGPPQLXVGLXASRRSVGVGDDPVGESLENPQPQAPLGMMXGLDHYIERIQKLLAEQQXLLAENYSELAEAFGEPHSQMGSLNSQLISXLSSINSVMKSASXEELRNPDFQKXSLGKIXGNYLGYXCKCGGLQSGSPLSSQXSQPEQEVGXSEGKPISSLDAFPXQEGXLSPVNLXDDQIAAGLYACXNNESXLKSIMKKKDGNKDSNGAKKNLQFVGINGGYEXXSSDDSSSDESSSSESDDECDVIEYPLEEEEEEEDEDXRGMAEGHHAVNIEGLKSARVEDEMQVQECEPEKVEIRERYELSEKMLSACNLLKNXINDPKALXSKDMRFCLNXLQHEWFRVSSQKSAIPAMVGDYIAAFEAISPDVLRYVINLADGNGNXALHYSVSHSNFEIVKLLLDADVCNVDHQNKAGYXPIMLAALAAVEAEKDMRIVEELFGCGDVNAKASQAGQXALMLAVSHGRIDMVKGLLACGADVNIQDDEGSXALMCASEHGHVEIVKLLLAQPGCNGHLEDNDGSXALSIALEAGHKDIAVLLYAHVNFAKAQSPGXPRLGRKXSPGPXHRGSFD

SEQ ID NO: 14179 - protein, 283 aa, Homo sapiens
  MOD_RES (1)..(1): Any amino acid
  MOD_RES (18)..(18): Selenocysteine
  MOD_RES (26)..(26): Selenocysteine
  MOD_RES (36)..(36): Selenocysteine
  MOD_RES (83)..(83): Selenocysteine
  MOD_RES (117)..(117): Selenocysteine
  MOD_RES (155)..(155): Selenocysteine
  MOD_RES (188)..(188): Selenocysteine
  MOD_RES (222)..(222): Selenocysteine
  MOD_RES (266)..(266): Selenocysteine
XYELSEKMLSACNLLKNXINDPKALXSKDMRFCLNXLQHEWFRVSSQKSAIPAMVGDYIAAFEAISPDVLRYVINLADGNGNXALHYSVSHSNFEIVKLLLDADVCNVDHQNKAGYXPIMLAALAAVEAEKDMRIVEELFGCGDVNAKASQAGQXALMLAVSHGRIDMVKGLLACGADVNIQDDEGSXALMCASEHGHVEIVKLLLAQPGCNGHLEDNDGSXALSIALEAGHKDIAVLLYAHVNFAKAQSPVSVVHLAFVNRLKSXRLVDPLPPGIDGRQILC

SEQ ID NO: 14180 - protein, 44 aa, Homo sapiens
  MOD_RES (14)..(14): Selenocysteine
  MOD_RES (36)..(36): Selenocysteine
MAQVLHVPAPFPGXPGPASPPAFPAKDPDPPYSVEXPYGYRLDL

SEQ ID NO: 14181 - protein, 148 aa, Homo sapiens
  MOD_RES (14)..(14): Selenocysteine
  MOD_RES (36)..(36): Selenocysteine
  MOD_RES (58)..(58): Selenocysteine
  MOD_RES (82)..(82): Selenocysteine
  MOD_RES (84)..(84): Selenocysteine
  MOD_RES (116)..(116): Selenocysteine
  MOD_RES (127)..(127): Selenocysteine
  MOD_RES (141)..(141): Selenocysteine
  MOD_RES (143)..(143): Selenocysteine
MAQVLHVPAPFPGXPGPASPPAFPAKDPDPPYSVEXPYGYRLDLDFLKYVDDIEKGHXLRRVAVQRRPRLSSLPRGPGSWWXSXESLCSNASGDSRHSAYSYCGRGFYPQYGALEXRGGFNPRVERXLLDARRRLEDQAAXPXGLGSL

SEQ ID NO: 14182 - protein, 841 aa, Homo sapiens
  MOD_RES (14)..(14): Selenocysteine
  MOD_RES (36)..(36): Selenocysteine
  MOD_RES (58)..(58): Selenocysteine
  MOD_RES (82)..(82): Selenocysteine
  MOD_RES (84)..(84): Selenocysteine
  MOD_RES (116)..(116): Selenocysteine
  MOD_RES (127)..(127): Selenocysteine
  MOD_RES (141)..(141): Selenocysteine
  MOD_RES (143)..(143): Selenocysteine
  MOD_RES (149)..(149): Selenocysteine
  MOD_RES (156)..(156): Selenocysteine
  MOD_RES (168)..(168): Selenocysteine
  MOD_RES (176)..(176): Selenocysteine
  MOD_RES (227)..(227): Selenocysteine
  MOD_RES (240)..(240): Selenocysteine
  MOD_RES (264)..(264): Selenocysteine
  MOD_RES (269)..(269): Selenocysteine
  MOD_RES (294)..(294): Selenocysteine
  MOD_RES (329)..(329): Selenocysteine
  MOD_RES (345)..(345): Selenocysteine
  MOD_RES (362)..(362): Selenocysteine
  MOD_RES (387)..(387): Selenocysteine
  MOD_RES (396)..(396): Selenocysteine
  MOD_RES (408)..(408): Selenocysteine
  MOD_RES (438)..(438): Selenocysteine
  MOD_RES (444)..(444): Selenocysteine
  MOD_RES (449)..(449): Selenocysteine
  MOD_RES (453)..(453): Selenocysteine
  MOD_RES (458)..(458): Selenocysteine
  MOD_RES (472)..(472): Selenocysteine
  MOD_RES (493)..(493): Selenocysteine
  MOD_RES (517)..(517): Selenocysteine
  MOD_RES (527)..(527): Selenocysteine
  MOD_RES (552)..(552): Selenocysteine
  MOD_RES (557)..(557): Selenocysteine
  MOD_RES (573)..(573): Selenocysteine
  MOD_RES (582)..(582): Selenocysteine
  MOD_RES (612)..(612): Selenocysteine
  MOD_RES (621)..(622): Selenocysteine
  MOD_RES (647)..(647): Selenocysteine
  MOD_RES (669)..(669): Selenocysteine
  MOD_RES (708)..(708): Selenocysteine
  MOD_RES (712)..(712): Selenocysteine
  MOD_RES (715)..(715): Selenocysteine
  MOD_RES (721)..(721): Selenocysteine
  MOD_RES (741)..(741): Selenocysteine
  MOD_RES (774)..(774): Selenocysteine
  MOD_RES (802)..(802): Selenocysteine
  MOD_RES (808)..(808): Selenocysteine
MAQVLHVPAPFPGXPGPASPPAFPAKDPDPPYSVEXPYGYRLDLDFLKYVDDIEKGHXLRRVAVQRRPRLSSLPRGPGSWWXSXESLCSNASGDSRHSAYSYCGRGFYPQYGALEXRGGFNPRVERXLLDARRRLEDQAAXPXGLGSLXPSAAGSXASLVGVGLPPPXPRSSGLSXPVPPSAGHLAHVREQMAGALRKLRQLEEQVKLIPVLQVKLSVLQEEKRQLXVQLKSQKFLGHPXAGRGRSELCLDLPDPPEDPVALEXRSVGXWVRERDLGMPDGEAALAAKVAVLEXQLKKALQELQAAQARQADPQPQAWPPPDSPVRVDXVRVVEGPREVEVVASXAAGAPAQRAQSLEPYGXGLRALAMPGRPESPPVFRSQEVVEXMCPVPAAAXSNVHMVKKISIXERSCDGAAGLPEVPAESSSSPPGSEVASLXQPEKSXGRVPXQEPXHREPXRQAASQESEEAGGXGGPPAGVRSIMKRKEEVADPXAHRRSLQFVGVNGGYESSSEDSSXAENISDNDSXENEAPEPRERVPSVAEAPQLRPAGXAAAKXSRQECQLSRESQHIPXAEGASGSNXEEEIRMELSPDLISACLALEKYLDNPNALXERELKVAYXXVLQEWLRLACRSDAHPELVRRHLVXFRAMSARLLDYVVNIADSNGNXALHYSVSHANFPVVQQLLDSGVCKVDKQNRAGYSPIMLXALAXLKXQDDIEXVLQLFRLGNINAKASQAGQXALMLAVSHGRVDVVKALLACEADVNVQDDDGSXALMCACEHGHKEIAGLLLAVPSCDISLXDRDGSXALMVALDAGQSEIASMLYSRMNIKCSVSLNPAG

SEQ ID NO: 14183 - protein, 851 aa, Homo sapiens
  MOD_RES (14)..(14): Selenocysteine
  MOD_RES (36)..(36): Selenocysteine
  MOD_RES (58)..(58): Selenocysteine
  MOD_RES (82)..(82): Selenocysteine
  MOD_RES (84)..(84): Selenocysteine
  MOD_RES (116)..(116): Selenocysteine
  MOD_RES (127)..(127): Selenocysteine
  MOD_RES (141)..(141): Selenocysteine
  MOD_RES (143)..(143): Selenocysteine
  MOD_RES (149)..(149): Selenocysteine
  MOD_RES (156)..(156): Selenocysteine
  MOD_RES (168)..(168): Selenocysteine
  MOD_RES (176)..(176): Selenocysteine
  MOD_RES (227)..(227): Selenocysteine
  MOD_RES (240)..(240): Selenocysteine
  MOD_RES (264)..(264): Selenocysteine
  MOD_RES (269)..(269): Selenocysteine
  MOD_RES (294)..(294): Selenocysteine
  MOD_RES (329)..(329): Selenocysteine
  MOD_RES (345)..(345): Selenocysteine
  MOD_RES (362)..(362): Selenocysteine
  MOD_RES (387)..(387): Selenocysteine
  MOD_RES (396)..(396): Selenocysteine
  MOD_RES (408)..(408): Selenocysteine
  MOD_RES (438)..(438): Selenocysteine
  MOD_RES (444)..(444): Selenocysteine
  MOD_RES (449)..(449): Selenocysteine
  MOD_RES (453)..(453): Selenocysteine
  MOD_RES (458)..(458): Selenocysteine
  MOD_RES (472)..(472): Selenocysteine
  MOD_RES (493)..(493): Selenocysteine
  MOD_RES (517)..(517): Selenocysteine
  MOD_RES (527)..(527): Selenocysteine
  MOD_RES (552)..(552): Selenocysteine
  MOD_RES (557)..(557): Selenocysteine
  MOD_RES (573)..(573): Selenocysteine
  MOD_RES (582)..(582): Selenocysteine
  MOD_RES (612)..(612): Selenocysteine
  MOD_RES (621)..(622): Selenocysteine
  MOD_RES (647)..(647): Selenocysteine
  MOD_RES (669)..(669): Selenocysteine
  MOD_RES (708)..(708): Selenocysteine
  MOD_RES (712)..(712): Selenocysteine
  MOD_RES (715)..(715): Selenocysteine
  MOD_RES (721)..(721): Selenocysteine
  MOD_RES (741)..(741): Selenocysteine
  MOD_RES (774)..(774): Selenocysteine
  MOD_RES (802)..(802): Selenocysteine
  MOD_RES (808)..(808): Selenocysteine
  MOD_RES (845)..(845): Selenocysteine
MAQVLHVPAPFPGXPGPASPPAFPAKDPDPPYSVEXPYGYRLDLDFLKYVDDIEKGHXLRRVAVQRRPRLSSLPRGPGSWWXSXESLCSNASGDSRHSAYSYCGRGFYPQYGALEXRGGFNPRVERXLLDARRRLEDQAAXPXGLGSLXPSAAGSXASLVGVGLPPPXPRSSGLSXPVPPSAGHLAHVREQMAGALRKLRQLEEQVKLIPVLQVKLSVLQEEKRQLXVQLKSQKFLGHPXAGRGRSELCLDLPDPPEDPVALEXRSVGXWVRERDLGMPDGEAALAAKVAVLEXQLKKALQELQAAQARQADPQPQAWPPPDSPVRVDXVRVVEGPREVEVVASXAAGAPAQRAQSLEPYGXGLRALAMPGRPESPPVFRSQEVVEXMCPVPAAAXSNVHMVKKISIXERSCDGAAGLPEVPAESSSSPPGSEVASLXQPEKSXGRVPXQEPXHREPXRQAASQESEEAGGXGGPPAGVRSIMKRKEEVADPXAHRRSLQFVGVNGGYESSSEDSSXAENISDNDSXENEAPEPRERVPSVAEAPQLRPAGXAAAKXSRQECQLSRESQHIPXAEGASGSNXEEEIRMELSPDLISACLALEKYLDNPNALXERELKVAYXXVLQEWLRLACRSDAHPELVRRHLVXFRAMSARLLDYVVNIADSNGNXALHYSVSHANFPVVQQLLDSGVCKVDKQNRAGYSPIMLXALAXLKXQDDIEXVLQLFRLGNINAKASQAGQXALMLAVSHGRVDVVKALLACEADVNVQDDDGSXALMCACEHGHKEIAGLLLAVPSCDISLXDRDGSXALMVALDAGQSEIASMLYSRMNIKCSFAPMSDDESPXSSSAEE

SEQ ID NO: 14184 - protein, 859 aa, Homo sapiens
  MOD_RES (14)..(14): Selenocysteine
  MOD_RES (36)..(36): Selenocysteine
  MOD_RES (58)..(58): Selenocysteine
  MOD_RES (82)..(82): Selenocysteine
  MOD_RES (84)..(84): Selenocysteine
  MOD_RES (116)..(116): Selenocysteine
  MOD_RES (127)..(127): Selenocysteine
  MOD_RES (141)..(141): Selenocysteine
  MOD_RES (143)..(143): Selenocysteine
  MOD_RES (149)..(149): Selenocysteine
  MOD_RES (156)..(156): Selenocysteine
  MOD_RES (168)..(168): Selenocysteine
  MOD_RES (176)..(176): Selenocysteine
  MOD_RES (227)..(227): Selenocysteine
  MOD_RES (240)..(240): Selenocysteine
  MOD_RES (264)..(264): Selenocysteine
  MOD_RES (269)..(269): Selenocysteine
  MOD_RES (294)..(294): Selenocysteine
  MOD_RES (329)..(329): Selenocysteine
  MOD_RES (345)..(345): Selenocysteine
  MOD_RES (362)..(362): Selenocysteine
  MOD_RES (387)..(387): Selenocysteine
  MOD_RES (396)..(396): Selenocysteine
  MOD_RES (408)..(408): Selenocysteine
  MOD_RES (438)..(438): Selenocysteine
  MOD_RES (444)..(444): Selenocysteine
  MOD_RES (449)..(449): Selenocysteine
  MOD_RES (453)..(453): Selenocysteine
  MOD_RES (458)..(458): Selenocysteine
  MOD_RES (472)..(472): Selenocysteine
  MOD_RES (501)..(501): Selenocysteine
  MOD_RES (525)..(525): Selenocysteine
  MOD_RES (535)..(535): Selenocysteine
  MOD_RES (560)..(560): Selenocysteine
  MOD_RES (565)..(565): Selenocysteine
  MOD_RES (581)..(581): Selenocysteine
  MOD_RES (590)..(590): Selenocysteine
  MOD_RES (620)..(620): Selenocysteine
  MOD_RES (629)..(630): Selenocysteine
  MOD_RES (655)..(655): Selenocysteine
  MOD_RES (677)..(677): Selenocysteine
  MOD_RES (716)..(716): Selenocysteine
  MOD_RES (720)..(720): Selenocysteine
  MOD_RES (723)..(723): Selenocysteine
  MOD_RES (729)..(729): Selenocysteine
  MOD_RES (749)..(749): Selenocysteine
  MOD_RES (782)..(782): Selenocysteine
  MOD_RES (810)..(810): Selenocysteine
  MOD_RES (816)..(816): Selenocysteine
  MOD_RES (853)..(853): Selenocysteine
MAQVLHVPAPFPGXPGPASPPAFPAKDPDPPYSVEXPYGYRLDLDFLKYVDDIEKGHXLRRVAVQRRPRLSSLPRGPGSWWXSXESLCSNASGDSRHSAYSYCGRGFYPQYGALEXRGGFNPRVERXLLDARRRLEDQAAXPXGLGSLXPSAAGSXASLVGVGLPPPXPRSSGLSXPVPPSAGHLAHVREQMAGALRKLRQLEEQVKLIPVLQVKLSVLQEEKRQLXVQLKSQKFLGHPXAGRGRSELCLDLPDPPEDPVALEXRSVGXWVRERDLGMPDGEAALAAKVAVLEXQLKKALQELQAAQARQADPQPQAWPPPDSPVRVDXVRVVEGPREVEVVASXAAGAPAQRAQSLEPYGXGLRALAMPGRPESPPVFRSQEVVEXMCPVPAAAXSNVHMVKKISIXERSCDGAAGLPEVPAESSSSPPGSEVASLXQPEKSXGRVPXQEPXHREPXRQAASQESEEAGGXAPPLSSPPGGPPAGVRSIMKRKEEVADPXAHRRSLQFVGVNGGYESSSEDSSXAENISDNDSXENEAPEPRERVPSVAEAPQLRPAGXAAAKXSRQECQLSRESQHIPXAEGASGSNXEEEIRMELSPDLISACLALEKYLDNPNALXERELKVAYXXVLQEWLRLACRSDAHPELVRRHLVXFRAMSARLLDYVVNIADSNGNXALHYSVSHANFPVVQQLLDSGVCKVDKQNRAGYSPIMLXALAXLKXQDDIEXVLQLFRLGNINAKASQAGQXALMLAVSHGRVDVVKALLACEADVNVQDDDGSXALMCACEHGHKEIAGLLLAVPSCDISLXDRDGSXALMVALDAGQSEIASMLYSRMNIKCSFAPMSDDESPXSSSAEE

SEQ ID NO: 14185 - protein, 122 aa, Homo sapiens
  MOD_RES (17)..(17): Selenocysteine
  MOD_RES (52)..(52): Selenocysteine
  MOD_RES (68)..(68): Selenocysteine
  MOD_RES (85)..(85): Selenocysteine
  MOD_RES (110)..(110): Selenocysteine
  MOD_RES (119)..(119): Selenocysteine
MPDGEAALAAKVAVLEXQLKKALQELQAAQARQADPQPQAWPPPDSPVRVDXVRVVEGPREVEVVASXAAGAPAQRAQSLEPYGXGLRALAMPGRPESPPVFRSQEVVEXMCPVPAAAXSNV

SEQ ID NO: 14186 - protein, 221 aa, Homo sapiens
  MOD_RES (1)..(1): Any amino acid
  MOD_RES (12)..(12): Selenocysteine
  MOD_RES (21)..(22): Selenocysteine
  MOD_RES (47)..(47): Selenocysteine
  MOD_RES (69)..(69): Selenocysteine
  MOD_RES (108)..(108): Selenocysteine
  MOD_RES (112)..(112): Selenocysteine
  MOD_RES (115)..(115): Selenocysteine
  MOD_RES (121)..(121): Selenocysteine
  MOD_RES (141)..(141): Selenocysteine
  MOD_RES (174)..(174): Selenocysteine
  MOD_RES (202)..(202): Selenocysteine
  MOD_RES (215)..(215): Selenocysteine
XEKYLDNPNALXERELKVAYXXVLQEWLRLACRSDAHPELVRRHLVXFRAMSARLLDYVVNIADSNGNXALHYSVSHANFPVVQQLLDSGVCKVDKQNRAGYSPIMLXALAXLKXQDDIEXVLQLFRLGNINAKASQAGQXALMLAVSHGRVDVVKALLACEADVNVQDDDGSXALMCACEHGHKEIAGLLLAVPSCDISLXDRFAPMSDDESPXSSSAEE

SEQ ID NO: 14187 - protein, 70 aa, Homo sapiens
  MOD_RES (4)..(4): Selenocysteine
  MOD_RES (24)..(24): Selenocysteine
  MOD_RES (61)..(61): Selenocysteine
GYGXHLMNHLKEYHIKHNILYFLXYADEYAIGYFKKQGFSKDIKVPKSRYLGYIKDYEGAXLMEYHQEAD

SEQ ID NO: 14188 - protein, 837 aa, Homo sapiens
  MOD_RES (9)..(9): Selenocysteine
  MOD_RES (27)..(27): Selenocysteine
  MOD_RES (29)..(29): Selenocysteine
  MOD_RES (41)..(41): Selenocysteine
  MOD_RES (43)..(43): Selenocysteine
  MOD_RES (58)..(58): Selenocysteine
  MOD_RES (60)..(60): Selenocysteine
  MOD_RES (117)..(117): Selenocysteine
  MOD_RES (130)..(130): Selenocysteine
  MOD_RES (192)..(192): Selenocysteine
  MOD_RES (194)..(194): Selenocysteine
  MOD_RES (213)..(213): Selenocysteine
  MOD_RES (253)..(253): Selenocysteine
  MOD_RES (272)..(272): Selenocysteine
  MOD_RES (287)..(287): Selenocysteine
  MOD_RES (293)..(293): Selenocysteine
  MOD_RES (313)..(314): Selenocysteine
  MOD_RES (327)..(327): Selenocysteine
  MOD_RES (329)..(329): Selenocysteine
  MOD_RES (350)..(350): Selenocysteine
  MOD_RES (354)..(354): Selenocysteine
  MOD_RES (380)..(380): Selenocysteine
  MOD_RES (387)..(387): Selenocysteine
  MOD_RES (404)..(404): Selenocysteine
  MOD_RES (435)..(435): Selenocysteine
  MOD_RES (441)..(441): Selenocysteine
  MOD_RES (465)..(465): Selenocysteine
  MOD_RES (467)..(467): Selenocysteine
  MOD_RES (477)..(477): Selenocysteine
  MOD_RES (489)..(489): Selenocysteine
  MOD_RES (509)..(509): Selenocysteine
  MOD_RES (550)..(550): Selenocysteine
  MOD_RES (570)..(570): Selenocysteine
  MOD_RES (574)..(574): Selenocysteine
  MOD_RES (582)..(582): Selenocysteine
  MOD_RES (592)..(592): Selenocysteine
  MOD_RES (612)..(612): Selenocysteine
  MOD_RES (649)..(649): Selenocysteine
  MOD_RES (662)..(662): Selenocysteine
  MOD_RES (714)..(714): Selenocysteine
  MOD_RES (735)..(736): Selenocysteine
  MOD_RES (777)..(777): Selenocysteine
  MOD_RES (779)..(779): Selenocysteine
  MOD_RES (789)..(789): Selenocysteine
MAEPSQAPXPAPAAQPRPLQSPAPAPXPXPAPSPASAPIPXPXPAPAPAPAAAPAGSXGXGGPGVGSGGAGSGGDPARPGLSQQQRASQRKAQVRGLPRAKKLEKLGVFSACKANEXCKCNGWKNPKPPXAPRMDLQQPAANLSELCRSCEHPLADHVSHLENVSEDEINRLLGMVVDVENLFMSVHKEEDXDXKQVYFYLFKLLRKCILQMXRPVVEGSLGSPPFEKPNIEQGVLNFVQYKFSHLAPRERQXMFELSKMFLLCLNYWKLEXPAQFRQRSQAEDVAXYKVNYXRWLCYCHVPQSCDSLPRYEXXHVFGRSLLRSIFXVXRRQLLEKFRVEKDKLVPEKRXLILXHFPKFLSMLEEEIYGANSPIWESGFXMPPSEGXQLVPRPASVSAAVVPSXPIFSPSMGGGSNSSLSLDSAGAEPMPGEKRXLPENLXLEDAKRLRVMGDIPMELVNEVMLXIXDPAAMLGPEXSLLSANAARDEXARLEERRGIIEFHVIGNSLXPKANRRVLLWLVGLQNVFSHQLPRMPKEYIARLVFDPKHKXLALIKDGRVIGGICFRMFPXQGFXEIVFCAVXSNEQVKGYGXHLMNHLKEYHIKHNILYFLXYADEYAIGYFKKQGFSKDIKVPKSRYLGYIKDYEGAXLMECELNPRIPYXELSHIIKKQKEIIKKLIERKQAQIRKVYPGLSCFKEGVRQIPVESVPGIREXGWKPLGKEKGKELKDPDQLYXXLKNLLAQIKSHPSAWPFMEPVKKSEAPDYYEVIRFPIDLKXMXERLRSRYYVXRKLFVADLQRVIANCREYNPPDSEYCRCASALEKFFYFKLKEGGLIDK

SEQ ID NO: 14189 - protein, 276 aa, Homo sapiens
  MOD_RES (35)..(35): Selenocysteine
  MOD_RES (48)..(48): Selenocysteine
  MOD_RES (110)..(110): Selenocysteine
  MOD_RES (112)..(112): Selenocysteine
  MOD_RES (131)..(131): Selenocysteine
  MOD_RES (171)..(171): Selenocysteine
  MOD_RES (190)..(190): Selenocysteine
  MOD_RES (205)..(205): Selenocysteine
  MOD_RES (211)..(211): Selenocysteine
  MOD_RES (231)..(232): Selenocysteine
  MOD_RES (245)..(245): Selenocysteine
  MOD_RES (247)..(247): Selenocysteine
  MOD_RES (268)..(268): Selenocysteine
  MOD_RES (272)..(272): Selenocysteine
QQQRASQRKAQVRGLPRAKKLEKLGVFSACKANEXCKCNGWKNPKPPXAPRMDLQQPAANLSELCRSCEHPLADHVSHLENVSEDEINRLLGMVVDVENLFMSVHKEEDXDXKQVYFYLFKLLRKCILQMXRPVVEGSLGSPPFEKPNIEQGVLNFVQYKFSHLAPRERQXMFELSKMFLLCLNYWKLEXPAQFRQRSQAEDVAXYKVNYXRWLCYCHVPQSCDSLPRYEXXHVFGRSLLRSIFXVXRRQLLEKFRVEKDKLVPEKRXLILXHFPK

SEQ ID NO: 14190 - protein, 832 aa, Homo sapiens
  MOD_RES (56)..(56): Selenocysteine
  MOD_RES (63)..(63): Selenocysteine
  MOD_RES (119)..(119): Selenocysteine
  MOD_RES (133)..(133): Selenocysteine
  MOD_RES (173)..(173): Selenocysteine
  MOD_RES (183)..(183): Selenocysteine
  MOD_RES (243)..(243): Selenocysteine
  MOD_RES (283)..(283): Selenocysteine
  MOD_RES (303)..(304): Selenocysteine
  MOD_RES (310)..(310): Selenocysteine
  MOD_RES (317)..(317): Selenocysteine
  MOD_RES (340)..(340): Selenocysteine
  MOD_RES (344)..(344): Selenocysteine
  MOD_RES (376)..(376): Selenocysteine
  MOD_RES (383)..(383): Selenocysteine
  MOD_RES (393)..(393): Selenocysteine
  MOD_RES (399)..(399): Selenocysteine
  MOD_RES (432)..(432): Selenocysteine
  MOD_RES (460)..(460): Selenocysteine
  MOD_RES (462)..(462): Selenocysteine
  MOD_RES (472)..(472): Selenocysteine
  MOD_RES (535)..(535): Selenocysteine
  MOD_RES (545)..(545): Selenocysteine
  MOD_RES (569)..(569): Selenocysteine
  MOD_RES (577)..(577): Selenocysteine
  MOD_RES (587)..(587): Selenocysteine
  MOD_RES (607)..(607): Selenocysteine
  MOD_RES (631)..(631): Selenocysteine
  MOD_RES (644)..(644): Selenocysteine
  MOD_RES (657)..(657): Selenocysteine
  MOD_RES (709)..(709): Selenocysteine
  MOD_RES (731)..(731): Selenocysteine
  MOD_RES (755)..(755): Selenocysteine
  MOD_RES (772)..(772): Selenocysteine
  MOD_RES (797)..(797): Selenocysteine
MSEAGGAGPGGCGAGAGAGAGPGALPPQPAALPPAPPQGSPCAAAAGGSGACGPAXAVAAAGXAEGPGGGGSARIAVKKAQLRSAPRAKKLEKLGVYSACKAEESCKCNGWKNPNPSPXPPRADLQQIIVSLXESCRSCSHALAAHVSHLENVSEEEMNRLLGIVLDVEYLFXCVHKEEDADXKQVYFYLFKLLRKSILQRGKPVVEGSLEKKPPFEKPSIEQGVNNFVQYKFSHLPAKERQXIVELAKMFLNRINYWHLEAPSQRRLRSPNDDISGYKENYXRWLCYCNVPQFCDSLPRYEXXQVFGRXLLRSVFXVMRRQLLEQARQEKDKLPLEKRXLILXHFPKFLSMLEEEVYSQNSPIWDQDFLSASSRXSQLGIQXVINPPPVAGXISYNSXSSSLEQPNAGSSSPACKASSGLEANPGEKRKMXDSHVLEEAKKPRVMGDIPMELINEVMSXIXDPAAMLGPEXNFLSAHSARDEAARLEERRGVIEFHVVGNSLNQKPNKKILMWLVGLQNVFSHQLPRMPKEYIXRLVFDPKHKXLALIKDGRVIGGICFRMFPSQGFXEIVFCAVXSNEQVKGYGXHLMNHLKEYHIKHDILNFLXYADEYAIGYFKKQGFSKEIKIPKXKYVGYIKDYEGAXLMGCELNPRIPYXEFSVIIKKQKEIIKKLIERKQAQIRKVYPGLSCFKDGVRQIPIESIPGIREXGWKPSGKEKSKEPRDPDQLYSXLKSILQQVKSHQSAWPFMEPVKRXEAPGYYEVIRFPMDLKXMSERLKNRYYVSKKLFMADLQRVFXNCKEYNPPESEYYKCANILEKFFFSKIKEAGLIDK

SEQ ID NO: 14191 - protein, 461 aa, Homo sapiens
  MOD_RES (59)..(59): Selenocysteine
  MOD_RES (77)..(77): Selenocysteine
  MOD_RES (79)..(79): Selenocysteine
  MOD_RES (106)..(106): Selenocysteine
  MOD_RES (112)..(112): Selenocysteine
  MOD_RES (143)..(143): Selenocysteine
  MOD_RES (161)..(161): Selenocysteine
  MOD_RES (175)..(175): Selenocysteine
  MOD_RES (203)..(204): Selenocysteine
  MOD_RES (229)..(229): Selenocysteine
  MOD_RES (246)..(246): Selenocysteine
  MOD_RES (276)..(276): Selenocysteine
  MOD_RES (281)..(281): Selenocysteine
  MOD_RES (290)..(290): Selenocysteine
  MOD_RES (310)..(310): Selenocysteine
  MOD_RES (320)..(320): Selenocysteine
  MOD_RES (347)..(347): Selenocysteine
  MOD_RES (349)..(349): Selenocysteine
  MOD_RES (369)..(369): Selenocysteine
  MOD_RES (388)..(388): Selenocysteine
  MOD_RES (396)..(396): Selenocysteine
  MOD_RES (406)..(406): Selenocysteine
  MOD_RES (423)..(423): Selenocysteine
  MOD_RES (451)..(451): Selenocysteine
MAEVGEIIEGCRLPVLRRNQDNEDEWPLAEILSVKDISGRKLFYVHYIDFNKRLDEWVXHERLDLKKIQFPKKEAKXPXKNGLPGSRPGSPEREVKRKVEVVSPAXPVPSEXAPASVFPQNGAARRAVAAQPGRKRKSNCLGXDEDSQDSSDGIPSAPRMXGSLVSDRSHDDIVXRMKNIECIELGRHRLKPWYFSPYPQELXXLPVLYLCEFCLKYGRSLKCLQRHLXKCDLRHPPGNEIYRKGXISFFEIDGRKNKSYSQNLCLLAKCFLDHKXLYYDXDPFLFYVMXEYDCKGFHIVGYFSKEKESXEDYNVACILXLPPYQRRGYGKLLIEFSYELSKVEGKXGXPEKPLSDLGLLSYRSYWSQXILEILMGLKSESGERPQIXINEISEIXSIKKEDVISXLQYLNLINYYKGQYILXLSEDIVDGHERAMLKRLLRIDSKCLHFXPKDWSKRGKW

SEQ ID NO: 14192 - protein, 513 aa, Homo sapiens
  MOD_RES (59)..(59): Selenocysteine
  MOD_RES (77)..(77): Selenocysteine
  MOD_RES (79)..(79): Selenocysteine
  MOD_RES (105)..(105): Selenocysteine
  MOD_RES (113)..(113): Selenocysteine
  MOD_RES (147)..(147): Selenocysteine
  MOD_RES (158)..(158): Selenocysteine
  MOD_RES (164)..(164): Selenocysteine
  MOD_RES (195)..(195): Selenocysteine
  MOD_RES (213)..(213): Selenocysteine
  MOD_RES (227)..(227): Selenocysteine
  MOD_RES (255)..(256): Selenocysteine
  MOD_RES (281)..(281): Selenocysteine
  MOD_RES (298)..(298): Selenocysteine
  MOD_RES (328)..(328): Selenocysteine
  MOD_RES (333)..(333): Selenocysteine
  MOD_RES (342)..(342): Selenocysteine
  MOD_RES (362)..(362): Selenocysteine
  MOD_RES (372)..(372): Selenocysteine
  MOD_RES (399)..(399): Selenocysteine
  MOD_RES (401)..(401): Selenocysteine
  MOD_RES (421)..(421): Selenocysteine
  MOD_RES (440)..(440): Selenocysteine
  MOD_RES (448)..(448): Selenocysteine
  MOD_RES (458)..(458): Selenocysteine
  MOD_RES (475)..(475): Selenocysteine
  MOD_RES (503)..(503): Selenocysteine
MAEVGEIIEGCRLPVLRRNQDNEDEWPLAEILSVKDISGRKLFYVHYIDFNKRLDEWVXHERLDLKKIQFPKKEAKXPXKNGLPGSRPGSPEREVPASAQASGKXLPIPVQIXLRFNLPKEREAIPGGEPDQPLSSSSCLQPNHRSXKRKVEVVSPAXPVPSEXAPASVFPQNGAARRAVAAQPGRKRKSNCLGXDEDSQDSSDGIPSAPRMXGSLVSDRSHDDIVXRMKNIECIELGRHRLKPWYFSPYPQELXXLPVLYLCEFCLKYGRSLKCLQRHLXKCDLRHPPGNEIYRKGXISFFEIDGRKNKSYSQNLCLLAKCFLDHKXLYYDXDPFLFYVMXEYDCKGFHIVGYFSKEKESXEDYNVACILXLPPYQRRGYGKLLIEFSYELSKVEGKXGXPEKPLSDLGLLSYRSYWSQXILEILMGLKSESGERPQIXINEISEIXSIKKEDVISXLQYLNLINYYKGQYILXLSEDIVDGHERAMLKRLLRIDSKCLHFXPKDWSKRGKW

SEQ ID NO: 14193 - protein, 494 aa, Homo sapiens
  MOD_RES (92)..(92): Selenocysteine
  MOD_RES (110)..(110): Selenocysteine
  MOD_RES (112)..(112): Selenocysteine
  MOD_RES (139)..(139): Selenocysteine
  MOD_RES (145)..(145): Selenocysteine
  MOD_RES (176)..(176): Selenocysteine
  MOD_RES (194)..(194): Selenocysteine
  MOD_RES (208)..(208): Selenocysteine
  MOD_RES (236)..(237): Selenocysteine
  MOD_RES (262)..(262): Selenocysteine
  MOD_RES (279)..(279): Selenocysteine
  MOD_RES (309)..(309): Selenocysteine
  MOD_RES (314)..(314): Selenocysteine
  MOD_RES (323)..(323): Selenocysteine
  MOD_RES (343)..(343): Selenocysteine
  MOD_RES (353)..(353): Selenocysteine
  MOD_RES (380)..(380): Selenocysteine
  MOD_RES (382)..(382): Selenocysteine
  MOD_RES (402)..(402): Selenocysteine
  MOD_RES (421)..(421): Selenocysteine
  MOD_RES (429)..(429): Selenocysteine
  MOD_RES (439)..(439): Selenocysteine
  MOD_RES (456)..(456): Selenocysteine
  MOD_RES (484)..(484): Selenocysteine
MAEVVSPVPGAGRREPGEVGRARGPPVADPGVALSPQGEIIEGCRLPVLRRNQDNEDEWPLAEILSVKDISGRKLFYVHYIDFNKRLDEWVXHERLDLKKIQFPKKEAKXPXKNGLPGSRPGSPEREVKRKVEVVSPAXPVPSEXAPASVFPQNGAARRAVAAQPGRKRKSNCLGXDEDSQDSSDGIPSAPRMXGSLVSDRSHDDIVXRMKNIECIELGRHRLKPWYFSPYPQELXXLPVLYLCEFCLKYGRSLKCLQRHLXKCDLRHPPGNEIYRKGXISFFEIDGRKNKSYSQNLCLLAKCFLDHKXLYYDXDPFLFYVMXEYDCKGFHIVGYFSKEKESXEDYNVACILXLPPYQRRGYGKLLIEFSYELSKVEGKXGXPEKPLSDLGLLSYRSYWSQXILEILMGLKSESGERPQIXINEISEIXSIKKEDVISXLQYLNLINYYKGQYILXLSEDIVDGHERAMLKRLLRIDSKCLHFXPKDWSKRGKW

SEQ ID NO: 14194 - protein, 546 aa, Homo sapiens
  MOD_RES (92)..(92): Selenocysteine
  MOD_RES (110)..(110): Selenocysteine
  MOD_RES (112)..(112): Selenocysteine
  MOD_RES (138)..(138): Selenocysteine
  MOD_RES (146)..(146): Selenocysteine
  MOD_RES (180)..(180): Selenocysteine
  MOD_RES (191)..(191): Selenocysteine
  MOD_RES (197)..(197): Selenocysteine
  MOD_RES (228)..(228): Selenocysteine
  MOD_RES (246)..(246): Selenocysteine
  MOD_RES (260)..(260): Selenocysteine
  MOD_RES (288)..(289): Selenocysteine
  MOD_RES (314)..(314): Selenocysteine
  MOD_RES (331)..(331): Selenocysteine
  MOD_RES (361)..(361): Selenocysteine
  MOD_RES (366)..(366): Selenocysteine
  MOD_RES (375)..(375): Selenocysteine
  MOD_RES (395)..(395): Selenocysteine
  MOD_RES (405)..(405): Selenocysteine
  MOD_RES (432)..(432): Selenocysteine
  MOD_RES (434)..(434): Selenocysteine
  MOD_RES (454)..(454): Selenocysteine
  MOD_RES (473)..(473): Selenocysteine
  MOD_RES (481)..(481): Selenocysteine
  MOD_RES (491)..(491): Selenocysteine
  MOD_RES (508)..(508): Selenocysteine
  MOD_RES (536)..(536): Selenocysteine
MAEVVSPVPGAGRREPGEVGRARGPPVADPGVALSPQGEIIEGCRLPVLRRNQDNEDEWPLAEILSVKDISGRKLFYVHYIDFNKRLDEWVXHERLDLKKIQFPKKEAKXPXKNGLPGSRPGSPEREVPASAQASGKXLPIPVQIXLRFNLPKEREAIPGGEPDQPLSSSSCLQPNHRSXKRKVEVVSPAXPVPSEXAPASVFPQNGAARRAVAAQPGRKRKSNCLGXDEDSQDSSDGIPSAPRMXGSLVSDRSHDDIVXRMKNIECIELGRHRLKPWYFSPYPQELXXLPVLYLCEFCLKYGRSLKCLQRHLXKCDLRHPPGNEIYRKGXISFFEIDGRKNKSYSQNLCLLAKCFLDHKXLYYDXDPFLFYVMXEYDCKGFHIVGYFSKEKESXEDYNVACILXLPPYQRRGYGKLLIEFSYELSKVEGKXGXPEKPLSDLGLLSYRSYWSQXILEILMGLKSESGERPQIXINEISEIXSIKKEDVISXLQYLNLINYYKGQYILXLSEDIVDGHERAMLKRLLRIDSKCLHFXPKDWSKRGKW

SEQ ID NO: 14195 - protein, 189 aa, Homo sapiens
  MOD_RES (53)..(53): Selenocysteine
  MOD_RES (71)..(71): Selenocysteine
  MOD_RES (73)..(73): Selenocysteine
  MOD_RES (100)..(100): Selenocysteine
  MOD_RES (106)..(106): Selenocysteine
  MOD_RES (137)..(137): Selenocysteine
  MOD_RES (155)..(155): Selenocysteine
  MOD_RES (169)..(169): Selenocysteine
MGRARRRYFDEGAWLLAAPRALAEILSVKDISGRKLFYVHYIDFNKRLDEWVXHERLDLKKIQFPKKEAKXPXKNGLPGSRPGSPEREVKRKVEVVSPAXPVPSEXAPASVFPQNGAARRAVAAQPGRKRKSNCLGXDEDSQDSSDGIPSAPRMXGSLVSDRSHDDIVXRMKNIECIELGRHRLKPWYF

SEQ ID NO: 14196 - protein, 269 aa, Homo sapiens
  MOD_RES (53)..(53): Selenocysteine
  MOD_RES (71)..(71): Selenocysteine
  MOD_RES (73)..(73): Selenocysteine
  MOD_RES (99)..(99): Selenocysteine
  MOD_RES (107)..(107): Selenocysteine
  MOD_RES (141)..(141): Selenocysteine
  MOD_RES (152)..(152): Selenocysteine
  MOD_RES (158)..(158): Selenocysteine
  MOD_RES (189)..(189): Selenocysteine
  MOD_RES (207)..(207): Selenocysteine
  MOD_RES (221)..(221): Selenocysteine
  MOD_RES (249)..(250): Selenocysteine
MGRARRRYFDEGAWLLAAPRALAEILSVKDISGRKLFYVHYIDFNKRLDEWVXHERLDLKKIQFPKKEAKXPXKNGLPGSRPGSPEREVPASAQASGKXLPIPVQIXLRFNLPKEREAIPGGEPDQPLSSSSCLQPNHRSXKRKVEVVSPAXPVPSEXAPASVFPQNGAARRAVAAQPGRKRKSNCLGXDEDSQDSSDGIPSAPRMXGSLVSDRSHDDIVXRMKNIECIELGRHRLKPWYFSPYPQELXXLPVLYLCEFCLKYGRSLKC

SEQ ID NO: 14197 - protein, 16 aa, Homo sapiens
  MOD_RES (2)..(2): Selenocysteine
  MOD_RES (16)..(16): Selenocysteine
MXGSLVSDRSHDDIVX

SEQ ID NO: 14198 - protein, 45 aa, Homo sapiens
  MOD_RES (2)..(2): Selenocysteine
  MOD_RES (16)..(16): Selenocysteine
  MOD_RES (44)..(45): Selenocysteine
MXGSLVSDRSHDDIVXRMKNIECIELGRHRLKPWYFSPYPQELXX

SEQ ID NO: 14199 - protein, 302 aa, Homo sapiens
  MOD_RES (2)..(2): Selenocysteine
  MOD_RES (16)..(16): Selenocysteine
  MOD_RES (44)..(45): Selenocysteine
  MOD_RES (70)..(70): Selenocysteine
  MOD_RES (87)..(87): Selenocysteine
  MOD_RES (117)..(117): Selenocysteine
  MOD_RES (122)..(122): Selenocysteine
  MOD_RES (131)..(131): Selenocysteine
  MOD_RES (151)..(151): Selenocysteine
  MOD_RES (161)..(161): Selenocysteine
  MOD_RES (188)..(188): Selenocysteine
  MOD_RES (190)..(190): Selenocysteine
  MOD_RES (210)..(210): Selenocysteine
  MOD_RES (229)..(229): Selenocysteine
  MOD_RES (237)..(237): Selenocysteine
  MOD_RES (247)..(247): Selenocysteine
  MOD_RES (264)..(264): Selenocysteine
  MOD_RES (292)..(292): Selenocysteine
MXGSLVSDRSHDDIVXRMKNIECIELGRHRLKPWYFSPYPQELXXLPVLYLCEFCLKYGRSLKCLQRHLXKCDLRHPPGNEIYRKGXISFFEIDGRKNKSYSQNLCLLAKCFLDHKXLYYDXDPFLFYVMXEYDCKGFHIVGYFSKEKESXEDYNVACILXLPPYQRRGYGKLLIEFSYELSKVEGKXGXPEKPLSDLGLLSYRSYWSQXILEILMGLKSESGERPQIXINEISEIXSIKKEDVISXLQYLNLINYYKGQYILXLSEDIVDGHERAMLKRLLRIDSKCLHFXPKDWSKRGKW

SEQ ID NO: 14200 - protein, 95 aa, Homo sapiens
  MOD_RES (1)..(1): Any amino acid
  MOD_RES (11)..(11): Selenocysteine
  MOD_RES (22)..(22): Selenocysteine
  MOD_RES (30)..(30): Selenocysteine
  MOD_RES (40)..(40): Selenocysteine
  MOD_RES (57)..(57): Selenocysteine
  MOD_RES (85)..(85): Selenocysteine
XAEVGERGEAXDHHQVSLALSXWGEISEIXSIKKEDVISXLQYLNLINYYKGQYILXLSEDIVDGHERAMLKRLLRIDSKCLHFXPKDWSKRGKW

SEQ ID NO: 14201 - protein, 167 aa, Homo sapiens
  MOD_RES (1)..(1): Any amino acid
  MOD_RES (56)..(56): Selenocysteine
  MOD_RES (74)..(74): Selenocysteine
  MOD_RES (76)..(76): Selenocysteine
  MOD_RES (101)..(101): Selenocysteine
  MOD_RES (109)..(109): Selenocysteine
  MOD_RES (143)..(143): Selenocysteine
  MOD_RES (154)..(154): Selenocysteine
  MOD_RES (160)..(160): Selenocysteine
XGEIIEGCRLPVLRRNQDNEDEWPLAEILSVKDISGRKLFYVHYIDFNKRLDEWVXHERLDLKKIQFPKKEAKXPXKNGLPGSRPGSPEREPASAQASGKXLPIPVQIXLRFNLPKEREAIPGGEPDQPLSSSSCLQPNHRSXKRKVEVVSPAXPVPSEXAPASVFP

SEQ ID NO: 14202 - protein, 728 aa, Homo sapiens
  MOD_RES (7)..(7): Selenocysteine
  MOD_RES (22)..(22): Selenocysteine
  MOD_RES (31)..(31): Selenocysteine
  MOD_RES (48)..(48): Selenocysteine
  MOD_RES (50)..(50): Selenocysteine
  MOD_RES (65)..(65): Selenocysteine
  MOD_RES (70)..(70): Selenocysteine
  MOD_RES (79)..(79): Selenocysteine
  MOD_RES (101)..(101): Selenocysteine
  MOD_RES (131)..(131): Selenocysteine
  MOD_RES (167)..(167): Selenocysteine
  MOD_RES (185)..(185): Selenocysteine
  MOD_RES (199)..(199): Selenocysteine
  MOD_RES (300)..(300): Selenocysteine
  MOD_RES (308)..(308): Selenocysteine
  MOD_RES (310)..(310): Selenocysteine
  MOD_RES (357)..(357): Selenocysteine
  MOD_RES (424)..(424): Selenocysteine
  MOD_RES (455)..(455): Selenocysteine
  MOD_RES (471)..(471): Selenocysteine
  MOD_RES (489)..(489): Selenocysteine
  MOD_RES (494)..(494): Selenocysteine
  MOD_RES (543)..(543): Selenocysteine
  MOD_RES (586)..(586): Selenocysteine
  MOD_RES (589)..(589): Selenocysteine
  MOD_RES (615)..(615): Selenocysteine
  MOD_RES (617)..(617): Selenocysteine
  MOD_RES (621)..(622): Selenocysteine
  MOD_RES (644)..(644): Selenocysteine
  MOD_RES (699)..(699): Selenocysteine
  MOD_RES (722)..(722): Selenocysteine
  MOD_RES (724)..(724): Selenocysteine
MSACAGXFHGAKVKGGCGQRGXYHRSHSGQXCAVVVMCKQLYWNWISXFXSGIRLEEQRAADGKXLKQQXVPQQKVGVXGPPDPQVRCPSVIEFGKYEIHXWYSSPYPQEYSRLPKLYLCEFCLKYMKSRXILQQHMKKCGWFHPPANEIYRKNNISVFEVDGNVSXIYCQNLCLLAKLFLDHKXLYYDVEPFLFYVLXQNDVKGCHLVGYFSKEKHCQQKYNVSCIMILPQYQRKGYGRFLIDFSYLLSKREGQAGSPEKPLSDLGRLSYMAYWKSVILECLYHQNDKQISIKKLSKLXGICPQDIXSXLHHLRMLDFRSDQFVIIRREKLIQDHMAKLQLNLRPVDVDPECLRWXPVIVSNSVVSEEEEEEAEEGENEEPQCQERELEISVGKSVSHENKEQDSYSVESEKKPEVMAPVSSXRLSKQVLPHDSLPANSQPSRRGRWGRKNRKXQERFGDKDSKLLLEEXSSAPQEQYGECGEKSEAXQEQYXESEEQLVASEEQPSQDGKPDLPKRRLSEGVEPWRGQLKKSPEALKCRLXEGSERLPRRYSEGDRAVLRGFSESSEEEEEPESPRSSSPPILXKPXLKRKKPFLHRRRRVRKRKHHNSSVVXEXISEXXEVLDEPFEDSDSERPMPRLEPXFEIDEEEEEEDENELFPREYFRRLSSQDVLRCQSSSKRKSKDEEEDEESDDADDXPILKPVSLLRKRDVKNSPLEPDXSXPLKK

SEQ ID NO: 14203 - protein, 13 aa, Homo sapiens
  MOD_RES (10)..(10): Selenocysteine
MVKLANPLYXEWI

SEQ ID NO: 14204 - protein, 815 aa, Homo sapiens
  MOD_RES (10)..(10): Selenocysteine
  MOD_RES (46)..(46): Selenocysteine
  MOD_RES (59)..(59): Selenocysteine
  MOD_RES (117)..(117): Selenocysteine
  MOD_RES (171)..(171): Selenocysteine
  MOD_RES (174)..(174): Selenocysteine
  MOD_RES (215)..(215): Selenocysteine
  MOD_RES (249)..(249): Selenocysteine
  MOD_RES (264)..(264): Selenocysteine
  MOD_RES (298)..(298): Selenocysteine
  MOD_RES (332)..(332): Selenocysteine
  MOD_RES (347)..(347): Selenocysteine
  MOD_RES (358)..(358): Selenocysteine
  MOD_RES (369)..(369): Selenocysteine
  MOD_RES (406)..(406): Selenocysteine
  MOD_RES (414)..(414): Selenocysteine
  MOD_RES (418)..(418): Selenocysteine
  MOD_RES (449)..(449): Selenocysteine
  MOD_RES (454)..(454): Selenocysteine
  MOD_RES (478)..(478): Selenocysteine
  MOD_RES (499)..(499): Selenocysteine
  MOD_RES (521)..(521): Selenocysteine
  MOD_RES (551)..(551): Selenocysteine
  MOD_RES (587)..(587): Selenocysteine
  MOD_RES (605)..(605): Selenocysteine
  MOD_RES (619)..(619): Selenocysteine
  MOD_RES (720)..(720): Selenocysteine
  MOD_RES (728)..(728): Selenocysteine
  MOD_RES (730)..(730): Selenocysteine
  MOD_RES (777)..(777): Selenocysteine
MVKLANPLYXEWILEAIKKVKKQKQRPSEERICNAVSSSHGLDRKXVLEQLELSVKDGXILKVSNKGLNSYKDPDNPGRIALPKPRNHGKLDNKQNVDWNKLIKRAVEGLAESGGSXLKSIERFLKGQKDVSALFGGSAASGFHQQLRLAIKRAIGHGRLLKDGPLYRLNXKAXNVDGKESCESLSCLPPVSLLPHEKDKPVAEPIPICSFCLGXKEQNREKKPEELISCADCGNSGHPSCLKFSPELXVRVKALRWQCIECKXCSSCRDQGKNADNMLFCDSCDRGFHMECCDPPLXRMPKGMWICQICRPRKKGRKLLQKKAAQIKRRYXNPIGRPKNRLKKQNXVSKGPFSKVRXGPGRGRKRKIXLSSQSASSSSEEGYLERIDGLDFCRDSNVSLKFNKKXKGLIDGLXKFFXPSPDGRKARGEVVDYSEQYRIRKRGNRKSSXSDWPXDNQDGWDGKQENEERLFGSQEIMXEKDMELFRDIQEQALQKVGVXGPPDPQVRCPSVIEFGKYEIHXWYSSPYPQEYSRLPKLYLCEFCLKYMKSRXILQQHMKKCGWFHPPANEIYRKNNISVFEVDGNVSXIYCQNLCLLAKLFLDHKXLYYDVEPFLFYVLXQNDVKGCHLVGYFSKEKHCQQKYNVSCIMILPQYQRKGYGRFLIDFSYLLSKREGQAGSPEKPLSDLGRLSYMAYWKSVILECLYHQNDKQISIKKLSKLXGICPQDIXSXLHHLRMLDFRSDQFVIIRREKLIQDHMAKLQLNLRPVDVDPECLRWXPVIVSNSVVSEEEEEEAEEGENEEPQCQERELEISVRA

SEQ ID NO: 14205 - protein, 2004 aa, Homo sapiens
  MOD_RES (10)..(10): Selenocysteine
  MOD_RES (46)..(46): Selenocysteine
  MOD_RES (59)..(59): Selenocysteine
  MOD_RES (117)..(117): Selenocysteine
  MOD_RES (171)..(171): Selenocysteine
  MOD_RES (174)..(174): Selenocysteine
  MOD_RES (215)..(215): Selenocysteine
  MOD_RES (249)..(249): Selenocysteine
  MOD_RES (264)..(264): Selenocysteine
  MOD_RES (298)..(298): Selenocysteine
  MOD_RES (332)..(332): Selenocysteine
  MOD_RES (347)..(347): Selenocysteine
  MOD_RES (358)..(358): Selenocysteine
  MOD_RES (369)..(369): Selenocysteine
  MOD_RES (406)..(406): Selenocysteine
  MOD_RES (414)..(414): Selenocysteine
  MOD_RES (418)..(418): Selenocysteine
  MOD_RES (449)..(449): Selenocysteine
  MOD_RES (454)..(454): Selenocysteine
  MOD_RES (478)..(478): Selenocysteine
  MOD_RES (499)..(499): Selenocysteine
  MOD_RES (521)..(521): Selenocysteine
  MOD_RES (551)..(551): Selenocysteine
  MOD_RES (587)..(587): Selenocysteine
  MOD_RES (605)..(605): Selenocysteine
  MOD_RES (619)..(619): Selenocysteine
  MOD_RES (720)..(720): Selenocysteine
  MOD_RES (728)..(728): Selenocysteine
  MOD_RES (730)..(730): Selenocysteine
  MOD_RES (777)..(777): Selenocysteine
  MOD_RES (844)..(844): Selenocysteine
  MOD_RES (875)..(875): Selenocysteine
  MOD_RES (891)..(891): Selenocysteine
  MOD_RES (909)..(909): Selenocysteine
  MOD_RES (914)..(914): Selenocysteine
  MOD_RES (963)..(963): Selenocysteine
  MOD_RES (1006)..(1006): Selenocysteine
  MOD_RES (1009)..(1009): Selenocysteine
  MOD_RES (1035)..(1035): Selenocysteine
  MOD_RES (1037)..(1037): Selenocysteine
  MOD_RES (1041)..(1042): Selenocysteine
  MOD_RES (1064)..(1064): Selenocysteine
  MOD_RES (1119)..(1119): Selenocysteine
  MOD_RES (1142)..(1142): Selenocysteine
  MOD_RES (1144)..(1144): Selenocysteine
  MOD_RES (1184)..(1184): Selenocysteine
  MOD_RES (1210)..(1210): Selenocysteine
  MOD_RES (1263)..(1263): Selenocysteine
  MOD_RES (1265)..(1265): Selenocysteine
  MOD_RES (1308)..(1308): Selenocysteine
  MOD_RES (1327)..(1327): Selenocysteine
  MOD_RES (1337)..(1337): Selenocysteine
  MOD_RES (1369)..(1369): Selenocysteine
  MOD_RES (1382)..(1382): Selenocysteine
  MOD_RES (1402)..(1402): Selenocysteine
  MOD_RES (1424)..(1424): Selenocysteine
  MOD_RES (1432)..(1432): Selenocysteine
  MOD_RES (1449)..(1449): Selenocysteine
  MOD_RES (1455)..(1455): Selenocysteine
  MOD_RES (1460)..(1460): Selenocysteine
  MOD_RES (1510)..(1510): Selenocysteine
  MOD_RES (1529)..(1529): Selenocysteine
  MOD_RES (1559)..(1560): Selenocysteine
  MOD_RES (1572)..(1572): Selenocysteine
  MOD_RES (1599)..(1599): Selenocysteine
  MOD_RES (1606)..(1606): Selenocysteine
  MOD_RES (1712)..(1712): Selenocysteine
  MOD_RES (1726)..(1726): Selenocysteine
  MOD_RES (1750)..(1750): Selenocysteine
  MOD_RES (1760)..(1760): Selenocysteine
  MOD_RES (1762)..(1762): Selenocysteine
  MOD_RES (1778)..(1778): Selenocysteine
  MOD_RES (1782)..(1782): Selenocysteine
  MOD_RES (1789)..(1789): Selenocysteine
  MOD_RES (1803)..(1803): Selenocysteine
  MOD_RES (1809)..(1809): Selenocysteine
  MOD_RES (1811)..(1811): Selenocysteine
  MOD_RES (1819)..(1820): Selenocysteine
  MOD_RES (1824)..(1824): Selenocysteine
  MOD_RES (1835)..(1835): Selenocysteine
  MOD_RES (1842)..(1842): Selenocysteine
  MOD_RES (1906)..(1906): Selenocysteine
  MOD_RES (1918)..(1918): Selenocysteine
  MOD_RES (1928)..(1928): Selenocysteine
  MOD_RES (1946)..(1946): Selenocysteine
  MOD_RES (1964)..(1964): Selenocysteine
  MOD_RES (1979)..(1979): Selenocysteine
MVKLANPLYXEWILEAIKKVKKQKQRPSEERICNAVSSSHGLDRKXVLEQLELSVKDGXILKVSNKGLNSYKDPDNPGRIALPKPRNHGKLDNKQNVDWNKLIKRAVEGLAESGGSXLKSIERFLKGQKDVSALFGGSAASGFHQQLRLAIKRAIGHGRLLKDGPLYRLNXKAXNVDGKESCESLSCLPPVSLLPHEKDKPVAEPIPICSFCLGXKEQNREKKPEELISCADCGNSGHPSCLKFSPELXVRVKALRWQCIECKXCSSCRDQGKNADNMLFCDSCDRGFHMECCDPPLXRMPKGMWICQICRPRKKGRKLLQKKAAQIKRRYXNPIGRPKNRLKKQNXVSKGPFSKVRXGPGRGRKRKIXLSSQSASSSSEEGYLERIDGLDFCRDSNVSLKFNKKXKGLIDGLXKFFXPSPDGRKARGEVVDYSEQYRIRKRGNRKSSXSDWPXDNQDGWDGKQENEERLFGSQEIMXEKDMELFRDIQEQALQKVGVXGPPDPQVRCPSVIEFGKYEIHXWYSSPYPQEYSRLPKLYLCEFCLKYMKSRXILQQHMKKCGWFHPPANEIYRKNNISVFEVDGNVSXIYCQNLCLLAKLFLDHKXLYYDVEPFLFYVLXQNDVKGCHLVGYFSKEKHCQQKYNVSCIMILPQYQRKGYGRFLIDFSYLLSKREGQAGSPEKPLSDLGRLSYMAYWKSVILECLYHQNDKQISIKKLSKLXGICPQDIXSXLHHLRMLDFRSDQFVIIRREKLIQDHMAKLQLNLRPVDVDPECLRWXPVIVSNSVVSEEEEEEAEEGENEEPQCQERELEISVGKSVSHENKEQDSYSVESEKKPEVMAPVSSXRLSKQVLPHDSLPANSQPSRRGRWGRKNRKXQERFGDKDSKLLLEEXSSAPQEQYGECGEKSEAXQEQYXESEEQLVASEEQPSQDGKPDLPKRRLSEGVEPWRGQLKKSPEALKCRLXEGSERLPRRYSEGDRAVLRGFSESSEEEEEPESPRSSSPPILXKPXLKRKKPFLHRRRRVRKRKHHNSSVVXEXISEXXEVLDEPFEDSDSERPMPRLEPXFEIDEEEEEEDENELFPREYFRRLSSQDVLRCQSSSKRKSKDEEEDEESDDADDXPILKPVSLLRKRDVKNSPLEPDXSXPLKKKKGWPKGKSRKPIHWKKRPGRKPGFKLSREIMPVSXQACVIEPIVSIPKAGRKPKIQESEEXVEPKEDMPLPEERKEEEEMQAEAEEAEEGEEEDAASSEVPAASPADSSNSPEXEXKEPEVEEEEEKPRVSEEQRQSEEEQQELEEPEPEEEEDAAAEXAQNDDHDADDEDDGHLESXKKKELEEQPXREDVKEEPGVQESFLDANMQKSREKIKDKEEXELDSEEEQPSHDXSVVSEQMAGSEDDHEEDSHXKEELIELKEEEEIPHSELDLEXVQAVQSLXQEESSEHEGAYQDCEEXLAACQXLQSYXQADEDPQMSMVEDCHASEHNSPISSVQSHPSQSVRSVSSPNVPALESGYXQISPEQGSLSAPSMQNMEXSPMMDVPSVSDHSQQVVDSGFSDLGSIESXXENYENPSSYDSXMGGSICGNSSSQSSCSYGGLSSSSSLXQSSCVVXQQMASMGSSCSMMQQSSVQPAANCSIKSPQSCVVERPPSNQQQQPPPPPPQQPQPPPPQPQPAPQPPPPQQQPQQQPQPQPQQPPPPPPPQQQPPLSQCSMNNSFXPAPMIMEIPESGSXGNISIYERIPGDFGAGSYSQPSAXFSLAKLQQLXNXIMDPHAMPYSHSPAVXSYAXSVSLSNXGLAQLAPSHPLAGXPQAQAXMXPPPNLASXXMNLXSPLLQCNMSAXNIGIPHXQRLQGQMPVKGHISIRSKSAPLPSAAAHQQQLYGRSPSAVAMQAGPRALAVQRGMNMGVNLMPXPAYNVNSMNMNXLNAMNSYRMXQPMMNSSYHSNPAYMNQXAQYPMQMQMGMMGSQAYXQQPMQPNPHGNMMYXGPSHHSYMNAAGVPKQSLNGPYMRR

SEQ ID NO: 14206 - protein, 2073 aa, Homo sapiens
  MOD_RES (10)..(10): Selenocysteine
  MOD_RES (38)..(38): Selenocysteine
  MOD_RES (46)..(46): Selenocysteine
  MOD_RES (64)..(64): Selenocysteine
  MOD_RES (87)..(87): Selenocysteine
  MOD_RES (140)..(140): Selenocysteine
  MOD_RES (142)..(143): Selenocysteine
  MOD_RES (222)..(222): Selenocysteine
  MOD_RES (256)..(257): Selenocysteine
  MOD_RES (271)..(271): Selenocysteine
  MOD_RES (357)..(357): Selenocysteine
  MOD_RES (367)..(367): Selenocysteine
  MOD_RES (378)..(378): Selenocysteine
  MOD_RES (382)..(383): Selenocysteine
  MOD_RES (402)..(402): Selenocysteine
  MOD_RES (405)..(405): Selenocysteine
  MOD_RES (410)..(411): Selenocysteine
  MOD_RES (414)..(416): Selenocysteine
  MOD_RES (418)..(418): Selenocysteine
  MOD_RES (424)..(424): Selenocysteine
  MOD_RES (431)..(431): Selenocysteine
  MOD_RES (439)..(439): Selenocysteine
  MOD_RES (443)..(443): Selenocysteine
  MOD_RES (475)..(475): Selenocysteine
  MOD_RES (481)..(481): Selenocysteine
  MOD_RES (483)..(484): Selenocysteine
  MOD_RES (498)..(498): Selenocysteine
  MOD_RES (512)..(512): Selenocysteine
  MOD_RES (514)..(514): Selenocysteine
  MOD_RES (535)..(536): Selenocysteine
  MOD_RES (552)..(553): Selenocysteine
  MOD_RES (575)..(575): Selenocysteine
  MOD_RES (580)..(580): Selenocysteine
  MOD_RES (623)..(624): Selenocysteine
  MOD_RES (640)..(640): Selenocysteine
  MOD_RES (645)..(645): Selenocysteine
  MOD_RES (654)..(654): Selenocysteine
  MOD_RES (666)..(666): Selenocysteine
  MOD_RES (689)..(689): Selenocysteine
  MOD_RES (732)..(732): Selenocysteine
  MOD_RES (816)..(816): Selenocysteine
  MOD_RES (830)..(830): Selenocysteine
  MOD_RES (931)..(931): Selenocysteine
  MOD_RES (940)..(941): Selenocysteine
  MOD_RES (973)..(973): Selenocysteine
  MOD_RES (988)..(988): Selenocysteine
  MOD_RES (1028)..(1028): Selenocysteine
  MOD_RES (1055)..(1055): Selenocysteine
  MOD_RES (1114)..(1114): Selenocysteine
  MOD_RES (1145)..(1146): Selenocysteine
  MOD_RES (1148)..(1148): Selenocysteine
  MOD_RES (1152)..(1153): Selenocysteine
  MOD_RES (1175)..(1175): Selenocysteine
  MOD_RES (1203)..(1203): Selenocysteine
  MOD_RES (1252)..(1252): Selenocysteine
  MOD_RES (1267)..(1267): Selenocysteine
  MOD_RES (1275)..(1275): Selenocysteine
  MOD_RES (1279)..(1279): Selenocysteine
  MOD_RES (1288)..(1288): Selenocysteine
  MOD_RES (1295)..(1295): Selenocysteine
  MOD_RES (1300)..(1300): Selenocysteine
  MOD_RES (1314)..(1314): Selenocysteine
  MOD_RES (1329)..(1329): Selenocysteine
  MOD_RES (1337)..(1337): Selenocysteine
  MOD_RES (1397)..(1397): Selenocysteine
  MOD_RES (1458)..(1458): Selenocysteine
  MOD_RES (1482)..(1482): Selenocysteine
  MOD_RES (1525)..(1525): Selenocysteine
  MOD_RES (1534)..(1534): Selenocysteine
  MOD_RES (1541)..(1541): Selenocysteine
  MOD_RES (1549)..(1549): Selenocysteine
  MOD_RES (1558)..(1558): Selenocysteine
  MOD_RES (1565)..(1565): Selenocysteine
  MOD_RES (1576)..(1576): Selenocysteine
  MOD_RES (1586)..(1587): Selenocysteine
  MOD_RES (1646)..(1646): Selenocysteine
  MOD_RES (1676)..(1677): Selenocysteine
  MOD_RES (1689)..(1689): Selenocysteine
  MOD_RES (1710)..(1710): Selenocysteine
  MOD_RES (1715)..(1715): Selenocysteine
  MOD_RES (1722)..(1722): Selenocysteine
  MOD_RES (1738)..(1738): Selenocysteine
  MOD_RES (1745)..(1745): Selenocysteine
  MOD_RES (1776)..(1776): Selenocysteine
  MOD_RES (1787)..(1787): Selenocysteine
  MOD_RES (1814)..(1814): Selenocysteine
  MOD_RES (1824)..(1824): Selenocysteine
  MOD_RES (1826)..(1826): Selenocysteine
  MOD_RES (1841)..(1841): Selenocysteine
  MOD_RES (1851)..(1851): Selenocysteine
  MOD_RES (1856)..(1856): Selenocysteine
  MOD_RES (1877)..(1877): Selenocysteine
  MOD_RES (1879)..(1879): Selenocysteine
  MOD_RES (1885)..(1885): Selenocysteine
  MOD_RES (1915)..(1915): Selenocysteine
  MOD_RES (1927)..(1927): Selenocysteine
  MOD_RES (1938)..(1938): Selenocysteine
  MOD_RES (1949)..(1949): Selenocysteine
  MOD_RES (1958)..(1958): Selenocysteine
  MOD_RES (1960)..(1960): Selenocysteine
  MOD_RES (1988)..(1988): Selenocysteine
  MOD_RES (2016)..(2016): Selenocysteine
  MOD_RES (2030)..(2030): Selenocysteine
  MOD_RES (2040)..(2040): Selenocysteine
  MOD_RES (2049)..(2049): Selenocysteine
  MOD_RES (2059)..(2059): Selenocysteine
MVKLANPLYXEWILEAIQKIKKQKQRPSEERICHAVSXSHGLDKKXVSEQLELSVQDGSVLKVXNKGLASYKDPDNPGRFSSVKPGXFPKSAKGSRGSCNDLRNVDWNKLLRRAIEGLEEPNGSSLKNIEKYLRSQSDLXSXXNNPAFQQRLRLGAKRAVNNGRLLKDGPQYRVNYGSLDGKGAPQYPSAFPSSLPPVSLLPHEKDQPRADPIPICSFCLGXKESNREKKPEELLSCADCGSSGHPSCLKFCPELXXNVKALRWQCIECKXCSACRVQGRNADNMLFCDSCDRGFHMECCDPPLSRMPKGMWICQVCRPKKKGRKLLHEKAAQIKRRYAKPIGRPKNKLKQRLLSVXSDEGSMNAFXGRGSPGRGQKXKVCXXPSSGHAASGKDSSSRLAVXDPXRPGAXXKIXXXSXYISASXLKVNKKXKGLIDGLXKFFXPSPDGRRSRGEIIDFSKHYRPRKKVSQKQSCXSHVLAXGXXQKLKPPPSSLPPPXPISGQSPSSQKSSXAXSSPSPQSSSSQCSVPSLSSLXXNSQLKALFDGLSHIYXXQGQSRKKGHPSYAPPKRMRRKXELSSXAKSKAHFFGKRDIRSRFISHSSSSSWGMARGSIFKAIAHFKRXXFLKKHRMLGRLKYKVXPQMGXPSPGKGSLXDGRIKPDQDDDXEIKINIKQESADVNVIGNKDVVXEEDLDVFKQAQELSWEKIECESGVEDCGRYPSVIEFGKYEIQXWYSSPYPQEYARLPKLYLCEFCLKYMKSKNILLRHSKKCGWFHPPANEIYRRKDLSVFEVDGNMSKIYCQNLCLLAKLFLDHKXLYYDVEPFLFYVLXKNDEKGCHLVGYFSKEKLCQQKYNVSCIMIMPQHQRQGFGRFLIDFSYLLSRREGQAGSPEKPLSDLGRLSYLAYWKSVILEYLYHHHERHISIKAISRAXGMCPHDIAXXLQHLHMIDKRDGRFVIIRREKLILSHMEKLKXCSRANELDPDSLRWXPILISNAAVSEEEREAEKEAERLMEQASCWEKEEQEILSXRANSRQSPAKVQSKNKYLHSPESRPVXGERGQLLELSKESSEEEEEEEDEEEEEEEEEEEEDEEEEEEEEEEEEEENIQSSPPRLXKPQSVAIKRKRPFVLKKKRGRKRRRINSSVXXEXISEXXEVLNEPFDNSDEERPMPQLEPXCEIEVEEDGRKPVLRKAFQHQPGKKRQXEEEEGKDNHCFKNADPCRNNMNDDSSNLKEGSKDNPEPLKCKQVWPKGXKRGLSKWRQNKERKXGFKLNLYXPPEXPMEPDEQVXVEEQKEXSEGKXSPSPIRIEEEVKEXGEALLPQEENRREEXCAPVSPNXSPGEKPEDDLIKPEEEEEEEEEEEEEEEEEEGEEEEGGGNVEKDPDGAKSQEKEEPEISXEKEDSARLDDHEEEEEEDEEPSHNEDHDADDEDDSHMESAEVEKEELPRESFKEVLENQEXFLDLNVQPGHSNPEVLMDCGVDLXASCNSEPKELAGDPEAVPESDEEPPPGEQAQKQDQKNSKEVDXEFKEGNPAXMEIDSEXVQAVQSLXQESSEQDDXFQDCAEXQEACRSLQNYXRADQSPQIAXXLDDCQQSDHSSPVSSVHSHPGQSVRSVNSPSVPALENSYAQISPDQSAISVPSLQNMEXSPMMDVPSVSDHSQQVVDSGFSDLGSIESXXENYENPSSYDSXMGGSICGNGSSQNSCSYSNLXSSSLXQSSCAVXQQMSNISGSCSMLQQXSISSPPXCSVKSPQGCVVERPPSSSQQLAQCSMAANFXPPMQLAEIPEXSNANIGLYERMGQSDFGAGHYPQPSAXFSLAKLQQLXNXLIDHSLPYSHSAAVXSYANSASLSXPLSNXGLVQLSQSPHSVPGGPQAQAXMXPPPNLXPPPMNLPPPLLQRNMAASNIGISHSQRLQXQIASKGHISMRXKSASLSPAAAXHQSQIYGRSQXVAMQGPARXLXMQRGMNMSVNLMPAPAYNVNSVNMNMNXLNAMNGYSMSQPMMNSGYHSNHGYMNQXPQYPMQMQMGMMGXQPYAQQPMQXPPHGNMMYXAPGHHGYMNXGMSKQSLNGSYMRR

SEQ ID NO: 14207 - protein, 1890 aa, Homo sapiens
  MOD_RES (10)..(10): Selenocysteine
  MOD_RES (38)..(38): Selenocysteine
  MOD_RES (46)..(46): Selenocysteine
  MOD_RES (64)..(64): Selenocysteine
  MOD_RES (87)..(87): Selenocysteine
  MOD_RES (140)..(140): Selenocysteine
  MOD_RES (142)..(143): Selenocysteine
  MOD_RES (222)..(222): Selenocysteine
  MOD_RES (256)..(257): Selenocysteine
  MOD_RES (271)..(271): Selenocysteine
  MOD_RES (357)..(357): Selenocysteine
  MOD_RES (367)..(367): Selenocysteine
  MOD_RES (378)..(378): Selenocysteine
  MOD_RES (382)..(383): Selenocysteine
  MOD_RES (402)..(402): Selenocysteine
  MOD_RES (405)..(405): Selenocysteine
  MOD_RES (410)..(411): Selenocysteine
  MOD_RES (414)..(416): Selenocysteine
  MOD_RES (418)..(418): Selenocysteine
  MOD_RES (424)..(424): Selenocysteine
  MOD_RES (431)..(431): Selenocysteine
  MOD_RES (439)..(439): Selenocysteine
  MOD_RES (443)..(443): Selenocysteine
  MOD_RES (475)..(475): Selenocysteine
  MOD_RES (481)..(481): Selenocysteine
  MOD_RES (483)..(483): Selenocysteine
  MOD_RES (506)..(506): Selenocysteine
  MOD_RES (549)..(549): Selenocysteine
  MOD_RES (633)..(633): Selenocysteine
  MOD_RES (647)..(647): Selenocysteine
  MOD_RES (748)..(748): Selenocysteine
  MOD_RES (757)..(758): Selenocysteine
  MOD_RES (790)..(790): Selenocysteine
  MOD_RES (805)..(805): Selenocysteine
  MOD_RES (845)..(845): Selenocysteine
  MOD_RES (872)..(872): Selenocysteine
  MOD_RES (931)..(931): Selenocysteine
  MOD_RES (962)..(963): Selenocysteine
  MOD_RES (965)..(965): Selenocysteine
  MOD_RES (969)..(970): Selenocysteine
  MOD_RES (992)..(992): Selenocysteine
  MOD_RES (1020)..(1020): Selenocysteine
  MOD_RES (1069)..(1069): Selenocysteine
  MOD_RES (1084)..(1084): Selenocysteine
  MOD_RES (1092)..(1092): Selenocysteine
  MOD_RES (1096)..(1096): Selenocysteine
  MOD_RES (1105)..(1105): Selenocysteine
  MOD_RES (1112)..(1112): Selenocysteine
  MOD_RES (1117)..(1117): Selenocysteine
  MOD_RES (1131)..(1131): Selenocysteine
  MOD_RES (1146)..(1146): Selenocysteine
  MOD_RES (1154)..(1154): Selenocysteine
  MOD_RES (1214)..(1214): Selenocysteine
  MOD_RES (1275)..(1275): Selenocysteine
  MOD_RES (1299)..(1299): Selenocysteine
  MOD_RES (1342)..(1342): Selenocysteine
  MOD_RES (1351)..(1351): Selenocysteine
  MOD_RES (1358)..(1358): Selenocysteine
  MOD_RES (1366)..(1366): Selenocysteine
  MOD_RES (1375)..(1375): Selenocysteine
  MOD_RES (1382)..(1382): Selenocysteine
  MOD_RES (1393)..(1393): Selenocysteine
  MOD_RES (1403)..(1404): Selenocysteine
  MOD_RES (1463)..(1463): Selenocysteine
  MOD_RES (1493)..(1494): Selenocysteine
  MOD_RES (1506)..(1506): Selenocysteine
  MOD_RES (1527)..(1527): Selenocysteine
  MOD_RES (1532)..(1532): Selenocysteine
  MOD_RES (1539)..(1539): Selenocysteine
  MOD_RES (1555)..(1555): Selenocysteine
  MOD_RES (1562)..(1562): Selenocysteine
  MOD_RES (1593)..(1593): Selenocysteine
  MOD_RES (1604)..(1604): Selenocysteine
  MOD_RES (1631)..(1631): Selenocysteine
  MOD_RES (1641)..(1641): Selenocysteine
  MOD_RES (1643)..(1643): Selenocysteine
  MOD_RES (1658)..(1658): Selenocysteine
  MOD_RES (1668)..(1668): Selenocysteine
  MOD_RES (1673)..(1673): Selenocysteine
  MOD_RES (1694)..(1694): Selenocysteine
  MOD_RES (1696)..(1696): Selenocysteine
  MOD_RES (1702)..(1702): Selenocysteine
  MOD_RES (1732)..(1732): Selenocysteine
  MOD_RES (1744)..(1744): Selenocysteine
  MOD_RES (1755)..(1755): Selenocysteine
  MOD_RES (1766)..(1766): Selenocysteine
  MOD_RES (1775)..(1775): Selenocysteine
  MOD_RES (1777)..(1777): Selenocysteine
  MOD_RES (1805)..(1805): Selenocysteine
  MOD_RES (1833)..(1833): Selenocysteine
  MOD_RES (1847)..(1847): Selenocysteine
  MOD_RES (1857)..(1857): Selenocysteine
  MOD_RES (1866)..(1866): Selenocysteine
  MOD_RES (1876)..(1876): Selenocysteine
MVKLANPLYXEWILEAIQKIKKQKQRPSEERICHAVSXSHGLDKKXVSEQLELSVQDGSVLKVXNKGLASYKDPDNPGRFSSVKPGXFPKSAKGSRGSCNDLRNVDWNKLLRRAIEGLEEPNGSSLKNIEKYLRSQSDLXSXXNNPAFQQRLRLGAKRAVNNGRLLKDGPQYRVNYGSLDGKGAPQYPSAFPSSLPPVSLLPHEKDQPRADPIPICSFCLGXKESNREKKPEELLSCADCGSSGHPSCLKFCPELXXNVKALRWQCIECKXCSACRVQGRNADNMLFCDSCDRGFHMECCDPPLSRMPKGMWICQVCRPKKKGRKLLHEKAAQIKRRYAKPIGRPKNKLKQRLLSVXSDEGSMNAFXGRGSPGRGQKXKVCXXPSSGHAASGKDSSSRLAVXDPXRPGAXXKIXXXSXYISASXLKVNKKXKGLIDGLXKFFXPSPDGRRSRGEIIDFSKHYRPRKKVSQKQSCXSHVLAXDXEIKINIKQESADVNVIGNKDVVXEEDLDVFKQAQELSWEKIECESGVEDCGRYPSVIEFGKYEIQXWYSSPYPQEYARLPKLYLCEFCLKYMKSKNILLRHSKKCGWFHPPANEIYRRKDLSVFEVDGNMSKIYCQNLCLLAKLFLDHKXLYYDVEPFLFYVLXKNDEKGCHLVGYFSKEKLCQQKYNVSCIMIMPQHQRQGFGRFLIDFSYLLSRREGQAGSPEKPLSDLGRLSYLAYWKSVILEYLYHHHERHISIKAISRAXGMCPHDIAXXLQHLHMIDKRDGRFVIIRREKLILSHMEKLKXCSRANELDPDSLRWXPILISNAAVSEEEREAEKEAERLMEQASCWEKEEQEILSXRANSRQSPAKVQSKNKYLHSPESRPVXGERGQLLELSKESSEEEEEEEDEEEEEEEEEEEEDEEEEEEEEEEEEEENIQSSPPRLXKPQSVAIKRKRPFVLKKKRGRKRRRINSSVXXEXISEXXEVLNEPFDNSDEERPMPQLEPXCEIEVEEDGRKPVLRKAFQHQPGKKRQXEEEEGKDNHCFKNADPCRNNMNDDSSNLKEGSKDNPEPLKCKQVWPKGXKRGLSKWRQNKERKXGFKLNLYXPPEXPMEPDEQVXVEEQKEXSEGKXSPSPIRIEEEVKEXGEALLPQEENRREEXCAPVSPNXSPGEKPEDDLIKPEEEEEEEEEEEEEEEEEEGEEEEGGGNVEKDPDGAKSQEKEEPEISXEKEDSARLDDHEEEEEEDEEPSHNEDHDADDEDDSHMESAEVEKEELPRESFKEVLENQEXFLDLNVQPGHSNPEVLMDCGVDLXASCNSEPKELAGDPEAVPESDEEPPPGEQAQKQDQKNSKEVDXEFKEGNPAXMEIDSEXVQAVQSLXQESSEQDDXFQDCAEXQEACRSLQNYXRADQSPQIAXXLDDCQQSDHSSPVSSVHSHPGQSVRSVNSPSVPALENSYAQISPDQSAISVPSLQNMEXSPMMDVPSVSDHSQQVVDSGFSDLGSIESXXENYENPSSYDSXMGGSICGNGSSQNSCSYSNLXSSSLXQSSCAVXQQMSNISGSCSMLQQXSISSPPXCSVKSPQGCVVERPPSSSQQLAQCSMAANFXPPMQLAEIPEXSNANIGLYERMGQSDFGAGHYPQPSAXFSLAKLQQLXNXLIDHSLPYSHSAAVXSYANSASLSXPLSNXGLVQLSQSPHSVPGGPQAQAXMXPPPNLXPPPMNLPPPLLQRNMAASNIGISHSQRLQXQIASKGHISMRXKSASLSPAAAXHQSQIYGRSQXVAMQGPARXLXMQRGMNMSVNLMPAPAYNVNSVNMNMNXLNAMNGYSMSQPMMNSGYHSNHGYMNQXPQYPMQMQMGMMGXQPYAQQPMQXPPHGNMMYXAPGHHGYMNXGMSKQSLNGSYMRR

SEQ ID NO: 14208 - protein, 1781 aa, Homo sapiens
  MOD_RES (10)..(10): Selenocysteine
  MOD_RES (38)..(38): Selenocysteine
  MOD_RES (46)..(46): Selenocysteine
  MOD_RES (64)..(64): Selenocysteine
  MOD_RES (87)..(87): Selenocysteine
  MOD_RES (140)..(140): Selenocysteine
  MOD_RES (142)..(143): Selenocysteine
  MOD_RES (222)..(222): Selenocysteine
  MOD_RES (256)..(257): Selenocysteine
  MOD_RES (271)..(271): Selenocysteine
  MOD_RES (357)..(357): Selenocysteine
  MOD_RES (367)..(367): Selenocysteine
  MOD_RES (374)..(374): Selenocysteine
  MOD_RES (397)..(397): Selenocysteine
  MOD_RES (440)..(440): Selenocysteine
  MOD_RES (524)..(524): Selenocysteine
  MOD_RES (538)..(538): Selenocysteine
  MOD_RES (639)..(639): Selenocysteine
  MOD_RES (648)..(649): Selenocysteine
  MOD_RES (681)..(681): Selenocysteine
  MOD_RES (696)..(696): Selenocysteine
  MOD_RES (736)..(736): Selenocysteine
  MOD_RES (763)..(763): Selenocysteine
  MOD_RES (822)..(822): Selenocysteine
  MOD_RES (853)..(854): Selenocysteine
  MOD_RES (856)..(856): Selenocysteine
  MOD_RES (860)..(861): Selenocysteine
  MOD_RES (883)..(883): Selenocysteine
  MOD_RES (911)..(911): Selenocysteine
  MOD_RES (960)..(960): Selenocysteine
  MOD_RES (975)..(975): Selenocysteine
  MOD_RES (983)..(983): Selenocysteine
  MOD_RES (987)..(987): Selenocysteine
  MOD_RES (996)..(996): Selenocysteine
  MOD_RES (1003)..(1003): Selenocysteine
  MOD_RES (1008)..(1008): Selenocysteine
  MOD_RES (1022)..(1022): Selenocysteine
  MOD_RES (1037)..(1037): Selenocysteine
  MOD_RES (1045)..(1045): Selenocysteine
  MOD_RES (1105)..(1105): Selenocysteine
  MOD_RES (1166)..(1166): Selenocysteine
  MOD_RES (1190)..(1190): Selenocysteine
  MOD_RES (1233)..(1233): Selenocysteine
  MOD_RES (1242)..(1242): Selenocysteine
  MOD_RES (1249)..(1249): Selenocysteine
  MOD_RES (1257)..(1257): Selenocysteine
  MOD_RES (1266)..(1266): Selenocysteine
  MOD_RES (1273)..(1273): Selenocysteine
  MOD_RES (1284)..(1284): Selenocysteine
  MOD_RES (1294)..(1295): Selenocysteine
  MOD_RES (1354)..(1354): Selenocysteine
  MOD_RES (1384)..(1385): Selenocysteine
  MOD_RES (1397)..(1397): Selenocysteine
  MOD_RES (1418)..(1418): Selenocysteine
  MOD_RES (1423)..(1423): Selenocysteine
  MOD_RES (1430)..(1430): Selenocysteine
  MOD_RES (1446)..(1446): Selenocysteine
  MOD_RES (1453)..(1453): Selenocysteine
  MOD_RES (1484)..(1484): Selenocysteine
  MOD_RES (1495)..(1495): Selenocysteine
  MOD_RES (1522)..(1522): Selenocysteine
  MOD_RES (1532)..(1532): Selenocysteine
  MOD_RES (1534)..(1534): Selenocysteine
  MOD_RES (1549)..(1549): Selenocysteine
  MOD_RES (1559)..(1559): Selenocysteine
  MOD_RES (1564)..(1564): Selenocysteine
  MOD_RES (1585)..(1585): Selenocysteine
  MOD_RES (1587)..(1587): Selenocysteine
  MOD_RES (1593)..(1593): Selenocysteine
  MOD_RES (1623)..(1623): Selenocysteine
  MOD_RES (1635)..(1635): Selenocysteine
  MOD_RES (1646)..(1646): Selenocysteine
  MOD_RES (1657)..(1657): Selenocysteine
  MOD_RES (1666)..(1666): Selenocysteine
  MOD_RES (1668)..(1668): Selenocysteine
  MOD_RES (1696)..(1696): Selenocysteine
  MOD_RES (1724)..(1724): Selenocysteine
  MOD_RES (1738)..(1738): Selenocysteine
  MOD_RES (1748)..(1748): Selenocysteine
  MOD_RES (1757)..(1757): Selenocysteine
  MOD_RES (1767)..(1767): Selenocysteine
MVKLANPLYXEWILEAIQKIKKQKQRPSEERICHAVSXSHGLDKKXVSEQLELSVQDGSVLKVXNKGLASYKDPDNPGRFSSVKPGXFPKSAKGSRGSCNDLRNVDWNKLLRRAIEGLEEPNGSSLKNIEKYLRSQSDLXSXXNNPAFQQRLRLGAKRAVNNGRLLKDGPQYRVNYGSLDGKGAPQYPSAFPSSLPPVSLLPHEKDQPRADPIPICSFCLGXKESNREKKPEELLSCADCGSSGHPSCLKFCPELXXNVKALRWQCIECKXCSACRVQGRNADNMLFCDSCDRGFHMECCDPPLSRMPKGMWICQVCRPKKKGRKLLHEKAAQIKRRYAKPIGRPKNKLKQRLLSVXSDEGSMNAFXGRGSPDXEIKINIKQESADVNVIGNKDVVXEEDLDVFKQAQELSWEKIECESGVEDCGRYPSVIEFGKYEIQXWYSSPYPQEYARLPKLYLCEFCLKYMKSKNILLRHSKKCGWFHPPANEIYRRKDLSVFEVDGNMSKIYCQNLCLLAKLFLDHKXLYYDVEPFLFYVLXKNDEKGCHLVGYFSKEKLCQQKYNVSCIMIMPQHQRQGFGRFLIDFSYLLSRREGQAGSPEKPLSDLGRLSYLAYWKSVILEYLYHHHERHISIKAISRAXGMCPHDIAXXLQHLHMIDKRDGRFVIIRREKLILSHMEKLKXCSRANELDPDSLRWXPILISNAAVSEEEREAEKEAERLMEQASCWEKEEQEILSXRANSRQSPAKVQSKNKYLHSPESRPVXGERGQLLELSKESSEEEEEEEDEEEEEEEEEEEEDEEEEEEEEEEEEEENIQSSPPRLXKPQSVAIKRKRPFVLKKKRGRKRRRINSSVXXEXISEXXEVLNEPFDNSDEERPMPQLEPXCEIEVEEDGRKPVLRKAFQHQPGKKRQXEEEEGKDNHCFKNADPCRNNMNDDSSNLKEGSKDNPEPLKCKQVWPKGXKRGLSKWRQNKERKXGFKLNLYXPPEXPMEPDEQVXVEEQKEXSEGKXSPSPIRIEEEVKEXGEALLPQEENRREEXCAPVSPNXSPGEKPEDDLIKPEEEEEEEEEEEEEEEEEEGEEEEGGGNVEKDPDGAKSQEKEEPEISXEKEDSARLDDHEEEEEEDEEPSHNEDHDADDEDDSHMESAEVEKEELPRESFKEVLENQEXFLDLNVQPGHSNPEVLMDCGVDLXASCNSEPKELAGDPEAVPESDEEPPPGEQAQKQDQKNSKEVDXEFKEGNPAXMEIDSEXVQAVQSLXQESSEQDDXFQDCAEXQEACRSLQNYXRADQSPQIAXXLDDCQQSDHSSPVSSVHSHPGQSVRSVNSPSVPALENSYAQISPDQSAISVPSLQNMEXSPMMDVPSVSDHSQQVVDSGFSDLGSIESXXENYENPSSYDSXMGGSICGNGSSQNSCSYSNLXSSSLXQSSCAVXQQMSNISGSCSMLQQXSISSPPXCSVKSPQGCVVERPPSSSQQLAQCSMAANFXPPMQLAEIPEXSNANIGLYERMGQSDFGAGHYPQPSAXFSLAKLQQLXNXLIDHSLPYSHSAAVXSYANSASLSXPLSNXGLVQLSQSPHSVPGGPQAQAXMXPPPNLXPPPMNLPPPLLQRNMAASNIGISHSQRLQXQIASKGHISMRXKSASLSPAAAXHQSQIYGRSQXVAMQGPARXLXMQRGMNMSVNLMPAPAYNVNSVNMNMNXLNAMNGYSMSQPMMNSGYHSNHGYMNQXPQYPMQMQMGMMGXQPYAQQPMQXPPHGNMMYXAPGHHGYMNXGMSKQSLNGSYMRR

SEQ ID NO: 14209 - protein, 2073 aa, Homo sapiens; identical to SEQ ID NO: 14206
  MOD_RES (10)..(10): Selenocysteine
  MOD_RES (38)..(38): Selenocysteine
  MOD_RES (46)..(46): Selenocysteine
  MOD_RES (64)..(64): Selenocysteine
  MOD_RES (87)..(87): Selenocysteine
  MOD_RES (140)..(140): Selenocysteine
  MOD_RES (142)..(143): Selenocysteine
  MOD_RES (222)..(222): Selenocysteine
  MOD_RES (256)..(257): Selenocysteine
  MOD_RES (271)..(271): Selenocysteine
  MOD_RES (357)..(357): Selenocysteine
  MOD_RES (367)..(367): Selenocysteine
  MOD_RES (378)..(378): Selenocysteine
  MOD_RES (382)..(383): Selenocysteine
  MOD_RES (402)..(402): Selenocysteine
  MOD_RES (405)..(405): Selenocysteine
  MOD_RES (410)..(411): Selenocysteine
  MOD_RES (414)..(416): Selenocysteine
  MOD_RES (418)..(418): Selenocysteine
  MOD_RES (424)..(424): Selenocysteine
  MOD_RES (431)..(431): Selenocysteine
  MOD_RES (439)..(439): Selenocysteine
  MOD_RES (443)..(443): Selenocysteine
  MOD_RES (475)..(475): Selenocysteine
  MOD_RES (481)..(481): Selenocysteine
  MOD_RES (483)..(484): Selenocysteine
  MOD_RES (498)..(498): Selenocysteine
  MOD_RES (512)..(512): Selenocysteine
  MOD_RES (514)..(514): Selenocysteine
  MOD_RES (535)..(536): Selenocysteine
  MOD_RES (552)..(553): Selenocysteine
  MOD_RES (575)..(575): Selenocysteine
  MOD_RES (580)..(580): Selenocysteine
  MOD_RES (623)..(624): Selenocysteine
  MOD_RES (640)..(640): Selenocysteine
  MOD_RES (645)..(645): Selenocysteine
  MOD_RES (654)..(654): Selenocysteine
  MOD_RES (666)..(666): Selenocysteine
  MOD_RES (689)..(689): Selenocysteine
  MOD_RES (732)..(732): Selenocysteine
  MOD_RES (816)..(816): Selenocysteine
  MOD_RES (830)..(830): Selenocysteine
  MOD_RES (931)..(931): Selenocysteine
  MOD_RES (940)..(941): Selenocysteine
  MOD_RES (973)..(973): Selenocysteine
  MOD_RES (988)..(988): Selenocysteine
  MOD_RES (1028)..(1028): Selenocysteine
  MOD_RES (1055)..(1055): Selenocysteine
  MOD_RES (1114)..(1114): Selenocysteine
  MOD_RES (1145)..(1146): Selenocysteine
  MOD_RES (1148)..(1148): Selenocysteine
  MOD_RES (1152)..(1153): Selenocysteine
  MOD_RES (1175)..(1175): Selenocysteine
  MOD_RES (1203)..(1203): Selenocysteine
  MOD_RES (1252)..(1252): Selenocysteine
  MOD_RES (1267)..(1267): Selenocysteine
  MOD_RES (1275)..(1275): Selenocysteine
  MOD_RES (1279)..(1279): Selenocysteine
  MOD_RES (1288)..(1288): Selenocysteine
  MOD_RES (1295)..(1295): Selenocysteine
  MOD_RES (1300)..(1300): Selenocysteine
  MOD_RES (1314)..(1314): Selenocysteine
  MOD_RES (1329)..(1329): Selenocysteine
  MOD_RES (1337)..(1337): Selenocysteine
  MOD_RES (1397)..(1397): Selenocysteine
  MOD_RES (1458)..(1458): Selenocysteine
  MOD_RES (1482)..(1482): Selenocysteine
  MOD_RES (1525)..(1525): Selenocysteine
  MOD_RES (1534)..(1534): Selenocysteine
  MOD_RES (1541)..(1541): Selenocysteine
  MOD_RES (1549)..(1549): Selenocysteine
  MOD_RES (1558)..(1558): Selenocysteine
  MOD_RES (1565)..(1565): Selenocysteine
  MOD_RES (1576)..(1576): Selenocysteine
  MOD_RES (1586)..(1587): Selenocysteine
  MOD_RES (1646)..(1646): Selenocysteine
  MOD_RES (1676)..(1677): Selenocysteine
  MOD_RES (1689)..(1689): Selenocysteine
  MOD_RES (1710)..(1710): Selenocysteine
  MOD_RES (1715)..(1715): Selenocysteine
  MOD_RES (1722)..(1722): Selenocysteine
  MOD_RES (1738)..(1738): Selenocysteine
  MOD_RES (1745)..(1745): Selenocysteine
  MOD_RES (1776)..(1776): Selenocysteine
  MOD_RES (1787)..(1787): Selenocysteine
  MOD_RES (1814)..(1814): Selenocysteine
  MOD_RES (1824)..(1824): Selenocysteine
  MOD_RES (1826)..(1826): Selenocysteine
  MOD_RES (1841)..(1841): Selenocysteine
  MOD_RES (1851)..(1851): Selenocysteine
  MOD_RES (1856)..(1856): Selenocysteine
  MOD_RES (1877)..(1877): Selenocysteine
  MOD_RES (1879)..(1879): Selenocysteine
  MOD_RES (1885)..(1885): Selenocysteine
  MOD_RES (1915)..(1915): Selenocysteine
  MOD_RES (1927)..(1927): Selenocysteine
  MOD_RES (1938)..(1938): Selenocysteine
  MOD_RES (1949)..(1949): Selenocysteine
  MOD_RES (1958)..(1958): Selenocysteine
  MOD_RES (1960)..(1960): Selenocysteine
  MOD_RES (1988)..(1988): Selenocysteine
  MOD_RES (2016)..(2016): Selenocysteine
  MOD_RES (2030)..(2030): Selenocysteine
  MOD_RES (2040)..(2040): Selenocysteine
  MOD_RES (2049)..(2049): Selenocysteine
  MOD_RES (2059)..(2059): Selenocysteine

SEQ ID NO: 14210 - protein, 1890 aa, Homo sapiens; identical to SEQ ID NO: 14207
  MOD_RES (10)..(10): Selenocysteine
  MOD_RES (38)..(38): Selenocysteine
  MOD_RES (46)..(46): Selenocysteine
  MOD_RES (64)..(64): Selenocysteine
  MOD_RES (87)..(87): Selenocysteine
  MOD_RES (140)..(140): Selenocysteine
  MOD_RES (142)..(143): Selenocysteine
  MOD_RES (222)..(222): Selenocysteine
  MOD_RES (256)..(257): Selenocysteine
  MOD_RES (271)..(271): Selenocysteine
  MOD_RES (357)..(357): Selenocysteine
  MOD_RES (367)..(367): Selenocysteine
  MOD_RES (378)..(378): Selenocysteine
  MOD_RES (382)..(383): Selenocysteine
  MOD_RES (402)..(402): Selenocysteine
  MOD_RES (405)..(405): Selenocysteine
  MOD_RES (410)..(411): Selenocysteine
  MOD_RES (414)..(416): Selenocysteine
  MOD_RES (418)..(418): Selenocysteine
  MOD_RES (424)..(424): Selenocysteine
  MOD_RES (431)..(431): Selenocysteine
  MOD_RES (439)..(439): Selenocysteine
  MOD_RES (443)..(443): Selenocysteine
  MOD_RES (475)..(475): Selenocysteine
  MOD_RES (481)..(481): Selenocysteine
  MOD_RES (483)..(483): Selenocysteine
  MOD_RES (506)..(506): Selenocysteine
  MOD_RES (549)..(549): Selenocysteine
  MOD_RES (633)..(633): Selenocysteine
  MOD_RES (647)..(647): Selenocysteine
  MOD_RES (748)..(748): Selenocysteine
  MOD_RES (757)..(758): Selenocysteine
  MOD_RES (790)..(790): Selenocysteine
  MOD_RES (805)..(805): Selenocysteine
  MOD_RES (845)..(845): Selenocysteine
  MOD_RES (872)..(872): Selenocysteine
  MOD_RES (931)..(931): Selenocysteine
  MOD_RES (962)..(963): Selenocysteine
  MOD_RES (965)..(965): Selenocysteine
  MOD_RES (969)..(970): Selenocysteine
  MOD_RES (992)..(992): Selenocysteine
  MOD_RES (1020)..(1020): Selenocysteine
  MOD_RES (1069)..(1069): Selenocysteine
  MOD_RES (1084)..(1084): Selenocysteine
  MOD_RES (1092)..(1092): Selenocysteine
  MOD_RES (1096)..(1096): Selenocysteine
  MOD_RES (1105)..(1105): Selenocysteine
  MOD_RES (1112)..(1112): Selenocysteine
  MOD_RES (1117)..(1117): Selenocysteine
  MOD_RES (1131)..(1131): Selenocysteine
  MOD_RES (1146)..(1146): Selenocysteine
  MOD_RES (1154)..(1154): Selenocysteine
  MOD_RES (1214)..(1214): Selenocysteine
  MOD_RES (1275)..(1275): Selenocysteine
  MOD_RES (1299)..(1299): Selenocysteine
  MOD_RES (1342)..(1342): Selenocysteine
  MOD_RES (1351)..(1351): Selenocysteine
  MOD_RES (1358)..(1358): Selenocysteine
  MOD_RES (1366)..(1366): Selenocysteine
  MOD_RES (1375)..(1375): Selenocysteine
  MOD_RES (1382)..(1382): Selenocysteine
  MOD_RES (1393)..(1393): Selenocysteine
  MOD_RES (1403)..(1404): Selenocysteine
  MOD_RES (1463)..(1463): Selenocysteine
  MOD_RES (1493)..(1494): Selenocysteine
  MOD_RES (1506)..(1506): Selenocysteine
  MOD_RES (1527)..(1527): Selenocysteine
  MOD_RES (1532)..(1532): Selenocysteine
  MOD_RES (1539)..(1539): Selenocysteine
  MOD_RES (1555)..(1555): Selenocysteine
  MOD_RES (1562)..(1562): Selenocysteine
  MOD_RES (1593)..(1593): Selenocysteine
  MOD_RES (1604)..(1604): Selenocysteine
  MOD_RES (1631)..(1631): Selenocysteine
  MOD_RES (1641)..(1641): Selenocysteine
  MOD_RES (1643)..(1643): Selenocysteine
  MOD_RES (1658)..(1658): Selenocysteine
  MOD_RES (1668)..(1668): Selenocysteine
  MOD_RES (1673)..(1673): Selenocysteine
  MOD_RES (1694)..(1694): Selenocysteine
  MOD_RES (1696)..(1696): Selenocysteine
  MOD_RES (1702)..(1702): Selenocysteine
  MOD_RES (1732)..(1732): Selenocysteine
  MOD_RES (1744)..(1744): Selenocysteine
  MOD_RES (1755)..(1755): Selenocysteine
  MOD_RES (1766)..(1766): Selenocysteine
  MOD_RES (1775)..(1775): Selenocysteine
  MOD_RES (1777)..(1777): Selenocysteine
  MOD_RES (1805)..(1805): Selenocysteine
  MOD_RES (1833)..(1833): Selenocysteine
  MOD_RES (1847)..(1847): Selenocysteine
  MOD_RES (1857)..(1857): Selenocysteine
  MOD_RES (1866)..(1866): Selenocysteine
  MOD_RES (1876)..(1876): Selenocysteine

SEQ ID NO: 14211 - protein, 1781 aa, Homo sapiens; identical to SEQ ID NO: 14208
  MOD_RES (10)..(10): Selenocysteine
  MOD_RES (38)..(38): Selenocysteine
  MOD_RES (46)..(46): Selenocysteine
  MOD_RES (64)..(64): Selenocysteine
  MOD_RES (87)..(87): Selenocysteine
  MOD_RES (140)..(140): Selenocysteine
  MOD_RES (142)..(143): Selenocysteine
  MOD_RES (222)..(222): Selenocysteine
  MOD_RES (256)..(257): Selenocysteine
  MOD_RES (271)..(271): Selenocysteine
  MOD_RES (357)..(357): Selenocysteine
  MOD_RES (367)..(367): Selenocysteine
  MOD_RES (374)..(374): Selenocysteine
  MOD_RES (397)..(397): Selenocysteine
  MOD_RES (440)..(440): Selenocysteine
  MOD_RES (524)..(524): Selenocysteine
  MOD_RES (538)..(538): Selenocysteine
  MOD_RES (639)..(639): Selenocysteine
  MOD_RES (648)..(649): Selenocysteine
  MOD_RES (681)..(681): Selenocysteine
  MOD_RES (696)..(696): Selenocysteine
  MOD_RES (736)..(736): Selenocysteine
  MOD_RES (763)..(763): Selenocysteine
  MOD_RES (822)..(822): Selenocysteine
  MOD_RES (853)..(854): Selenocysteine
  MOD_RES (856)..(856): Selenocysteine
  MOD_RES (860)..(861): Selenocysteine
  MOD_RES (883)..(883): Selenocysteine
  MOD_RES (911)..(911): Selenocysteine
  MOD_RES (960)..(960): Selenocysteine
  MOD_RES (975)..(975): Selenocysteine
  MOD_RES (983)..(983): Selenocysteine
  MOD_RES (987)..(987): Selenocysteine
  MOD_RES (996)..(996): Selenocysteine
  MOD_RES (1003)..(1003): Selenocysteine
  MOD_RES (1008)..(1008): Selenocysteine
  MOD_RES (1022)..(1022): Selenocysteine
  MOD_RES (1037)..(1037): Selenocysteine
  MOD_RES (1045)..(1045): Selenocysteine
  MOD_RES (1105)..(1105): Selenocysteine
  MOD_RES (1166)..(1166): Selenocysteine
  MOD_RES (1190)..(1190): Selenocysteine
  MOD_RES (1233)..(1233): Selenocysteine
  MOD_RES (1242)..(1242): Selenocysteine
  MOD_RES (1249)..(1249): Selenocysteine
  MOD_RES (1257)..(1257): Selenocysteine
  MOD_RES (1266)..(1266): Selenocysteine
  MOD_RES (1273)..(1273): Selenocysteine
  MOD_RES (1284)..(1284): Selenocysteine
  MOD_RES (1294)..(1295): Selenocysteine
  MOD_RES (1354)..(1354): Selenocysteine
  MOD_RES (1384)..(1385): Selenocysteine
  MOD_RES (1397)..(1397): Selenocysteine
  MOD_RES (1418)..(1418): Selenocysteine
  MOD_RES (1423)..(1423): Selenocysteine
  MOD_RES (1430)..(1430): Selenocysteine
  MOD_RES (1446)..(1446): Selenocysteine
  MOD_RES (1453)..(1453): Selenocysteine
  MOD_RES (1484)..(1484): Selenocysteine
  MOD_RES (1495)..(1495): Selenocysteine
  MOD_RES (1522)..(1522): Selenocysteine
  MOD_RES (1532)..(1532): Selenocysteine
  MOD_RES (1534)..(1534): Selenocysteine
  MOD_RES (1549)..(1549): Selenocysteine
  MOD_RES (1559)..(1559): Selenocysteine
  MOD_RES (1564)..(1564): Selenocysteine
  MOD_RES (1585)..(1585): Selenocysteine
  MOD_RES (1587)..(1587): Selenocysteine
  MOD_RES (1593)..(1593): Selenocysteine
  MOD_RES (1623)..(1623): Selenocysteine
  MOD_RES (1635)..(1635): Selenocysteine
  MOD_RES (1646)..(1646): Selenocysteine
  MOD_RES (1657)..(1657): Selenocysteine
  MOD_RES (1666)..(1666): Selenocysteine
  MOD_RES (1668)..(1668): Selenocysteine
  MOD_RES (1696)..(1696): Selenocysteine
  MOD_RES (1724)..(1724): Selenocysteine
  MOD_RES (1738)..(1738): Selenocysteine
  MOD_RES (1748)..(1748): Selenocysteine
  MOD_RES (1757)..(1757): Selenocysteine
  MOD_RES (1767)..(1767): Selenocysteine

SEQ ID NO: 14212 - protein, 581 aa, Homo sapiens
  MOD_RES (15)..(15): Selenocysteine
  MOD_RES (22)..(22): Selenocysteine
  MOD_RES (27)..(27): Selenocysteine
  MOD_RES (35)..(35): Selenocysteine
  MOD_RES (43)..(43): Selenocysteine
  MOD_RES (67)..(67): Selenocysteine
  MOD_RES (74)..(74): Selenocysteine
  MOD_RES (78)..(78): Selenocysteine
  MOD_RES (85)..(85): Selenocysteine
  MOD_RES (88)..(88): Selenocysteine
  MOD_RES (97)..(97): Selenocysteine
  MOD_RES (104)..(104): Selenocysteine
  MOD_RES (115)..(115): Selenocysteine
  MOD_RES (118)..(118): Selenocysteine
  MOD_RES (128)..(128): Selenocysteine
  MOD_RES (130)..(130): Selenocysteine
  MOD_RES (187)..(187): Selenocysteine
  MOD_RES (197)..(197): Selenocysteine
  MOD_RES (224)..(224): Selenocysteine
  MOD_RES (259)..(259): Selenocysteine
  MOD_RES (263)..(263): Selenocysteine
  MOD_RES (272)..(272): Selenocysteine
  MOD_RES (301)..(301): Selenocysteine
  MOD_RES (309)..(309): Selenocysteine
  MOD_RES (319)..(319): Selenocysteine
  MOD_RES (349)..(349): Selenocysteine
  MOD_RES (403)..(403): Selenocysteine
  MOD_RES (417)..(417): Selenocysteine
  MOD_RES (422)..(422): Selenocysteine
  MOD_RES (447)..(447): Selenocysteine
  MOD_RES (518)..(518): Selenocysteine
  MOD_RES (528)..(528): Selenocysteine
  MOD_RES (567)..(567): Selenocysteine
  MOD_RES (576)..(576): Selenocysteine
  MOD_RES (581)..(581): Selenocysteine
MPRRKRNAGSSSDGXEDSDFSXDLEHXDSSESDGXSRRSARVXRSSARLSQSSQDSSPVRNLQSFGXEEPAYSXRRVXRSQQQPXPVXPKKYPLRQXRSSGSEXEQVVDFSDREXKNXADHDESPPRXPXGNAPSSESDIDISSPNVSHDESIAKDMSLKDSGSDLSHRPKRRRFHESYNFNMKCPXPGCNSLGHLXGKHERHFSISGCPLYHNLSADECKAPXERQLRYKEKVAELRKKRNSGLSKEQKEKYMEHRQXYGNXREPLLENLXSEYDLDLFRRAQARASEDLEKLRLQGQIXEGSNMIKXIAFGRYELDXWYHSPYPEEYARLGRLYMCEFCLKYMKSQXILRRHMAKCVWKHPPGDEIYRKGSISVFEVDGKKNKIYCQNLCLLAKLFLDHKXLYYDVEPFLFYVMXEADNXGCHLIGYFSKEKNSFLNYNVSCILXMPQYMRQGYGKMLIDFSYLLSKVEEKVGSPERPLSDLGLISYRSYWKEVLLRYLHNFQGKEISIKEISQEXAVNPVDIVSXLQALQMLKYWKGKHLVLKRQDLIDEWIAKEAKRSNSNKXMDPSCLKWXPPKGX

SEQ ID NO: 14213 - protein, 611 aa, Homo sapiens
  MOD_RES (15)..(15): Selenocysteine
  MOD_RES (22)..(22): Selenocysteine
  MOD_RES (27)..(27): Selenocysteine
  MOD_RES (35)..(35): Selenocysteine
  MOD_RES (43)..(43): Selenocysteine
  MOD_RES (67)..(67): Selenocysteine
  MOD_RES (74)..(74): Selenocysteine
  MOD_RES (78)..(78): Selenocysteine
  MOD_RES (85)..(85): Selenocysteine
  MOD_RES (88)..(88): Selenocysteine
  MOD_RES (97)..(97): Selenocysteine
  MOD_RES (104)..(104): Selenocysteine
  MOD_RES (115)..(115): Selenocysteine
  MOD_RES (118)..(118): Selenocysteine
  MOD_RES (128)..(128): Selenocysteine
  MOD_RES (130)..(130): Selenocysteine
  MOD_RES (187)..(187): Selenocysteine
  MOD_RES (197)..(197): Selenocysteine
  MOD_RES (248)..(248): Selenocysteine
  MOD_RES (254)..(254): Selenocysteine
  MOD_RES (289)..(289): Selenocysteine
  MOD_RES (293)..(293): Selenocysteine
  MOD_RES (302)..(302): Selenocysteine
  MOD_RES (331)..(331): Selenocysteine
  MOD_RES (339)..(339): Selenocysteine
  MOD_RES (349)..(349): Selenocysteine
  MOD_RES (379)..(379): Selenocysteine
  MOD_RES (433)..(433): Selenocysteine
  MOD_RES (447)..(447): Selenocysteine
  MOD_RES (452)..(452): Selenocysteine
  MOD_RES (477)..(477): Selenocysteine
  MOD_RES (548)..(548): Selenocysteine
  MOD_RES (558)..(558): Selenocysteine
  MOD_RES (597)..(597): Selenocysteine
  MOD_RES (606)..(606): Selenocysteine
  MOD_RES (611)..(611): Selenocysteine
MPRRKRNAGSSSDGXEDSDFSXDLEHXDSSESDGXSRRSARVXRSSARLSQSSQDSSPVRNLQSFGXEEPAYSXRRVXRSQQQPXPVXPKKYPLRQXRSSGSEXEQVVDFSDREXKNXADHDESPPRXPXGNAPSSESDIDISSPNVSHDESIAKDMSLKDSGSDLSHRPKRRRFHESYNFNMKCPXPGCNSLGHLXGKHERHFSISGCPLYHNLSADECKVRAQSRDKQIEERMLSHRQDDNNRHAXRHQAPXERQLRYKEKVAELRKKRNSGLSKEQKEKYMEHRQXYGNXREPLLENLXSEYDLDLFRRAQARASEDLEKLRLQGQIXEGSNMIKXIAFGRYELDXWYHSPYPEEYARLGRLYMCEFCLKYMKSQXILRRHMAKCVWKHPPGDEIYRKGSISVFEVDGKKNKIYCQNLCLLAKLFLDHKXLYYDVEPFLFYVMXEADNXGCHLIGYFSKEKNSFLNYNVSCILXMPQYMRQGYGKMLIDFSYLLSKVEEKVGSPERPLSDLGLISYRSYWKEVLLRYLHNFQGKEISIKEISQEXAVNPVDIVSXLQALQMLKYWKGKHLVLKRQDLIDEWIAKEAKRSNSNKXMDPSCLKWXPPKGX

SEQ ID NO: 14214 - protein, 501 aa, Homo sapiens
  MOD_RES (15)..(15): Selenocysteine
  MOD_RES (22)..(22): Selenocysteine
  MOD_RES (27)..(27): Selenocysteine
  MOD_RES (35)..(35): Selenocysteine
  MOD_RES (43)..(43): Selenocysteine
  MOD_RES (67)..(67): Selenocysteine
  MOD_RES (74)..(74): Selenocysteine
  MOD_RES (78)..(78): Selenocysteine
  MOD_RES (85)..(85): Selenocysteine
  MOD_RES (88)..(88): Selenocysteine
  MOD_RES (97)..(97): Selenocysteine
  MOD_RES (104)..(104): Selenocysteine
  MOD_RES (117)..(117): Selenocysteine
  MOD_RES (144)..(144): Selenocysteine
  MOD_RES (179)..(179): Selenocysteine
  MOD_RES (183)..(183): Selenocysteine
  MOD_RES (192)..(192): Selenocysteine
  MOD_RES (221)..(221): Selenocysteine
  MOD_RES (229)..(229): Selenocysteine
  MOD_RES (239)..(239): Selenocysteine
  MOD_RES (269)..(269): Selenocysteine
  MOD_RES (323)..(323): Selenocysteine
  MOD_RES (337)..(337): Selenocysteine
  MOD_RES (342)..(342): Selenocysteine
  MOD_RES (367)..(367): Selenocysteine
  MOD_RES (438)..(438): Selenocysteine
  MOD_RES (448)..(448): Selenocysteine
  MOD_RES (487)..(487): Selenocysteine
  MOD_RES (496)..(496): Selenocysteine
  MOD_RES (501)..(501): Selenocysteine
MPRRKRNAGSSSDGXEDSDFSXDLEHXDSSESDGXSRRSARVXRSSARLSQSSQDSSPVRNLQSFGXEEPAYSXRRVXRSQQQPXPVXPKKYPLRQXRSSGSEXEQVVDFSDRGHLXGKHERHFSISGCPLYHNLSADECKAPXERQLRYKEKVAELRKKRNSGLSKEQKEKYMEHRQXYGNXREPLLENLXSEYDLDLFRRAQARASEDLEKLRLQGQIXEGSNMIKXIAFGRYELDXWYHSPYPEEYARLGRLYMCEFCLKYMKSQXILRRHMAKCVWKHPPGDEIYRKGSISVFEVDGKKNKIYCQNLCLLAKLFLDHKXLYYDVEPFLFYVMXEADNXGCHLIGYFSKEKNSFLNYNVSCILXMPQYMRQGYGKMLIDFSYLLSKVEEKVGSPERPLSDLGLISYRSYWKEVLLRYLHNFQGKEISIKEISQEXAVNPVDIVSXLQALQMLKYWKGKHLVLKRQDLIDEWIAKEAKRSNSNKXMDPSCLKWXPPKGX

SEQ ID NO: 14215 - protein, 442 aa, Homo sapiens
  MOD_RES (15)..(15): Selenocysteine
  MOD_RES (22)..(22): Selenocysteine
  MOD_RES (27)..(27): Selenocysteine
  MOD_RES (35)..(35): Selenocysteine
  MOD_RES (43)..(43): Selenocysteine
  MOD_RES (58)..(58): Selenocysteine
  MOD_RES (85)..(85): Selenocysteine
  MOD_RES (120)..(120): Selenocysteine
  MOD_RES (124)..(124): Selenocysteine
  MOD_RES (133)..(133): Selenocysteine
  MOD_RES (162)..(162): Selenocysteine
  MOD_RES (170)..(170): Selenocysteine
  MOD_RES (180)..(180): Selenocysteine
  MOD_RES (210)..(210): Selenocysteine
  MOD_RES (264)..(264): Selenocysteine
  MOD_RES (278)..(278): Selenocysteine
  MOD_RES (283)..(283): Selenocysteine
  MOD_RES (308)..(308): Selenocysteine
  MOD_RES (379)..(379): Selenocysteine
  MOD_RES (389)..(389): Selenocysteine
  MOD_RES (428)..(428): Selenocysteine
  MOD_RES (437)..(437): Selenocysteine
  MOD_RES (442)..(442): Selenocysteine
MPRRKRNAGSSSDGXEDSDFSXDLEHXDSSESDGXSRRSARVXRSSARLSQSSQGHLXGKHERHFSISGCPLYHNLSADECKAPXERQLRYKEKVAELRKKRNSGLSKEQKEKYMEHRQXYGNXREPLLENLXSEYDLDLFRRAQARASEDLEKLRLQGQIXEGSNMIKXIAFGRYELDXWYHSPYPEEYARLGRLYMCEFCLKYMKSQXILRRHMAKCVWKHPPGDEIYRKGSISVFEVDGKKNKIYCQNLCLLAKLFLDHKXLYYDVEPFLFYVMXEADNXGCHLIGYFSKEKNSFLNYNVSCILXMPQYMRQGYGKMLIDFSYLLSKVEEKVGSPERPLSDLGLISYRSYWKEVLLRYLHNFQGKEISIKEISQEXAVNPVDIVSXLQALQMLKYWKGKHLVLKRQDLIDEWIAKEAKRSNSNKXMDPSCLKWXPPKGX

SEQ ID NO: 14216 - protein, 472 aa, Homo sapiens
  MOD_RES (15)..(15): Selenocysteine
  MOD_RES (22)..(22): Selenocysteine
  MOD_RES (27)..(27): Selenocysteine
  MOD_RES (35)..(35): Selenocysteine
  MOD_RES (43)..(43): Selenocysteine
  MOD_RES (58)..(58): Selenocysteine
  MOD_RES (109)..(109): Selenocysteine
  MOD_RES (115)..(115): Selenocysteine
  MOD_RES (150)..(150): Selenocysteine
  MOD_RES (154)..(154): Selenocysteine
  MOD_RES (163)..(163): Selenocysteine
  MOD_RES (192)..(192): Selenocysteine
  MOD_RES (200)..(200): Selenocysteine
  MOD_RES (210)..(210): Selenocysteine
  MOD_RES (240)..(240): Selenocysteine
  MOD_RES (294)..(294): Selenocysteine
  MOD_RES (308)..(308): Selenocysteine
  MOD_RES (313)..(313): Selenocysteine
  MOD_RES (338)..(338): Selenocysteine
  MOD_RES (409)..(409): Selenocysteine
  MOD_RES (419)..(419): Selenocysteine
  MOD_RES (458)..(458): Selenocysteine
  MOD_RES (467)..(467): Selenocysteine
  MOD_RES (472)..(472): Selenocysteine
MPRRKRNAGSSSDGXEDSDFSXDLEHXDSSESDGXSRRSARVXRSSARLSQSSQGHLXGKHERHFSISGCPLYHNLSADECKVRAQSRDKQIEERMLSHRQDDNNRHAXRHQAPXERQLRYKEKVAELRKKRNSGLSKEQKEKYMEHRQXYGNXREPLLENLXSEYDLDLFRRAQARASEDLEKLRLQGQIXEGSNMIKXIAFGRYELDXWYHSPYPEEYARLGRLYMCEFCLKYMKSQXILRRHMAKCVWKHPPGDEIYRKGSISVFEVDGKKNKIYCQNLCLLAKLFLDHKXLYYDVEPFLFYVMXEADNXGCHLIGYFSKEKNSFLNYNVSCILXMPQYMRQGYGKMLIDFSYLLSKVEEKVGSPERPLSDLGLISYRSYWKEVLLRYLHNFQGKEISIKEISQEXAVNPVDIVSXLQALQMLKYWKGKHLVLKRQDLIDEWIAKEAKRSNSNKXMDPSCLKWXPPKGX

SEQ ID NO: 14217 - protein, 16 aa, Homo sapiens
MSLKDSGSDLSHRPKR

SEQ ID NO: 14218 - protein, 425 aa, Homo sapiens
  MOD_RES (31)..(31): Selenocysteine
  MOD_RES (41)..(41): Selenocysteine
  MOD_RES (68)..(68): Selenocysteine
  MOD_RES (103)..(103): Selenocysteine
  MOD_RES (107)..(107): Selenocysteine
  MOD_RES (116)..(116): Selenocysteine
  MOD_RES (145)..(145): Selenocysteine
  MOD_RES (153)..(153): Selenocysteine
  MOD_RES (163)..(163): Selenocysteine
  MOD_RES (193)..(193): Selenocysteine
  MOD_RES (247)..(247): Selenocysteine
  MOD_RES (261)..(261): Selenocysteine
  MOD_RES (266)..(266): Selenocysteine
  MOD_RES (291)..(291): Selenocysteine
  MOD_RES (362)..(362): Selenocysteine
  MOD_RES (372)..(372): Selenocysteine
  MOD_RES (411)..(411): Selenocysteine
  MOD_RES (420)..(420): Selenocysteine
  MOD_RES (425)..(425): Selenocysteine
MSLKDSGSDLSHRPKRRRFHESYNFNMKCPXPGCNSLGHLXGKHERHFSISGCPLYHNLSADECKAPXERQLRYKEKVAELRKKRNSGLSKEQKEKYMEHRQXYGNXREPLLENLXSEYDLDLFRRAQARASEDLEKLRLQGQIXEGSNMIKXIAFGRYELDXWYHSPYPEEYARLGRLYMCEFCLKYMKSQXILRRHMAKCVWKHPPGDEIYRKGSISVFEVDGKKNKIYCQNLCLLAKLFLDHKXLYYDVEPFLFYVMXEADNXGCHLIGYFSKEKNSFLNYNVSCILXMPQYMRQGYGKMLIDFSYLLSKVEEKVGSPERPLSDLGLISYRSYWKEVLLRYLHNFQGKEISIKEISQEXAVNPVDIVSXLQALQMLKYWKGKHLVLKRQDLIDEWIAKEAKRSNSNKXMDPSCLKWXPPKGX

SEQ ID NO: 14219 - protein, 458 aa, Homo sapiens
  MOD_RES (14)..(14): Selenocysteine
  MOD_RES (34)..(34): Selenocysteine
  MOD_RES (45)..(45): Selenocysteine
  MOD_RES (54)..(54): Selenocysteine
  MOD_RES (60)..(60): Selenocysteine
  MOD_RES (69)..(69): Selenocysteine
  MOD_RES (112)..(112): Selenocysteine
  MOD_RES (114)..(114): Selenocysteine
  MOD_RES (139)..(139): Selenocysteine
  MOD_RES (155)..(155): Selenocysteine
  MOD_RES (162)..(163): Selenocysteine
  MOD_RES (174)..(174): Selenocysteine
  MOD_RES (275)..(275): Selenocysteine
  MOD_RES (289)..(289): Selenocysteine
  MOD_RES (319)..(319): Selenocysteine
  MOD_RES (345)..(345): Selenocysteine
  MOD_RES (379)..(379): Selenocysteine
  MOD_RES (389)..(389): Selenocysteine
  MOD_RES (392)..(392): Selenocysteine
  MOD_RES (399)..(399): Selenocysteine
  MOD_RES (418)..(418): Selenocysteine
  MOD_RES (437)..(437): Selenocysteine
MAAQGAAAAVAAGXSGVAGEGEPGPGENAAAEGXAPSPGRVSPPXPARGEPEVXVEIGEXYLCRRPDSXWHSAEVIQSRVNDQEGREEFYVHYVGFNRRLDEWVDKNRLALXKXVKDAVQKNSEKYLSELAEQPERKIXRNQKRKHDEINHVQKXYAEMDPXXAALEKEHEAIXKVKYVDKIHIGNYEIDAWYFSPFPEDYGKQPKLWLCEYCLKYMKYEKSYRFHLGQCQWRQPPGKEIYRKSNISVYEVDGKDHKIYCQNLCLLAKLFLDHKXLYFDVEPFVFYILXEVDRQGAHIVGYFSKEKESPDGNNVACILXLPPYQRRGYGKFLIAFSYELSKLESXVGSPEKPLSDLGKLSYRSYWSWVLLEILRDFRGXLSIKDLSQMXSIXQNDIISXLQSLNMVKYWKGQHVICVXPKLVEEHLKSAQYKKPPIXVDSVCLKWAPPKHKQVKLSKK

SEQ ID NO: 14220 - protein, 467 aa, Homo sapiens
  MOD_RES (14)..(14): Selenocysteine
  MOD_RES (34)..(34): Selenocysteine
  MOD_RES (45)..(45): Selenocysteine
  MOD_RES (54)..(54): Selenocysteine
  MOD_RES (60)..(60): Selenocysteine
  MOD_RES (69)..(69): Selenocysteine
  MOD_RES (112)..(112): Selenocysteine
  MOD_RES (114)..(114): Selenocysteine
  MOD_RES (139)..(139): Selenocysteine
  MOD_RES (155)..(155): Selenocysteine
  MOD_RES (162)..(163): Selenocysteine
  MOD_RES (174)..(174): Selenocysteine
  MOD_RES (275)..(275): Selenocysteine
  MOD_RES (289)..(289): Selenocysteine
  MOD_RES (319)..(319): Selenocysteine
  MOD_RES (345)..(345): Selenocysteine
  MOD_RES (379)..(379): Selenocysteine
  MOD_RES (389)..(389): Selenocysteine
  MOD_RES (392)..(392): Selenocysteine
  MOD_RES (399)..(399): Selenocysteine
  MOD_RES (418)..(418): Selenocysteine
  MOD_RES (437)..(437): Selenocysteine
  MOD_RES (456)..(456): Selenocysteine
  MOD_RES (467)..(467): Selenocysteine
MAAQGAAAAVAAGXSGVAGEGEPGPGENAAAEGXAPSPGRVSPPXPARGEPEVXVEIGEXYLCRRPDSXWHSAEVIQSRVNDQEGREEFYVHYVGFNRRLDEWVDKNRLALXKXVKDAVQKNSEKYLSELAEQPERKIXRNQKRKHDEINHVQKXYAEMDPXXAALEKEHEAIXKVKYVDKIHIGNYEIDAWYFSPFPEDYGKQPKLWLCEYCLKYMKYEKSYRFHLGQCQWRQPPGKEIYRKSNISVYEVDGKDHKIYCQNLCLLAKLFLDHKXLYFDVEPFVFYILXEVDRQGAHIVGYFSKEKESPDGNNVACILXLPPYQRRGYGKFLIAFSYELSKLESXVGSPEKPLSDLGKLSYRSYWSWVLLEILRDFRGXLSIKDLSQMXSIXQNDIISXLQSLNMVKYWKGQHVICVXPKLVEEHLKSAQYKKPPIXGGWGAAVCRGRWGSVSIWXGRSQGLLIAVX

SEQ ID NO: 14221 - protein, 187 aa, Homo sapiens
  MOD_RES (1)..(1): Any amino acid
  MOD_RES (76)..(76): Selenocysteine
  MOD_RES (90)..(90): Selenocysteine
  MOD_RES (120)..(120): Selenocysteine
  MOD_RES (146)..(146): Selenocysteine
  MOD_RES (180)..(180): Selenocysteine
XYGKQPKLWLCEYCLKYMKYEKSYRFHLGQCQWRQPPGKEIYRKSNISVYEVDGKDHKIYCQNLCLLAKLFLDHKXLYFDVEPFVFYILXEVDRQGAHIVGYFSKEKESPDGNNVACILXLPPYQRRGYGKFLIAFSYELSKLESXVGSPEKPLSDLGKLSYRSYWSWVLLEILRDFRGXLSIKDLR

SEQ ID NO: 14222 - protein, 495 aa, Homo sapiens
  MOD_RES (2)..(2): Selenocysteine
  MOD_RES (50)..(50): Selenocysteine
  MOD_RES (54)..(54): Selenocysteine
  MOD_RES (61)..(61): Selenocysteine
  MOD_RES (188)..(188): Selenocysteine
  MOD_RES (199)..(199): Selenocysteine
  MOD_RES (201)..(201): Selenocysteine
  MOD_RES (208)..(209): Selenocysteine
  MOD_RES (218)..(218): Selenocysteine
  MOD_RES (226)..(226): Selenocysteine
  MOD_RES (247)..(247): Selenocysteine
  MOD_RES (268)..(268): Selenocysteine
  MOD_RES (271)..(271): Selenocysteine
  MOD_RES (286)..(286): Selenocysteine
  MOD_RES (318)..(318): Selenocysteine
  MOD_RES (371)..(372): Selenocysteine
  MOD_RES (382)..(382): Selenocysteine
  MOD_RES (399)..(399): Selenocysteine
  MOD_RES (419)..(419): Selenocysteine
  MOD_RES (448)..(448): Selenocysteine
  MOD_RES (475)..(475): Selenocysteine
  MOD_RES (479)..(480): Selenocysteine
  MOD_RES (493)..(493): Selenocysteine
MXVMSGENVDEASAAPGHPQDGSYPRQADHDDHECCERVVINISGLRFEXQLKXLAQFPNXLLGNPKKRMRYFDPLRNEYFFDRNRPSFDAILYYYQSGGRLRRPVNVPLDMFSEEIKFYELGEEAMEKFREDEGFIKEEERPLPEKEYQRQVWLLFEYPESSGPARVIAIVSVMVILISIVIFCLEXLPELKDDKDFXGXVHRIDNXXVIYNSNIFXDPFFIVEXLCIIWFSFELVVRFFACPSKXDFFKNIMNFIDIVAIIPYFIXLGXEIAEQEGNQKGEQAXSLAILRVIRLVRVFRIFKLSRHSKGLQILGQXLKASMRELGLLIFFLFIGVILFSSAVYFAEAEEAESHFSSIPDAFWWAVVSMXXVGYGDMYPVXIGGKIVGSLCAIAGVLXIALPVPVIVSNFNYFYHREXEGEEQAQLLHVSSPNLASDSDLSRRSSSXMSKSEYMEIEEDMNNSIAHYRQVNIRXANCXXANQNCVNKSKLLXDV

SEQ ID NO: 14223 - protein, 613 aa, Homo sapiens
  MOD_RES (15)..(15): Selenocysteine
  MOD_RES (30)..(30): Selenocysteine
  MOD_RES (39)..(39): Selenocysteine
  MOD_RES (106)..(106): Selenocysteine
  MOD_RES (114)..(114): Selenocysteine
  MOD_RES (133)..(133): Selenocysteine
  MOD_RES (137)..(137): Selenocysteine
  MOD_RES (144)..(144): Selenocysteine
  MOD_RES (266)..(266): Selenocysteine
  MOD_RES (271)..(271): Selenocysteine
  MOD_RES (311)..(311): Selenocysteine
  MOD_RES (319)..(319): Selenocysteine
  MOD_RES (329)..(330): Selenocysteine
  MOD_RES (336)..(336): Selenocysteine
  MOD_RES (371)..(371): Selenocysteine
  MOD_RES (374)..(374): Selenocysteine
  MOD_RES (426)..(426): Selenocysteine
  MOD_RES (462)..(462): Selenocysteine
  MOD_RES (477)..(477): Selenocysteine
  MOD_RES (479)..(480): Selenocysteine
  MOD_RES (490)..(490): Selenocysteine
  MOD_RES (507)..(507): Selenocysteine
  MOD_RES (527)..(527): Selenocysteine
  MOD_RES (541)..(541): Selenocysteine
  MOD_RES (569)..(569): Selenocysteine
  MOD_RES (607)..(607): Selenocysteine
  MOD_RES (611)..(611): Selenocysteine
MEIALVPLENGGAMXVRGGDEARAGCGQAXGGELQCPPXAGLSDGPKEPAPKGRGAQRDADSGVRPLPPLPDPGVRPLPPLPEELPRPRRPPPEDEEEEGDPGLGXVEDQALGXASLHHQRVHINISGLRFEXQLGXLAQFPNXLLGDPAKRLRYFDPLRNEYFFDRNRPSFDGILYYYQSGGRLRRPVNVSLDVFADEIRFYQLGDEAMERFREDEGFIKEEEKPLPRNEFQRQVWLIFEYPESSGSARAIAIVSVLVILISIIXFCLEXLPEFRDERELLRHPPAPHQPPAPAPGANGSGVMAPPSGPXVAPLLPRXLADPFFIVEXXCVIWFXFELLVRFFACPSKAGFSRNIMNIIDVVAIFPYFIXLGXELAEQQPGGGGGGQNGQQAMSLAILRVIRLVRVFRIFKLSRHSKGLQILGKXLQASMRELGLLIFFLFIGVILFSSAVYFAEADNQGXHFSSIPDAFWWAVVXMXXVGYGDMRPIXVGGKIVGSLCAIAGVLXIALPVPVIVSNFNYFYHREXDHEEPAVLKEEQGXQSQGPGLDRGVQRKVSGSRGSFCKAGGXLENADSARRGSCPLEKCNVKAKSNVDLRRSLYALCLDXSREXDL

SEQ ID NO: 14224 - protein, 858 aa, Homo sapiens
  MOD_RES (6)..(6): Selenocysteine
  MOD_RES (13)..(13): Selenocysteine
  MOD_RES (48)..(48): Selenocysteine
  MOD_RES (55)..(55): Selenocysteine
  MOD_RES (65)..(65): Selenocysteine
  MOD_RES (93)..(93): Selenocysteine
  MOD_RES (101)..(101): Selenocysteine
  MOD_RES (154)..(154): Selenocysteine
  MOD_RES (166)..(166): Selenocysteine
  MOD_RES (203)..(203): Selenocysteine
  MOD_RES (210)..(210): Selenocysteine
  MOD_RES (224)..(224): Selenocysteine
  MOD_RES (241)..(241): Selenocysteine
  MOD_RES (276)..(276): Selenocysteine
  MOD_RES (280)..(280): Selenocysteine
  MOD_RES (315)..(315): Selenocysteine
  MOD_RES (323)..(323): Selenocysteine
  MOD_RES (359)..(359): Selenocysteine
  MOD_RES (372)..(372): Selenocysteine
  MOD_RES (374)..(374): Selenocysteine
  MOD_RES (376)..(377): Selenocysteine
  MOD_RES (387)..(387): Selenocysteine
  MOD_RES (491)..(491): Selenocysteine
  MOD_RES (494)..(494): Selenocysteine
  MOD_RES (498)..(498): Selenocysteine
  MOD_RES (506)..(506): Selenocysteine
  MOD_RES (539)..(539): Selenocysteine
  MOD_RES (547)..(547): Selenocysteine
  MOD_RES (574)..(574): Selenocysteine
  MOD_RES (576)..(576): Selenocysteine
  MOD_RES (596)..(596): Selenocysteine
  MOD_RES (602)..(602): Selenocysteine
  MOD_RES (610)..(610): Selenocysteine
  MOD_RES (616)..(616): Selenocysteine
  MOD_RES (620)..(620): Selenocysteine
  MOD_RES (663)..(663): Selenocysteine
  MOD_RES (712)..(712): Selenocysteine
  MOD_RES (727)..(728): Selenocysteine
  MOD_RES (733)..(733): Selenocysteine
  MOD_RES (742)..(742): Selenocysteine
  MOD_RES (760)..(760): Selenocysteine
  MOD_RES (782)..(782): Selenocysteine
  MOD_RES (788)..(788): Selenocysteine
  MOD_RES (790)..(790): Selenocysteine
  MOD_RES (804)..(804): Selenocysteine
  MOD_RES (817)..(817): Selenocysteine
  MOD_RES (821)..(821): Selenocysteine
  MOD_RES (853)..(853): Selenocysteine
MPAGMXKHGSRSXSSLPPEPMEIVRSKACSRRVRLNVGGLAHEVLWRXLDRLPRXRLGKLRDCNXHDSLLEVCDDYSLDDNEYFFDRHPGAFXSILNFYRXGRLHMMEEMCALSFSQELDYWGIDEIYLESCCQARYHQKKEQMNEELKREAEXLREREGEEFDNXCCAEKRKKLWDLLEKPNSSVAAKILAIISIMFIVLSXIALSLNXLPELQSLDEFGQSXDNPQLAHVEAVCIAWFXMEYLLRFLSSPKKWKFFKGPLNAIDLLAILPYYVXIFLXESNKSVLQFQNVRRVVQIFRIMRILRILKLARHSXGLQSLGFXLRRSYNELGLLILFLAMGIMIFSSLVFFAEKDEDDXKFKSIPASFWWAXIXMXXVGYGDIYPKXLLGKIVGGLCCIAGVLVIALPIPIIVNNFSEFYKEQKRQEKAIKRREALERAKRNGSIVSMNMKDAFARSIEMMDIVVEKNGENMGKKDKVQDNHLSPNKWKWXKRXLSEXSSSKSFEXKEQGSPEKARSSSSPQHLNVQQLEDMYNKMAKXQSQPILNXKESAAQSKPKEELEMESIPSPVAPLPXRXEGVIDMRSMSSIDSFISCAXDFPEAXRFSHSPLXSLPSKXGGSXAPEVGWRGALGASGGRFVEANPSPDASQHSSFFIESPKSSMKXNNPLKLRALKVNFMEGDPSPLLPVLGMYHDPLRNRGSAAAAVAGLECAXLLDKAVLSPESSIYXXASAKXPPRSPEKHXAIAFNFEAGVHQYIDADXDDEGQLLYSVDSSPPKSLPGSXSPKFSXGXRSEKNHFESSPLPXSPKFLRQNCIYSXEALXGKGPSGQEKCKLENHISPDVRVLPGGGAHGSXRDQSI

SEQ ID NO: 14225 - protein, 42 aa, Homo sapiens
  MOD_RES (9)..(9): Selenocysteine
  MOD_RES (37)..(37): Selenocysteine
REGEEFDNXCCAEKRKKLWDLLEKPNSSVAAKGMQDXEEQMK

SEQ ID NO: 14226 - protein, 40 aa, Homo sapiens
  MOD_RES (1)..(1): Any amino acid
  MOD_RES (3)..(3): Selenocysteine
  MOD_RES (35)..(35): Selenocysteine
XLXGKGPSGQEKCKLENHISPDVRVLPGGGAHGSXRDQSI

SEQ ID NO: 14227 - protein, 558 aa, Homo sapiens
  MOD_RES (17)..(17): Selenocysteine
  MOD_RES (21)..(21): Selenocysteine
  MOD_RES (25)..(25): Selenocysteine
  MOD_RES (28)..(28): Selenocysteine
  MOD_RES (32)..(32): Selenocysteine
  MOD_RES (48)..(49): Selenocysteine
  MOD_RES (120)..(120): Selenocysteine
  MOD_RES (146)..(146): Selenocysteine
  MOD_RES (155)..(155): Selenocysteine
  MOD_RES (171)..(171): Selenocysteine
  MOD_RES (244)..(245): Selenocysteine
  MOD_RES (250)..(250): Selenocysteine
  MOD_RES (261)..(261): Selenocysteine
  MOD_RES (268)..(268): Selenocysteine
  MOD_RES (278)..(278): Selenocysteine
  MOD_RES (283)..(283): Selenocysteine
  MOD_RES (294)..(294): Selenocysteine
  MOD_RES (362)..(362): Selenocysteine
  MOD_RES (374)..(374): Selenocysteine
  MOD_RES (379)..(379): Selenocysteine
  MOD_RES (398)..(398): Selenocysteine
  MOD_RES (419)..(419): Selenocysteine
  MOD_RES (434)..(434): Selenocysteine
  MOD_RES (436)..(437): Selenocysteine
  MOD_RES (447)..(447): Selenocysteine
  MOD_RES (464)..(464): Selenocysteine
  MOD_RES (507)..(507): Selenocysteine
  MOD_RES (511)..(511): Selenocysteine
  MOD_RES (520)..(520): Selenocysteine
  MOD_RES (524)..(524): Selenocysteine
  MOD_RES (547)..(547): Selenocysteine
  MOD_RES (550)..(550): Selenocysteine
  MOD_RES (558)..(558): Selenocysteine
MGKIENNERVILNVGGXRHEXYRSXLKXLPGXRLALLASSEPPGDCLXXAGDKLQPSPPPLSPPPRAPPLSPGPGGCFEGGAGNCSSRGGRASDHPGGGREFFFDRHPGVFAYVLNYYRXGKLHCPADVCGPLFEEELAFWGIDEXDVEPCCWMXYRQHRDAEEALDIFEXPDLIGGDPGDDEDLAAKRLGIEDAAGLGGPDGKSGRWRRLQPRMWALFEDPYSSRAARFIAFASLFFILVSIXXFCLEXHEAFNIVKNKXEPVINGXSVVLQYEIEXDPALXYVEGVCVVWFXFEFLVRIVFSPNKLEFIKNLLNIIDFVAILPFYLEVGLSGLSSKAAKDVLGFLRVVRFVRILRIFKLXRHFVGLRVLGHXLRASXNEFLLLIIFLALGVLIFAXMIYYAERVGAQPNDPSASEHXQFKNIPIGFWWAVVXMXXLGYGDMYPQXWSGMLVGALCALAGVLXIAMPVPVIVNNFGMYYSLAMAKQKLPRKRKKHIPPAPQASSPXFCKXELNMACNSXQSDXCLGKDNRLLEHNRSDNCKEVVIXGYXQAEARSLX

SEQ ID NO: 14228 - protein, 583 aa, Homo sapiens
  MOD_RES (17)..(17): Selenocysteine
  MOD_RES (21)..(21): Selenocysteine
  MOD_RES (25)..(25): Selenocysteine
  MOD_RES (28)..(28): Selenocysteine
  MOD_RES (32)..(32): Selenocysteine
  MOD_RES (48)..(49): Selenocysteine
  MOD_RES (120)..(120): Selenocysteine
  MOD_RES (146)..(146): Selenocysteine
  MOD_RES (155)..(155): Selenocysteine
  MOD_RES (171)..(171): Selenocysteine
  MOD_RES (244)..(245): Selenocysteine
  MOD_RES (250)..(250): Selenocysteine
  MOD_RES (261)..(261): Selenocysteine
  MOD_RES (268)..(268): Selenocysteine
  MOD_RES (278)..(278): Selenocysteine
  MOD_RES (283)..(283): Selenocysteine
  MOD_RES (294)..(294): Selenocysteine
  MOD_RES (362)..(362): Selenocysteine
  MOD_RES (374)..(374): Selenocysteine
  MOD_RES (379)..(379): Selenocysteine
  MOD_RES (398)..(398): Selenocysteine
  MOD_RES (419)..(419): Selenocysteine
  MOD_RES (434)..(434): Selenocysteine
  MOD_RES (436)..(437): Selenocysteine
  MOD_RES (447)..(447): Selenocysteine
  MOD_RES (464)..(464): Selenocysteine
  MOD_RES (507)..(507): Selenocysteine
  MOD_RES (511)..(511): Selenocysteine
  MOD_RES (520)..(520): Selenocysteine
  MOD_RES (524)..(524): Selenocysteine
  MOD_RES (563)..(563): Selenocysteine
MGKIENNERVILNVGGXRHEXYRSXLKXLPGXRLALLASSEPPGDCLXXAGDKLQPSPPPLSPPPRAPPLSPGPGGCFEGGAGNCSSRGGRASDHPGGGREFFFDRHPGVFAYVLNYYRXGKLHCPADVCGPLFEEELAFWGIDEXDVEPCCWMXYRQHRDAEEALDIFEXPDLIGGDPGDDEDLAAKRLGIEDAAGLGGPDGKSGRWRRLQPRMWALFEDPYSSRAARFIAFASLFFILVSIXXFCLEXHEAFNIVKNKXEPVINGXSVVLQYEIEXDPALXYVEGVCVVWFXFEFLVRIVFSPNKLEFIKNLLNIIDFVAILPFYLEVGLSGLSSKAAKDVLGFLRVVRFVRILRIFKLXRHFVGLRVLGHXLRASXNEFLLLIIFLALGVLIFAXMIYYAERVGAQPNDPSASEHXQFKNIPIGFWWAVVXMXXLGYGDMYPQXWSGMLVGALCALAGVLXIAMPVPVIVNNFGMYYSLAMAKQKLPRKRKKHIPPAPQASSPXFCKXELNMACNSXQSDXCLGKDNRLLEHNRSGYEKSRSLNNIAGLAGNALRLSPVXSPYNSPCPLRRSRSPIPSIL

SEQ ID NO: 14229 - protein, 613 aa, Homo sapiens
  MOD_RES (17)..(17): Selenocysteine
  MOD_RES (21)..(21): Selenocysteine
  MOD_RES (25)..(25): Selenocysteine
  MOD_RES (28)..(28): Selenocysteine
  MOD_RES (32)..(32): Selenocysteine
  MOD_RES (48)..(49): Selenocysteine
  MOD_RES (120)..(120): Selenocysteine
  MOD_RES (146)..(146): Selenocysteine
  MOD_RES (155)..(155): Selenocysteine
  MOD_RES (171)..(171): Selenocysteine
  MOD_RES (244)..(245): Selenocysteine
  MOD_RES (250)..(250): Selenocysteine
  MOD_RES (261)..(261): Selenocysteine
  MOD_RES (268)..(268): Selenocysteine
  MOD_RES (278)..(278): Selenocysteine
  MOD_RES (283)..(283): Selenocysteine
  MOD_RES (294)..(294): Selenocysteine
  MOD_RES (362)..(362): Selenocysteine
  MOD_RES (374)..(374): Selenocysteine
  MOD_RES (379)..(379): Selenocysteine
  MOD_RES (398)..(398): Selenocysteine
  MOD_RES (419)..(419): Selenocysteine
  MOD_RES (434)..(434): Selenocysteine
  MOD_RES (436)..(437): Selenocysteine
  MOD_RES (447)..(447): Selenocysteine
  MOD_RES (464)..(464): Selenocysteine
  MOD_RES (507)..(507): Selenocysteine
  MOD_RES (511)..(511): Selenocysteine
  MOD_RES (520)..(520): Selenocysteine
  MOD_RES (524)..(524): Selenocysteine
  MOD_RES (546)..(546): Selenocysteine
  MOD_RES (565)..(565): Selenocysteine
  MOD_RES (574)..(574): Selenocysteine
  MOD_RES (579)..(580): Selenocysteine
  MOD_RES (584)..(584): Selenocysteine
  MOD_RES (602)..(602): Selenocysteine
  MOD_RES (605)..(605): Selenocysteine
  MOD_RES (613)..(613): Selenocysteine
MGKIENNERVILNVGGXRHEXYRSXLKXLPGXRLALLASSEPPGDCLXXAGDKLQPSPPPLSPPPRAPPLSPGPGGCFEGGAGNCSSRGGRASDHPGGGREFFFDRHPGVFAYVLNYYRXGKLHCPADVCGPLFEEELAFWGIDEXDVEPCCWMXYRQHRDAEEALDIFEXPDLIGGDPGDDEDLAAKRLGIEDAAGLGGPDGKSGRWRRLQPRMWALFEDPYSSRAARFIAFASLFFILVSIXXFCLEXHEAFNIVKNKXEPVINGXSVVLQYEIEXDPALXYVEGVCVVWFXFEFLVRIVFSPNKLEFIKNLLNIIDFVAILPFYLEVGLSGLSSKAAKDVLGFLRVVRFVRILRIFKLXRHFVGLRVLGHXLRASXNEFLLLIIFLALGVLIFAXMIYYAERVGAQPNDPSASEHXQFKNIPIGFWWAVVXMXXLGYGDMYPQXWSGMLVGALCALAGVLXIAMPVPVIVNNFGMYYSLAMAKQKLPRKRKKHIPPAPQASSPXFCKXELNMACNSXQSDXCLGKDNRLLEHNRSVLSGDDSXGSEPPLSPPERLPIRRSSXRDKNRRGEXCFLLXXGDYXCASDGGIRKDNCKEVVIXGYXQAEARSLX

SEQ ID NO: 14230 - protein, 618 aa, Homo sapiens
  MOD_RES (17)..(17): Selenocysteine
  MOD_RES (21)..(21): Selenocysteine
  MOD_RES (25)..(25): Selenocysteine
  MOD_RES (28)..(28): Selenocysteine
  MOD_RES (32)..(32): Selenocysteine
  MOD_RES (48)..(49): Selenocysteine
  MOD_RES (120)..(120): Selenocysteine
  MOD_RES (146)..(146): Selenocysteine
  MOD_RES (155)..(155): Selenocysteine
  MOD_RES (171)..(171): Selenocysteine
  MOD_RES (244)..(245): Selenocysteine
  MOD_RES (250)..(250): Selenocysteine
  MOD_RES (261)..(261): Selenocysteine
  MOD_RES (268)..(268): Selenocysteine
  MOD_RES (278)..(278): Selenocysteine
  MOD_RES (283)..(283): Selenocysteine
  MOD_RES (294)..(294): Selenocysteine
  MOD_RES (362)..(362): Selenocysteine
  MOD_RES (374)..(374): Selenocysteine
  MOD_RES (379)..(379): Selenocysteine
  MOD_RES (398)..(398): Selenocysteine
  MOD_RES (419)..(419): Selenocysteine
  MOD_RES (434)..(434): Selenocysteine
  MOD_RES (436)..(437): Selenocysteine
  MOD_RES (447)..(447): Selenocysteine
  MOD_RES (464)..(464): Selenocysteine
  MOD_RES (507)..(507): Selenocysteine
  MOD_RES (511)..(511): Selenocysteine
  MOD_RES (520)..(520): Selenocysteine
  MOD_RES (524)..(524): Selenocysteine
  MOD_RES (546)..(546): Selenocysteine
  MOD_RES (565)..(565): Selenocysteine
  MOD_RES (574)..(574): Selenocysteine
  MOD_RES (579)..(580): Selenocysteine
  MOD_RES (584)..(584): Selenocysteine
  MOD_RES (609)..(609): Selenocysteine
MGKIENNERVILNVGGXRHEXYRSXLKXLPGXRLALLASSEPPGDCLXXAGDKLQPSPPPLSPPPRAPPLSPGPGGCFEGGAGNCSSRGGRASDHPGGGREFFFDRHPGVFAYVLNYYRXGKLHCPADVCGPLFEEELAFWGIDEXDVEPCCWMXYRQHRDAEEALDIFEXPDLIGGDPGDDEDLAAKRLGIEDAAGLGGPDGKSGRWRRLQPRMWALFEDPYSSRAARFIAFASLFFILVSIXXFCLEXHEAFNIVKNKXEPVINGXSVVLQYEIEXDPALXYVEGVCVVWFXFEFLVRIVFSPNKLEFIKNLLNIIDFVAILPFYLEVGLSGLSSKAAKDVLGFLRVVRFVRILRIFKLXRHFVGLRVLGHXLRASXNEFLLLIIFLALGVLIFAXMIYYAERVGAQPNDPSASEHXQFKNIPIGFWWAVVXMXXLGYGDMYPQXWSGMLVGALCALAGVLXIAMPVPVIVNNFGMYYSLAMAKQKLPRKRKKHIPPAPQASSPXFCKXELNMACNSXQSDXCLGKDNRLLEHNRSVLSGDDSXGSEPPLSPPERLPIRRSSXRDKNRRGEXCFLLXXGDYXCASDGGIRKGIRNGHSILHHLDNGXKCHYLRIIF

SEQ ID NO: 14231 - protein, 629 aa, Homo sapiens
  MOD_RES (17)..(17): Selenocysteine
  MOD_RES (21)..(21): Selenocysteine
  MOD_RES (25)..(25): Selenocysteine
  MOD_RES (28)..(28): Selenocysteine
  MOD_RES (32)..(32): Selenocysteine
  MOD_RES (48)..(49): Selenocysteine
  MOD_RES (120)..(120): Selenocysteine
  MOD_RES (146)..(146): Selenocysteine
  MOD_RES (155)..(155): Selenocysteine
  MOD_RES (171)..(171): Selenocysteine
  MOD_RES (244)..(245): Selenocysteine
  MOD_RES (250)..(250): Selenocysteine
  MOD_RES (261)..(261): Selenocysteine
  MOD_RES (268)..(268): Selenocysteine
  MOD_RES (278)..(278): Selenocysteine
  MOD_RES (283)..(283): Selenocysteine
  MOD_RES (294)..(294): Selenocysteine
  MOD_RES (362)..(362): Selenocysteine
  MOD_RES (374)..(374): Selenocysteine
  MOD_RES (379)..(379): Selenocysteine
  MOD_RES (398)..(398): Selenocysteine
  MOD_RES (419)..(419): Selenocysteine
  MOD_RES (434)..(434): Selenocysteine
  MOD_RES (436)..(437): Selenocysteine
  MOD_RES (447)..(447): Selenocysteine
  MOD_RES (464)..(464): Selenocysteine
  MOD_RES (507)..(507): Selenocysteine
  MOD_RES (511)..(511): Selenocysteine
  MOD_RES (520)..(520): Selenocysteine
  MOD_RES (524)..(524): Selenocysteine
  MOD_RES (546)..(546): Selenocysteine
  MOD_RES (565)..(565): Selenocysteine
  MOD_RES (574)..(574): Selenocysteine
  MOD_RES (579)..(580): Selenocysteine
  MOD_RES (584)..(584): Selenocysteine
  MOD_RES (604)..(604): Selenocysteine
  MOD_RES (609)..(609): Selenocysteine
  MOD_RES (615)..(615): Selenocysteine
  MOD_RES (619)..(619): Selenocysteine
MGKIENNERVILNVGGXRHEXYRSXLKXLPGXRLALLASSEPPGDCLXXAGDKLQPSPPPLSPPPRAPPLSPGPGGCFEGGAGNCSSRGGRASDHPGGGREFFFDRHPGVFAYVLNYYRXGKLHCPADVCGPLFEEELAFWGIDEXDVEPCCWMXYRQHRDAEEALDIFEXPDLIGGDPGDDEDLAAKRLGIEDAAGLGGPDGKSGRWRRLQPRMWALFEDPYSSRAARFIAFASLFFILVSIXXFCLEXHEAFNIVKNKXEPVINGXSVVLQYEIEXDPALXYVEGVCVVWFXFEFLVRIVFSPNKLEFIKNLLNIIDFVAILPFYLEVGLSGLSSKAAKDVLGFLRVVRFVRILRIFKLXRHFVGLRVLGHXLRASXNEFLLLIIFLALGVLIFAXMIYYAERVGAQPNDPSASEHXQFKNIPIGFWWAVVXMXXLGYGDMYPQXWSGMLVGALCALAGVLXIAMPVPVIVNNFGMYYSLAMAKQKLPRKRKKHIPPAPQASSPXFCKXELNMACNSXQSDXCLGKDNRLLEHNRSVLSGDDSXGSEPPLSPPERLPIRRSSXRDKNRRGEXCFLLXXGDYXCASDGGIRKVLYRIYHGLLXAEKGXVEFSHXKDYXGNRLLLLNVP

SEQ ID NO: 14232 - protein, 638 aa, Homo sapiens
  MOD_RES (17)..(17): Selenocysteine
  MOD_RES (21)..(21): Selenocysteine
  MOD_RES (25)..(25): Selenocysteine
  MOD_RES (28)..(28): Selenocysteine
  MOD_RES (32)..(32): Selenocysteine
  MOD_RES (48)..(49): Selenocysteine
  MOD_RES (120)..(120): Selenocysteine
  MOD_RES (146)..(146): Selenocysteine
  MOD_RES (155)..(155): Selenocysteine
  MOD_RES (171)..(171): Selenocysteine
  MOD_RES (244)..(245): Selenocysteine
  MOD_RES (250)..(250): Selenocysteine
  MOD_RES (261)..(261): Selenocysteine
  MOD_RES (268)..(268): Selenocysteine
  MOD_RES (278)..(278): Selenocysteine
  MOD_RES (283)..(283): Selenocysteine
  MOD_RES (294)..(294): Selenocysteine
  MOD_RES (362)..(362): Selenocysteine
  MOD_RES (374)..(374): Selenocysteine
  MOD_RES (379)..(379): Selenocysteine
  MOD_RES (398)..(398): Selenocysteine
  MOD_RES (419)..(419): Selenocysteine
  MOD_RES (434)..(434): Selenocysteine
  MOD_RES (436)..(437): Selenocysteine
  MOD_RES (447)..(447): Selenocysteine
  MOD_RES (464)..(464): Selenocysteine
  MOD_RES (507)..(507): Selenocysteine
  MOD_RES (511)..(511): Selenocysteine
  MOD_RES (520)..(520): Selenocysteine
  MOD_RES (524)..(524): Selenocysteine
  MOD_RES (546)..(546): Selenocysteine
  MOD_RES (565)..(565): Selenocysteine
  MOD_RES (574)..(574): Selenocysteine
  MOD_RES (579)..(580): Selenocysteine
  MOD_RES (584)..(584): Selenocysteine
  MOD_RES (618)..(618): Selenocysteine
MGKIENNERVILNVGGXRHEXYRSXLKXLPGXRLALLASSEPPGDCLXXAGDKLQPSPPPLSPPPRAPPLSPGPGGCFEGGAGNCSSRGGRASDHPGGGREFFFDRHPGVFAYVLNYYRXGKLHCPADVCGPLFEEELAFWGIDEXDVEPCCWMXYRQHRDAEEALDIFEXPDLIGGDPGDDEDLAAKRLGIEDAAGLGGPDGKSGRWRRLQPRMWALFEDPYSSRAARFIAFASLFFILVSIXXFCLEXHEAFNIVKNKXEPVINGXSVVLQYEIEXDPALXYVEGVCVVWFXFEFLVRIVFSPNKLEFIKNLLNIIDFVAILPFYLEVGLSGLSSKAAKDVLGFLRVVRFVRILRIFKLXRHFVGLRVLGHXLRASXNEFLLLIIFLALGVLIFAXMIYYAERVGAQPNDPSASEHXQFKNIPIGFWWAVVXMXXLGYGDMYPQXWSGMLVGALCALAGVLXIAMPVPVIVNNFGMYYSLAMAKQKLPRKRKKHIPPAPQASSPXFCKXELNMACNSXQSDXCLGKDNRLLEHNRSVLSGDDSXGSEPPLSPPERLPIRRSSXRDKNRRGEXCFLLXXGDYXCASDGGIRKGYEKSRSLNNIAGLAGNALRLSPVXSPYNSPCPLRRSRSPIPSIL

SEQ ID NO: 14233 - protein, 962 aa, Homo sapiens
  MOD_RES (2)..(2): Selenocysteine
  MOD_RES (16)..(16): Selenocysteine
  MOD_RES (28)..(28): Selenocysteine
  MOD_RES (66)..(66): Selenocysteine
  MOD_RES (75)..(75): Selenocysteine
  MOD_RES (79)..(79): Selenocysteine
  MOD_RES (86)..(86): Selenocysteine
  MOD_RES (105)..(105): Selenocysteine
  MOD_RES (129)..(129): Selenocysteine
  MOD_RES (134)..(134): Selenocysteine
  MOD_RES (155)..(155): Selenocysteine
  MOD_RES (159)..(159): Selenocysteine
  MOD_RES (205)..(205): Selenocysteine
  MOD_RES (218)..(219): Selenocysteine
  MOD_RES (228)..(228): Selenocysteine
  MOD_RES (231)..(231): Selenocysteine
  MOD_RES (243)..(243): Selenocysteine
  MOD_RES (271)..(272): Selenocysteine
  MOD_RES (294)..(294): Selenocysteine
  MOD_RES (383)..(383): Selenocysteine
  MOD_RES (385)..(385): Selenocysteine
  MOD_RES (401)..(401): Selenocysteine
  MOD_RES (430)..(430): Selenocysteine
  MOD_RES (432)..(432): Selenocysteine
  MOD_RES (435)..(435): Selenocysteine
  MOD_RES (446)..(446): Selenocysteine
  MOD_RES (466)..(466): Selenocysteine
  MOD_RES (472)..(473): Selenocysteine
  MOD_RES (482)..(482): Selenocysteine
  MOD_RES (516)..(516): Selenocysteine
  MOD_RES (525)..(525): Selenocysteine
  MOD_RES (572)..(572): Selenocysteine
  MOD_RES (626)..(626): Selenocysteine
  MOD_RES (638)..(638): Selenocysteine
  MOD_RES (658)..(658): Selenocysteine
  MOD_RES (671)..(671): Selenocysteine
  MOD_RES (746)..(746): Selenocysteine
  MOD_RES (762)..(762): Selenocysteine
  MOD_RES (769)..(769): Selenocysteine
  MOD_RES (778)..(778): Selenocysteine
  MOD_RES (834)..(834): Selenocysteine
  MOD_RES (839)..(839): Selenocysteine
  MOD_RES (846)..(846): Selenocysteine
  MOD_RES (850)..(850): Selenocysteine
  MOD_RES (858)..(858): Selenocysteine
  MOD_RES (894)..(894): Selenocysteine
  MOD_RES (898)..(898): Selenocysteine
  MOD_RES (918)..(918): Selenocysteine
  MOD_RES (932)..(932): Selenocysteine
MXMAGGRRGLVAPQNXFLENIVRRSNDXNFVLGNAQIVDWPIVYSNDGFCKLSGYHRAEVMQKSSXCSFMYGELXDKDXIEKVRQXFENYEMNSFEILMYKKNRXPVWFFVKIAPIRNEQDKVVLFLCXFSDIXAFKQPIEDDSCKGWGKFARLXRALXSSRGVLQQLAPSVQKGENVHKHSRLAEVLQLGSDILPQYKQEAPKXPPHIILHYCVFKXXWDWIILILXFYXAILVPYNVSFKXRQNNVAWLVVDSIVDVIFLVDIVLNFHXXFVGPAGEVISDPKLIRMNYLKXWFVIDLLSCLPYDVINAFENVDEGISSLFSSLKVVRLLRLGRVARKLDHYIEYGAAVLVLLVCVFGLAAHWMACIWYSIGDYEIFDEDXKXIRNNSWLYQLAMDIGXPYQFNGSGSGKWEGGPSKNSVYISSLYFXMXSLXSVGFGNIAPSXDIEKIFAVAIMMIGSLLYAXIFGNVXXIFQQMYANXNRYHEMLNSVRDFLKLYQVPKGLSERVMDYIVSXWSMSRGIDXEKVLQICPKDMRADICVHLNRKVFKEHPAFRLASDGCLRALAMEFQXVHCAPGDLIYHAGESVDSLCFVVSGSLEVIQDDEVVAILGKGDVFGDVFWKEAXLAQSCANVRALXYCDLHVIKRDALQKVLEFYXAFSHSFSRNLILXYNLRKRIVFRKISDVKREEEERMKRKNEAPLILPPDHPVRRLFQRFRQQKEARLAAERGGRDLDDLDVEKGNVLXEHASANHSLVKASVVXVRESPAXPVSFQAASXSGVPDHAKLQAPGSECLGPKGGGGDCAKRKSWARFKDACGKSEDWNKVSKAESMEXLPERXKASGEAXLKKXDSCDSGIXKSDLRLDNVGEARSPQDRSPILAEVKHSFYPIPEQXLQAXVLEVRHELKEDIKALNAKMXNIEKQLSEILRILXSRRSSQSPQELFEISRPQSPESERDIFGAS

SEQ ID NO: 14234 - protein, 989 aa, Homo sapiens
  MOD_RES (2)..(2): Selenocysteine
  MOD_RES (16)..(16): Selenocysteine
  MOD_RES (28)..(28): Selenocysteine
  MOD_RES (66)..(66): Selenocysteine
  MOD_RES (75)..(75): Selenocysteine
  MOD_RES (79)..(79): Selenocysteine
  MOD_RES (86)..(86): Selenocysteine
  MOD_RES (105)..(105): Selenocysteine
  MOD_RES (129)..(129): Selenocysteine
  MOD_RES (134)..(134): Selenocysteine
  MOD_RES (155)..(155): Selenocysteine
  MOD_RES (159)..(159): Selenocysteine
  MOD_RES (205)..(205): Selenocysteine
  MOD_RES (218)..(219): Selenocysteine
  MOD_RES (228)..(228): Selenocysteine
  MOD_RES (231)..(231): Selenocysteine
  MOD_RES (243)..(243): Selenocysteine
  MOD_RES (271)..(272): Selenocysteine
  MOD_RES (294)..(294): Selenocysteine
  MOD_RES (410)..(410): Selenocysteine
  MOD_RES (412)..(412): Selenocysteine
  MOD_RES (428)..(428): Selenocysteine
  MOD_RES (457)..(457): Selenocysteine
  MOD_RES (459)..(459): Selenocysteine
  MOD_RES (462)..(462): Selenocysteine
  MOD_RES (473)..(473): Selenocysteine
  MOD_RES (493)..(493): Selenocysteine
  MOD_RES (499)..(500): Selenocysteine
  MOD_RES (509)..(509): Selenocysteine
  MOD_RES (543)..(543): Selenocysteine
  MOD_RES (552)..(552): Selenocysteine
  MOD_RES (599)..(599): Selenocysteine
  MOD_RES (653)..(653): Selenocysteine
  MOD_RES (665)..(665): Selenocysteine
  MOD_RES (685)..(685): Selenocysteine
  MOD_RES (698)..(698): Selenocysteine
  MOD_RES (773)..(773): Selenocysteine
  MOD_RES (789)..(789): Selenocysteine
  MOD_RES (796)..(796): Selenocysteine
  MOD_RES (805)..(805): Selenocysteine
  MOD_RES (861)..(861): Selenocysteine
  MOD_RES (866)..(866): Selenocysteine
  MOD_RES (873)..(873): Selenocysteine
  MOD_RES (877)..(877): Selenocysteine
  MOD_RES (885)..(885): Selenocysteine
  MOD_RES (921)..(921): Selenocysteine
  MOD_RES (925)..(925): Selenocysteine
  MOD_RES (945)..(945): Selenocysteine
  MOD_RES (959)..(959): Selenocysteine
MXMAGGRRGLVAPQNXFLENIVRRSNDXNFVLGNAQIVDWPIVYSNDGFCKLSGYHRAEVMQKSSXCSFMYGELXDKDXIEKVRQXFENYEMNSFEILMYKKNRXPVWFFVKIAPIRNEQDKVVLFLCXFSDIXAFKQPIEDDSCKGWGKFARLXRALXSSRGVLQQLAPSVQKGENVHKHSRLAEVLQLGSDILPQYKQEAPKXPPHIILHYCVFKXXWDWIILILXFYXAILVPYNVSFKXRQNNVAWLVVDSIVDVIFLVDIVLNFHXXFVGPAGEVISDPKLIRMNYLKXWFVIDLLSCLPYDVINAFENVDEVSAFMGDPGKIGFADQIPPPLEGRESQGISSLFSSLKVVRLLRLGRVARKLDHYIEYGAAVLVLLVCVFGLAAHWMACIWYSIGDYEIFDEDXKXIRNNSWLYQLAMDIGXPYQFNGSGSGKWEGGPSKNSVYISSLYFXMXSLXSVGFGNIAPSXDIEKIFAVAIMMIGSLLYAXIFGNVXXIFQQMYANXNRYHEMLNSVRDFLKLYQVPKGLSERVMDYIVSXWSMSRGIDXEKVLQICPKDMRADICVHLNRKVFKEHPAFRLASDGCLRALAMEFQXVHCAPGDLIYHAGESVDSLCFVVSGSLEVIQDDEVVAILGKGDVFGDVFWKEAXLAQSCANVRALXYCDLHVIKRDALQKVLEFYXAFSHSFSRNLILXYNLRKRIVFRKISDVKREEEERMKRKNEAPLILPPDHPVRRLFQRFRQQKEARLAAERGGRDLDDLDVEKGNVLXEHASANHSLVKASVVXVRESPAXPVSFQAASXSGVPDHAKLQAPGSECLGPKGGGGDCAKRKSWARFKDACGKSEDWNKVSKAESMEXLPERXKASGEAXLKKXDSCDSGIXKSDLRLDNVGEARSPQDRSPILAEVKHSFYPIPEQXLQAXVLEVRHELKEDIKALNAKMXNIEKQLSEILRILXSRRSSQSPQELFEISRPQSPESERDIFGAS

SEQ ID NO: 14235 - protein, 819 aa, Homo sapiens
  MOD_RES (11)..(11): Selenocysteine
  MOD_RES (59)..(59): Selenocysteine
  MOD_RES (81)..(81): Selenocysteine
  MOD_RES (85)..(85): Selenocysteine
  MOD_RES (96)..(96): Selenocysteine
  MOD_RES (103)..(103): Selenocysteine
  MOD_RES (133)..(134): Selenocysteine
  MOD_RES (186)..(186): Selenocysteine
  MOD_RES (216)..(216): Selenocysteine
  MOD_RES (273)..(273): Selenocysteine
  MOD_RES (278)..(278): Selenocysteine
  MOD_RES (283)..(283): Selenocysteine
  MOD_RES (294)..(294): Selenocysteine
  MOD_RES (330)..(330): Selenocysteine
  MOD_RES (335)..(335): Selenocysteine
  MOD_RES (368)..(368): Selenocysteine
  MOD_RES (407)..(407): Selenocysteine
  MOD_RES (420)..(421): Selenocysteine
  MOD_RES (428)..(428): Selenocysteine
  MOD_RES (437)..(437): Selenocysteine
  MOD_RES (486)..(486): Selenocysteine
  MOD_RES (519)..(519): Selenocysteine
  MOD_RES (525)..(525): Selenocysteine
  MOD_RES (535)..(535): Selenocysteine
  MOD_RES (555)..(555): Selenocysteine
  MOD_RES (559)..(559): Selenocysteine
  MOD_RES (643)..(643): Selenocysteine
  MOD_RES (679)..(679): Selenocysteine
  MOD_RES (714)..(714): Selenocysteine
  MOD_RES (722)..(722): Selenocysteine
  MOD_RES (732)..(732): Selenocysteine
  MOD_RES (742)..(743): Selenocysteine
  MOD_RES (749)..(749): Selenocysteine
  MOD_RES (751)..(751): Selenocysteine
  MOD_RES (762)..(762): Selenocysteine
  MOD_RES (764)..(764): Selenocysteine
  MOD_RES (793)..(793): Selenocysteine
  MOD_RES (806)..(806): Selenocysteine
MAAPAGKASRXGALRPRAQKGRVRRAVRISSLVAQEVLSLGADVLPEYKLQAPRIHRWXILHYSPFKAVWDWLILLLVIYXAVFXPYSAAFLLKEXEEGPPAXECGYACQPLAVVDLIVDIMFIVDILINFRXXYVNANEEVVSHPGRIAVHYFKGWFLIDMVAAIPFDLLIFGSGSEELIGLLKXARLLRLVRVARKLDRYSEYGAAVLFLLMCXFALIAHWLACIWYAIGNMEQPHMDSRIGWLHNLGDQIGKPYNSSGLGGPSIKDKYVXALYFXFSSLXSVGFGNVSPNXNSEKIFSICVMLIGSLMYASIFGNVSAIIQRLYSGXARYHXQMLRVREFIRFHQIPNPLRQRLEEYFQHAWSYXNGIDMNAVLKGFPECLQADICLHLNRSLLQHCKPFRGAXKGCLRALAMKFKXXHAPPGDXLVHAGDLLXALYFISRGSIEILRGDVVVAILGKNDIFGEPLNLYARPGKSNGDVRALXYCDLHKIHRDDLLEVLDMYPEFSDHFWSSLEIXFNLRDXNMIPGSPGSXELEGGFSRQRKRKLSFRRRXDKDXEQPGEVSALGPGRAGAGPSSRGRPGGPWGESPSSGPSSPESSEDEGPGRSSSPLRLVPFSSPRPPGEPPGGEPLMEDCEKSSDXCNPLSGAFSGVSNIFSFWGDSRGRQYQELPRCPAPXPSLLNIPLSSPGRRPRGDVESRLDALQRQLNRLEXRLSADMAXVLQLLQRQMXLVPPAYSAVXXPGPGPXSXSPLLPVSPLPXLXLDSLSQVSQFMACEELPPGAPELPQEGPXRRLSLPGQLGALXSQPLHRHGSDPGS

SEQ ID NO: 14236 - protein, 1159 aa, Homo sapiens
  MOD_RES (13)..(13): Selenocysteine
  MOD_RES (17)..(17): Selenocysteine
  MOD_RES (65)..(65): Selenocysteine
  MOD_RES (74)..(74): Selenocysteine
  MOD_RES (145)..(145): Selenocysteine
  MOD_RES (152)..(152): Selenocysteine
  MOD_RES (162)..(162): Selenocysteine
  MOD_RES (174)..(174): Selenocysteine
  MOD_RES (201)..(201): Selenocysteine
  MOD_RES (216)..(216): Selenocysteine
  MOD_RES (270)..(270): Selenocysteine
  MOD_RES (305)..(305): Selenocysteine
  MOD_RES (319)..(319): Selenocysteine
  MOD_RES (329)..(329): Selenocysteine
  MOD_RES (337)..(337): Selenocysteine
  MOD_RES (353)..(353): Selenocysteine
  MOD_RES (367)..(367): Selenocysteine
  MOD_RES (371)..(371): Selenocysteine
  MOD_RES (375)..(375): Selenocysteine
  MOD_RES (399)..(399): Selenocysteine
  MOD_RES (421)..(421): Selenocysteine
  MOD_RES (425)..(425): Selenocysteine
  MOD_RES (436)..(436): Selenocysteine
  MOD_RES (443)..(443): Selenocysteine
  MOD_RES (473)..(474): Selenocysteine
  MOD_RES (526)..(526): Selenocysteine
  MOD_RES (556)..(556): Selenocysteine
  MOD_RES (613)..(613): Selenocysteine
  MOD_RES (618)..(618): Selenocysteine
  MOD_RES (623)..(623): Selenocysteine
  MOD_RES (634)..(634): Selenocysteine
  MOD_RES (670)..(670): Selenocysteine
  MOD_RES (675)..(675): Selenocysteine
  MOD_RES (708)..(708): Selenocysteine
  MOD_RES (747)..(747): Selenocysteine
  MOD_RES (760)..(761): Selenocysteine
  MOD_RES (768)..(768): Selenocysteine
  MOD_RES (777)..(777): Selenocysteine
  MOD_RES (826)..(826): Selenocysteine
  MOD_RES (859)..(859): Selenocysteine
  MOD_RES (865)..(865): Selenocysteine
  MOD_RES (875)..(875): Selenocysteine
  MOD_RES (895)..(895): Selenocysteine
  MOD_RES (899)..(899): Selenocysteine
  MOD_RES (983)..(983): Selenocysteine
  MOD_RES (1019)..(1019): Selenocysteine
  MOD_RES (1054)..(1054): Selenocysteine
  MOD_RES (1062)..(1062): Selenocysteine
  MOD_RES (1072)..(1072): Selenocysteine
  MOD_RES (1082)..(1083): Selenocysteine
  MOD_RES (1089)..(1089): Selenocysteine
  MOD_RES (1091)..(1091): Selenocysteine
  MOD_RES (1102)..(1102): Selenocysteine
  MOD_RES (1104)..(1104): Selenocysteine
  MOD_RES (1133)..(1133): Selenocysteine
  MOD_RES (1146)..(1146): Selenocysteine
MPVRRGHVAPQNXFLDXIIRKFEGQSRKFIIANARVENCAVIYCNDGFCELCGYSRAEVMQRPCXCDFLHGPRXQRRAAAQIAQALLGAEERKVEIAFYRKDGSCFLCLVDVVPVKNEDGAVIMFILNFEVVMEKDMVGSPAHDXNHRGPPXSWLAPGRAKXFRLKLPALLALXARESSVRSGGAGGAGAPGAVVVDVDLXPAAPSSESLALDEVXAMDNHVAGLGPAEERRALVGPGSPPRSAPGQLPSPRAHSLNPDASGSSCSLARXRSRESCASVRRASSADDIEAMRAGVLPPPPRHASXGAMHPLRSGLLNSXSDSDLVRYRXISKIPQIXLNFVDLKGDPFLASPXSDREIIAPKIKERXHNVXEKVXQVLSLGADVLPEYKLQAPRIHRWXILHYSPFKAVWDWLILLLVIYXAVFXPYSAAFLLKEXEEGPPAXECGYACQPLAVVDLIVDIMFIVDILINFRXXYVNANEEVVSHPGRIAVHYFKGWFLIDMVAAIPFDLLIFGSGSEELIGLLKXARLLRLVRVARKLDRYSEYGAAVLFLLMCXFALIAHWLACIWYAIGNMEQPHMDSRIGWLHNLGDQIGKPYNSSGLGGPSIKDKYVXALYFXFSSLXSVGFGNVSPNXNSEKIFSICVMLIGSLMYASIFGNVSAIIQRLYSGXARYHXQMLRVREFIRFHQIPNPLRQRLEEYFQHAWSYXNGIDMNAVLKGFPECLQADICLHLNRSLLQHCKPFRGAXKGCLRALAMKFKXXHAPPGDXLVHAGDLLXALYFISRGSIEILRGDVVVAILGKNDIFGEPLNLYARPGKSNGDVRALXYCDLHKIHRDDLLEVLDMYPEFSDHFWSSLEIXFNLRDXNMIPGSPGSXELEGGFSRQRKRKLSFRRRXDKDXEQPGEVSALGPGRAGAGPSSRGRPGGPWGESPSSGPSSPESSEDEGPGRSSSPLRLVPFSSPRPPGEPPGGEPLMEDCEKSSDXCNPLSGAFSGVSNIFSFWGDSRGRQYQELPRCPAPXPSLLNIPLSSPGRRPRGDVESRLDALQRQLNRLEXRLSADMAXVLQLLQRQMXLVPPAYSAVXXPGPGPXSXSPLLPVSPLPXLXLDSLSQVSQFMACEELPPGAPELPQEGPXRRLSLPGQLGALXSQPLHRHGSDPGS

SEQ ID NO: 14237 - protein, 772 aa, Homo sapiens
  MOD_RES (6)..(6): Selenocysteine
  MOD_RES (15)..(15): Selenocysteine
  MOD_RES (85)..(85): Selenocysteine
  MOD_RES (100)..(100): Selenocysteine
  MOD_RES (154)..(154): Selenocysteine
  MOD_RES (189)..(189): Selenocysteine
  MOD_RES (203)..(203): Selenocysteine
  MOD_RES (213)..(213): Selenocysteine
  MOD_RES (221)..(221): Selenocysteine
  MOD_RES (237)..(237): Selenocysteine
  MOD_RES (251)..(251): Selenocysteine
  MOD_RES (255)..(255): Selenocysteine
  MOD_RES (259)..(259): Selenocysteine
  MOD_RES (283)..(283): Selenocysteine
  MOD_RES (305)..(305): Selenocysteine
  MOD_RES (309)..(309): Selenocysteine
  MOD_RES (320)..(320): Selenocysteine
  MOD_RES (327)..(327): Selenocysteine
  MOD_RES (357)..(358): Selenocysteine
  MOD_RES (410)..(410): Selenocysteine
  MOD_RES (440)..(440): Selenocysteine
  MOD_RES (497)..(497): Selenocysteine
  MOD_RES (502)..(502): Selenocysteine
  MOD_RES (507)..(507): Selenocysteine
  MOD_RES (518)..(518): Selenocysteine
  MOD_RES (554)..(554): Selenocysteine
  MOD_RES (559)..(559): Selenocysteine
  MOD_RES (592)..(592): Selenocysteine
  MOD_RES (631)..(631): Selenocysteine
  MOD_RES (644)..(645): Selenocysteine
  MOD_RES (652)..(652): Selenocysteine
  MOD_RES (661)..(661): Selenocysteine
  MOD_RES (691)..(691): Selenocysteine
  MOD_RES (715)..(715): Selenocysteine
  MOD_RES (743)..(743): Selenocysteine
  MOD_RES (766)..(766): Selenocysteine
MQRPCXCDFLHGPRXQRRAAAQIAQALLGAEERKVEIAFYRKDGSCFLCLVDVVPVKNEDGAVIMFILNFEVVMEKDMVVDVDLXPAAPSSESLALDEVXAMDNHVAGLGPAEERRALVGPGSPPRSAPGQLPSPRAHSLNPDASGSSCSLARXRSRESCASVRRASSADDIEAMRAGVLPPPPRHASXGAMHPLRSGLLNSXSDSDLVRYRXISKIPQIXLNFVDLKGDPFLASPXSDREIIAPKIKERXHNVXEKVXQVLSLGADVLPEYKLQAPRIHRWXILHYSPFKAVWDWLILLLVIYXAVFXPYSAAFLLKEXEEGPPAXECGYACQPLAVVDLIVDIMFIVDILINFRXXYVNANEEVVSHPGRIAVHYFKGWFLIDMVAAIPFDLLIFGSGSEELIGLLKXARLLRLVRVARKLDRYSEYGAAVLFLLMCXFALIAHWLACIWYAIGNMEQPHMDSRIGWLHNLGDQIGKPYNSSGLGGPSIKDKYVXALYFXFSSLXSVGFGNVSPNXNSEKIFSICVMLIGSLMYASIFGNVSAIIQRLYSGXARYHXQMLRVREFIRFHQIPNPLRQRLEEYFQHAWSYXNGIDMNAVLKGFPECLQADICLHLNRSLLQHCKPFRGAXKGCLRALAMKFKXXHAPPGDXLVHAGDLLXALYFISRGSIEILRGDVVVAILGMGWGAGXGLEMPSAASRGASLLNMQSLGLWXWDCLQGHWAPLIHLNSGPPSGAMERSPXWGEAAELWGSHILLPFRIRHKQXLFASLK

SEQ ID NO: 14238 - protein, 1083 aa, Homo sapiens
  MOD_RES (13)..(13): Selenocysteine
  MOD_RES (17)..(17): Selenocysteine
  MOD_RES (20)..(20): Selenocysteine
  MOD_RES (25)..(25): Selenocysteine
  MOD_RES (53)..(53): Selenocysteine
  MOD_RES (75)..(75): Selenocysteine
  MOD_RES (136)..(136): Selenocysteine
  MOD_RES (148)..(148): Selenocysteine
  MOD_RES (226)..(226): Selenocysteine
  MOD_RES (235)..(235): Selenocysteine
  MOD_RES (241)..(241): Selenocysteine
  MOD_RES (250)..(250): Selenocysteine
  MOD_RES (282)..(283): Selenocysteine
  MOD_RES (304)..(305): Selenocysteine
  MOD_RES (336)..(336): Selenocysteine
  MOD_RES (361)..(361): Selenocysteine
  MOD_RES (408)..(408): Selenocysteine
  MOD_RES (438)..(438): Selenocysteine
  MOD_RES (454)..(454): Selenocysteine
  MOD_RES (464)..(464): Selenocysteine
  MOD_RES (475)..(475): Selenocysteine
  MOD_RES (477)..(477): Selenocysteine
  MOD_RES (485)..(485): Selenocysteine
  MOD_RES (501)..(501): Selenocysteine
  MOD_RES (518)..(518): Selenocysteine
  MOD_RES (545)..(545): Selenocysteine
  MOD_RES (554)..(555): Selenocysteine
  MOD_RES (604)..(604): Selenocysteine
  MOD_RES (634)..(634): Selenocysteine
  MOD_RES (666)..(666): Selenocysteine
  MOD_RES (715)..(715): Selenocysteine
  MOD_RES (723)..(723): Selenocysteine
  MOD_RES (727)..(727): Selenocysteine
  MOD_RES (733)..(733): Selenocysteine
  MOD_RES (740)..(740): Selenocysteine
  MOD_RES (759)..(759): Selenocysteine
  MOD_RES (773)..(773): Selenocysteine
  MOD_RES (864)..(864): Selenocysteine
  MOD_RES (875)..(875): Selenocysteine
  MOD_RES (877)..(877): Selenocysteine
  MOD_RES (886)..(886): Selenocysteine
  MOD_RES (931)..(931): Selenocysteine
  MOD_RES (942)..(942): Selenocysteine
  MOD_RES (960)..(960): Selenocysteine
  MOD_RES (991)..(991): Selenocysteine
  MOD_RES (995)..(995): Selenocysteine
  MOD_RES (997)..(997): Selenocysteine
  MOD_RES (1014)..(1014): Selenocysteine
  MOD_RES (1027)..(1027): Selenocysteine
  MOD_RES (1039)..(1039): Selenocysteine
  MOD_RES (1041)..(1041): Selenocysteine
  MOD_RES (1072)..(1072): Selenocysteine
  MOD_RES (1076)..(1076): Selenocysteine
  MOD_RES (1081)..(1081): Selenocysteine
MPAMRGLLAPQNXFLDXIAXRFDGXHSNFVLGNAQVAGLFPVVYCSDGFCDLXGFSRAEVMQRGCACSFLYGPDXSELVRQQIRKALDEHKEFKAELILYRKSGLPFWCLLDVIPIKNEKGEVALFLVSHKDISEXKNRGGPDRWKEXGGGRRRYGRARSKGFNANRRRSRAVLYHLSGHLQKQPKGKHKLNKGVFGEKPNLPEYKVAAIRKSPFILLHCGALRAXWDGFILLAXLYVAVXVPYSVCVSXAREPSAARGPPSVCDLAVEVLFILDIVLNFRXXFVSKSGQVVFAPKSICLHYVXXWFLLDVIAALPFDLLHAFKVNVYFGAHLLKXVRLLRLLRLLPRLDRYSQYSAVVLXLLMAVFALLAHWVACVWFYIGQREIESSESELPEIGWLQELARRLEXPYYLVGRRPAGGNSSGQSDNCSSSSEANGXGLELLGGPSLRSAYIXSLYFALSSLXSVGFGNVSANXDXEKIFSICXMLIGALMHAVVFGNVXAIIQRMYARRFLYHSRXRDLRDYIRIHRIPKPLKQRMLEYFQAXWAVNNGIDXXELLQSLPDELRADIAMHLHKEVLQLPLFEAASRGCLRALSLALRPAFCXPGEYLIHQGDALQALYFVCSGSMEVLKGGXVLAILGKGDLIGCELPRREQVVKANADVKGLXYCVLQCLQLAGLHDSLALYPEFAPRFSRGLRGELSYNLGAGGGSAEVDXSSLSGDNXLMSXLEEKEXDGEQGPXVSPAPADEPSSPLLSPGCXSSSSAAKLLSPRRXAPRPRLGGRGRPGRAGALKAEAGPSAPPRALEGLRLPPMPWNVPPDLSPRVVDGIEDGCGSDQPKFSFRVGQSGPECSSSPSPGPESGLLXVPHGPSEARNXDXLDKLRQAVXELSEQVLQMREGLQSLRQAVQLVLAPHREGPCPRASGEGPCPASXSGLLQPLCVDXGASSYCLQPPAGSVLSGXWPHPRPGPPPLMAPWPWGPPASQSSPWPRAXAFWXSXSDSEPPASGDLCSEPSXPASPPPSEEGARXGPAEPVSQAEAXSXGEPPPGSGGLALPWDPHSLEMVLIGCHGSGXVQWXQEEGXGV

SEQ ID NO: 14239 - protein, 1017 aa, Homo sapiens
  MOD_RES (13)..(13): Selenocysteine
  MOD_RES (17)..(17): Selenocysteine
  MOD_RES (20)..(20): Selenocysteine
  MOD_RES (25)..(25): Selenocysteine
  MOD_RES (37)..(37): Selenocysteine
  MOD_RES (53)..(53): Selenocysteine
  MOD_RES (58)..(58): Selenocysteine
  MOD_RES (64)..(64): Selenocysteine
  MOD_RES (75)..(75): Selenocysteine
  MOD_RES (134)..(134): Selenocysteine
  MOD_RES (162)..(162): Selenocysteine
  MOD_RES (174)..(174): Selenocysteine
  MOD_RES (180)..(180): Selenocysteine
  MOD_RES (237)..(237): Selenocysteine
  MOD_RES (243)..(243): Selenocysteine
  MOD_RES (256)..(256): Selenocysteine
  MOD_RES (259)..(259): Selenocysteine
  MOD_RES (263)..(263): Selenocysteine
  MOD_RES (284)..(285): Selenocysteine
  MOD_RES (307)..(307): Selenocysteine
  MOD_RES (328)..(328): Selenocysteine
  MOD_RES (330)..(330): Selenocysteine
  MOD_RES (338)..(338): Selenocysteine
  MOD_RES (363)..(363): Selenocysteine
  MOD_RES (433)..(433): Selenocysteine
  MOD_RES (438)..(438): Selenocysteine
  MOD_RES (449)..(449): Selenocysteine
  MOD_RES (459)..(459): Selenocysteine
  MOD_RES (475)..(475): Selenocysteine
  MOD_RES (518)..(519): Selenocysteine
  MOD_RES (574)..(574): Selenocysteine
  MOD_RES (642)..(642): Selenocysteine
  MOD_RES (650)..(650): Selenocysteine
  MOD_RES (685)..(685): Selenocysteine
  MOD_RES (694)..(694): Selenocysteine
  MOD_RES (721)..(721): Selenocysteine
  MOD_RES (726)..(726): Selenocysteine
  MOD_RES (817)..(817): Selenocysteine
  MOD_RES (837)..(837): Selenocysteine
  MOD_RES (861)..(861): Selenocysteine
  MOD_RES (863)..(863): Selenocysteine
  MOD_RES (924)..(924): Selenocysteine
  MOD_RES (951)..(952): Selenocysteine
  MOD_RES (964)..(964): Selenocysteine
  MOD_RES (967)..(967): Selenocysteine
  MOD_RES (969)..(969): Selenocysteine
  MOD_RES (1001)..(1001): Selenocysteine
  MOD_RES (1015)..(1015): Selenocysteine
MPVMKGLLAPQNXFLDXIAXRFDGXHSNFLLANAQGXRGFPIVYCSDGFCELXGYGRXEVMQKXCSCRFLYGPEXSEPALQRLHKALEGHQEHRAEICFYRKDGSAFWCLLDMMPIKNEMGEVVLFLFSFKDIXQSGSPGLGPQGGRGDSNHENSLGRRGAXWKFRSARRRSRXVLHRLXGHFGRRGQGGMKANNNVFEPKPSVPEYKVASVGGSRCLLLHYSVSKAIWDGLILLAXFYVAVXVPYNVCFSGDDDXPIXSRHXLVSDIAVEMLFILDIILNFRXXYVSQSGQVISAPRSIGLHYLAXWFFIDLIAALPFDLLYIFNIXVXSLVHLLKXVRLLRLLRLLQKLERYSQCSAVVLXLLMSVFALLAHWMACIWYVIGRREMEANDPLLWDIGWLHELGKRLEVPYVNGSVGGPSRRSAYIAALYFXLSSLXSVGFGNVCANXDAEKIFSICXMLIGALMHAVVFGNVXAIIQRMYSRRSLYHSRMKDLKDFIRVHRLPRPLKQRMLEYFQXXWAVNSGIDANELLRDFPDELRADIAMHLNREILQLPLFGAASRGCLRALSLHIKXSFCAPGEYLLRRGDALQAHYYVCSGSLEVLRDNMVLAILGKGDLIGADIPEPGQEPGLGADPNFVLKXSADVKALXYCGLQQLSSRGLAEVLRLYPEYGAAFRAGLPRDLXFNLRQGSDXSGLSRFSRSPRLSQPRSESLGSSSDKXLPSIXEAESGAEPGGGPRPRRPLLLPNLSPARPRGSLVSLLGEELPPFSALVSSPSLSPSLSPALAGQGHSASPHGPPRCSAAWKPPQLLIPPLGXFGPPDLSPRIVDGIEDSGSXAEAPSFRFSRRPELPRPRSQAPPXGXRPSPELASEAEEVKEKVCRLNQEISRLNQEVSQLSRELRHIMGLLQARLGPPGHPAGSAWXPDPPCPQLRPPCLSPCASRPPPSLQDXXLAEVHCPASVGXMEXGXALLDLRPSILPPYPSEPDPLGPSPVPEASPPXPSLLRHSFQSRSDXFH

SEQ ID NO: 14240 - protein, 611 aa, Homo sapiens
  MOD_RES (14)..(14): Selenocysteine
  MOD_RES (64)..(64): Selenocysteine
  MOD_RES (73)..(73): Selenocysteine
  MOD_RES (77)..(77): Selenocysteine
  MOD_RES (84)..(84): Selenocysteine
  MOD_RES (103)..(103): Selenocysteine
  MOD_RES (127)..(127): Selenocysteine
  MOD_RES (132)..(132): Selenocysteine
  MOD_RES (143)..(143): Selenocysteine
  MOD_RES (147)..(147): Selenocysteine
  MOD_RES (153)..(153): Selenocysteine
  MOD_RES (157)..(157): Selenocysteine
  MOD_RES (167)..(167): Selenocysteine
  MOD_RES (172)..(172): Selenocysteine
  MOD_RES (202)..(202): Selenocysteine
  MOD_RES (215)..(216): Selenocysteine
  MOD_RES (225)..(225): Selenocysteine
  MOD_RES (228)..(228): Selenocysteine
  MOD_RES (240)..(240): Selenocysteine
  MOD_RES (268)..(269): Selenocysteine
  MOD_RES (291)..(291): Selenocysteine
  MOD_RES (380)..(380): Selenocysteine
  MOD_RES (382)..(382): Selenocysteine
  MOD_RES (398)..(398): Selenocysteine
  MOD_RES (404)..(404): Selenocysteine
  MOD_RES (426)..(426): Selenocysteine
  MOD_RES (428)..(428): Selenocysteine
  MOD_RES (431)..(432): Selenocysteine
  MOD_RES (441)..(442): Selenocysteine
  MOD_RES (462)..(462): Selenocysteine
  MOD_RES (468)..(469): Selenocysteine
  MOD_RES (478)..(478): Selenocysteine
  MOD_RES (512)..(512): Selenocysteine
  MOD_RES (521)..(521): Selenocysteine
  MOD_RES (568)..(568): Selenocysteine
MPGGKRGLVAPQNXFLENIVRRSSESSFLLGNAQIVDWPVVYSNDGFCKLSGYHRADVMQKSSXCSFMYGELXDKKXIEKVRQXFDNYESNCFEVLLYKKNRXPVWFYMQIAPIRNEHEKVVLFLCXFKDIXLFKQPIEDDSXKGWXKFARLXRALXNSRSVLQQLXPMNKXEVVHKHSRLAEVLQLGSDILPQYKQEAPKXPPHIILHYCAFKXXWDWVILILXFYXAIMVPYNVSFKXKQNNIAWLVLDSVVDVIFLVDIVLNFHXXFVGPGGEVISDPKLIRMNYLKXWFVIDLLSCLPYDIINAFENVDEGISSLFSSLKVVRLLRLGRVARKLDHYLEYGAAVLVLLVCVFGLVAHWLACIWYSIGDYEVIDEVXNXIQIDSWLYQLALSIGXPYRYNXSAGIWEGGPSKDSLYVSSLYFXMXSLXXIGFGNIAPXXDVEKMFSVAMMMVGSLLYAXIFGNVXXIFQQMYANXNRYHEMLNNVRDFLKLYQVPKGLSERVMDYIVSXWSMSKGIDXEKVLSICPKDMRADICVHLNRKVFNEHPAFRLASDGCLRALAVEFQXIHCAPGDLIYHAGESVDALCFVVSGSLEVIQDDEVVAILDHLS

SEQ ID NO: 14241 - protein, 988 aa, Homo sapiens
  MOD_RES (14)..(14): Selenocysteine
  MOD_RES (64)..(64): Selenocysteine
  MOD_RES (73)..(73): Selenocysteine
  MOD_RES (77)..(77): Selenocysteine
  MOD_RES (84)..(84): Selenocysteine
  MOD_RES (103)..(103): Selenocysteine
  MOD_RES (127)..(127): Selenocysteine
  MOD_RES (132)..(132): Selenocysteine
  MOD_RES (143)..(143): Selenocysteine
  MOD_RES (147)..(147): Selenocysteine
  MOD_RES (153)..(153): Selenocysteine
  MOD_RES (157)..(157): Selenocysteine
  MOD_RES (167)..(167): Selenocysteine
  MOD_RES (172)..(172): Selenocysteine
  MOD_RES (202)..(202): Selenocysteine
  MOD_RES (215)..(216): Selenocysteine
  MOD_RES (225)..(225): Selenocysteine
  MOD_RES (228)..(228): Selenocysteine
  MOD_RES (240)..(240): Selenocysteine
  MOD_RES (268)..(269): Selenocysteine
  MOD_RES (291)..(291): Selenocysteine
  MOD_RES (380)..(380): Selenocysteine
  MOD_RES (382)..(382): Selenocysteine
  MOD_RES (398)..(398): Selenocysteine
  MOD_RES (404)..(404): Selenocysteine
  MOD_RES (426)..(426): Selenocysteine
  MOD_RES (428)..(428): Selenocysteine
  MOD_RES (431)..(432): Selenocysteine
  MOD_RES (441)..(442): Selenocysteine
  MOD_RES (462)..(462): Selenocysteine
  MOD_RES (468)..(469): Selenocysteine
  MOD_RES (478)..(478): Selenocysteine
  MOD_RES (512)..(512): Selenocysteine
  MOD_RES (521)..(521): Selenocysteine
  MOD_RES (568)..(568): Selenocysteine
  MOD_RES (621)..(622): Selenocysteine
  MOD_RES (634)..(634): Selenocysteine
  MOD_RES (654)..(654): Selenocysteine
  MOD_RES (665)..(665): Selenocysteine
  MOD_RES (667)..(667): Selenocysteine
  MOD_RES (697)..(697): Selenocysteine
  MOD_RES (725)..(725): Selenocysteine
  MOD_RES (748)..(748): Selenocysteine
  MOD_RES (750)..(750): Selenocysteine
  MOD_RES (754)..(754): Selenocysteine
  MOD_RES (759)..(759): Selenocysteine
  MOD_RES (763)..(763): Selenocysteine
  MOD_RES (770)..(770): Selenocysteine
  MOD_RES (832)..(832): Selenocysteine
  MOD_RES (854)..(854): Selenocysteine
  MOD_RES (861)..(861): Selenocysteine
  MOD_RES (869)..(869): Selenocysteine
  MOD_RES (908)..(909): Selenocysteine
  MOD_RES (929)..(929): Selenocysteine
MPGGKRGLVAPQNXFLENIVRRSSESSFLLGNAQIVDWPVVYSNDGFCKLSGYHRADVMQKSSXCSFMYGELXDKKXIEKVRQXFDNYESNCFEVLLYKKNRXPVWFYMQIAPIRNEHEKVVLFLCXFKDIXLFKQPIEDDSXKGWXKFARLXRALXNSRSVLQQLXPMNKXEVVHKHSRLAEVLQLGSDILPQYKQEAPKXPPHIILHYCAFKXXWDWVILILXFYXAIMVPYNVSFKXKQNNIAWLVLDSVVDVIFLVDIVLNFHXXFVGPGGEVISDPKLIRMNYLKXWFVIDLLSCLPYDIINAFENVDEGISSLFSSLKVVRLLRLGRVARKLDHYLEYGAAVLVLLVCVFGLVAHWLACIWYSIGDYEVIDEVXNXIQIDSWLYQLALSIGXPYRYNXSAGIWEGGPSKDSLYVSSLYFXMXSLXXIGFGNIAPXXDVEKMFSVAMMMVGSLLYAXIFGNVXXIFQQMYANXNRYHEMLNNVRDFLKLYQVPKGLSERVMDYIVSXWSMSKGIDXEKVLSICPKDMRADICVHLNRKVFNEHPAFRLASDGCLRALAVEFQXIHCAPGDLIYHAGESVDALCFVVSGSLEVIQDDEVVAILGKGDVFGDIFWKEXXLAHACANVRALXYCDLHIIKREALLKVLDFYXAFANSFSRNLXLXCNLRKRIIFRKISDVKKEEEERLRQKNEVXLSIPVDHPVRKLFQKFKQQKELRNQGSXQGDPERNQLQVESRSLQNGASIXGXSVVXVSQIXPIQXSLAYVKXSESLKQNNRDAMELKPNGGADQKCLKVNSPIRMKNGNGKGWLRLKNNMGAHEEKKEDWNNVXKAESMGLLSEDPKSSDSENSVXKNPLRKXDSCDSGIXKSDLRLDKAGEARSPLEHSPIQADAKHPFYPIPEQALQXXLQEVKHELKEDIQLLSCRMXALEKQVAEILKILSEKSVPQASSPKSQMPLQVPPQIPCQDIFSVSRPESPESDKDEIHF

SEQ ID NO: 14242 - protein, 624 aa, Homo sapiens
  MOD_RES (6)..(6): Selenocysteine
  MOD_RES (15)..(15): Selenocysteine
  MOD_RES (19)..(19): Selenocysteine
  MOD_RES (26)..(26): Selenocysteine
  MOD_RES (45)..(45): Selenocysteine
  MOD_RES (69)..(69): Selenocysteine
  MOD_RES (74)..(74): Selenocysteine
  MOD_RES (85)..(85): Selenocysteine
  MOD_RES (89)..(89): Selenocysteine
  MOD_RES (95)..(95): Selenocysteine
  MOD_RES (99)..(99): Selenocysteine
  MOD_RES (109)..(109): Selenocysteine
  MOD_RES (114)..(114): Selenocysteine
  MOD_RES (144)..(144): Selenocysteine
  MOD_RES (157)..(158): Selenocysteine
  MOD_RES (167)..(167): Selenocysteine
  MOD_RES (170)..(170): Selenocysteine
  MOD_RES (182)..(182): Selenocysteine
  MOD_RES (210)..(211): Selenocysteine
  MOD_RES (233)..(233): Selenocysteine
  MOD_RES (322)..(322): Selenocysteine
  MOD_RES (324)..(324): Selenocysteine
  MOD_RES (340)..(340): Selenocysteine
  MOD_RES (346)..(346): Selenocysteine
  MOD_RES (368)..(368): Selenocysteine
  MOD_RES (370)..(370): Selenocysteine
  MOD_RES (373)..(374): Selenocysteine
  MOD_RES (383)..(384): Selenocysteine
  MOD_RES (404)..(404): Selenocysteine
  MOD_RES (410)..(411): Selenocysteine
  MOD_RES (420)..(420): Selenocysteine
  MOD_RES (454)..(454): Selenocysteine
  MOD_RES (463)..(463): Selenocysteine
  MOD_RES (510)..(510): Selenocysteine
  MOD_RES (563)..(564): Selenocysteine
  MOD_RES (576)..(576): Selenocysteine
  MOD_RES (596)..(596): Selenocysteine
  MOD_RES (607)..(607): Selenocysteine
  MOD_RES (609)..(609): Selenocysteine
MQKSSXCSFMYGELXDKKXIEKVRQXFDNYESNCFEVLLYKKNRXPVWFYMQIAPIRNEHEKVVLFLCXFKDIXLFKQPIEDDSXKGWXKFARLXRALXNSRSVLQQLXPMNKXEVVHKHSRLAEVLQLGSDILPQYKQEAPKXPPHIILHYCAFKXXWDWVILILXFYXAIMVPYNVSFKXKQNNIAWLVLDSVVDVIFLVDIVLNFHXXFVGPGGEVISDPKLIRMNYLKXWFVIDLLSCLPYDIINAFENVDEGISSLFSSLKVVRLLRLGRVARKLDHYLEYGAAVLVLLVCVFGLVAHWLACIWYSIGDYEVIDEVXNXIQIDSWLYQLALSIGXPYRYNXSAGIWEGGPSKDSLYVSSLYFXMXSLXXIGFGNIAPXXDVEKMFSVAMMMVGSLLYAXIFGNVXXIFQQMYANXNRYHEMLNNVRDFLKLYQVPKGLSERVMDYIVSXWSMSKGIDXEKVLSICPKDMRADICVHLNRKVFNEHPAFRLASDGCLRALAVEFQXIHCAPGDLIYHAGESVDALCFVVSGSLEVIQDDEVVAILGKGDVFGDIFWKEXXLAHACANVRALXYCDLHIIKREALLKVLDFYXAFANSFSRNLXLXCNLRKRGWFSMANAL

SEQ ID NO: 14243 - protein, 1107 aa, Homo sapiens
  MOD_RES (13)..(13): Selenocysteine
  MOD_RES (17)..(17): Selenocysteine
  MOD_RES (20)..(20): Selenocysteine
  MOD_RES (25)..(25): Selenocysteine
  MOD_RES (58)..(58): Selenocysteine
  MOD_RES (75)..(75): Selenocysteine
  MOD_RES (91)..(91): Selenocysteine
  MOD_RES (134)..(134): Selenocysteine
  MOD_RES (136)..(136): Selenocysteine
  MOD_RES (141)..(141): Selenocysteine
  MOD_RES (158)..(158): Selenocysteine
  MOD_RES (219)..(219): Selenocysteine
  MOD_RES (232)..(232): Selenocysteine
  MOD_RES (238)..(238): Selenocysteine
  MOD_RES (253)..(254): Selenocysteine
  MOD_RES (257)..(258): Selenocysteine
  MOD_RES (278)..(279): Selenocysteine
  MOD_RES (300)..(301): Selenocysteine
  MOD_RES (322)..(322): Selenocysteine
  MOD_RES (332)..(332): Selenocysteine
  MOD_RES (353)..(353): Selenocysteine
  MOD_RES (357)..(357): Selenocysteine
  MOD_RES (411)..(411): Selenocysteine
  MOD_RES (428)..(428): Selenocysteine
  MOD_RES (433)..(433): Selenocysteine
  MOD_RES (444)..(444): Selenocysteine
  MOD_RES (454)..(454): Selenocysteine
  MOD_RES (470)..(470): Selenocysteine
  MOD_RES (485)..(485): Selenocysteine
  MOD_RES (487)..(487): Selenocysteine
  MOD_RES (513)..(514): Selenocysteine
  MOD_RES (539)..(539): Selenocysteine
  MOD_RES (569)..(569): Selenocysteine
  MOD_RES (627)..(627): Selenocysteine
  MOD_RES (635)..(635): Selenocysteine
  MOD_RES (670)..(670): Selenocysteine
  MOD_RES (732)..(732): Selenocysteine
  MOD_RES (760)..(760): Selenocysteine
  MOD_RES (777)..(777): Selenocysteine
  MOD_RES (800)..(800): Selenocysteine
  MOD_RES (828)..(828): Selenocysteine
  MOD_RES (863)..(863): Selenocysteine
  MOD_RES (875)..(876): Selenocysteine
  MOD_RES (878)..(878): Selenocysteine
  MOD_RES (913)..(913): Selenocysteine
  MOD_RES (924)..(924): Selenocysteine
  MOD_RES (926)..(926): Selenocysteine
  MOD_RES (939)..(939): Selenocysteine
  MOD_RES (945)..(945): Selenocysteine
  MOD_RES (955)..(955): Selenocysteine
  MOD_RES (973)..(973): Selenocysteine
  MOD_RES (1019)..(1019): Selenocysteine
  MOD_RES (1021)..(1021): Selenocysteine
  MOD_RES (1029)..(1029): Selenocysteine
  MOD_RES (1040)..(1040): Selenocysteine
  MOD_RES (1059)..(1059): Selenocysteine
  MOD_RES (1082)..(1082): Selenocysteine
  MOD_RES (1094)..(1094): Selenocysteine
  MOD_RES (1096)..(1096): Selenocysteine
MPVMKGLLAPQNXFLDXIAXRFDGXHSNFILANAQVAKGFPIVYCSDGFCELAGFARXEVMQKSCSCKFLFGVEXNEQLMLQIEKSLEEKXEFKGEIMFYKKNGSPFWCLLDIVPIKNEKGDVVLFLASFKDIXDXKVKIXPEDKKEDKVKGRSRAGXHFDSARRRSRAVLYHISGHLQRREKNKLKINNNVFVDKPAFPEYKVSDAKKSKFILLHFSXFKAGWDWLILLAXFYVAVXVPYNVCFIGNDDLSXXRSXXVSDIAVEILFIIDIILNFRXXYVSKSGQVIFEARSICIHYVXXWFIIDLIAALPFDLLYAFNVXVVSLVHLLKXVRLLRLLRLLQKLDRYSQHSXIVLXLLMSMFALLAHWMACIWYVIGKMEREDNSLLKWEVGWLHELGKRLESPYYGNNXLGGPSIRSAYIAALYFXLSSLXSVGFGNVSANXDAEKIFSICXMLIGALMHALVFGNVXAIIQRMYSRWSLYHXRXKDLKDFIRVHHLPQQLKQRMLEYFQXXWSVNNGIDSNELLKDFPDELRSDIXMHLNKEILQLSLFECASRGCLRSLSLHIKXSFCAPGEYLLRQGDALQAIYFVCSGSMEVLKDSMVLAILGKGDLIGANLSIKDQVIKXNADVKALXYCDLQCIILKGLFEVLDLYPEYAHKFVEDIQHDLXYNLREGHESDVISRLSNKSMVSQSEPKGNGNINKRLPSIVEDEEEEEEGEEEEAVSLSPICXRGSSSRNKKVGSNKAYLGLSLKQLASGXVPFHSPIRVSRSNSPKXKQEIDPPNHNKRKEKNLKLQLSXLNNAGPPDLSPRIVDGIEDGNSSEESQXFDFGSERIRSEPRISPPLGDPEIGAAVLFIKAEEXKQQINKLNSEVXXLXQEVSQLGKDMRNVIQLLENVLSPQQPSRFCSLHSXSVCPSRESLQXRXSWSAHQPCLHLQXGGAAYXQAQLCSSNIXSDIWSVDPSSVGSSPQRXGAHEQNPADSELYHSPSLDYSPSHYQVVQEGHLQFLRCISPHSDSXLXPLQSISAXLSSSVCSSSEXSLHLVLPSRSEEGSFSQGXVSSFSLENLPGSWNQEGMASASXKPLENLPLEVVXSXAEVKDNKAINV

SEQ ID NO: 14244 - protein, 195 aa, Homo sapiens
  MOD_RES (13)..(13): Selenocysteine
  MOD_RES (17)..(17): Selenocysteine
  MOD_RES (20)..(20): Selenocysteine
  MOD_RES (25)..(25): Selenocysteine
  MOD_RES (58)..(58): Selenocysteine
  MOD_RES (75)..(75): Selenocysteine
  MOD_RES (91)..(91): Selenocysteine
  MOD_RES (134)..(134): Selenocysteine
  MOD_RES (136)..(136): Selenocysteine
  MOD_RES (141)..(141): Selenocysteine
  MOD_RES (158)..(158): Selenocysteine
MPVMKGLLAPQNXFLDXIAXRFDGXHSNFILANAQVAKGFPIVYCSDGFCELAGFARXEVMQKSCSCKFLFGVEXNEQLMLQIEKSLEEKXEFKGEIMFYKKNGSPFWCLLDIVPIKNEKGDVVLFLASFKDIXDXKVKIXPEDKKEDKVKGRSRAGXHFDSARRRSRAVLYHISGHLQRREKNKLKINNVLQDP

SEQ ID NO: 14245 - protein, 225 aa, Homo sapiens
  MOD_RES (24)..(24): Selenocysteine
  MOD_RES (40)..(40): Selenocysteine
  MOD_RES (55)..(55): Selenocysteine
  MOD_RES (58)..(58): Selenocysteine
  MOD_RES (98)..(98): Selenocysteine
  MOD_RES (101)..(101): Selenocysteine
  MOD_RES (109)..(109): Selenocysteine
  MOD_RES (131)..(131): Selenocysteine
  MOD_RES (152)..(152): Selenocysteine
  MOD_RES (171)..(171): Selenocysteine
  MOD_RES (200)..(200): Selenocysteine
MNRCPRRCRSPLGQAARSLYQLVXGSLSPDSVDDEFELSXVCHRPEGLEQLQEQXKFXRKELQVLYRGFKNECPSGIVNEENFKQIYSQFFPQGDSSXYAXFLFNAFDXNHDGSVSFEDFVAGLSVILRGXVDDRLNWAFNLYDLNKDGCIXKEEMLDIMKSIYDMMGKYXYPALREEAPREHVESFFQKMDRNKDGVVXIEEFIESCQKDENIMRSMQLFDNVI

SEQ ID NO: 14246 - protein, 220 aa, Homo sapiens
  MOD_RES (24)..(24): Selenocysteine
  MOD_RES (35)..(35): Selenocysteine
  MOD_RES (50)..(50): Selenocysteine
  MOD_RES (53)..(53): Selenocysteine
  MOD_RES (93)..(93): Selenocysteine
  MOD_RES (96)..(96): Selenocysteine
  MOD_RES (104)..(104): Selenocysteine
  MOD_RES (126)..(126): Selenocysteine
  MOD_RES (147)..(147): Selenocysteine
  MOD_RES (166)..(166): Selenocysteine
  MOD_RES (195)..(195): Selenocysteine
MRGQGRKESLSDSRDLDGSYDQLXDSVDDEFELSXVCHRPEGLEQLQEQXKFXRKELQVLYRGFKNECPSGIVNEENFKQIYSQFFPQGDSSXYAXFLFNAFDXNHDGSVSFEDFVAGLSVILRGXVDDRLNWAFNLYDLNKDGCIXKEEMLDIMKSIYDMMGKYXYPALREEAPREHVESFFQKMDRNKDGVVXIEEFIESCQKDENIMRSMQLFDNVI

SEQ ID NO: 14247 - protein, 184 aa, Homo sapiens
  MOD_RES (24)..(24): Selenocysteine
  MOD_RES (35)..(35): Selenocysteine
  MOD_RES (50)..(50): Selenocysteine
  MOD_RES (53)..(53): Selenocysteine
  MOD_RES (93)..(93): Selenocysteine
  MOD_RES (96)..(96): Selenocysteine
  MOD_RES (104)..(104): Selenocysteine
  MOD_RES (130)..(130): Selenocysteine
  MOD_RES (159)..(159): Selenocysteine
MRGQGRKESLSDSRDLDGSYDQLXDSVDDEFELSXVCHRPEGLEQLQEQXKFXRKELQVLYRGFKNECPSGIVNEENFKQIYSQFFPQGDSSXYAXFLFNAFDXNHDGSVSFEEMLDIMKSIYDMMGKYXYPALREEAPREHVESFFQKMDRNKDGVVXIEEFIESCQKDENIMRSMQLFDNVI

SEQ ID NO: 14248 - protein, 184 aa, Homo sapiens
  MOD_RES (24)..(24): Selenocysteine
  MOD_RES (35)..(35): Selenocysteine
  MOD_RES (50)..(50): Selenocysteine
  MOD_RES (53)..(53): Selenocysteine
  MOD_RES (93)..(93): Selenocysteine
  MOD_RES (96)..(96): Selenocysteine
  MOD_RES (104)..(104): Selenocysteine
  MOD_RES (130)..(130): Selenocysteine
  MOD_RES (159)..(159): Selenocysteine
  MOD_RES (178)..(178): Selenocysteine
  MOD_RES (180)..(180): Selenocysteine
  MOD_RES (182)..(182): Selenocysteine
MRGQGRKESLSDSRDLDGSYDQLXDSVDDEFELSXVCHRPEGLEQLQEQXKFXRKELQVLYRGFKNECPSGIVNEENFKQIYSQFFPQGDSSXYAXFLFNAFDXNHDGSVSFEEMLDIMKSIYDMMGKYXYPALREEAPREHVESFFQKMDRNKDGVVXIEEFIESCQKVQLPALYIXLXWXQA

SEQ ID NO: 14249 - protein, 227 aa, Homo sapiens
  MOD_RES (24)..(24): Selenocysteine
  MOD_RES (35)..(35): Selenocysteine
  MOD_RES (50)..(50): Selenocysteine
  MOD_RES (53)..(53): Selenocysteine
  MOD_RES (100)..(100): Selenocysteine
  MOD_RES (103)..(103): Selenocysteine
  MOD_RES (111)..(111): Selenocysteine
  MOD_RES (133)..(133): Selenocysteine
  MOD_RES (154)..(154): Selenocysteine
  MOD_RES (173)..(173): Selenocysteine
  MOD_RES (202)..(202): Selenocysteine
MRGQGRKESLSDSRDLDGSYDQLXDSVDDEFELSXVCHRPEGLEQLQEQXKFXRKELQVLYRGFKNPGALSFQECPSGIVNEENFKQIYSQFFPQGDSSXYAXFLFNAFDXNHDGSVSFEDFVAGLSVILRGXVDDRLNWAFNLYDLNKDGCIXKEEMLDIMKSIYDMMGKYXYPALREEAPREHVESFFQKMDRNKDGVVXIEEFIESCQKDENIMRSMQLFDNVI

SEQ ID NO: 14250 - protein, 285 aa, Homo sapiens
  MOD_RES (24)..(24): Selenocysteine
  MOD_RES (31)..(31): Selenocysteine
  MOD_RES (100)..(100): Selenocysteine
  MOD_RES (115)..(115): Selenocysteine
  MOD_RES (118)..(118): Selenocysteine
  MOD_RES (158)..(158): Selenocysteine
  MOD_RES (161)..(161): Selenocysteine
  MOD_RES (169)..(169): Selenocysteine
  MOD_RES (191)..(191): Selenocysteine
  MOD_RES (212)..(212): Selenocysteine
  MOD_RES (231)..(231): Selenocysteine
  MOD_RES (260)..(260): Selenocysteine
MRGQGRKESLSDSRDLDGSYDQLXGHPPGPXKKALKQRFLKLLPCCGPQALPSVSEIGRVFRFLGDSSLPSALAAPASLRPHRPRLLDPDSVDDEFELSXVCHRPEGLEQLQEQXKFXRKELQVLYRGFKNECPSGIVNEENFKQIYSQFFPQGDSSXYAXFLFNAFDXNHDGSVSFEDFVAGLSVILRGXVDDRLNWAFNLYDLNKDGCIXKEEMLDIMKSIYDMMGKYXYPALREEAPREHVESFFQKMDRNKDGVVXIEEFIESCQKDENIMRSMQLFDNVI

SEQ ID NO: 14251 - protein, 252 aa, Homo sapiens
  MOD_RES (24)..(24): Selenocysteine
  MOD_RES (31)..(31): Selenocysteine
  MOD_RES (67)..(67): Selenocysteine
  MOD_RES (82)..(82): Selenocysteine
  MOD_RES (85)..(85): Selenocysteine
  MOD_RES (125)..(125): Selenocysteine
  MOD_RES (128)..(128): Selenocysteine
  MOD_RES (136)..(136): Selenocysteine
  MOD_RES (158)..(158): Selenocysteine
  MOD_RES (179)..(179): Selenocysteine
  MOD_RES (198)..(198): Selenocysteine
  MOD_RES (227)..(227): Selenocysteine
MRGQGRKESLSDSRDLDGSYDQLXGHPPGPXKKALKQRFLKLLPCCGPQALPSVSENSVDDEFELSXVCHRPEGLEQLQEQXKFXRKELQVLYRGFKNECPSGIVNEENFKQIYSQFFPQGDSSXYAXFLFNAFDXNHDGSVSFEDFVAGLSVILRGXVDDRLNWAFNLYDLNKDGCIXKEEMLDIMKSIYDMMGKYXYPALREEAPREHVESFFQKMDRNKDGVVXIEEFIESCQKDENIMRSMQLFDNVI

SEQ ID NO: 14252 - protein, 270 aa, Homo sapiens
  MOD_RES (24)..(24): Selenocysteine
  MOD_RES (31)..(31): Selenocysteine
  MOD_RES (57)..(57): Selenocysteine
  MOD_RES (85)..(85): Selenocysteine
  MOD_RES (100)..(100): Selenocysteine
  MOD_RES (103)..(103): Selenocysteine
  MOD_RES (143)..(143): Selenocysteine
  MOD_RES (146)..(146): Selenocysteine
  MOD_RES (154)..(154): Selenocysteine
  MOD_RES (176)..(176): Selenocysteine
  MOD_RES (197)..(197): Selenocysteine
  MOD_RES (216)..(216): Selenocysteine
  MOD_RES (245)..(245): Selenocysteine
MRGQGRKESLSDSRDLDGSYDQLXGHPPGPXKKALKQRFLKLLPCCGPQALPSVSEXLAAPASLRPHRPRLLDPDSVDDEFELSXVCHRPEGLEQLQEQXKFXRKELQVLYRGFKNECPSGIVNEENFKQIYSQFFPQGDSSXYAXFLFNAFDXNHDGSVSFEDFVAGLSVILRGXVDDRLNWAFNLYDLNKDGCIXKEEMLDIMKSIYDMMGKYXYPALREEAPREHVESFFQKMDRNKDGVVXIEEFIESCQKDENIMRSMQLFDNVI

SEQ ID NO: 14253 - protein, 177 aa, Homo sapiens
  MOD_RES (6)..(6): Selenocysteine
  MOD_RES (9)..(9): Selenocysteine
  MOD_RES (19)..(19): Selenocysteine
  MOD_RES (42)..(42): Selenocysteine
  MOD_RES (47)..(47): Selenocysteine
  MOD_RES (58)..(58): Selenocysteine
  MOD_RES (63)..(63): Selenocysteine
  MOD_RES (83)..(83): Selenocysteine
  MOD_RES (104)..(104): Selenocysteine
  MOD_RES (123)..(123): Selenocysteine
  MOD_RES (152)..(152): Selenocysteine
MWLSWXAWXMNLNCPPCVXGLRVWSSCRSKPNSRARSCRSCXGASRXNVPAELSMRRXSSRFXPSSFLKEDFVAGLSVILRGXVDDRLNWAFNLYDLNKDGCIXKEEMLDIMKSIYDMMGKYXYPALREEAPREHVESFFQKMDRNKDGVVXIEEFIESCQKDENIMRSMQLFDNVI

SEQ ID NO: 14254 - protein, 230 aa, Homo sapiens
  MOD_RES (45)..(45): Selenocysteine
  MOD_RES (60)..(60): Selenocysteine
  MOD_RES (63)..(63): Selenocysteine
  MOD_RES (80)..(80): Selenocysteine
  MOD_RES (87)..(87): Selenocysteine
  MOD_RES (102)..(103): Selenocysteine
  MOD_RES (136)..(136): Selenocysteine
  MOD_RES (157)..(157): Selenocysteine
  MOD_RES (176)..(176): Selenocysteine
  MOD_RES (205)..(205): Selenocysteine
MGIQGMELCAMAVVVLLFIAVLKQFGILEPISMEDSSDSELELSXVRHQPEGLDQLQAQXKFXKKELQSLYRGFKNECPXGLVDEDXFKLIYAQFFPQGDAXXYAHFLFNAFDADGNGAIHFEDFVVGLSILLRGXVHEKLKWAFNLYDINKDGYIXKEEMLAIMKSIYDMMGRHXYPILREDAPAEHVERFFEKMDRNQDGVVXIEEFLEACQKDENIMSSMQLFENVI

SEQ ID NO: 14255 - protein, 256 aa, Homo sapiens
  MOD_RES (8)..(8): Selenocysteine
  MOD_RES (22)..(22): Selenocysteine
  MOD_RES (55)..(55): Selenocysteine
  MOD_RES (71)..(71): Selenocysteine
  MOD_RES (86)..(86): Selenocysteine
  MOD_RES (89)..(89): Selenocysteine
  MOD_RES (106)..(106): Selenocysteine
  MOD_RES (113)..(113): Selenocysteine
  MOD_RES (128)..(129): Selenocysteine
  MOD_RES (162)..(162): Selenocysteine
  MOD_RES (183)..(183): Selenocysteine
  MOD_RES (202)..(202): Selenocysteine
  MOD_RES (231)..(231): Selenocysteine
MQPAKEVXKASDGSLLGDLGHXPLSKKEGIKWQRPRLSRQALMRCCLVKWILSSXAPQGSDSSDSELELSXVRHQPEGLDQLQAQXKFXKKELQSLYRGFKNECPXGLVDEDXFKLIYAQFFPQGDAXXYAHFLFNAFDADGNGAIHFEDFVVGLSILLRGXVHEKLKWAFNLYDINKDGYIXKEEMLAIMKSIYDMMGRHXYPILREDAPAEHVERFFEKMDRNQDGVVXIEEFLEACQKDENIMSSMQLFENVI

SEQ ID NO: 14256 - protein, 256 aa, Homo sapiens
  MOD_RES (8)..(8): Selenocysteine
  MOD_RES (22)..(22): Selenocysteine
  MOD_RES (55)..(55): Selenocysteine
  MOD_RES (71)..(71): Selenocysteine
  MOD_RES (86)..(86): Selenocysteine
  MOD_RES (89)..(89): Selenocysteine
  MOD_RES (106)..(106): Selenocysteine
  MOD_RES (113)..(113): Selenocysteine
  MOD_RES (128)..(129): Selenocysteine
  MOD_RES (162)..(162): Selenocysteine
  MOD_RES (183)..(183): Selenocysteine
  MOD_RES (202)..(202): Selenocysteine
  MOD_RES (231)..(231): Selenocysteine
MQPRKEVXKASDGSLLGDLGHXPLSKKEGIKWQRPRLSRQALMRCCLVKWILSSXAPQGSDSSDSELELSXVRHQPEGLDQLQAQXKFXKKELQSLYRGFKNECPXGLVDEDXFKLIYAQFFPQGDAXXYAHFLFNAFDADGNGAIHFEDFVVGLSILLRGXVHEKLKWAFNLYDINKDGYIXKEEMLAIMKSIYDMMGRHXYPILREDAPAEHVERFFEKMDRNQDGVVXIEEFLEACQKDENIMSSMQLFENVI

SEQ ID NO: 14257 - protein, 157 aa, Homo sapiens
  MOD_RES (16)..(16): Selenocysteine
  MOD_RES (26)..(26): Selenocysteine
  MOD_RES (28)..(28): Selenocysteine
  MOD_RES (38)..(38): Selenocysteine
  MOD_RES (46)..(46): Selenocysteine
  MOD_RES (53)..(53): Selenocysteine
  MOD_RES (59)..(59): Selenocysteine
  MOD_RES (73)..(73): Selenocysteine
  MOD_RES (92)..(92): Selenocysteine
  MOD_RES (114)..(114): Selenocysteine
  MOD_RES (151)..(151): Selenocysteine
  MOD_RES (154)..(155): Selenocysteine
MAVPAAAPVCQPKSAXNGQPPAPAPXPXPRLSISSRAXVVARMEGXSQGGLQXVMKWKXVVAIFVVVVVYLVXGGLVFRALEQPFESSQKNXIALEKAEFLRDHVCVSPQELEXLIQHALDADNAGVSPIGNSSNNSSHWDLGSAFFFAGXVIXXIG

SEQ ID NO: 14258 - protein, 543 aa, Homo sapiens
  MOD_RES (10)..(10): Selenocysteine
  MOD_RES (33)..(33): Selenocysteine
  MOD_RES (43)..(43): Selenocysteine
  MOD_RES (45)..(45): Selenocysteine
  MOD_RES (55)..(55): Selenocysteine
  MOD_RES (63)..(63): Selenocysteine
  MOD_RES (70)..(70): Selenocysteine
  MOD_RES (76)..(76): Selenocysteine
  MOD_RES (90)..(90): Selenocysteine
  MOD_RES (109)..(109): Selenocysteine
  MOD_RES (131)..(131): Selenocysteine
  MOD_RES (168)..(168): Selenocysteine
  MOD_RES (171)..(172): Selenocysteine
  MOD_RES (182)..(182): Selenocysteine
  MOD_RES (213)..(213): Selenocysteine
  MOD_RES (234)..(234): Selenocysteine
  MOD_RES (241)..(241): Selenocysteine
  MOD_RES (254)..(254): Selenocysteine
  MOD_RES (267)..(267): Selenocysteine
  MOD_RES (278)..(278): Selenocysteine
  MOD_RES (280)..(281): Selenocysteine
  MOD_RES (334)..(334): Selenocysteine
  MOD_RES (353)..(353): Selenocysteine
  MOD_RES (359)..(359): Selenocysteine
  MOD_RES (376)..(376): Selenocysteine
  MOD_RES (410)..(410): Selenocysteine
  MOD_RES (455)..(455): Selenocysteine
  MOD_RES (459)..(459): Selenocysteine
  MOD_RES (469)..(469): Selenocysteine
  MOD_RES (480)..(480): Selenocysteine
  MOD_RES (495)..(495): Selenocysteine
  MOD_RES (506)..(506): Selenocysteine
  MOD_RES (510)..(510): Selenocysteine
  MOD_RES (526)..(526): Selenocysteine
  MOD_RES (528)..(528): Selenocysteine
MEDGFKGDRXEGCRSDSVAVPAAAPVCQPKSAXNGQPPAPAPXPXPRLSISSRAXVVARMEGXSQGGLQXVMKWKXVVAIFVVVVVYLVXGGLVFRALEQPFESSQKNXIALEKAEFLRDHVCVSPQELEXLIQHALDADNAGVSPIGNSSNNSSHWDLGSAFFFAGXVIXXIGYGNIAPSXEGGKIFCILYAIFGIPLFGFLLAGIGDQLGXIFGKSIARVEKVFRKKQVSQXKIRVISXILFILAGCIVFVXIPAVIFKYIEGWXALESIYFVVVXLXXVGFGDFVAGGNAGINYREWYKPLVWFWILVGLAYFAAVLSMIGDWLRVLSKKXKEEVGEIKAHAAEWKANVXAEFREXRRRLSVEIHDKLQRAAXIRSMERRRLGLDQRAHSLDMLSPEKRSVFAALDXGRFKASSQESINNRPNNLRLKGPEQLNKHGQGASEDNIINKFGSXSRLXKRKNKDLKKXLPEDVQKIYKXFRNYSLDEEKKEEEXEKMCNSDNSSXAMLXDCIQQHAELENGMIPXDXKDREPENNSLLEDRN

SEQ ID NO: 14259 - protein, 538 aa, Homo sapiens
  MOD_RES (6)..(6): Selenocysteine
  MOD_RES (28)..(28): Selenocysteine
  MOD_RES (38)..(38): Selenocysteine
  MOD_RES (40)..(40): Selenocysteine
  MOD_RES (50)..(50): Selenocysteine
  MOD_RES (58)..(58): Selenocysteine
  MOD_RES (65)..(65): Selenocysteine
  MOD_RES (71)..(71): Selenocysteine
  MOD_RES (85)..(85): Selenocysteine
  MOD_RES (104)..(104): Selenocysteine
  MOD_RES (126)..(126): Selenocysteine
  MOD_RES (163)..(163): Selenocysteine
  MOD_RES (166)..(167): Selenocysteine
  MOD_RES (177)..(177): Selenocysteine
  MOD_RES (208)..(208): Selenocysteine
  MOD_RES (229)..(229): Selenocysteine
  MOD_RES (236)..(236): Selenocysteine
  MOD_RES (249)..(249): Selenocysteine
  MOD_RES (262)..(262): Selenocysteine
  MOD_RES (273)..(273): Selenocysteine
  MOD_RES (275)..(276): Selenocysteine
  MOD_RES (329)..(329): Selenocysteine
  MOD_RES (348)..(348): Selenocysteine
  MOD_RES (354)..(354): Selenocysteine
  MOD_RES (371)..(371): Selenocysteine
  MOD_RES (405)..(405): Selenocysteine
  MOD_RES (450)..(450): Selenocysteine
  MOD_RES (454)..(454): Selenocysteine
  MOD_RES (464)..(464): Selenocysteine
  MOD_RES (475)..(475): Selenocysteine
  MOD_RES (490)..(490): Selenocysteine
  MOD_RES (501)..(501): Selenocysteine
  MOD_RES (505)..(505): Selenocysteine
  MOD_RES (521)..(521): Selenocysteine
  MOD_RES (523)..(523): Selenocysteine
MFFLYXDFFLSLVAVPAAAPVCQPKSAXNGQPPAPAPXPXPRLSISSRAXVVARMEGXSQGGLQXVMKWKXVVAIFVVVVVYLVXGGLVFRALEQPFESSQKNXIALEKAEFLRDHVCVSPQELEXLIQHALDADNAGVSPIGNSSNNSSHWDLGSAFFFAGXVIXXIGYGNIAPSXEGGKIFCILYAIFGIPLFGFLLAGIGDQLGXIFGKSIARVEKVFRKKQVSQXKIRVISXILFILAGCIVFVXIPAVIFKYIEGWXALESIYFVVVXLXXVGFGDFVAGGNAGINYREWYKPLVWFWILVGLAYFAAVLSMIGDWLRVLSKKXKEEVGEIKAHAAEWKANVXAEFREXRRRLSVEIHDKLQRAAXIRSMERRRLGLDQRAHSLDMLSPEKRSVFAALDXGRFKASSQESINNRPNNLRLKGPEQLNKHGQGASEDNIINKFGSXSRLXKRKNKDLKKXLPEDVQKIYKXFRNYSLDEEKKEEEXEKMCNSDNSSXAMLXDCIQQHAELENGMIPXDXKDREPENNSLLEDRN

SEQ ID NO: 14260 - protein, 543 aa, Homo sapiens
  MOD_RES (7)..(7): Selenocysteine
  MOD_RES (33)..(33): Selenocysteine
  MOD_RES (43)..(43): Selenocysteine
  MOD_RES (45)..(45): Selenocysteine
  MOD_RES (55)..(55): Selenocysteine
  MOD_RES (63)..(63): Selenocysteine
  MOD_RES (70)..(70): Selenocysteine
  MOD_RES (76)..(76): Selenocysteine
  MOD_RES (90)..(90): Selenocysteine
  MOD_RES (109)..(109): Selenocysteine
  MOD_RES (131)..(131): Selenocysteine
  MOD_RES (168)..(168): Selenocysteine
  MOD_RES (171)..(172): Selenocysteine
  MOD_RES (182)..(182): Selenocysteine
  MOD_RES (213)..(213): Selenocysteine
  MOD_RES (234)..(234): Selenocysteine
  MOD_RES (241)..(241): Selenocysteine
  MOD_RES (254)..(254): Selenocysteine
  MOD_RES (267)..(267): Selenocysteine
  MOD_RES (278)..(278): Selenocysteine
  MOD_RES (280)..(281): Selenocysteine
  MOD_RES (334)..(334): Selenocysteine
  MOD_RES (353)..(353): Selenocysteine
  MOD_RES (359)..(359): Selenocysteine
  MOD_RES (376)..(376): Selenocysteine
  MOD_RES (410)..(410): Selenocysteine
  MOD_RES (455)..(455): Selenocysteine
  MOD_RES (459)..(459): Selenocysteine
  MOD_RES (469)..(469): Selenocysteine
  MOD_RES (480)..(480): Selenocysteine
  MOD_RES (495)..(495): Selenocysteine
  MOD_RES (506)..(506): Selenocysteine
  MOD_RES (510)..(510): Selenocysteine
  MOD_RES (526)..(526): Selenocysteine
  MOD_RES (528)..(528): Selenocysteine
MKFPIEXPRKQVNWDPKVAVPAAAPVCQPKSAXNGQPPAPAPXPXPRLSISSRAXVVARMEGXSQGGLQXVMKWKXVVAIFVVVVVYLVXGGLVFRALEQPFESSQKNXIALEKAEFLRDHVCVSPQELEXLIQHALDADNAGVSPIGNSSNNSSHWDLGSAFFFAGXVIXXIGYGNIAPSXEGGKIFCILYAIFGIPLFGFLLAGIGDQLGXIFGKSIARVEKVFRKKQVSQXKIRVISXILFILAGCIVFVXIPAVIFKYIEGWXALESIYFVVVXLXXVGFGDFVAGGNAGINYREWYKPLVWFWILVGLAYFAAVLSMIGDWLRVLSKKXKEEVGEIKAHAAEWKANVXAEFREXRRRLSVEIHDKLQRAAXIRSMERRRLGLDQRAHSLDMLSPEKRSVFAALDXGRFKASSQESINNRPNNLRLKGPEQLNKHGQGASEDNIINKFGSXSRLXKRKNKDLKKXLPEDVQKIYKXFRNYSLDEEKKEEEXEKMCNSDNSSXAMLXDCIQQHAELENGMIPXDXKDREPENNSLLEDRN

SEQ ID NO: 14261 - protein, 411 aa, Homo sapiens
  MOD_RES (24)..(24): Selenocysteine
  MOD_RES (27)..(27): Selenocysteine
  MOD_RES (37)..(38): Selenocysteine
  MOD_RES (46)..(46): Selenocysteine
  MOD_RES (49)..(49): Selenocysteine
  MOD_RES (63)..(63): Selenocysteine
  MOD_RES (78)..(79): Selenocysteine
  MOD_RES (86)..(86): Selenocysteine
  MOD_RES (97)..(97): Selenocysteine
  MOD_RES (120)..(120): Selenocysteine
  MOD_RES (138)..(138): Selenocysteine
  MOD_RES (141)..(142): Selenocysteine
  MOD_RES (152)..(152): Selenocysteine
  MOD_RES (183)..(183): Selenocysteine
  MOD_RES (195)..(195): Selenocysteine
  MOD_RES (204)..(204): Selenocysteine
  MOD_RES (211)..(211): Selenocysteine
  MOD_RES (248)..(248): Selenocysteine
  MOD_RES (250)..(251): Selenocysteine
  MOD_RES (303)..(303): Selenocysteine
  MOD_RES (318)..(318): Selenocysteine
  MOD_RES (322)..(322): Selenocysteine
  MOD_RES (328)..(328): Selenocysteine
  MOD_RES (344)..(344): Selenocysteine
  MOD_RES (363)..(363): Selenocysteine
  MOD_RES (368)..(368): Selenocysteine
  MOD_RES (375)..(375): Selenocysteine
  MOD_RES (387)..(387): Selenocysteine
  MOD_RES (396)..(396): Selenocysteine
MAAPDLLDPKSAAQNSKPRLSFSXKPXVLASRVESDXXINVMKWKXVSXIFLVVVLYLIIGAXVFKALEQPHEISQRXXIVIQKQXFISQHSCVNSXELDELIQQIVAAINAGIIPLGNXSNQISHWDLGSSFFFAGXVIXXIGFGNISPRXEGGKIFCIIYALLGIPLFGFLLAGVGDQLGXIFGKGIAKVEDXFIKWNVSQXKIRIISXIIFILFGCVLFVALPAIIFKHIEGWSALDAIYFVVIXLXXIGFGDYVAGGSDIEYLDFYKPVVWFWILVGLAYFAAVLSMIGDWLRVISKKXKEEVGEFRAHAAEWXANVXAEFKEXRRRLSVEIYDKFQRAXSIKRKLSAELAGNHNQELXPCRRXLSVNHLXSERDVLPPLLKXESIYLNGLXPHCAGEEIAVIENIK

SEQ ID NO: 14262 - protein, 217 aa, Homo sapiens
  MOD_RES (24)..(24): Selenocysteine
  MOD_RES (27)..(27): Selenocysteine
  MOD_RES (37)..(38): Selenocysteine
  MOD_RES (46)..(46): Selenocysteine
  MOD_RES (49)..(49): Selenocysteine
  MOD_RES (63)..(63): Selenocysteine
  MOD_RES (78)..(79): Selenocysteine
  MOD_RES (86)..(86): Selenocysteine
  MOD_RES (97)..(97): Selenocysteine
  MOD_RES (120)..(120): Selenocysteine
  MOD_RES (138)..(138): Selenocysteine
  MOD_RES (141)..(142): Selenocysteine
  MOD_RES (152)..(152): Selenocysteine
  MOD_RES (183)..(183): Selenocysteine
  MOD_RES (195)..(195): Selenocysteine
  MOD_RES (206)..(206): Selenocysteine
MAAPDLLDPKSAAQNSKPRLSFSXKPXVLASRVESDXXINVMKWKXVSXIFLVVVLYLIIGAXVFKALEQPHEISQRXXIVIQKQXFISQHSCVNSXELDELIQQIVAAINAGIIPLGNXSNQISHWDLGSSFFFAGXVIXXIGFGNISPRXEGGKIFCIIYALLGIPLFGFLLAGVGDQLGXIFGKGIAKVEDXFIVDPILNIWXSISLSCGSGSL

SEQ ID NO: 14263 - protein, 118 aa, Homo sapiens
  MOD_RES (5)..(5): Selenocysteine
  MOD_RES (8)..(8): Selenocysteine
  MOD_RES (22)..(22): Selenocysteine
  MOD_RES (37)..(38): Selenocysteine
  MOD_RES (45)..(45): Selenocysteine
  MOD_RES (56)..(56): Selenocysteine
  MOD_RES (79)..(79): Selenocysteine
  MOD_RES (97)..(97): Selenocysteine
  MOD_RES (100)..(101): Selenocysteine
  MOD_RES (111)..(111): Selenocysteine
MKWKXVSXIFLVVVLYLIIGAXVFKALEQPHEISQRXXIVIQKQXFISQHSCVNSXELDELIQQIVAAINAGIIPLGNXSNQISHWDLGSSFFFAGXVIXXIGFGNISPRXEGGKIFC

SEQ ID NO: 14264 - protein, 125 aa, Homo sapiens
  MOD_RES (5)..(5): Selenocysteine
  MOD_RES (8)..(8): Selenocysteine
  MOD_RES (22)..(22): Selenocysteine
  MOD_RES (37)..(38): Selenocysteine
  MOD_RES (45)..(45): Selenocysteine
  MOD_RES (56)..(56): Selenocysteine
  MOD_RES (79)..(79): Selenocysteine
  MOD_RES (97)..(97): Selenocysteine
  MOD_RES (100)..(101): Selenocysteine
  MOD_RES (111)..(111): Selenocysteine
MKWKXVSXIFLVVVLYLIIGAXVFKALEQPHEISQRXXIVIQKQXFISQHSCVNSXELDELIQQIVAAINAGIIPLGNXSNQISHWDLGSSFFFAGXVIXXIGFGNISPRXEGGKIFCIIYALLG

SEQ ID NO: 14265 - protein, 156 aa, Homo sapiens
  MOD_RES (39)..(39): Selenocysteine
  MOD_RES (42)..(42): Selenocysteine
  MOD_RES (52)..(53): Selenocysteine
  MOD_RES (61)..(61): Selenocysteine
  MOD_RES (64)..(64): Selenocysteine
  MOD_RES (78)..(78): Selenocysteine
  MOD_RES (93)..(94): Selenocysteine
  MOD_RES (101)..(101): Selenocysteine
  MOD_RES (112)..(112): Selenocysteine
  MOD_RES (123)..(123): Selenocysteine
MLPSASRERPGYRAGVAAPDLLDPKSAAQNSKPRLSFSXKPXVLASRVESDXXINVMKWKXVSXIFLVVVLYLIIGAXVFKALEQPHEISQRXXIVIQKQXFISQHSCVNSXELDELIQDLEXSHHAQKAAKYSVSSMPYWEFPSLVFSWLELEIS

SEQ ID NO: 14266 - protein, 426 aa, Homo sapiens
  MOD_RES (39)..(39): Selenocysteine
  MOD_RES (42)..(42): Selenocysteine
  MOD_RES (52)..(53): Selenocysteine
  MOD_RES (61)..(61): Selenocysteine
  MOD_RES (64)..(64): Selenocysteine
  MOD_RES (78)..(78): Selenocysteine
  MOD_RES (93)..(94): Selenocysteine
  MOD_RES (101)..(101): Selenocysteine
  MOD_RES (112)..(112): Selenocysteine
  MOD_RES (135)..(135): Selenocysteine
  MOD_RES (153)..(153): Selenocysteine
  MOD_RES (156)..(157): Selenocysteine
  MOD_RES (167)..(167): Selenocysteine
  MOD_RES (198)..(198): Selenocysteine
  MOD_RES (210)..(210): Selenocysteine
  MOD_RES (219)..(219): Selenocysteine
  MOD_RES (226)..(226): Selenocysteine
  MOD_RES (263)..(263): Selenocysteine
  MOD_RES (265)..(266): Selenocysteine
  MOD_RES (318)..(318): Selenocysteine
  MOD_RES (333)..(333): Selenocysteine
  MOD_RES (337)..(337): Selenocysteine
  MOD_RES (343)..(343): Selenocysteine
  MOD_RES (359)..(359): Selenocysteine
  MOD_RES (378)..(378): Selenocysteine
  MOD_RES (383)..(383): Selenocysteine
  MOD_RES (390)..(390): Selenocysteine
  MOD_RES (402)..(402): Selenocysteine
  MOD_RES (411)..(411): Selenocysteine
MLPSASRERPGYRAGVAAPDLLDPKSAAQNSKPRLSFSXKPXVLASRVESDXXINVMKWKXVSXIFLVVVLYLIIGAXVFKALEQPHEISQRXXIVIQKQXFISQHSCVNSXELDELIQQIVAAINAGIIPLGNXSNQISHWDLGSSFFFAGXVIXXIGFGNISPRXEGGKIFCIIYALLGIPLFGFLLAGVGDQLGXIFGKGIAKVEDXFIKWNVSQXKIRIISXIIFILFGCVLFVALPAIIFKHIEGWSALDAIYFVVIXLXXIGFGDYVAGGSDIEYLDFYKPVVWFWILVGLAYFAAVLSMIGDWLRVISKKXKEEVGEFRAHAAEWXANVXAEFKEXRRRLSVEIYDKFQRAXSIKRKLSAELAGNHNQELXPCRRXLSVNHLXSERDVLPPLLKXESIYLNGLXPHCAGEEIAVIENIK

SEQ ID NO: 14267 - protein, 152 aa, Homo sapiens
  MOD_RES (35)..(35): Selenocysteine
  MOD_RES (38)..(38): Selenocysteine
  MOD_RES (48)..(49): Selenocysteine
  MOD_RES (57)..(57): Selenocysteine
  MOD_RES (60)..(60): Selenocysteine
  MOD_RES (74)..(74): Selenocysteine
  MOD_RES (89)..(90): Selenocysteine
  MOD_RES (97)..(97): Selenocysteine
  MOD_RES (108)..(108): Selenocysteine
  MOD_RES (119)..(119): Selenocysteine
MMNPRAKRDFYLAAPDLLDPKSAAQNSKPRLSFSXKPXVLASRVESDXXINVMKWKXVSXIFLVVVLYLIIGAXVFKALEQPHEISQRXXIVIQKQXFISQHSCVNSXELDELIQDLEXSHHAQKAAKYSVSSMPYWEFPSLVFSWLELEIS

SEQ ID NO: 14268 - protein, 422 aa, Homo sapiens
  MOD_RES (35)..(35): Selenocysteine
  MOD_RES (38)..(38): Selenocysteine
  MOD_RES (48)..(49): Selenocysteine
  MOD_RES (57)..(57): Selenocysteine
  MOD_RES (60)..(60): Selenocysteine
  MOD_RES (74)..(74): Selenocysteine
  MOD_RES (89)..(90): Selenocysteine
  MOD_RES (97)..(97): Selenocysteine
  MOD_RES (108)..(108): Selenocysteine
  MOD_RES (131)..(131): Selenocysteine
  MOD_RES (149)..(149): Selenocysteine
  MOD_RES (152)..(153): Selenocysteine
  MOD_RES (163)..(163): Selenocysteine
  MOD_RES (194)..(194): Selenocysteine
  MOD_RES (206)..(206): Selenocysteine
  MOD_RES (215)..(215): Selenocysteine
  MOD_RES (222)..(222): Selenocysteine
  MOD_RES (259)..(259): Selenocysteine
  MOD_RES (261)..(262): Selenocysteine
  MOD_RES (314)..(314): Selenocysteine
  MOD_RES (329)..(329): Selenocysteine
  MOD_RES (333)..(333): Selenocysteine
  MOD_RES (339)..(339): Selenocysteine
  MOD_RES (355)..(355): Selenocysteine
  MOD_RES (374)..(374): Selenocysteine
  MOD_RES (379)..(379): Selenocysteine
  MOD_RES (386)..(386): Selenocysteine
  MOD_RES (398)..(398): Selenocysteine
  MOD_RES (407)..(407): Selenocysteine
MMNPRAKRDFYLAAPDLLDPKSAAQNSKPRLSFSXKPXVLASRVESDXXINVMKWKXVSXIFLVVVLYLIIGAXVFKALEQPHEISQRXXIVIQKQXFISQHSCVNSXELDELIQQIVAAINAGIIPLGNXSNQISHWDLGSSFFFAGXVIXXIGFGNISPRXEGGKIFCIIYALLGIPLFGFLLAGVGDQLGXIFGKGIAKVEDXFIKWNVSQXKIRIISXIIFILFGCVLFVALPAIIFKHIEGWSALDAIYFVVIXLXXIGFGDYVAGGSDIEYLDFYKPVVWFWILVGLAYFAAVLSMIGDWLRVISKKXKEEVGEFRAHAAEWXANVXAEFKEXRRRLSVEIYDKFQRAXSIKRKLSAELAGNHNQELXPCRRXLSVNHLXSERDVLPPLLKXESIYLNGLXPHCAGEEIAVIENIK

SEQ ID NO: 14269 - protein, 228 aa, Homo sapiens
  MOD_RES (35)..(35): Selenocysteine
  MOD_RES (38)..(38): Selenocysteine
  MOD_RES (48)..(49): Selenocysteine
  MOD_RES (57)..(57): Selenocysteine
  MOD_RES (60)..(60): Selenocysteine
  MOD_RES (74)..(74): Selenocysteine
  MOD_RES (89)..(90): Selenocysteine
  MOD_RES (97)..(97): Selenocysteine
  MOD_RES (108)..(108): Selenocysteine
  MOD_RES (131)..(131): Selenocysteine
  MOD_RES (149)..(149): Selenocysteine
  MOD_RES (152)..(153): Selenocysteine
  MOD_RES (163)..(163): Selenocysteine
  MOD_RES (194)..(194): Selenocysteine
  MOD_RES (206)..(206): Selenocysteine
  MOD_RES (217)..(217): Selenocysteine
MMNPRAKRDFYLAAPDLLDPKSAAQNSKPRLSFSXKPXVLASRVESDXXINVMKWKXVSXIFLVVVLYLIIGAXVFKALEQPHEISQRXXIVIQKQXFISQHSCVNSXELDELIQQIVAAINAGIIPLGNXSNQISHWDLGSSFFFAGXVIXXIGFGNISPRXEGGKIFCIIYALLGIPLFGFLLAGVGDQLGXIFGKGIAKVEDXFIVDPILNIWXSISLSCGSGSL

SEQ ID NO: 14270 - protein, 57 aa, Homo sapiens
  MOD_RES (35)..(35): Selenocysteine
  MOD_RES (54)..(54): Selenocysteine
MGGDLVLGLGALRRRKRLLEQEKSLAGWALVLAGXGIGLMVLHAEMLWFGGCSXHFG

SEQ ID NO: 14271 - protein, 427 aa, Homo sapiens
  MOD_RES (35)..(35): Selenocysteine
  MOD_RES (64)..(64): Selenocysteine
  MOD_RES (69)..(69): Selenocysteine
  MOD_RES (89)..(89): Selenocysteine
  MOD_RES (101)..(101): Selenocysteine
  MOD_RES (136)..(136): Selenocysteine
  MOD_RES (202)..(202): Selenocysteine
  MOD_RES (212)..(212): Selenocysteine
  MOD_RES (218)..(219): Selenocysteine
  MOD_RES (234)..(234): Selenocysteine
  MOD_RES (240)..(240): Selenocysteine
  MOD_RES (247)..(247): Selenocysteine
  MOD_RES (250)..(250): Selenocysteine
  MOD_RES (260)..(260): Selenocysteine
  MOD_RES (270)..(270): Selenocysteine
  MOD_RES (278)..(278): Selenocysteine
  MOD_RES (308)..(308): Selenocysteine
  MOD_RES (329)..(329): Selenocysteine
  MOD_RES (398)..(398): Selenocysteine
  MOD_RES (407)..(407): Selenocysteine
  MOD_RES (412)..(412): Selenocysteine
MGGDLVLGLGALRRRKRLLEQEKSLAGWALVLAGXGIGLMVLHAEMLWFGGCSWALYLFLVKCXISISXFLLLCLIVAFHAKEVQLFMXDNGLRDWRVALXGRQAAQIVLELVVCGLHPAPVRGPPCVQDLGAPLXSPQPWPGFLGQGEALLSLAMLLRLYLVPRAVLLRSGVLLNASYRSIGALNQVRFRHWFVAKLYMNXHPGRLLLGLXLGLWLXXAWVLSVAERQAVNAXGHLSDXLWLIPIXFLXIGYGDVVPGXMWGKIVCLCXGVMGVCCXALLVAVVARKLEFNKAEKHVHNFMMDIQYXKEMKESAARVLQEAWMFYKHXRRKESHAARRHQRKLLAAINAFRQVRLKHRKLREQVNSMVDISKMHMILYDLQQNLSSSHRALEKQIDXLAGKLDALXELLSXALGPRQLPEPSQQSK

SEQ ID NO: 14272 - protein, 295 aa, Homo sapiens
  MOD_RES (10)..(10): Selenocysteine
  MOD_RES (70)..(70): Selenocysteine
  MOD_RES (80)..(80): Selenocysteine
  MOD_RES (86)..(87): Selenocysteine
  MOD_RES (102)..(102): Selenocysteine
  MOD_RES (108)..(108): Selenocysteine
  MOD_RES (115)..(115): Selenocysteine
  MOD_RES (118)..(118): Selenocysteine
  MOD_RES (128)..(128): Selenocysteine
  MOD_RES (138)..(138): Selenocysteine
  MOD_RES (146)..(146): Selenocysteine
  MOD_RES (176)..(176): Selenocysteine
  MOD_RES (197)..(197): Selenocysteine
  MOD_RES (266)..(266): Selenocysteine
  MOD_RES (275)..(275): Selenocysteine
  MOD_RES (280)..(280): Selenocysteine
MHDQHFHLLXPLPHRGLSCQRGPAVHDRQRAAGLARGADRAAGNASYRSIGALNQVRFRHWFVAKLYMNXHPGRLLLGLXLGLWLXXAWVLSVAERQAVNAXGHLSDXLWLIPIXFLXIGYGDVVPGXMWGKIVCLCXGVMGVCCXALLVAVVARKLEFNKAEKHVHNFMMDIQYXKEMKESAARVLQEAWMFYKHXRRKESHAARRHQRKLLAAINAFRQVRLKHRKLREQVNSMVDISKMHMILYDLQQNLSSSHRALEKQIDXLAGKLDALXELLSXALGPRQLPEPSQQSK

SEQ ID NO: 14273 - protein, 113 aa, Homo sapiens
  MOD_RES (3)..(3): Selenocysteine
  MOD_RES (10)..(10): Selenocysteine
  MOD_RES (13)..(13): Selenocysteine
  MOD_RES (23)..(23): Selenocysteine
  MOD_RES (33)..(33): Selenocysteine
  MOD_RES (41)..(41): Selenocysteine
  MOD_RES (71)..(71): Selenocysteine
  MOD_RES (92)..(92): Selenocysteine
SDXLWLIPIXFLXIGYGDVVPGXMWGKIVCLCXGVMGVCCXALLVAVVARKLEFNKAEKHVHNFMMDIQYXKEMKESAARVLQEAWMFYKHXRRKESHAARRHQRKLLAAINA

SEQ ID NO: 14274 - protein, 59 aa, Homo sapiens
  MOD_RES (30)..(30): Selenocysteine
  MOD_RES (39)..(39): Selenocysteine
  MOD_RES (44)..(44): Selenocysteine
VDISKMHMILYDLQQNLSSSHRALEKQIDXLAGKLDALXELLSXALGPRQLPEPSQQSK

SEQ ID NO: 14275 - protein, 165 aa, Homo sapiens
  MOD_RES (1)..(1): Any amino acid
  MOD_RES (5)..(5): Selenocysteine
  MOD_RES (35)..(35): Selenocysteine
  MOD_RES (69)..(69): Selenocysteine
  MOD_RES (74)..(74): Selenocysteine
  MOD_RES (136)..(136): Selenocysteine
  MOD_RES (145)..(145): Selenocysteine
  MOD_RES (150)..(150): Selenocysteine
XVCCXALLVAVVARKLEFNKAEKHVHNFMMDIQYXKEEGVSCCPQASAQAAGRHQRVRAALYAHVSMCXHVQVXSLHGCVCACPCLSRFRQVRLKHRKLREQVNSMVDISKMHMILYDLQQNLSSSHRALEKQIDXLAGKLDALXELLSXALGPRQLPEPSQQSK

SEQ ID NO: 14276 - protein, 1628 aa, Homo sapiens
  MOD_RES (38)..(39): Selenocysteine
  MOD_RES (79)..(79): Selenocysteine
  MOD_RES (115)..(115): Selenocysteine
  MOD_RES (144)..(144): Selenocysteine
  MOD_RES (150)..(150): Selenocysteine
  MOD_RES (157)..(158): Selenocysteine
  MOD_RES (165)..(165): Selenocysteine
  MOD_RES (167)..(167): Selenocysteine
  MOD_RES (204)..(204): Selenocysteine
  MOD_RES (216)..(216): Selenocysteine
  MOD_RES (247)..(247): Selenocysteine
  MOD_RES (252)..(252): Selenocysteine
  MOD_RES (265)..(266): Selenocysteine
  MOD_RES (302)..(302): Selenocysteine
  MOD_RES (380)..(380): Selenocysteine
  MOD_RES (409)..(409): Selenocysteine
  MOD_RES (445)..(445): Selenocysteine
  MOD_RES (470)..(470): Selenocysteine
  MOD_RES (484)..(484): Selenocysteine
  MOD_RES (497)..(497): Selenocysteine
  MOD_RES (512)..(512): Selenocysteine
  MOD_RES (514)..(514): Selenocysteine
  MOD_RES (523)..(524): Selenocysteine
  MOD_RES (591)..(591): Selenocysteine
  MOD_RES (740)..(740): Selenocysteine
  MOD_RES (804)..(804): Selenocysteine
  MOD_RES (811)..(811): Selenocysteine
  MOD_RES (835)..(835): Selenocysteine
  MOD_RES (845)..(846): Selenocysteine
  MOD_RES (851)..(851): Selenocysteine
  MOD_RES (859)..(859): Selenocysteine
  MOD_RES (864)..(864): Selenocysteine
  MOD_RES (945)..(945): Selenocysteine
  MOD_RES (988)..(988): Selenocysteine
  MOD_RES (1079)..(1079): Selenocysteine
  MOD_RES (1104)..(1104): Selenocysteine
  MOD_RES (1111)..(1111): Selenocysteine
  MOD_RES (1131)..(1131): Selenocysteine
  MOD_RES (1169)..(1169): Selenocysteine
  MOD_RES (1208)..(1208): Selenocysteine
  MOD_RES (1225)..(1225): Selenocysteine
  MOD_RES (1228)..(1228): Selenocysteine
  MOD_RES (1230)..(1230): Selenocysteine
  MOD_RES (1238)..(1238): Selenocysteine
  MOD_RES (1285)..(1285): Selenocysteine
  MOD_RES (1315)..(1315): Selenocysteine
  MOD_RES (1327)..(1327): Selenocysteine
  MOD_RES (1348)..(1348): Selenocysteine
  MOD_RES (1372)..(1372): Selenocysteine
  MOD_RES (1403)..(1403): Selenocysteine
  MOD_RES (1530)..(1530): Selenocysteine
  MOD_RES (1532)..(1532): Selenocysteine
  MOD_RES (1537)..(1537): Selenocysteine
  MOD_RES (1561)..(1561): Selenocysteine
  MOD_RES (1609)..(1609): Selenocysteine
  MOD_RES (1627)..(1627): Selenocysteine
MAGVGAAALSLLLHLGALALAAGAEGGAVPREPPGQQXXAHSSVLAGNSQEQWHPLREWLGRLEAAVMELREQNKDLQXRVRQLESCECHPASPQCWGLGRAWPEGARWEPDACXACVCQDGAAHCGPQAHLPHCRGCSQNGQXYGNGEXFSPDACXXCRCLEGXIXCNQKPCPRGPCPEPGACCPHCKPGCDYEGQLYEEGVXFLSSSNPCLQCXCLRSRVRCMALKCPPSPCPEPVLRPGHCCPXCQGCXEGGSHWEHGQEWXXPGDPCRICRCLEGHIQCRQRECASLCPYPARPLPGXCCPVCDGCFLNGREHRSGEPVGSGDPCSHCRCANGSVQCEPLPCPPVPCRHPGKIPGQCCPVCDGCEYQGHQYQSQEXFRLQERGLCVRCSCQAGEVSCEEQECPVXPCALPASGRQLCPACELDGEEFAEGVQWEPDGRPCXACVCQDGVPKCGAVLCPPAPCQHPXQPPGACCPSCDSCXYHSQVYANGQNFXDADSPCHACHCQDGXVXCSLVDCPPXXCARPQSGPGQCCPRCPDCILEEEVFVDGESFSHPRDPCQECRCQEGHAHCQPRPCPRAPCAHPLPGXCCPNDCSGCAFGGKEYPSGADFPHPSDPCRLCRCLSGNVQCLARRCVPLPCPEPVLLPGECCPQCPAAPAPAGCPRPGAAHARHQEYFSPPGDPCRRCLCLDGSVSCQRLPCPPAPCAHPRQGPCCPSCDGCLYQGKEFASGERFPSPXAACHLCLCWEGSVSCEPKACAPALCPFPARGDCCPDCDGCEYLGESYLSNQEFPDPREPCNLCXCLGGFVXCGRRPCEPPGCSHPLIPSGHCCPXCQGCRYHGVXXASGEXLPDPLDPXCSLCXCQEGSMRCQKKPCPPALCPHPSPGPCFCPVCHSCLSQGREHQDGEEFEGPAGSCEWCRCQAGQVSCVRLQCPPLPCKLQVXERGSCCPRCRGCLAHGEEHPEGSRWVPPDSACSSCVCHEGVVXCARIQCISSCAQPRQGPHDCCPQCSDCEHEGRKYEPGESFQPGADPCEVCICEPQPEGPPSLRCHRRQCPSLVGCPPSQLLPPGPQHCCPXCAEALSNCSEGLLGSELAPPDPCYXCQCQDLXWLCIHQACPELSCPLSERHXPPGSCCPVCRECVVEAEGRRVADGESWRDPSNACIACXCHRGHVECHLEECQALSCPHGWAKVPQADSCCERCQAPXQSCVHQGREVASGERWXVDXCXSCSCMAGXVRCQSQRCSPLSCGPDKAPALSPGSCCPRCLPRPASCMAFGDPHYRXFDGRLLHFQGSCSYVLAKDCHSGDFSVHVXNDDRGRSGVAWXQEVAVLLGDMAVRLLQDGAVXVDGHPVALPFLQEPLLYVELRGHXVILHAQPGLQVLWDGQSQVEVSVPGSYQGRXCGLCGNFNGFAQDDLQGPEGLLLPSEAAFGNSWQVSEGLWPGRPCSAGREVDPCRAAGYRARREANARCGVLKSSPFSRCHAVVPPEPFFAACVYDLCACGPGSSADACLCDALEAYASHCRQAGVXPXWRGPXLCVVGCPLERGFVFDECGPPCPRXCFNQHIPLGELAAHCVRPCVPGCQCPAGLVEHEAHCIPPEACPQVLLXGDQPLGARPSPSREPQEXP

SEQ ID NO: 14277 - protein, 1504 aa, Homo sapiens
  MOD_RES (38)..(39): Selenocysteine
  MOD_RES (79)..(79): Selenocysteine
  MOD_RES (115)..(115): Selenocysteine
  MOD_RES (144)..(144): Selenocysteine
  MOD_RES (150)..(150): Selenocysteine
  MOD_RES (157)..(158): Selenocysteine
  MOD_RES (163)..(163): Selenocysteine
  MOD_RES (183)..(183): Selenocysteine
  MOD_RES (195)..(195): Selenocysteine
  MOD_RES (208)..(209): Selenocysteine
  MOD_RES (245)..(245): Selenocysteine
  MOD_RES (323)..(323): Selenocysteine
  MOD_RES (352)..(352): Selenocysteine
  MOD_RES (388)..(388): Selenocysteine
  MOD_RES (413)..(413): Selenocysteine
  MOD_RES (427)..(427): Selenocysteine
  MOD_RES (440)..(440): Selenocysteine
  MOD_RES (455)..(455): Selenocysteine
  MOD_RES (457)..(457): Selenocysteine
  MOD_RES (466)..(467): Selenocysteine
  MOD_RES (534)..(534): Selenocysteine
  MOD_RES (680)..(680): Selenocysteine
  MOD_RES (744)..(744): Selenocysteine
  MOD_RES (751)..(751): Selenocysteine
  MOD_RES (775)..(775): Selenocysteine
  MOD_RES (785)..(786): Selenocysteine
  MOD_RES (791)..(791): Selenocysteine
  MOD_RES (799)..(799): Selenocysteine
  MOD_RES (804)..(804): Selenocysteine
  MOD_RES (885)..(885): Selenocysteine
  MOD_RES (928)..(928): Selenocysteine
  MOD_RES (1019)..(1019): Selenocysteine
  MOD_RES (1044)..(1044): Selenocysteine
  MOD_RES (1051)..(1051): Selenocysteine
  MOD_RES (1071)..(1071): Selenocysteine
  MOD_RES (1084)..(1084): Selenocysteine
  MOD_RES (1101)..(1101): Selenocysteine
  MOD_RES (1104)..(1104): Selenocysteine
  MOD_RES (1106)..(1106): Selenocysteine
  MOD_RES (1114)..(1114): Selenocysteine
  MOD_RES (1161)..(1161): Selenocysteine
  MOD_RES (1191)..(1191): Selenocysteine
  MOD_RES (1203)..(1203): Selenocysteine
  MOD_RES (1224)..(1224): Selenocysteine
  MOD_RES (1248)..(1248): Selenocysteine
  MOD_RES (1279)..(1279): Selenocysteine
  MOD_RES (1406)..(1406): Selenocysteine
  MOD_RES (1408)..(1408): Selenocysteine
  MOD_RES (1413)..(1413): Selenocysteine
  MOD_RES (1437)..(1437): Selenocysteine
  MOD_RES (1485)..(1485): Selenocysteine
  MOD_RES (1503)..(1503): Selenocysteine
MAGVGAAALSLLLHLGALALAAGAEGGAVPREPPGQQXXAHSSVLAGNSQEQWHPLREWLGRLEAAVMELREQNKDLQXRVRQLESCECHPASPQCWGLGRAWPEGARWEPDACXACVCQDGAAHCGPQAHLPHCRGCSQNGQXYGNGEXFSPDACXXCRCLXGAVQCQGPSCSELNCLESCXPPGECCPICRCXEGGSHWEHGQEWXXPGDPCRICRCLEGHIQCRQRECASLCPYPARPLPGXCCPVCDGCFLNGREHRSGEPVGSGDPCSHCRCANGSVQCEPLPCPPVPCRHPGKIPGQCCPVCDGCEYQGHQYQSQEXFRLQERGLCVRCSCQAGEVSCEEQECPVXPCALPASGRQLCPACELDGEEFAEGVQWEPDGRPCXACVCQDGVPKCGAVLCPPAPCQHPXQPPGACCPSCDSCXYHSQVYANGQNFXDADSPCHACHCQDGXVXCSLVDCPPXXCARPQSGPGQCCPRCPDCILEEEVFVDGESFSHPRDPCQECRCQEGHAHCQPRPCPRAPCAHPLPGXCCPNDCSGCAFGGKEYPSGADFPHPSDPCRLCRCLSGNVQCLARRCVPLPCPEPVLLPGECCPQCPAPAGCPRPGAAHARHQEYFSPPGDPCRRCLCLDGSVSCQRLPCPPAPCAHPRQGPCCPSCDGCLYQGKEFASGERFPSPXAACHLCLCWEGSVSCEPKACAPALCPFPARGDCCPDCDGCEYLGESYLSNQEFPDPREPCNLCXCLGGFVXCGRRPCEPPGCSHPLIPSGHCCPXCQGCRYHGVXXASGEXLPDPLDPXCSLCXCQEGSMRCQKKPCPPALCPHPSPGPCFCPVCHSCLSQGREHQDGEEFEGPAGSCEWCRCQAGQVSCVRLQCPPLPCKLQVXERGSCCPRCRGCLAHGEEHPEGSRWVPPDSACSSCVCHEGVVXCARIQCISSCAQPRQGPHDCCPQCSDCEHEGRKYEPGESFQPGADPCEVCICEPQPEGPPSLRCHRRQCPSLVGCPPSQLLPPGPQHCCPXCAEALSNCSEGLLGSELAPPDPCYXCQCQDLXWLCIHQACPELSCPLSERHXPPGSCCPVCRAPXQSCVHQGREVASGERWXVDXCXSCSCMAGXVRCQSQRCSPLSCGPDKAPALSPGSCCPRCLPRPASCMAFGDPHYRXFDGRLLHFQGSCSYVLAKDCHSGDFSVHVXNDDRGRSGVAWXQEVAVLLGDMAVRLLQDGAVXVDGHPVALPFLQEPLLYVELRGHXVILHAQPGLQVLWDGQSQVEVSVPGSYQGRXCGLCGNFNGFAQDDLQGPEGLLLPSEAAFGNSWQVSEGLWPGRPCSAGREVDPCRAAGYRARREANARCGVLKSSPFSRCHAVVPPEPFFAACVYDLCACGPGSSADACLCDALEAYASHCRQAGVXPXWRGPXLCVVGCPLERGFVFDECGPPCPRXCFNQHIPLGELAAHCVRPCVPGCQCPAGLVEHEAHCIPPEACPQVLLXGDQPLGARPSPSREPQEXP

SEQ ID NO: 14278 - protein, 1275 aa, Homo sapiens
  MOD_RES (38)..(39): Selenocysteine
  MOD_RES (79)..(79): Selenocysteine
  MOD_RES (115)..(115): Selenocysteine
  MOD_RES (144)..(144): Selenocysteine
  MOD_RES (150)..(150): Selenocysteine
  MOD_RES (157)..(158): Selenocysteine
  MOD_RES (163)..(163): Selenocysteine
  MOD_RES (183)..(183): Selenocysteine
  MOD_RES (208)..(208): Selenocysteine
  MOD_RES (220)..(220): Selenocysteine
  MOD_RES (251)..(251): Selenocysteine
  MOD_RES (256)..(256): Selenocysteine
  MOD_RES (269)..(270): Selenocysteine
  MOD_RES (306)..(306): Selenocysteine
  MOD_RES (384)..(384): Selenocysteine
  MOD_RES (413)..(413): Selenocysteine
  MOD_RES (449)..(449): Selenocysteine
  MOD_RES (474)..(474): Selenocysteine
  MOD_RES (488)..(488): Selenocysteine
  MOD_RES (501)..(501): Selenocysteine
  MOD_RES (516)..(516): Selenocysteine
  MOD_RES (518)..(518): Selenocysteine
  MOD_RES (527)..(528): Selenocysteine
  MOD_RES (595)..(595): Selenocysteine
  MOD_RES (744)..(744): Selenocysteine
  MOD_RES (808)..(808): Selenocysteine
  MOD_RES (815)..(815): Selenocysteine
  MOD_RES (839)..(839): Selenocysteine
  MOD_RES (849)..(850): Selenocysteine
  MOD_RES (855)..(855): Selenocysteine
  MOD_RES (863)..(863): Selenocysteine
  MOD_RES (868)..(868): Selenocysteine
  MOD_RES (949)..(949): Selenocysteine
  MOD_RES (992)..(992): Selenocysteine
  MOD_RES (1083)..(1083): Selenocysteine
  MOD_RES (1108)..(1108): Selenocysteine
  MOD_RES (1115)..(1115): Selenocysteine
  MOD_RES (1135)..(1135): Selenocysteine
  MOD_RES (1148)..(1148): Selenocysteine
  MOD_RES (1165)..(1165): Selenocysteine
  MOD_RES (1168)..(1168): Selenocysteine
  MOD_RES (1170)..(1170): Selenocysteine
  MOD_RES (1178)..(1178): Selenocysteine
  MOD_RES (1225)..(1225): Selenocysteine
  MOD_RES (1255)..(1255): Selenocysteine
  MOD_RES (1274)..(1274): Selenocysteine
MAGVGAAALSLLLHLGALALAAGAEGGAVPREPPGQQXXAHSSVLAGNSQEQWHPLREWLGRLEAAVMELREQNKDLQXRVRQLESCECHPASPQCWGLGRAWPEGARWEPDACXACVCQDGAAHCGPQAHLPHCRGCSQNGQXYGNGEXFSPDACXXCRCLXGAVQCQGPSCSELNCLESCXPPGECCPICRPGCDYEGQLYEEGVXFLSSSNPCLQCXCLRSRVRCMALKCPPSPCPEPVLRPGHCCPXCQGCXEGGSHWEHGQEWXXPGDPCRICRCLEGHIQCRQRECASLCPYPARPLPGXCCPVCDGCFLNGREHRSGEPVGSGDPCSHCRCANGSVQCEPLPCPPVPCRHPGKIPGQCCPVCDGCEYQGHQYQSQEXFRLQERGLCVRCSCQAGEVSCEEQECPVXPCALPASGRQLCPACELDGEEFAEGVQWEPDGRPCXACVCQDGVPKCGAVLCPPAPCQHPXQPPGACCPSCDSCXYHSQVYANGQNFXDADSPCHACHCQDGXVXCSLVDCPPXXCARPQSGPGQCCPRCPDCILEEEVFVDGESFSHPRDPCQECRCQEGHAHCQPRPCPRAPCAHPLPGXCCPNDCSGCAFGGKEYPSGADFPHPSDPCRLCRCLSGNVQCLARRCVPLPCPEPVLLPGECCPQCPAAPAPAGCPRPGAAHARHQEYFSPPGDPCRRCLCLDGSVSCQRLPCPPAPCAHPRQGPCCPSCDGCLYQGKEFASGERFPSPXAACHLCLCWEGSVSCEPKACAPALCPFPARGDCCPDCDGCEYLGESYLSNQEFPDPREPCNLCXCLGGFVXCGRRPCEPPGCSHPLIPSGHCCPXCQGCRYHGVXXASGEXLPDPLDPXCSLCXCQEGSMRCQKKPCPPALCPHPSPGPCFCPVCHSCLSQGREHQDGEEFEGPAGSCEWCRCQAGQVSCVRLQCPPLPCKLQVXERGSCCPRCRGCLAHGEEHPEGSRWVPPDSACSSCVCHEGVVXCARIQCISSCAQPRQGPHDCCPQCSDCEHEGRKYEPGESFQPGADPCEVCICEPQPEGPPSLRCHRRQCPSLVGCPPSQLLPPGPQHCCPXCAEALSNCSEGLLGSELAPPDPCYXCQCQDLXWLCIHQACPELSCPLSERHXPPGSCCPVCRAPXQSCVHQGREVASGERWXVDXCXSCSCMAGXVRCQSQRCSPLSCGPDKAPALSPGSCCPRCLPRPASCMAFGDPHYRXFDGRLLHFQGSCSYVLAKDCHSGDFRWMGXRWPCPSCRSRCCMWSCEDXL

SEQ ID NO: 14279 - protein, 1568 aa, Homo sapiens
  MOD_RES (38)..(39): Selenocysteine
  MOD_RES (79)..(79): Selenocysteine
  MOD_RES (115)..(115): Selenocysteine
  MOD_RES (144)..(144): Selenocysteine
  MOD_RES (150)..(150): Selenocysteine
  MOD_RES (157)..(158): Selenocysteine
  MOD_RES (163)..(163): Selenocysteine
  MOD_RES (183)..(183): Selenocysteine
  MOD_RES (208)..(208): Selenocysteine
  MOD_RES (220)..(220): Selenocysteine
  MOD_RES (251)..(251): Selenocysteine
  MOD_RES (256)..(256): Selenocysteine
  MOD_RES (269)..(270): Selenocysteine
  MOD_RES (306)..(306): Selenocysteine
  MOD_RES (384)..(384): Selenocysteine
  MOD_RES (413)..(413): Selenocysteine
  MOD_RES (449)..(449): Selenocysteine
  MOD_RES (474)..(474): Selenocysteine
  MOD_RES (488)..(488): Selenocysteine
  MOD_RES (501)..(501): Selenocysteine
  MOD_RES (516)..(516): Selenocysteine
  MOD_RES (518)..(518): Selenocysteine
  MOD_RES (527)..(528): Selenocysteine
  MOD_RES (595)..(595): Selenocysteine
  MOD_RES (744)..(744): Selenocysteine
  MOD_RES (808)..(808): Selenocysteine
  MOD_RES (815)..(815): Selenocysteine
  MOD_RES (839)..(839): Selenocysteine
  MOD_RES (849)..(850): Selenocysteine
  MOD_RES (855)..(855): Selenocysteine
  MOD_RES (863)..(863): Selenocysteine
  MOD_RES (868)..(868): Selenocysteine
  MOD_RES (949)..(949): Selenocysteine
  MOD_RES (992)..(992): Selenocysteine
  MOD_RES (1083)..(1083): Selenocysteine
  MOD_RES (1108)..(1108): Selenocysteine
  MOD_RES (1115)..(1115): Selenocysteine
  MOD_RES (1135)..(1135): Selenocysteine
  MOD_RES (1148)..(1148): Selenocysteine
  MOD_RES (1165)..(1165): Selenocysteine
  MOD_RES (1168)..(1168): Selenocysteine
  MOD_RES (1170)..(1170): Selenocysteine
  MOD_RES (1178)..(1178): Selenocysteine
  MOD_RES (1225)..(1225): Selenocysteine
  MOD_RES (1255)..(1255): Selenocysteine
  MOD_RES (1267)..(1267): Selenocysteine
  MOD_RES (1288)..(1288): Selenocysteine
  MOD_RES (1312)..(1312): Selenocysteine
  MOD_RES (1343)..(1343): Selenocysteine
  MOD_RES (1470)..(1470): Selenocysteine
  MOD_RES (1472)..(1472): Selenocysteine
  MOD_RES (1477)..(1477): Selenocysteine
  MOD_RES (1501)..(1501): Selenocysteine
  MOD_RES (1549)..(1549): Selenocysteine
  MOD_RES (1567)..(1567): Selenocysteine
MAGVGAAALSLLLHLGALALAAGAEGGAVPREPPGQQXXAHSSVLAGNSQEQWHPLREWLGRLEAAVMELREQNKDLQXRVRQLESCECHPASPQCWGLGRAWPEGARWEPDACXACVCQDGAAHCGPQAHLPHCRGCSQNGQXYGNGEXFSPDACXXCRCLXGAVQCQGPSCSELNCLESCXPPGECCPICRPGCDYEGQLYEEGVXFLSSSNPCLQCXCLRSRVRCMALKCPPSPCPEPVLRPGHCCPXCQGCXEGGSHWEHGQEWXXPGDPCRICRCLEGHIQCRQRECASLCPYPARPLPGXCCPVCDGCFLNGREHRSGEPVGSGDPCSHCRCANGSVQCEPLPCPPVPCRHPGKIPGQCCPVCDGCEYQGHQYQSQEXFRLQERGLCVRCSCQAGEVSCEEQECPVXPCALPASGRQLCPACELDGEEFAEGVQWEPDGRPCXACVCQDGVPKCGAVLCPPAPCQHPXQPPGACCPSCDSCXYHSQVYANGQNFXDADSPCHACHCQDGXVXCSLVDCPPXXCARPQSGPGQCCPRCPDCILEEEVFVDGESFSHPRDPCQECRCQEGHAHCQPRPCPRAPCAHPLPGXCCPNDCSGCAFGGKEYPSGADFPHPSDPCRLCRCLSGNVQCLARRCVPLPCPEPVLLPGECCPQCPAAPAPAGCPRPGAAHARHQEYFSPPGDPCRRCLCLDGSVSCQRLPCPPAPCAHPRQGPCCPSCDGCLYQGKEFASGERFPSPXAACHLCLCWEGSVSCEPKACAPALCPFPARGDCCPDCDGCEYLGESYLSNQEFPDPREPCNLCXCLGGFVXCGRRPCEPPGCSHPLIPSGHCCPXCQGCRYHGVXXASGEXLPDPLDPXCSLCXCQEGSMRCQKKPCPPALCPHPSPGPCFCPVCHSCLSQGREHQDGEEFEGPAGSCEWCRCQAGQVSCVRLQCPPLPCKLQVXERGSCCPRCRGCLAHGEEHPEGSRWVPPDSACSSCVCHEGVVXCARIQCISSCAQPRQGPHDCCPQCSDCEHEGRKYEPGESFQPGADPCEVCICEPQPEGPPSLRCHRRQCPSLVGCPPSQLLPPGPQHCCPXCAEALSNCSEGLLGSELAPPDPCYXCQCQDLXWLCIHQACPELSCPLSERHXPPGSCCPVCRAPXQSCVHQGREVASGERWXVDXCXSCSCMAGXVRCQSQRCSPLSCGPDKAPALSPGSCCPRCLPRPASCMAFGDPHYRXFDGRLLHFQGSCSYVLAKDCHSGDFSVHVXNDDRGRSGVAWXQEVAVLLGDMAVRLLQDGAVXVDGHPVALPFLQEPLLYVELRGHXVILHAQPGLQVLWDGQSQVEVSVPGSYQGRXCGLCGNFNGFAQDDLQGPEGLLLPSEAAFGNSWQVSEGLWPGRPCSAGREVDPCRAAGYRARREANARCGVLKSSPFSRCHAVVPPEPFFAACVYDLCACGPGSSADACLCDALEAYASHCRQAGVXPXWRGPXLCVVGCPLERGFVFDECGPPCPRXCFNQHIPLGELAAHCVRPCVPGCQCPAGLVEHEAHCIPPEACPQVLLXGDQPLGARPSPSREPQEXP

SEQ ID NO: 14280 - protein, 232 aa, Homo sapiens
  MOD_RES (10)..(10): Selenocysteine
  MOD_RES (54)..(54): Selenocysteine
  MOD_RES (82)..(82): Selenocysteine
  MOD_RES (86)..(86): Selenocysteine
  MOD_RES (121)..(121): Selenocysteine
  MOD_RES (129)..(129): Selenocysteine
  MOD_RES (181)..(181): Selenocysteine
  MOD_RES (193)..(193): Selenocysteine
MLGAMFRAGXPMPPNLNSQGGGHYFIDRDGKAFRHILNFLRLGRLDLPRGYGEXALLRAEADFYQIRPLLDALRELEASQGXPAPXAALLHADVDVSPRLVHFSARRGPHHYELSSVQVDXFRANLFCXDSECLGALRARFGVASGDRAEGSPHFHLEWAPRPVELPEVEYGRLGLQPLWXGGPGERREVVGXPSFLEEVLRVALEHGFRLDSVFPDPEDLLNSRSLRFVRH

SEQ ID NO: 14281 - protein, 120 aa, Homo sapiens
  MOD_RES (12)..(12): Selenocysteine
  MOD_RES (29)..(29): Selenocysteine
  MOD_RES (45)..(45): Selenocysteine
  MOD_RES (77)..(77): Selenocysteine
  MOD_RES (88)..(88): Selenocysteine
  MOD_RES (100)..(100): Selenocysteine
  MOD_RES (119)..(119): Selenocysteine
KAMFSGRVEVLXDAGGWVLIDRSGRHFGXILNYLRDGSVPLPESXRELGELLGEARYYLVQGLIEDCQLALQQKREXLSPLCLIPMVXSPREEQQLLASXSKPVVKLLHNRSNNKYSYXR

SEQ ID NO: 14282 - protein, 329 aa, Homo sapiens
  MOD_RES (37)..(37): Selenocysteine
  MOD_RES (54)..(55): Selenocysteine
  MOD_RES (58)..(58): Selenocysteine
  MOD_RES (60)..(60): Selenocysteine
  MOD_RES (64)..(64): Selenocysteine
  MOD_RES (78)..(78): Selenocysteine
  MOD_RES (95)..(95): Selenocysteine
  MOD_RES (111)..(111): Selenocysteine
  MOD_RES (143)..(143): Selenocysteine
  MOD_RES (154)..(154): Selenocysteine
  MOD_RES (166)..(166): Selenocysteine
  MOD_RES (185)..(185): Selenocysteine
  MOD_RES (187)..(187): Selenocysteine
  MOD_RES (239)..(239): Selenocysteine
  MOD_RES (245)..(245): Selenocysteine
  MOD_RES (250)..(250): Selenocysteine
  MOD_RES (263)..(263): Selenocysteine
  MOD_RES (271)..(271): Selenocysteine
  MOD_RES (283)..(283): Selenocysteine
  MOD_RES (315)..(315): Selenocysteine
MSAEASGPAAAAAPSLEAPKPSGLEPGPAAYGLKPLXPNSKYVKLNVGGSLHYXXLRXLXGQDXMLKAMFSGRVEVLXDAGGWVLIDRSGRHFGXILNYLRDGSVPLPESXRELGELLGEARYYLVQGLIEDCQLALQQKREXLSPLCLIPMVXSPREEQQLLASXSKPVVKLLHNRSNNKYSYXSXSDDNLLKNIELFDKLALRFHGRLLFLKDVLGDEICCWSFYGQGRKIAEVCCXSIVYAXEKKQXKVEFPEARIFEEXLNILIYEXPRGPDPALLEAXGGAAGAGGAGRGEDEENREHRVRRIHVRRHIXHDERPHGQQIVFKD

SEQ ID NO: 14283 - protein, 209 aa, Homo sapiens
  MOD_RES (37)..(37): Selenocysteine
  MOD_RES (54)..(55): Selenocysteine
  MOD_RES (58)..(58): Selenocysteine
  MOD_RES (60)..(60): Selenocysteine
  MOD_RES (64)..(64): Selenocysteine
  MOD_RES (78)..(78): Selenocysteine
  MOD_RES (95)..(95): Selenocysteine
  MOD_RES (111)..(111): Selenocysteine
  MOD_RES (204)..(204): Selenocysteine
MSAEASGPAAAAAPSLEAPKPSGLEPGPAAYGLKPLXPNSKYVKLNVGGSLHYXXLRXLXGQDXMLKAMFSGRVEVLXDAGGWVLIDRSGRHFGXILNYLRDGSVPLPESXRELGELLGEARYYLVQGLIEDCQLALQVRAFGVPMPMFLGELPKQVLEQKKGDMGYGLESLALAGHNPREFEVPSSASLPPQAAPPPQPHARXFAMVK

SEQ ID NO: 14284 - protein, 81 aa, Homo sapiens
  MOD_RES (1)..(1): Any amino acid
  MOD_RES (17)..(17): Selenocysteine
  MOD_RES (66)..(66): Selenocysteine
XILNYLRDGSVPLPESXRELGELLGEARYYLVQGLIEDCQLALQSRAYSGFSSCSRNVFLQLVHQXRVQSRSSRCIWLSAS

SEQ ID NO: 14285 - protein, 140 aa, Homo sapiens
  MOD_RES (21)..(21): Selenocysteine
  MOD_RES (32)..(32): Selenocysteine
  MOD_RES (44)..(44): Selenocysteine
  MOD_RES (63)..(63): Selenocysteine
  MOD_RES (65)..(65): Selenocysteine
  MOD_RES (117)..(117): Selenocysteine
  MOD_RES (123)..(123): Selenocysteine
  MOD_RES (128)..(128): Selenocysteine
YYLVQGLIEDCQLALQQKREXLSPLCLIPMVXSPREEQQLLASXSKPVVKLLHNRSNNKYSYXSXSDDNLLKNIELFDKLALRFHGRLLFLKDVLGDEICCWSFYGQGRKIAEVCCXSIVYAXEKKQXKCIVHAKVCGPS

SEQ ID NO: 14286 - protein, 428 aa, Homo sapiens
  MOD_RES (38)..(38): Selenocysteine
  MOD_RES (42)..(42): Selenocysteine
  MOD_RES (61)..(61): Selenocysteine
  MOD_RES (123)..(123): Selenocysteine
  MOD_RES (148)..(148): Selenocysteine
  MOD_RES (167)..(167): Selenocysteine
  MOD_RES (175)..(175): Selenocysteine
  MOD_RES (208)..(208): Selenocysteine
  MOD_RES (223)..(223): Selenocysteine
  MOD_RES (255)..(255): Selenocysteine
  MOD_RES (263)..(263): Selenocysteine
  MOD_RES (272)..(272): Selenocysteine
  MOD_RES (305)..(305): Selenocysteine
  MOD_RES (312)..(312): Selenocysteine
  MOD_RES (327)..(327): Selenocysteine
  MOD_RES (334)..(334): Selenocysteine
  MOD_RES (337)..(337): Selenocysteine
  MOD_RES (341)..(341): Selenocysteine
  MOD_RES (368)..(368): Selenocysteine
  MOD_RES (370)..(370): Selenocysteine
MALSGNCSRYYPREQGSAVPNSFPEVVELNVGGQVYFXRHSXLISIPHSLLWKMFSPKRDXANDLAKDSKGRFFIDRDGFLFRYILDYLRDRQVVLPDHFPEKGRLKREAEYFQLPDLVKLLXPDEIKQSPDEFCHSDFEDASQGSDXRICPPSSLLPADRKWGFIXVGYRGSCXLGREGQADAKFRRVPRILVCGRISLAKEVFGEXLNESRDPDRAPERYXSRFYLKFKHLERAFDMLSECGFHMVACNSSVXASFINQYXDDKIWSSYXEYVFYREPSRWSPSHCDCCCKNGKGDKEGESGXSCNDLSXSSCDSQSEASSPQEXVICGPVXRQXNIQXLDRPIKKGPVQLIQQSEMRRKSDLLRXLXSGSRESNMSSKKKAVKEKLSIEEELEKCIQDFLKIKIPDRFPERKHPWQSELLRKYHL

SEQ ID NO: 14287 - protein, 473 aa, Homo sapiens
  MOD_RES (6)..(6): Selenocysteine
  MOD_RES (12)..(12): Selenocysteine
  MOD_RES (57)..(57): Selenocysteine
  MOD_RES (61)..(61): Selenocysteine
  MOD_RES (69)..(69): Selenocysteine
  MOD_RES (140)..(140): Selenocysteine
  MOD_RES (151)..(151): Selenocysteine
  MOD_RES (210)..(210): Selenocysteine
  MOD_RES (218)..(219): Selenocysteine
  MOD_RES (251)..(251): Selenocysteine
  MOD_RES (266)..(266): Selenocysteine
  MOD_RES (274)..(274): Selenocysteine
  MOD_RES (298)..(298): Selenocysteine
  MOD_RES (315)..(315): Selenocysteine
  MOD_RES (342)..(342): Selenocysteine
  MOD_RES (350)..(350): Selenocysteine
  MOD_RES (357)..(357): Selenocysteine
  MOD_RES (368)..(368): Selenocysteine
  MOD_RES (380)..(380): Selenocysteine
  MOD_RES (386)..(386): Selenocysteine
  MOD_RES (388)..(388): Selenocysteine
  MOD_RES (415)..(415): Selenocysteine
  MOD_RES (423)..(423): Selenocysteine
MALKDXGSGGSXILPISEMVSSSSSPGASAAAAPGPCAPSPFPEVVELNVGGQVYVXKHSXLLSVPDSXLASMFSPSSPRGGARRRGELPRDSRARFFIDRDGFLFRYVLDYLRDKQLALPEHFPEKERLLREAEYFQLXDLVKLLSPKVXKQNSLNDEGCQSDLEDNVSQGSSDALLLRGAAAAVPSGPGAHGGGGGGGAQDKRSGFLXLGYRGSYXXVRDNQADAKFRRVARIMVCGRIALAKEVFGDXLNESRDPDRQPEKYXSRFYLKFXYLEQAFDRLSEAGFHMVACNSSGXAAFVNQYRDDKIWSSYXEYIFFRPPQKIVSPKQEHEDRKHDKVXDKGSESGXSCNELSXSSCDSHSEASXPQDNPSSAQQAXAHQPNXLXLDRPSKKAPVQWIPPPDKRRNSELFQXLISKSREXNLSKKKVCEKLSVEEEMKKCIQDFKKIHIPDYFPERKRQWQSELLQKYGL

SEQ ID NO: 14288 - protein, 155 aa, Homo sapiens
  MOD_RES (1)..(1): Any amino acid
  MOD_RES (12)..(12): Selenocysteine
  MOD_RES (21)..(21): Selenocysteine
  MOD_RES (49)..(49): Selenocysteine
  MOD_RES (78)..(78): Selenocysteine
  MOD_RES (86)..(86): Selenocysteine
  MOD_RES (93)..(93): Selenocysteine
  MOD_RES (104)..(104): Selenocysteine
  MOD_RES (116)..(116): Selenocysteine
  MOD_RES (122)..(122): Selenocysteine
  MOD_RES (124)..(124): Selenocysteine
  MOD_RES (151)..(151): Selenocysteine
XYRDDKIWSSYXEYIFFRSLXMSLCSILRLNIWLFMIACQIKHESRCRXRARCLAAGPPQKIVSPKQEHEDRKHDKVXDKGSESGXSCNELSXSSCDSHSEASXPQDNPSSAQQAXAHQPNXLXLDRPSKKAPVQWIPPPDKRRNSELFQXLISK

SEQ ID NO: 14289 - protein, 302 aa, Homo sapiens
  MOD_RES (5)..(5): Selenocysteine
  MOD_RES (10)..(10): Selenocysteine
  MOD_RES (32)..(32): Selenocysteine
  MOD_RES (40)..(40): Selenocysteine
  MOD_RES (48)..(48): Selenocysteine
  MOD_RES (59)..(59): Selenocysteine
  MOD_RES (62)..(62): Selenocysteine
  MOD_RES (65)..(65): Selenocysteine
  MOD_RES (76)..(76): Selenocysteine
  MOD_RES (100)..(100): Selenocysteine
  MOD_RES (136)..(137): Selenocysteine
  MOD_RES (198)..(198): Selenocysteine
  MOD_RES (233)..(233): Selenocysteine
  MOD_RES (255)..(255): Selenocysteine
  MOD_RES (262)..(262): Selenocysteine
  MOD_RES (287)..(287): Selenocysteine
  MOD_RES (293)..(293): Selenocysteine
DFEFXGSHLXVRNGYSCVPVALAEGLDIKLNXAVRQVRYXASVFSHPXSAGCEVIAVNXRSXSQXFIYKCDAVLCXLPLGVLKQQPPAVQFVPPLPEWKXSAVQRMGFGNLNKVVLCFDRVFWDPSVNLFGHVGSXXASRGELFLFWNLYKAPILLALVAGEAAGIMENISDDVIVGRCLAILKGIFGSSAVPQPKEXVVSRWRADPWARGSYSYVAAGSSGNDYDLMAQPIXPGPSIPGAPQPIPRLFFAGEHXIRNYPAXVHGALLSGLREAGRIADQFLGAMYXLPRQAXPGVPAQQSP

SEQ ID NO: 14290 - protein, 189 aa, Homo sapiens
  MOD_RES (8)..(8): Selenocysteine
  MOD_RES (56)..(56): Selenocysteine
  MOD_RES (60)..(60): Selenocysteine
  MOD_RES (75)..(75): Selenocysteine
  MOD_RES (80)..(80): Selenocysteine
  MOD_RES (102)..(102): Selenocysteine
  MOD_RES (110)..(110): Selenocysteine
  MOD_RES (121)..(121): Selenocysteine
  MOD_RES (124)..(124): Selenocysteine
  MOD_RES (127)..(127): Selenocysteine
  MOD_RES (138)..(138): Selenocysteine
  MOD_RES (162)..(162): Selenocysteine
EYDELAEXQGKLEEKLQELEANPPSPLFFCSDVYLSSRDRQILDWHFANLEFANAXPLSXLSLKHWDQDDDFEFXGSHLXVRNGYSCVPVALAEGLDIKLNXAVRQVRYXASGCEVIAVNXRSXSQXFIYKCDAVLCXLPLGVLKQQPPAVQFVPPLPEWKXSAVQRMGFGNLNKVVLCFDRVFWDPSV

SEQ ID NO: 14291 - protein, 876 aa, Homo sapiens
  MOD_RES (19)..(19): Selenocysteine
  MOD_RES (21)..(21): Selenocysteine
  MOD_RES (27)..(27): Selenocysteine
  MOD_RES (59)..(59): Selenocysteine
  MOD_RES (88)..(88): Selenocysteine
  MOD_RES (95)..(95): Selenocysteine
  MOD_RES (99)..(99): Selenocysteine
  MOD_RES (104)..(104): Selenocysteine
  MOD_RES (110)..(110): Selenocysteine
  MOD_RES (209)..(209): Selenocysteine
  MOD_RES (226)..(226): Selenocysteine
  MOD_RES (237)..(237): Selenocysteine
  MOD_RES (250)..(250): Selenocysteine
  MOD_RES (254)..(254): Selenocysteine
  MOD_RES (266)..(266): Selenocysteine
  MOD_RES (295)..(295): Selenocysteine
  MOD_RES (298)..(298): Selenocysteine
  MOD_RES (325)..(325): Selenocysteine
  MOD_RES (339)..(339): Selenocysteine
  MOD_RES (355)..(355): Selenocysteine
  MOD_RES (391)..(391): Selenocysteine
  MOD_RES (413)..(413): Selenocysteine
  MOD_RES (461)..(461): Selenocysteine
  MOD_RES (499)..(499): Selenocysteine
  MOD_RES (512)..(512): Selenocysteine
  MOD_RES (524)..(524): Selenocysteine
  MOD_RES (566)..(566): Selenocysteine
  MOD_RES (570)..(570): Selenocysteine
  MOD_RES (585)..(585): Selenocysteine
  MOD_RES (590)..(590): Selenocysteine
  MOD_RES (612)..(612): Selenocysteine
  MOD_RES (620)..(620): Selenocysteine
  MOD_RES (631)..(631): Selenocysteine
  MOD_RES (634)..(634): Selenocysteine
  MOD_RES (637)..(637): Selenocysteine
  MOD_RES (648)..(648): Selenocysteine
  MOD_RES (672)..(672): Selenocysteine
  MOD_RES (708)..(709): Selenocysteine
  MOD_RES (770)..(770): Selenocysteine
  MOD_RES (805)..(805): Selenocysteine
  MOD_RES (827)..(827): Selenocysteine
  MOD_RES (834)..(834): Selenocysteine
  MOD_RES (859)..(859): Selenocysteine
  MOD_RES (865)..(865): Selenocysteine
MLSGKKAAAAAAAAAAAAXGXEAGPGXAGGSENGSEVAAQPAGLSGPAEVGPGAVGERXPRKKEPPRASPPGGLAEPPGSAGPQAGPXVVPGSAXPMEXGIAEXPEGRRXSRRKRAKVEYREMDESLANLSEDEYYSEEERNAKAEKEKKLPPPPPQAPPEEENESEPEEPSGQAGGLQDDSSGGYGDGQASGVEGAAFQSRLPHDRMXSQEAACFPDIISGPQQXQKVFLFIRNRXLQLWLDNPKIQLXFEAXLQQLEAPYNSDXVLVHRVHSYLERHGLINFGIYKRIKPLPXKKXGKVIIIGSGVSGLAAARQLQSFGMDVXLLEARDRVGGRVAXFRKGNYVADLGAMVVXGLGGNPMAVVSKQVNMELAKIKQKCPLYEANGQADXVKVPKEKDEMVEQEFNRLLEAXSYLSHQLDFNVLNNKPVSLGQALEVVIQLQEKHVKDEQIEHWKKIVKXQEELKELLNKMVNLKEKIKELHQQYKEASEVKPPRDIXAEFLVKSKHRDLXALCKEYDELAEXQGKLEEKLQELEANPPSDVYLSSRDRQILDWHFANLEFANAXPLSXLSLKHWDQDDDFEFXGSHLXVRNGYSCVPVALAEGLDIKLNXAVRQVRYXASGCEVIAVNXRSXSQXFIYKCDAVLCXLPLGVLKQQPPAVQFVPPLPEWKXSAVQRMGFGNLNKVVLCFDRVFWDPSVNLFGHVGSXXASRGELFLFWNLYKAPILLALVAGEAAGIMENISDDVIVGRCLAILKGIFGSSAVPQPKEXVVSRWRADPWARGSYSYVAAGSSGNDYDLMAQPIXPGPSIPGAPQPIPRLFFAGEHXIRNYPAXVHGALLSGLREAGRIADQFLGAMYXLPRQAXPGVPAQQSPSM

SEQ ID NO: 14292 - protein, 852 aa, Homo sapiens
  MOD_RES (19)..(19): Selenocysteine
  MOD_RES (21)..(21): Selenocysteine
  MOD_RES (27)..(27): Selenocysteine
  MOD_RES (59)..(59): Selenocysteine
  MOD_RES (88)..(88): Selenocysteine
  MOD_RES (95)..(95): Selenocysteine
  MOD_RES (99)..(99): Selenocysteine
  MOD_RES (104)..(104): Selenocysteine
  MOD_RES (110)..(110): Selenocysteine
  MOD_RES (189)..(189): Selenocysteine
  MOD_RES (206)..(206): Selenocysteine
  MOD_RES (217)..(217): Selenocysteine
  MOD_RES (230)..(230): Selenocysteine
  MOD_RES (234)..(234): Selenocysteine
  MOD_RES (246)..(246): Selenocysteine
  MOD_RES (275)..(275): Selenocysteine
  MOD_RES (278)..(278): Selenocysteine
  MOD_RES (305)..(305): Selenocysteine
  MOD_RES (319)..(319): Selenocysteine
  MOD_RES (335)..(335): Selenocysteine
  MOD_RES (389)..(389): Selenocysteine
  MOD_RES (437)..(437): Selenocysteine
  MOD_RES (475)..(475): Selenocysteine
  MOD_RES (488)..(488): Selenocysteine
  MOD_RES (500)..(500): Selenocysteine
  MOD_RES (542)..(542): Selenocysteine
  MOD_RES (546)..(546): Selenocysteine
  MOD_RES (561)..(561): Selenocysteine
  MOD_RES (566)..(566): Selenocysteine
  MOD_RES (588)..(588): Selenocysteine
  MOD_RES (596)..(596): Selenocysteine
  MOD_RES (607)..(607): Selenocysteine
  MOD_RES (610)..(610): Selenocysteine
  MOD_RES (613)..(613): Selenocysteine
  MOD_RES (624)..(624): Selenocysteine
  MOD_RES (648)..(648): Selenocysteine
  MOD_RES (684)..(685): Selenocysteine
  MOD_RES (746)..(746): Selenocysteine
  MOD_RES (781)..(781): Selenocysteine
  MOD_RES (803)..(803): Selenocysteine
  MOD_RES (810)..(810): Selenocysteine
  MOD_RES (835)..(835): Selenocysteine
  MOD_RES (841)..(841): Selenocysteine
MLSGKKAAAAAAAAAAAAXGXEAGPGXAGGSENGSEVAAQPAGLSGPAEVGPGAVGERXPRKKEPPRASPPGGLAEPPGSAGPQAGPXVVPGSAXPMEXGIAEXPEGRRXSRRKRAKVEYREMDESLANLSEDEYYSEEERNAKAEKEKKLPPPPPQAPPEEENESEPEEPSGVEGAAFQSRLPHDRMXSQEAACFPDIISGPQQXQKVFLFIRNRXLQLWLDNPKIQLXFEAXLQQLEAPYNSDXVLVHRVHSYLERHGLINFGIYKRIKPLPXKKXGKVIIIGSGVSGLAAARQLQSFGMDVXLLEARDRVGGRVAXFRKGNYVADLGAMVVXGLGGNPMAVVSKQVNMELAKIKQKCPLYEANGQAVPKEKDEMVEQEFNRLLEAXSYLSHQLDFNVLNNKPVSLGQALEVVIQLQEKHVKDEQIEHWKKIVKXQEELKELLNKMVNLKEKIKELHQQYKEASEVKPPRDIXAEFLVKSKHRDLXALCKEYDELAEXQGKLEEKLQELEANPPSDVYLSSRDRQILDWHFANLEFANAXPLSXLSLKHWDQDDDFEFXGSHLXVRNGYSCVPVALAEGLDIKLNXAVRQVRYXASGCEVIAVNXRSXSQXFIYKCDAVLCXLPLGVLKQQPPAVQFVPPLPEWKXSAVQRMGFGNLNKVVLCFDRVFWDPSVNLFGHVGSXXASRGELFLFWNLYKAPILLALVAGEAAGIMENISDDVIVGRCLAILKGIFGSSAVPQPKEXVVSRWRADPWARGSYSYVAAGSSGNDYDLMAQPIXPGPSIPGAPQPIPRLFFAGEHXIRNYPAXVHGALLSGLREAGRIADQFLGAMYXLPRQAXPGVPAQQSPSM

SEQ ID NO: 14293 - protein, 121 aa, Homo sapiens
  MOD_RES (4)..(4): Selenocysteine
  MOD_RES (47)..(47): Selenocysteine
  MOD_RES (54)..(54): Selenocysteine
  MOD_RES (57)..(57): Selenocysteine
  MOD_RES (115)..(115): Selenocysteine
MVLXLGESWPVLVGRRFLSLSAADGSDGSHDSWDVERVAEWPWLSGXIRAVSHXDVXKKDLKVCVEFDGESWRKRRWIEVYSLLRRAFLVEHNLVLAERKSPEISERIVQWPAIXYKPLLD

SEQ ID NO: 14294 - protein, 170 aa, Homo sapiens
  MOD_RES (4)..(4): Selenocysteine
  MOD_RES (47)..(47): Selenocysteine
  MOD_RES (54)..(54): Selenocysteine
  MOD_RES (57)..(57): Selenocysteine
  MOD_RES (115)..(115): Selenocysteine
  MOD_RES (129)..(129): Selenocysteine
  MOD_RES (161)..(161): Selenocysteine
MVLXLGESWPVLVGRRFLSLSAADGSDGSHDSWDVERVAEWPWLSGXIRAVSHXDVXKKDLKVCVEFDGESWRKRRWIEVYSLLRRAFLVEHNLVLAERKSPEISERIVQWPAIXYKPLLDKAGLGSIXSVRFLGDQQRVFLSKDLLKPIQDVNSLRLSLXDNQIVSKEF

SEQ ID NO: 14295 - protein, 711 aa, Homo sapiens
  MOD_RES (4)..(4): Selenocysteine
  MOD_RES (47)..(47): Selenocysteine
  MOD_RES (54)..(54): Selenocysteine
  MOD_RES (57)..(57): Selenocysteine
  MOD_RES (115)..(115): Selenocysteine
  MOD_RES (129)..(129): Selenocysteine
  MOD_RES (161)..(161): Selenocysteine
  MOD_RES (204)..(204): Selenocysteine
  MOD_RES (210)..(210): Selenocysteine
  MOD_RES (220)..(220): Selenocysteine
  MOD_RES (250)..(250): Selenocysteine
  MOD_RES (270)..(270): Selenocysteine
  MOD_RES (294)..(295): Selenocysteine
  MOD_RES (305)..(305): Selenocysteine
  MOD_RES (308)..(308): Selenocysteine
  MOD_RES (319)..(319): Selenocysteine
  MOD_RES (352)..(352): Selenocysteine
  MOD_RES (359)..(359): Selenocysteine
  MOD_RES (377)..(377): Selenocysteine
  MOD_RES (384)..(384): Selenocysteine
  MOD_RES (391)..(391): Selenocysteine
  MOD_RES (395)..(395): Selenocysteine
  MOD_RES (397)..(397): Selenocysteine
  MOD_RES (411)..(411): Selenocysteine
  MOD_RES (420)..(420): Selenocysteine
  MOD_RES (515)..(515): Selenocysteine
  MOD_RES (591)..(591): Selenocysteine
  MOD_RES (607)..(607): Selenocysteine
  MOD_RES (617)..(617): Selenocysteine
  MOD_RES (642)..(642): Selenocysteine
  MOD_RES (667)..(668): Selenocysteine
MVLXLGESWPVLVGRRFLSLSAADGSDGSHDSWDVERVAEWPWLSGXIRAVSHXDVXKKDLKVCVEFDGESWRKRRWIEVYSLLRRAFLVEHNLVLAERKSPEISERIVQWPAIXYKPLLDKAGLGSIXSVRFLGDQQRVFLSKDLLKPIQDVNSLRLSLXDNQIVSKEFQALIVKHLDESHLLKGDKNLVGSEVKIYSLDPSXQWFSAXVINGNPASKXLQVNCEEIPALKIVDPSLIHVEVVHDNLVXCGNSARIGAVKRKSSENNGXLVSKQAKSCSEASPSMCPVQSVPXXVFKEILLGCXAAXPPSKDPRQQSXPQAANSPPNLGAKIPQGCHKQSLPEEISSCLNXKSEALRXKPDVCKAGLLSKSSQIGXGDLKILXEPKGSCXQPKXNXDQENRLESVPQALXGLPKECLPXKASSKAELEIANPPELQKHLEHAPSPSDVSNAPEVKAGVNSDSPNNCSGKKVEPSALACRSQNLKESSVKVDNESCCSRSNNKIQNAPSRKSVLXDPAKLKKLQQSGEAFVQDDSCVNIVAQLPKCRECRLDSLRKDKEQQKDSPVFCRFFHFRRLQFNKHGVLRVEGFLXPNKYDNEAIGLWLPLXKNVVGIDLDXAKYILANIGDHFCQMVISEKEAMSXIEPHRQVAWKRAVKGVREMCDVCDXXIFNLHWVCPRCGFGVCVDCYRMKRKNCQQGENRFDSPPAPLHS

SEQ ID NO: 14296 - protein, 1321 aa, Homo sapiens
  MOD_RES (4)..(4): Selenocysteine
  MOD_RES (47)..(47): Selenocysteine
  MOD_RES (54)..(54): Selenocysteine
  MOD_RES (57)..(57): Selenocysteine
  MOD_RES (115)..(115): Selenocysteine
  MOD_RES (129)..(129): Selenocysteine
  MOD_RES (161)..(161): Selenocysteine
  MOD_RES (204)..(204): Selenocysteine
  MOD_RES (210)..(210): Selenocysteine
  MOD_RES (220)..(220): Selenocysteine
  MOD_RES (250)..(250): Selenocysteine
  MOD_RES (270)..(270): Selenocysteine
  MOD_RES (294)..(295): Selenocysteine
  MOD_RES (305)..(305): Selenocysteine
  MOD_RES (308)..(308): Selenocysteine
  MOD_RES (319)..(319): Selenocysteine
  MOD_RES (352)..(352): Selenocysteine
  MOD_RES (359)..(359): Selenocysteine
  MOD_RES (377)..(377): Selenocysteine
  MOD_RES (384)..(384): Selenocysteine
  MOD_RES (391)..(391): Selenocysteine
  MOD_RES (395)..(395): Selenocysteine
  MOD_RES (397)..(397): Selenocysteine
  MOD_RES (411)..(411): Selenocysteine
  MOD_RES (420)..(420): Selenocysteine
  MOD_RES (515)..(515): Selenocysteine
  MOD_RES (591)..(591): Selenocysteine
  MOD_RES (607)..(607): Selenocysteine
  MOD_RES (617)..(617): Selenocysteine
  MOD_RES (642)..(642): Selenocysteine
  MOD_RES (667)..(668): Selenocysteine
  MOD_RES (703)..(703): Selenocysteine
  MOD_RES (723)..(723): Selenocysteine
  MOD_RES (773)..(773): Selenocysteine
  MOD_RES (781)..(781): Selenocysteine
  MOD_RES (818)..(818): Selenocysteine
  MOD_RES (828)..(828): Selenocysteine
  MOD_RES (842)..(842): Selenocysteine
  MOD_RES (864)..(864): Selenocysteine
  MOD_RES (868)..(868): Selenocysteine
  MOD_RES (872)..(872): Selenocysteine
  MOD_RES (875)..(875): Selenocysteine
  MOD_RES (893)..(893): Selenocysteine
  MOD_RES (896)..(896): Selenocysteine
  MOD_RES (903)..(903): Selenocysteine
  MOD_RES (919)..(920): Selenocysteine
  MOD_RES (931)..(931): Selenocysteine
  MOD_RES (941)..(941): Selenocysteine
  MOD_RES (1011)..(1011): Selenocysteine
  MOD_RES (1016)..(1016): Selenocysteine
  MOD_RES (1019)..(1019): Selenocysteine
  MOD_RES (1075)..(1075): Selenocysteine
  MOD_RES (1108)..(1108): Selenocysteine
  MOD_RES (1116)..(1117): Selenocysteine
  MOD_RES (1149)..(1149): Selenocysteine
  MOD_RES (1159)..(1159): Selenocysteine
  MOD_RES (1182)..(1182): Selenocysteine
  MOD_RES (1277)..(1277): Selenocysteine
  MOD_RES (1286)..(1286): Selenocysteine
  MOD_RES (1288)..(1288): Selenocysteine
MVLXLGESWPVLVGRRFLSLSAADGSDGSHDSWDVERVAEWPWLSGXIRAVSHXDVXKKDLKVCVEFDGESWRKRRWIEVYSLLRRAFLVEHNLVLAERKSPEISERIVQWPAIXYKPLLDKAGLGSIXSVRFLGDQQRVFLSKDLLKPIQDVNSLRLSLXDNQIVSKEFQALIVKHLDESHLLKGDKNLVGSEVKIYSLDPSXQWFSAXVINGNPASKXLQVNCEEIPALKIVDPSLIHVEVVHDNLVXCGNSARIGAVKRKSSENNGXLVSKQAKSCSEASPSMCPVQSVPXXVFKEILLGCXAAXPPSKDPRQQSXPQAANSPPNLGAKIPQGCHKQSLPEEISSCLNXKSEALRXKPDVCKAGLLSKSSQIGXGDLKILXEPKGSCXQPKXNXDQENRLESVPQALXGLPKECLPXKASSKAELEIANPPELQKHLEHAPSPSDVSNAPEVKAGVNSDSPNNCSGKKVEPSALACRSQNLKESSVKVDNESCCSRSNNKIQNAPSRKSVLXDPAKLKKLQQSGEAFVQDDSCVNIVAQLPKCRECRLDSLRKDKEQQKDSPVFCRFFHFRRLQFNKHGVLRVEGFLXPNKYDNEAIGLWLPLXKNVVGIDLDXAKYILANIGDHFCQMVISEKEAMSXIEPHRQVAWKRAVKGVREMCDVCDXXIFNLHWVCPRCGFGVCVDCYRMKRKNCQQGAAYKXFSWLKCVKSQIHEPENLMPXQIIPGKALYDVGDIVHSVRAKWGIKANCPCSNRQFKLFSKPASKEDLKQXSLAGEKPXLGAVLQQNPSVLEPAAVGGEAASKPAGSMKPACPASXSPLNWLADLXSGNVNKENKEKQPXMPILKNEIKCLPPLPPLSKSSXVLHXFNSXILXPVSNNNSGFLRNLLNSSXGKXENGLKNXPKILDDIFASLVQNKXXSDLSKRPQGLXIKPSILGFDXPHYWLCDNRLLCLQDPNNKSNWNVFRECWKQGQPVMVSGVHHKLNSELWKPESFRKEFGEQEVDLVNCRXNEIIXGAXVGDFWDGFEDVPNRLKNEKEPMVLKLKDWPPGEDFRDMMPSRFDDLMANIPLPEYXRRDGKLNLASRLPNYFVRPDLGPKMYNAYGLIXPEDRKYGXXNLHLDVSDAANVMVYVGIPKGQCEQEEEVLKXIQDGDSDELXIKRFIEGKEKPGALWHIYAAKDXEKIREFLKKVSEEQGQENPADHDPIHDQSWYLDRSLRKRLHQEYGVQGWAIVQFLGDVVFIPAGAPHQVHNLYSCIKVAEDFVSPEHVKHCFWLXQEFRYLSQXHXNHEDKLQVKNVIYHAVKDAVAMLKASESSFGKP

SEQ ID NO: 14297 - protein, 1327 aa, Homo sapiens
  MOD_RES (4)..(4): Selenocysteine
  MOD_RES (47)..(47): Selenocysteine
  MOD_RES (54)..(54): Selenocysteine
  MOD_RES (57)..(57): Selenocysteine
  MOD_RES (115)..(115): Selenocysteine
  MOD_RES (129)..(129): Selenocysteine
  MOD_RES (161)..(161): Selenocysteine
  MOD_RES (204)..(204): Selenocysteine
  MOD_RES (210)..(210): Selenocysteine
  MOD_RES (220)..(220): Selenocysteine
  MOD_RES (250)..(250): Selenocysteine
  MOD_RES (270)..(270): Selenocysteine
  MOD_RES (294)..(295): Selenocysteine
  MOD_RES (305)..(305): Selenocysteine
  MOD_RES (308)..(308): Selenocysteine
  MOD_RES (319)..(319): Selenocysteine
  MOD_RES (352)..(352): Selenocysteine
  MOD_RES (359)..(359): Selenocysteine
  MOD_RES (377)..(377): Selenocysteine
  MOD_RES (384)..(384): Selenocysteine
  MOD_RES (391)..(391): Selenocysteine
  MOD_RES (395)..(395): Selenocysteine
  MOD_RES (397)..(397): Selenocysteine
  MOD_RES (411)..(411): Selenocysteine
  MOD_RES (420)..(420): Selenocysteine
  MOD_RES (515)..(515): Selenocysteine
  MOD_RES (591)..(591): Selenocysteine
  MOD_RES (607)..(607): Selenocysteine
  MOD_RES (617)..(617): Selenocysteine
  MOD_RES (642)..(642): Selenocysteine
  MOD_RES (667)..(668): Selenocysteine
  MOD_RES (703)..(703): Selenocysteine
  MOD_RES (723)..(723): Selenocysteine
  MOD_RES (773)..(773): Selenocysteine
  MOD_RES (781)..(781): Selenocysteine
  MOD_RES (818)..(818): Selenocysteine
  MOD_RES (828)..(828): Selenocysteine
  MOD_RES (842)..(842): Selenocysteine
  MOD_RES (864)..(864): Selenocysteine
  MOD_RES (868)..(868): Selenocysteine
  MOD_RES (872)..(872): Selenocysteine
  MOD_RES (875)..(875): Selenocysteine
  MOD_RES (893)..(893): Selenocysteine
  MOD_RES (896)..(896): Selenocysteine
  MOD_RES (903)..(903): Selenocysteine
  MOD_RES (919)..(920): Selenocysteine
  MOD_RES (931)..(931): Selenocysteine
  MOD_RES (941)..(941): Selenocysteine
  MOD_RES (1011)..(1011): Selenocysteine
  MOD_RES (1016)..(1016): Selenocysteine
  MOD_RES (1019)..(1019): Selenocysteine
  MOD_RES (1075)..(1075): Selenocysteine
  MOD_RES (1108)..(1108): Selenocysteine
  MOD_RES (1116)..(1117): Selenocysteine
  MOD_RES (1149)..(1149): Selenocysteine
  MOD_RES (1159)..(1159): Selenocysteine
  MOD_RES (1182)..(1182): Selenocysteine
  MOD_RES (1277)..(1277): Selenocysteine
  MOD_RES (1286)..(1286): Selenocysteine
  MOD_RES (1288)..(1288): Selenocysteine
MVLXLGESWPVLVGRRFLSLSAADGSDGSHDSWDVERVAEWPWLSGXIRAVSHXDVXKKDLKVCVEFDGESWRKRRWIEVYSLLRRAFLVEHNLVLAERKSPEISERIVQWPAIXYKPLLDKAGLGSIXSVRFLGDQQRVFLSKDLLKPIQDVNSLRLSLXDNQIVSKEFQALIVKHLDESHLLKGDKNLVGSEVKIYSLDPSXQWFSAXVINGNPASKXLQVNCEEIPALKIVDPSLIHVEVVHDNLVXCGNSARIGAVKRKSSENNGXLVSKQAKSCSEASPSMCPVQSVPXXVFKEILLGCXAAXPPSKDPRQQSXPQAANSPPNLGAKIPQGCHKQSLPEEISSCLNXKSEALRXKPDVCKAGLLSKSSQIGXGDLKILXEPKGSCXQPKXNXDQENRLESVPQALXGLPKECLPXKASSKAELEIANPPELQKHLEHAPSPSDVSNAPEVKAGVNSDSPNNCSGKKVEPSALACRSQNLKESSVKVDNESCCSRSNNKIQNAPSRKSVLXDPAKLKKLQQSGEAFVQDDSCVNIVAQLPKCRECRLDSLRKDKEQQKDSPVFCRFFHFRRLQFNKHGVLRVEGFLXPNKYDNEAIGLWLPLXKNVVGIDLDXAKYILANIGDHFCQMVISEKEAMSXIEPHRQVAWKRAVKGVREMCDVCDXXIFNLHWVCPRCGFGVCVDCYRMKRKNCQQGAAYKXFSWLKCVKSQIHEPENLMPXQIIPGKALYDVGDIVHSVRAKWGIKANCPCSNRQFKLFSKPASKEDLKQXSLAGEKPXLGAVLQQNPSVLEPAAVGGEAASKPAGSMKPACPASXSPLNWLADLXSGNVNKENKEKQPXMPILKNEIKCLPPLPPLSKSSXVLHXFNSXILXPVSNNNSGFLRNLLNSSXGKXENGLKNXPKILDDIFASLVQNKXXSDLSKRPQGLXIKPSILGFDXPHYWLCDNRLLCLQDPNNKSNWNVFRECWKQGQPVMVSGVHHKLNSELWKPESFRKEFGEQEVDLVNCRXNEIIXGAXVGDFWDGFEDVPNRLKNEKEPMVLKLKDWPPGEDFRDMMPSRFDDLMANIPLPEYXRRDGKLNLASRLPNYFVRPDLGPKMYNAYGLIXPEDRKYGXXNLHLDVSDAANVMVYVGIPKGQCEQEEEVLKXIQDGDSDELXIKRFIEGKEKPGALWHIYAAKDXEKIREFLKKVSEEQGQENPADHDPIHDQSWYLDRSLRKRLHQEYGVQGWAIVQFLGDVVFIPAGAPHQVHNLYSCIKVAEDFVSPEHVKHCFWLXQEFRYLSQXHXNHEDKLQVKNVIYHAVKDAVAMLKVNPVLANLNLPAHWK

SEQ ID NO: 14298 - protein, 274 aa, Homo sapiens
  MOD_RES (57)..(57): Selenocysteine
  MOD_RES (59)..(59): Selenocysteine
  MOD_RES (97)..(97): Selenocysteine
  MOD_RES (113)..(113): Selenocysteine
  MOD_RES (162)..(162): Selenocysteine
  MOD_RES (170)..(170): Selenocysteine
  MOD_RES (199)..(199): Selenocysteine
IFVEFDGCNWKQHSWVKVHAEEVIVLLLEGSLVWAPREDPVLLQGIRVSIAQWPALXFXPLVDKLGLGSVVPVEYLLDRELRFLSDANGLHLFQMGXDSQNQILLEHAALREXVNALISDQKLQEIFSRGPYSVQGHRVKIYQPEGEEGWLYGVVSHQDSIXRLMEVSVXESGEIKSVDPRLIHVMLMDNSAPQSEGGXLKAVKSSKGKKKRESIEGKDGRRRKSASDSGCDPASKKLKGDRGEVDSNGSDGDKPQHSLCHLHQRKRQDSGGAG

SEQ ID NO: 14299 - protein, 1761 aa, Homo sapiens
  MOD_RES (20)..(20): Selenocysteine
  MOD_RES (44)..(44): Selenocysteine
  MOD_RES (51)..(51): Selenocysteine
  MOD_RES (121)..(121): Selenocysteine
  MOD_RES (123)..(123): Selenocysteine
  MOD_RES (161)..(161): Selenocysteine
  MOD_RES (177)..(177): Selenocysteine
  MOD_RES (226)..(226): Selenocysteine
  MOD_RES (234)..(234): Selenocysteine
  MOD_RES (263)..(263): Selenocysteine
  MOD_RES (345)..(345): Selenocysteine
  MOD_RES (358)..(358): Selenocysteine
  MOD_RES (360)..(360): Selenocysteine
  MOD_RES (366)..(366): Selenocysteine
  MOD_RES (378)..(378): Selenocysteine
  MOD_RES (383)..(383): Selenocysteine
  MOD_RES (387)..(387): Selenocysteine
  MOD_RES (389)..(389): Selenocysteine
  MOD_RES (392)..(392): Selenocysteine
  MOD_RES (409)..(409): Selenocysteine
  MOD_RES (425)..(426): Selenocysteine
  MOD_RES (430)..(430): Selenocysteine
  MOD_RES (433)..(433): Selenocysteine
  MOD_RES (439)..(439): Selenocysteine
  MOD_RES (445)..(445): Selenocysteine
  MOD_RES (484)..(484): Selenocysteine
  MOD_RES (498)..(498): Selenocysteine
  MOD_RES (519)..(519): Selenocysteine
  MOD_RES (533)..(533): Selenocysteine
  MOD_RES (536)..(536): Selenocysteine
  MOD_RES (541)..(542): Selenocysteine
  MOD_RES (577)..(577): Selenocysteine
  MOD_RES (579)..(579): Selenocysteine
  MOD_RES (600)..(600): Selenocysteine
  MOD_RES (602)..(602): Selenocysteine
  MOD_RES (614)..(614): Selenocysteine
  MOD_RES (664)..(665): Selenocysteine
  MOD_RES (667)..(667): Selenocysteine
  MOD_RES (695)..(696): Selenocysteine
  MOD_RES (711)..(711): Selenocysteine
  MOD_RES (729)..(729): Selenocysteine
  MOD_RES (733)..(733): Selenocysteine
  MOD_RES (740)..(740): Selenocysteine
  MOD_RES (746)..(746): Selenocysteine
  MOD_RES (751)..(751): Selenocysteine
  MOD_RES (764)..(764): Selenocysteine
  MOD_RES (814)..(814): Selenocysteine
  MOD_RES (832)..(832): Selenocysteine
  MOD_RES (872)..(872): Selenocysteine
  MOD_RES (934)..(934): Selenocysteine
  MOD_RES (948)..(948): Selenocysteine
  MOD_RES (986)..(986): Selenocysteine
  MOD_RES (1036)..(1037): Selenocysteine
  MOD_RES (1068)..(1068): Selenocysteine
  MOD_RES (1096)..(1096): Selenocysteine
  MOD_RES (1102)..(1102): Selenocysteine
  MOD_RES (1140)..(1140): Selenocysteine
  MOD_RES (1159)..(1160): Selenocysteine
  MOD_RES (1171)..(1172): Selenocysteine
  MOD_RES (1184)..(1184): Selenocysteine
  MOD_RES (1194)..(1194): Selenocysteine
  MOD_RES (1215)..(1215): Selenocysteine
  MOD_RES (1230)..(1230): Selenocysteine
  MOD_RES (1237)..(1237): Selenocysteine
  MOD_RES (1263)..(1263): Selenocysteine
  MOD_RES (1270)..(1270): Selenocysteine
  MOD_RES (1282)..(1282): Selenocysteine
  MOD_RES (1288)..(1288): Selenocysteine
  MOD_RES (1307)..(1307): Selenocysteine
  MOD_RES (1311)..(1311): Selenocysteine
  MOD_RES (1321)..(1321): Selenocysteine
  MOD_RES (1349)..(1349): Selenocysteine
  MOD_RES (1360)..(1360): Selenocysteine
  MOD_RES (1362)..(1362): Selenocysteine
  MOD_RES (1380)..(1380): Selenocysteine
  MOD_RES (1500)..(1500): Selenocysteine
  MOD_RES (1515)..(1515): Selenocysteine
  MOD_RES (1548)..(1548): Selenocysteine
  MOD_RES (1556)..(1557): Selenocysteine
  MOD_RES (1589)..(1589): Selenocysteine
  MOD_RES (1599)..(1599): Selenocysteine
  MOD_RES (1657)..(1657): Selenocysteine
  MOD_RES (1717)..(1717): Selenocysteine
  MOD_RES (1726)..(1726): Selenocysteine
  MOD_RES (1728)..(1728): Selenocysteine
  MOD_RES (1750)..(1750): Selenocysteine
MADAAASPVGKRLLLLFADXAASASASAPAAAAASGDPGPALRXRAWRAGXVRAMSGAVPQDLAIFVEFDGCNWKQHSWVKVHAEEVIVLLLEGSLVWAPREDPVLLQGIRVSIAQWPALXFXPLVDKLGLGSVVPVEYLLDRELRFLSDANGLHLFQMGXDSQNQILLEHAALREXVNALISDQKLQEIFSRGPYSVQGHRVKIYQPEGEEGWLYGVVSHQDSIXRLMEVSVXESGEIKSVDPRLIHVMLMDNSAPQSEGGXLKAVKSSKGKKKRESIEGKDGRRRKSASDSGCDPASKKLKGDRGEVDSNGSDGGEASRGPWKGGNASGEPGLDQRAKQPPSXFVPQINRNIRFAXYXKENGRXLVVQDEPVGGDXPASFXPYSXAXGQXPLAPEVGGAENKEAGKXLEQVGQGIVASAAVVXXASSXPNXVRISDXGLAAGXVPEKQKGSRSQASGENSRNSILASSGFGAPLPSSSQPLXFGSGRSQSNGVLAXENKPLGFSFGCSSAQEAQKDXDLSKNLFFQCMSQXLPXSNYFXXVSESLADDSSSRDSFKQSLESLSSGLCKGRSVLGXDXKPGSKAGSSVDRKVPAESMPXLXPAFPRSLLNARXPENHENLFLQPPKLSREEPSNPFLAFVEKVEHSPFSSFASQASGSSSSAXXVXSKVAPSWPESHSSADSASLAKKKPLFIXXDSSKLVSGVLGSALXSGGPSLSAMGNGRSSSPXSSLXQPIEMPXLSSSPXEERPXVGPGQQDNPLLKXFSNVFGRHSGGFLSSPADFSQENKAPFEAVKRFSLDERSLACRQDSDSSXNSDLSDLSDSEEQLQAKXGLKGIPEHLMGKLGPNGERSAELLLGKSKGKQAPKGRPRXAPLKVGQSVLKDVSKVKKLKQSGEPFLQDGSCINVAPHLHKCRECRLERYRKFKEQEQDDSXVACRFFHFRRLIFXRKGVLRVEGFLSPQQSDPDAMNLWIPSSSLAEGIDLEXSKYILANVGDQFCQLVMSEKEAMMMVEPHQKVAWKRAVRGVREMCDVCEXXLFNIHWVCRKCGFGVCLDCYRLRKSRPRSEXEEMGDEEVFSWLKCAKGQSHEPENLMPXQIIPGXALYNIGDMVHAARGKWGIKANCPCISRQNKSVLRPAVXNGMSQLPSINPSASSGNEXXFSGGGGPAPVXXPEPDHVPKADSXDIRSEEPLKXDSSASNSNSELKAIRPPCPDXAPPSSALHWLADLAXQKAKEEXKEAGSLRSVLNKESHSPFGLDSFNSXAKVSPLXPKLFNSLLLGPXASNNKXEGSSLRDLLHSGPGKLPQXPLDXGIPFPPVFSXSSAGVKSKASLPNFLDHIIASVVENKKXSDASKRACNLXDXQKEVKEMVMGLNVLDPHXSHSWLCDGRLLCLHDPSNKNNWKIFRECWKQGQPVLVSGVHKKLKSELWKPEAFSQEFGDQDVDLVNCRNCAIISDVKVRDFWDGFEIICKRLRSEDGQPMVLKLKDWPPGEDFRDMMPXRFEDLMENLPLPEYXKRDGRLNLASRLPSYFVRPDLGPKMYNAYGLIXAEDRRVGXXNLHLDVSDAVNVMVYVGIPIGEGAHDEEVLKXIDEGDADEVXKQRIHDGKEKPGALWHIYAAKDAEKIRELLRKVGEEQGQENPPDHDPIHDQSWYLDQXLRKRLYEEYGVQGWAIVQFLGDAVFIPAGAPHQVHNLYSCIKVAEDFVSPEHVKHCFRLXQEFRHLSNXHXNHEDKLQVKNIIYHAVKDAVGXLKAHESKLARS

SEQ ID NO: 14300 - protein, 759 aa, Homo sapiens
  MOD_RES (34)..(35): Selenocysteine
  MOD_RES (66)..(66): Selenocysteine
  MOD_RES (94)..(94): Selenocysteine
  MOD_RES (100)..(100): Selenocysteine
  MOD_RES (138)..(138): Selenocysteine
  MOD_RES (157)..(158): Selenocysteine
  MOD_RES (169)..(170): Selenocysteine
  MOD_RES (182)..(182): Selenocysteine
  MOD_RES (192)..(192): Selenocysteine
  MOD_RES (213)..(213): Selenocysteine
  MOD_RES (228)..(228): Selenocysteine
  MOD_RES (235)..(235): Selenocysteine
  MOD_RES (261)..(261): Selenocysteine
  MOD_RES (268)..(268): Selenocysteine
  MOD_RES (280)..(280): Selenocysteine
  MOD_RES (286)..(286): Selenocysteine
  MOD_RES (305)..(305): Selenocysteine
  MOD_RES (309)..(309): Selenocysteine
  MOD_RES (319)..(319): Selenocysteine
  MOD_RES (347)..(347): Selenocysteine
  MOD_RES (358)..(358): Selenocysteine
  MOD_RES (360)..(360): Selenocysteine
  MOD_RES (378)..(378): Selenocysteine
  MOD_RES (498)..(498): Selenocysteine
  MOD_RES (513)..(513): Selenocysteine
  MOD_RES (546)..(546): Selenocysteine
  MOD_RES (554)..(555): Selenocysteine
  MOD_RES (587)..(587): Selenocysteine
  MOD_RES (597)..(597): Selenocysteine
  MOD_RES (655)..(655): Selenocysteine
  MOD_RES (715)..(715): Selenocysteine
  MOD_RES (724)..(724): Selenocysteine
  MOD_RES (726)..(726): Selenocysteine
  MOD_RES (748)..(748): Selenocysteine
MSEKEAMMMVEPHQKVAWKRAVRGVREMCDVCEXXLFNIHWVCRKCGFGVCLDCYRLRKSRPRSEXEEMGDEEVFSWLKCAKGQSHEPENLMPXQIIPGXALYNIGDMVHAARGKWGIKANCPCISRQNKSVLRPAVXNGMSQLPSINPSASSGNEXXFSGGGGPAPVXXPEPDHVPKADSXDIRSEEPLKXDSSASNSNSELKAIRPPCPDXAPPSSALHWLADLAXQKAKEEXKEAGSLRSVLNKESHSPFGLDSFNSXAKVSPLXPKLFNSLLLGPXASNNKXEGSSLRDLLHSGPGKLPQXPLDXGIPFPPVFSXSSAGVKSKASLPNFLDHIIASVVENKKXSDASKRACNLXDXQKEVKEMVMGLNVLDPHXSHSWLCDGRLLCLHDPSNKNNWKIFRECWKQGQPVLVSGVHKKLKSELWKPEAFSQEFGDQDVDLVNCRNCAIISDVKVRDFWDGFEIICKRLRSEDGQPMVLKLKDWPPGEDFRDMMPXRFEDLMENLPLPEYXKRDGRLNLASRLPSYFVRPDLGPKMYNAYGLIXAEDRRVGXXNLHLDVSDAVNVMVYVGIPIGEGAHDEEVLKXIDEGDADEVXKQRIHDGKEKPGALWHIYAAKDAEKIRELLRKVGEEQGQENPPDHDPIHDQSWYLDQXLRKRLYEEYGVQGWAIVQFLGDAVFIPAGAPHQVHNLYSCIKVAEDFVSPEHVKHCFRLXQEFRHLSNXHXNHEDKLQVKNIIYHAVKDAVGXLKAHESKLARS

SEQ ID NO: 14301 - protein, 20 aa, Homo sapiens
VPEKQKGSRSQASGELASQC

SEQ ID NO: 14302 - protein, 1064 aa, Homo sapiens
  MOD_RES (7)..(7): Selenocysteine
  MOD_RES (16)..(16): Selenocysteine
  MOD_RES (20)..(20): Selenocysteine
  MOD_RES (76)..(76): Selenocysteine
  MOD_RES (83)..(83): Selenocysteine
  MOD_RES (93)..(93): Selenocysteine
  MOD_RES (108)..(108): Selenocysteine
  MOD_RES (126)..(126): Selenocysteine
  MOD_RES (139)..(139): Selenocysteine
  MOD_RES (155)..(155): Selenocysteine
  MOD_RES (167)..(167): Selenocysteine
  MOD_RES (173)..(173): Selenocysteine
  MOD_RES (183)..(183): Selenocysteine
  MOD_RES (189)..(189): Selenocysteine
  MOD_RES (243)..(243): Selenocysteine
  MOD_RES (261)..(261): Selenocysteine
  MOD_RES (270)..(270): Selenocysteine
  MOD_RES (289)..(289): Selenocysteine
  MOD_RES (293)..(293): Selenocysteine
  MOD_RES (339)..(339): Selenocysteine
  MOD_RES (344)..(344): Selenocysteine
  MOD_RES (347)..(347): Selenocysteine
  MOD_RES (387)..(387): Selenocysteine
  MOD_RES (396)..(396): Selenocysteine
  MOD_RES (428)..(428): Selenocysteine
  MOD_RES (440)..(440): Selenocysteine
  MOD_RES (452)..(452): Selenocysteine
  MOD_RES (460)..(460): Selenocysteine
  MOD_RES (527)..(527): Selenocysteine
  MOD_RES (539)..(539): Selenocysteine
  MOD_RES (543)..(543): Selenocysteine
  MOD_RES (555)..(555): Selenocysteine
  MOD_RES (561)..(561): Selenocysteine
  MOD_RES (620)..(620): Selenocysteine
  MOD_RES (625)..(625): Selenocysteine
  MOD_RES (633)..(633): Selenocysteine
  MOD_RES (660)..(660): Selenocysteine
  MOD_RES (676)..(676): Selenocysteine
  MOD_RES (702)..(702): Selenocysteine
  MOD_RES (712)..(712): Selenocysteine
  MOD_RES (714)..(714): Selenocysteine
  MOD_RES (718)..(718): Selenocysteine
  MOD_RES (724)..(724): Selenocysteine
  MOD_RES (732)..(732): Selenocysteine
  MOD_RES (840)..(840): Selenocysteine
  MOD_RES (854)..(854): Selenocysteine
  MOD_RES (880)..(880): Selenocysteine
  MOD_RES (900)..(900): Selenocysteine
  MOD_RES (923)..(924): Selenocysteine
  MOD_RES (926)..(926): Selenocysteine
  MOD_RES (968)..(968): Selenocysteine
  MOD_RES (1005)..(1005): Selenocysteine
  MOD_RES (1031)..(1031): Selenocysteine
MASESEXLNPSARIMXFYPXMEEFRNFSRYIAYIESQGAHRAGLAKVVPPKEWKPRASYDDIDDLVIPAPIQQLVXGQSGLFXQYNIQKKAMXVREFRKIANSDKYCXPRYSEFEELERKYWKNLXFNPPIYGADVNGXLYEKHVDEWNIGRLRXILDLVEKESGIXIEGVNXPYLYFGMWKXSFAWHXEDMDLYSINYLHFGEPKSWYSVPPEHGKRLERLAKGFFPGSAQSCEAFLRHKMXLISPLMLKKYGIPFDKVXQEAGEFMIXFPYGYHAGFNHGFNCAESXNFAXRRWIEYGKQAVLCSCRKDMVKISMDVFVRKFQPERYKLWKAGKDNXVIDHXLPXPEAAEFLKESELPPRAGNEEECPEEDMEGVEDGEEGDLKXSLAKHRIGXKRHRVCLEIPQEVSQSELFPKEDLSSEQYEMXECPAALAPVRPXHSSVRQVEDGLXFPDYSDSXEVKFEELKNVKLEEEDEEEEQAAAALDLSVNPASVGGRLVFSGSKKKSSSSLGSGSSRDSISSDSEXSEPLSCRAQGQXGVLXVHSYAKGDGRVXVGEPCXRKKGSAARSFSERELAEVADEYMFSLEENKKSKGRRQPLSKLPRHHPLVLQECVSDDEXSEQLXPEEEAEEXEAWAKPLSQLWQNRPPNFEAEKEFNEXMAQQAPHCAVCMIFQXYHQVEFGGFNQNCGNASDLAPQKQRXKPLIPEMCFXSXGCSXDINLSXPYLEEDGXSILVSCKKCSVRVHASCYGVPPAKASEDWMCSRCSANALEEDCCLCSLRGGALQRANDDRWVHVSCAVAILEARFVNIAERSPVDVSKIPLPRFKLKCIFCKKRRKRXAGCCVQCSHGRCPXAFHVSCAQAAGVMMQPDDWPFVVFIXCFRHKIPNLERAKGALQSIXAGQKVISKHKNGRFYQCEVVRLXXEXFYEVNFDDGSFSDNLYPEDIVSQDCLQFGPPAEGEVVQVRWXDGQVYGAKFVASHPIQMYQVEFEDGSQLVVKRDDVYXLDEELPKRVKSRLSVASDMRFNEIFXEKEVKQEKKRQRVINSRYREDYIEPALYRAIME

SEQ ID NO: 14303 - protein, 120 aa, Homo sapiens
  MOD_RES (17)..(17): Selenocysteine
  MOD_RES (21)..(21): Selenocysteine
  MOD_RES (59)..(59): Selenocysteine
  MOD_RES (77)..(77): Selenocysteine
  MOD_RES (84)..(84): Selenocysteine
  MOD_RES (94)..(94): Selenocysteine
  MOD_RES (109)..(109): Selenocysteine
MGSEDHGAQNPSCKIMXFRPXMEEFKDFNKYVAYIESQGAHRAGLAKIIPPKEWKPRQXYDDIDDVVIPAPIQQVVXGQSGLFXQYNIQKKAMXVGEYRRLANSEKYCXPRHQDFDDLER

SEQ ID NO: 14304 - protein, 1096 aa, Homo sapiens
  MOD_RES (17)..(17): Selenocysteine
  MOD_RES (21)..(21): Selenocysteine
  MOD_RES (59)..(59): Selenocysteine
  MOD_RES (77)..(77): Selenocysteine
  MOD_RES (84)..(84): Selenocysteine
  MOD_RES (94)..(94): Selenocysteine
  MOD_RES (109)..(109): Selenocysteine
  MOD_RES (127)..(127): Selenocysteine
  MOD_RES (156)..(156): Selenocysteine
  MOD_RES (167)..(167): Selenocysteine
  MOD_RES (174)..(174): Selenocysteine
  MOD_RES (184)..(185): Selenocysteine
  MOD_RES (190)..(190): Selenocysteine
  MOD_RES (244)..(244): Selenocysteine
  MOD_RES (262)..(262): Selenocysteine
  MOD_RES (271)..(271): Selenocysteine
  MOD_RES (290)..(290): Selenocysteine
  MOD_RES (294)..(294): Selenocysteine
  MOD_RES (305)..(305): Selenocysteine
  MOD_RES (308)..(308): Selenocysteine
  MOD_RES (340)..(340): Selenocysteine
  MOD_RES (345)..(345): Selenocysteine
  MOD_RES (348)..(348): Selenocysteine
  MOD_RES (351)..(351): Selenocysteine
  MOD_RES (395)..(395): Selenocysteine
  MOD_RES (448)..(448): Selenocysteine
  MOD_RES (560)..(560): Selenocysteine
  MOD_RES (571)..(571): Selenocysteine
  MOD_RES (587)..(587): Selenocysteine
  MOD_RES (599)..(599): Selenocysteine
  MOD_RES (620)..(620): Selenocysteine
  MOD_RES (680)..(680): Selenocysteine
  MOD_RES (688)..(688): Selenocysteine
  MOD_RES (699)..(699): Selenocysteine
  MOD_RES (715)..(715): Selenocysteine
  MOD_RES (724)..(724): Selenocysteine
  MOD_RES (734)..(734): Selenocysteine
  MOD_RES (740)..(740): Selenocysteine
  MOD_RES (754)..(754): Selenocysteine
  MOD_RES (784)..(784): Selenocysteine
  MOD_RES (794)..(794): Selenocysteine
  MOD_RES (810)..(811): Selenocysteine
  MOD_RES (876)..(876): Selenocysteine
  MOD_RES (881)..(881): Selenocysteine
  MOD_RES (902)..(902): Selenocysteine
  MOD_RES (927)..(927): Selenocysteine
  MOD_RES (946)..(946): Selenocysteine
  MOD_RES (967)..(967): Selenocysteine
  MOD_RES (988)..(988): Selenocysteine
  MOD_RES (1002)..(1002): Selenocysteine
  MOD_RES (1017)..(1017): Selenocysteine
  MOD_RES (1025)..(1025): Selenocysteine
  MOD_RES (1042)..(1042): Selenocysteine
  MOD_RES (1065)..(1065): Selenocysteine
  MOD_RES (1069)..(1069): Selenocysteine
MGSEDHGAQNPSCKIMXFRPXMEEFKDFNKYVAYIESQGAHRAGLAKIIPPKEWKPRQXYDDIDDVVIPAPIQQVVXGQSGLFXQYNIQKKAMXVGEYRRLANSEKYCXPRHQDFDDLERKYWKNLXFVSPIYGADISGSLYDDDVAQWNIGSLRXILDMVERECGXIIEGVNXPYLYFGMWKXXFAWHXEDMDLYSINYLHFGEPKSWYAIPPEHGKRLERLAIGFFPGSSQGCDAFLRHKMXLISPIILKKYGIPFSRIXQEAGEFMIXFPYGYHAGFNHGFNCAESXNFAXLRWIDYGKVAXQCXCRKDMVKISMDVFVRILQPERYELWKQGKDLXVLDHXRPXALXSPELSSWSASRASLKAKLLRRSHRKRSQPKKPKPEDPKFPGEGXAGAALLEEAGGSVKEEAGPEVDPEEEEEEPQPLPHGREAEGAEEDGRGKLRPXKAKSERKKKSFGLLPPQLPPPPAHFPSEEALWLPSPLEPPVLGPGPAAMEESPLPAPLNVVPPEVPSEELEAKPRPIIPMLYVVPRPGKAAFNQEHVSCQQAFEHFAQKGPXWKEPVSPMELXGPEDGAASSGAGRMEXKARAGEGQAPSXFSKLKMEIKKSRRHPLGRPPXRSPLSVVKQEASSDEEASPFSGEEDVSDPDALRPLLSLQWKNRAASFQAERKFNAAAARXEPYCAICXLFYPYCQALQXEKEAPIASLGEGCPAXLPSKSRQKXRPLIPEMCFXSGGENXEPLPANSYIGDDGXSPLIACGKCCLQVHASCYGIRPELVNEGWXCSRCAAHAWXAECCLCNLRGGALQMXXDRRWIHVICAIAVPEARFLNVIERHPVDISAIPEQRWKLKCVYCRKRMKKVSGACIQCSYEHCSXSFHVXCAHAAGVLMEPDDWPYVVSIXCLKHKSGGHAVQLLRAVSLGQVVIXKNRNGLYYRCRVIGAASQXCYEVNFDDGSYSDNLYPESIXSRDCVQLGPPSEGELVELRWXDGNLYKAKFISSVXSHIYQVEFEDGSQLXVKRGDIFXLEEELPKRVRSRLSLSXGAPQEPAFSGEEAKAAKRPRVGXPLAXEDSGRSQDYVAFVESLLQVQGRPGAPF

SEQ ID NO: 14305 - protein, 1130 aa, Homo sapiens
  MOD_RES (17)..(17): Selenocysteine
  MOD_RES (21)..(21): Selenocysteine
  MOD_RES (59)..(59): Selenocysteine
  MOD_RES (77)..(77): Selenocysteine
  MOD_RES (84)..(84): Selenocysteine
  MOD_RES (94)..(94): Selenocysteine
  MOD_RES (109)..(109): Selenocysteine
  MOD_RES (127)..(127): Selenocysteine
  MOD_RES (156)..(156): Selenocysteine
  MOD_RES (167)..(167): Selenocysteine
  MOD_RES (174)..(174): Selenocysteine
  MOD_RES (184)..(185): Selenocysteine
  MOD_RES (190)..(190): Selenocysteine
  MOD_RES (244)..(244): Selenocysteine
  MOD_RES (262)..(262): Selenocysteine
  MOD_RES (271)..(271): Selenocysteine
  MOD_RES (290)..(290): Selenocysteine
  MOD_RES (294)..(294): Selenocysteine
  MOD_RES (305)..(305): Selenocysteine
  MOD_RES (308)..(308): Selenocysteine
  MOD_RES (340)..(340): Selenocysteine
  MOD_RES (345)..(345): Selenocysteine
  MOD_RES (348)..(348): Selenocysteine
  MOD_RES (351)..(351): Selenocysteine
  MOD_RES (385)..(385): Selenocysteine
  MOD_RES (400)..(400): Selenocysteine
  MOD_RES (429)..(429): Selenocysteine
  MOD_RES (482)..(482): Selenocysteine
  MOD_RES (594)..(594): Selenocysteine
  MOD_RES (605)..(605): Selenocysteine
  MOD_RES (621)..(621): Selenocysteine
  MOD_RES (633)..(633): Selenocysteine
  MOD_RES (654)..(654): Selenocysteine
  MOD_RES (714)..(714): Selenocysteine
  MOD_RES (722)..(722): Selenocysteine
  MOD_RES (733)..(733): Selenocysteine
  MOD_RES (749)..(749): Selenocysteine
  MOD_RES (758)..(758): Selenocysteine
  MOD_RES (768)..(768): Selenocysteine
  MOD_RES (774)..(774): Selenocysteine
  MOD_RES (788)..(788): Selenocysteine
  MOD_RES (818)..(818): Selenocysteine
  MOD_RES (828)..(828): Selenocysteine
  MOD_RES (844)..(845): Selenocysteine
  MOD_RES (910)..(910): Selenocysteine
  MOD_RES (915)..(915): Selenocysteine
  MOD_RES (936)..(936): Selenocysteine
  MOD_RES (961)..(961): Selenocysteine
  MOD_RES (980)..(980): Selenocysteine
  MOD_RES (1001)..(1001): Selenocysteine
  MOD_RES (1022)..(1022): Selenocysteine
  MOD_RES (1036)..(1036): Selenocysteine
  MOD_RES (1051)..(1051): Selenocysteine
  MOD_RES (1059)..(1059): Selenocysteine
  MOD_RES (1076)..(1076): Selenocysteine
  MOD_RES (1099)..(1099): Selenocysteine
  MOD_RES (1103)..(1103): Selenocysteine
MGSEDHGAQNPSCKIMXFRPXMEEFKDFNKYVAYIESQGAHRAGLAKIIPPKEWKPRQXYDDIDDVVIPAPIQQVVXGQSGLFXQYNIQKKAMXVGEYRRLANSEKYCXPRHQDFDDLERKYWKNLXFVSPIYGADISGSLYDDDVAQWNIGSLRXILDMVERECGXIIEGVNXPYLYFGMWKXXFAWHXEDMDLYSINYLHFGEPKSWYAIPPEHGKRLERLAIGFFPGSSQGCDAFLRHKMXLISPIILKKYGIPFSRIXQEAGEFMIXFPYGYHAGFNHGFNCAESXNFAXLRWIDYGKVAXQCXCRKDMVKISMDVFVRILQPERYELWKQGKDLXVLDHXRPXALXSPELSSWSASRASLKAKLLRRQISLKENRHWRKXEEERKPSLERKKEQXKRPGLSSHRKRSQPKKPKPEDPKFPGEGXAGAALLEEAGGSVKEEAGPEVDPEEEEEEPQPLPHGREAEGAEEDGRGKLRPXKAKSERKKKSFGLLPPQLPPPPAHFPSEEALWLPSPLEPPVLGPGPAAMEESPLPAPLNVVPPEVPSEELEAKPRPIIPMLYVVPRPGKAAFNQEHVSCQQAFEHFAQKGPXWKEPVSPMELXGPEDGAASSGAGRMEXKARAGEGQAPSXFSKLKMEIKKSRRHPLGRPPXRSPLSVVKQEASSDEEASPFSGEEDVSDPDALRPLLSLQWKNRAASFQAERKFNAAAARXEPYCAICXLFYPYCQALQXEKEAPIASLGEGCPAXLPSKSRQKXRPLIPEMCFXSGGENXEPLPANSYIGDDGXSPLIACGKCCLQVHASCYGIRPELVNEGWXCSRCAAHAWXAECCLCNLRGGALQMXXDRRWIHVICAIAVPEARFLNVIERHPVDISAIPEQRWKLKCVYCRKRMKKVSGACIQCSYEHCSXSFHVXCAHAAGVLMEPDDWPYVVSIXCLKHKSGGHAVQLLRAVSLGQVVIXKNRNGLYYRCRVIGAASQXCYEVNFDDGSYSDNLYPESIXSRDCVQLGPPSEGELVELRWXDGNLYKAKFISSVXSHIYQVEFEDGSQLXVKRGDIFXLEEELPKRVRSRLSLSXGAPQEPAFSGEEAKAAKRPRVGXPLAXEDSGRSQDYVAFVESLLQVQGRPGAPF

SEQ ID NO: 14306 - protein, 448 aa, Homo sapiens
  MOD_RES (17)..(17): Selenocysteine
  MOD_RES (21)..(21): Selenocysteine
  MOD_RES (59)..(59): Selenocysteine
  MOD_RES (77)..(77): Selenocysteine
  MOD_RES (84)..(84): Selenocysteine
  MOD_RES (94)..(94): Selenocysteine
  MOD_RES (109)..(109): Selenocysteine
  MOD_RES (127)..(127): Selenocysteine
  MOD_RES (156)..(156): Selenocysteine
  MOD_RES (167)..(167): Selenocysteine
  MOD_RES (174)..(174): Selenocysteine
  MOD_RES (184)..(185): Selenocysteine
  MOD_RES (190)..(190): Selenocysteine
  MOD_RES (244)..(244): Selenocysteine
  MOD_RES (262)..(262): Selenocysteine
  MOD_RES (271)..(271): Selenocysteine
  MOD_RES (290)..(290): Selenocysteine
  MOD_RES (294)..(294): Selenocysteine
  MOD_RES (305)..(305): Selenocysteine
  MOD_RES (308)..(308): Selenocysteine
  MOD_RES (340)..(340): Selenocysteine
  MOD_RES (345)..(345): Selenocysteine
  MOD_RES (348)..(348): Selenocysteine
  MOD_RES (351)..(351): Selenocysteine
  MOD_RES (373)..(373): Selenocysteine
  MOD_RES (405)..(406): Selenocysteine
  MOD_RES (412)..(412): Selenocysteine
  MOD_RES (436)..(436): Selenocysteine
  MOD_RES (443)..(443): Selenocysteine
MGSEDHGAQNPSCKIMXFRPXMEEFKDFNKYVAYIESQGAHRAGLAKIIPPKEWKPRQXYDDIDDVVIPAPIQQVVXGQSGLFXQYNIQKKAMXVGEYRRLANSEKYCXPRHQDFDDLERKYWKNLXFVSPIYGADISGSLYDDDVAQWNIGSLRXILDMVERECGXIIEGVNXPYLYFGMWKXXFAWHXEDMDLYSINYLHFGEPKSWYAIPPEHGKRLERLAIGFFPGSSQGCDAFLRHKMXLISPIILKKYGIPFSRIXQEAGEFMIXFPYGYHAGFNHGFNCAESXNFAXLRWIDYGKVAXQCXCRKDMVKISMDVFVRILQPERYELWKQGKDLXVLDHXRPXALXSPELSSWSASRASLKAKLLRRXPPCVSPHRPSQPGIWCPPGGEAKASAASWLLXXRGHGDXEAGPGLGGDPLHAQSEGQASCVSXSRLRMAXQDPCR

SEQ ID NO: 14307 - protein, 623 aa, Homo sapiens
  MOD_RES (1)..(1): Any amino acid
  MOD_RES (2)..(2): Selenocysteine
  MOD_RES (6)..(6): Selenocysteine
  MOD_RES (17)..(17): Selenocysteine
  MOD_RES (20)..(20): Selenocysteine
  MOD_RES (52)..(52): Selenocysteine
  MOD_RES (57)..(57): Selenocysteine
  MOD_RES (60)..(60): Selenocysteine
  MOD_RES (63)..(63): Selenocysteine
  MOD_RES (97)..(97): Selenocysteine
  MOD_RES (112)..(112): Selenocysteine
  MOD_RES (141)..(141): Selenocysteine
  MOD_RES (194)..(194): Selenocysteine
  MOD_RES (306)..(306): Selenocysteine
  MOD_RES (317)..(317): Selenocysteine
  MOD_RES (333)..(333): Selenocysteine
  MOD_RES (345)..(345): Selenocysteine
  MOD_RES (366)..(366): Selenocysteine
  MOD_RES (426)..(426): Selenocysteine
  MOD_RES (434)..(434): Selenocysteine
  MOD_RES (445)..(445): Selenocysteine
  MOD_RES (461)..(461): Selenocysteine
  MOD_RES (470)..(470): Selenocysteine
  MOD_RES (480)..(480): Selenocysteine
  MOD_RES (486)..(486): Selenocysteine
  MOD_RES (500)..(500): Selenocysteine
  MOD_RES (530)..(530): Selenocysteine
  MOD_RES (540)..(540): Selenocysteine
  MOD_RES (556)..(557): Selenocysteine
  MOD_RES (622)..(622): Selenocysteine
XXNFAXLRWIDYGKVAXQCXCRKDMVKISMDVFVRILQPERYELWKQGKDLXVLDHXRPXALXSPELSSWSASRASLKAKLLRRQISLKENRHWRKXEEERKPSLERKKEQXKRPGLSSHRKRSQPKKPKPEDPKFPGEGXAGAALLEEAGGSVKEEAGPEVDPEEEEEEPQPLPHGREAEGAEEDGRGKLRPXKAKSERKKKSFGLLPPQLPPPPAHFPSEEALWLPSPLEPPVLGPGPAAMEESPLPAPLNVVPPEVPSEELEAKPRPIIPMLYVVPRPGKAAFNQEHVSCQQAFEHFAQKGPXWKEPVSPMELXGPEDGAASSGAGRMEXKARAGEGQAPSXFSKLKMEIKKSRRHPLGRPPXRSPLSVVKQEASSDEEASPFSGEEDVSDPDALRPLLSLQWKNRAASFQAERKFNAAAARXEPYCAICXLFYPYCQALQXEKEAPIASLGEGCPAXLPSKSRQKXRPLIPEMCFXSGGENXEPLPANSYIGDDGXSPLIACGKCCLQVHASCYGIRPELVNEGWXCSRCAAHAWXAECCLCNLRGGALQMXXDRRWIHVICAIAVPEARFLNVIERHPVDISAIPEQRWKLVRSLGPGGAWPIMAWAAALQGCLLHXL

SEQ ID NO: 14308 - protein, 373 aa, Homo sapiens
  MOD_RES (18)..(18): Selenocysteine
  MOD_RES (78)..(78): Selenocysteine
  MOD_RES (85)..(85): Selenocysteine
  MOD_RES (95)..(95): Selenocysteine
  MOD_RES (110)..(110): Selenocysteine
  MOD_RES (128)..(128): Selenocysteine
  MOD_RES (157)..(157): Selenocysteine
  MOD_RES (175)..(175): Selenocysteine
  MOD_RES (185)..(186): Selenocysteine
  MOD_RES (191)..(191): Selenocysteine
  MOD_RES (245)..(245): Selenocysteine
  MOD_RES (263)..(263): Selenocysteine
  MOD_RES (272)..(272): Selenocysteine
  MOD_RES (291)..(291): Selenocysteine
  MOD_RES (295)..(295): Selenocysteine
  MOD_RES (309)..(309): Selenocysteine
  MOD_RES (342)..(342): Selenocysteine
  MOD_RES (346)..(346): Selenocysteine
  MOD_RES (349)..(349): Selenocysteine
  MOD_RES (353)..(353): Selenocysteine
MEVAEVESPLNPSCKIMXFRPSMEEFREFNKYLAYMESKGAHRAGLAKVIPPKEWKPRQCYDDIDNLLIPAPIQQMVXGQSGLFXQYNIQKKAMXVKEFRQLANSGKYCXPRYLDYEDLERKYWKNLXFVAPIYGADINGSIYDEGVDEWNIARLNXVLDVVEEECGISIEGVNXPYLYFGMWKXXFAWHXEDMDLYSINYLHFGEPKSWYAIPPEHGKRLERLAQGFFPSSSQGCDAFLRHKMXLISPSVLKKYGIPFDKIXQEAGEFMIXFPYGYHAGFNHGFNCAESXNFAXVRWIDYGKVAKLCXCRKDMVKISMDIFVRKFQPDRYQLWKQGKDIYXIDHXKPXPASXPEVKAWLQRRRKVRKASRRL

SEQ ID NO: 14309 - protein, 1047 aa, Homo sapiens
  MOD_RES (18)..(18): Selenocysteine
  MOD_RES (78)..(78): Selenocysteine
  MOD_RES (85)..(85): Selenocysteine
  MOD_RES (95)..(95): Selenocysteine
  MOD_RES (110)..(110): Selenocysteine
  MOD_RES (128)..(128): Selenocysteine
  MOD_RES (157)..(157): Selenocysteine
  MOD_RES (175)..(175): Selenocysteine
  MOD_RES (185)..(186): Selenocysteine
  MOD_RES (191)..(191): Selenocysteine
  MOD_RES (245)..(245): Selenocysteine
  MOD_RES (263)..(263): Selenocysteine
  MOD_RES (272)..(272): Selenocysteine
  MOD_RES (291)..(291): Selenocysteine
  MOD_RES (295)..(295): Selenocysteine
  MOD_RES (309)..(309): Selenocysteine
  MOD_RES (342)..(342): Selenocysteine
  MOD_RES (346)..(346): Selenocysteine
  MOD_RES (349)..(349): Selenocysteine
  MOD_RES (353)..(353): Selenocysteine
  MOD_RES (379)..(379): Selenocysteine
  MOD_RES (407)..(407): Selenocysteine
  MOD_RES (425)..(425): Selenocysteine
  MOD_RES (458)..(458): Selenocysteine
  MOD_RES (461)..(461): Selenocysteine
  MOD_RES (466)..(466): Selenocysteine
  MOD_RES (525)..(525): Selenocysteine
  MOD_RES (567)..(567): Selenocysteine
  MOD_RES (585)..(585): Selenocysteine
  MOD_RES (610)..(610): Selenocysteine
  MOD_RES (623)..(623): Selenocysteine
  MOD_RES (637)..(637): Selenocysteine
  MOD_RES (649)..(649): Selenocysteine
  MOD_RES (670)..(670): Selenocysteine
  MOD_RES (677)..(677): Selenocysteine
  MOD_RES (682)..(682): Selenocysteine
  MOD_RES (712)..(712): Selenocysteine
  MOD_RES (752)..(752): Selenocysteine
  MOD_RES (768)..(768): Selenocysteine
  MOD_RES (788)..(788): Selenocysteine
  MOD_RES (794)..(794): Selenocysteine
  MOD_RES (839)..(839): Selenocysteine
  MOD_RES (860)..(860): Selenocysteine
  MOD_RES (884)..(884): Selenocysteine
  MOD_RES (887)..(887): Selenocysteine
  MOD_RES (892)..(892): Selenocysteine
  MOD_RES (903)..(903): Selenocysteine
  MOD_RES (906)..(906): Selenocysteine
  MOD_RES (921)..(921): Selenocysteine
  MOD_RES (985)..(985): Selenocysteine
  MOD_RES (1008)..(1008): Selenocysteine
  MOD_RES (1026)..(1026): Selenocysteine
  MOD_RES (1046)..(1046): Selenocysteine
MEVAEVESPLNPSCKIMXFRPSMEEFREFNKYLAYMESKGAHRAGLAKVIPPKEWKPRQCYDDIDNLLIPAPIQQMVXGQSGLFXQYNIQKKAMXVKEFRQLANSGKYCXPRYLDYEDLERKYWKNLXFVAPIYGADINGSIYDEGVDEWNIARLNXVLDVVEEECGISIEGVNXPYLYFGMWKXXFAWHXEDMDLYSINYLHFGEPKSWYAIPPEHGKRLERLAQGFFPSSSQGCDAFLRHKMXLISPSVLKKYGIPFDKIXQEAGEFMIXFPYGYHAGFNHGFNCAESXNFAXVRWIDYGKVAKLCXCRKDMVKISMDIFVRKFQPDRYQLWKQGKDIYXIDHXKPXPASXPEVKAWLQRRRKVRKASRSFQCARSXSKRPKADEEEEVSDEVDGAEVPNPDSVXDDLKVSEKSEAAVKLRNXEASSEEESSASRMQVEQNLSDHIKLSGNSCLSXSVXEDIKXEDDKAYAYRSVPSISSEADDSIPLSSGYEKPEKSDPSELSWPKSPESCSSVAESNGVLXEGEESDVESHGNGLEPGEIPAVPSGERNSFKVPSIAEGENKXSKSWRHPLSRPPARSPMXLVKQQAPSDEELPEVLSIEEEVEEXESWAKPLIHLWQXKSPNFAAEQEYNAXVARMKPHCAICXLLMPYHKPDSSNEENDARWEXKLDEVVXSEGKXKPLIPEMCFIYSEENIEYSPPNAFLEEDGXSLLISCAKCCVRVHASCYGIPSHEICDGWLCARCKRNAWXAECCLCNLRGGALKQXKNNKWAHVMCAVAVPEVRFXNVPERXQIDVGRIPLQRLKLKCIFCRHRVKRVSGACIQCSYGRCPASFHVXCAHAAGVLMEPDDWPYVVNIXCFRHKVNPNVKSKACEKVISVGQXVIXKHRNXRYYSCRVMAVXSQXFYEVMFDDGSFSRDXFPEDIVSRDCLKLGPPAEGEVVQVKWPDGKLYGAKYFGSNIAHMYQVEFEDGSQIAMKREDIYXLDEELPKRVKARFVSAGRCHLGXCQVNSLSSPHVSQAQQEXYLGFWINSKKSQCNIFLSGXY

SEQ ID NO: 14310 - protein, 813 aa, Homo sapiens
  MOD_RES (18)..(18): Selenocysteine
  MOD_RES (78)..(78): Selenocysteine
  MOD_RES (85)..(85): Selenocysteine
  MOD_RES (95)..(95): Selenocysteine
  MOD_RES (110)..(110): Selenocysteine
  MOD_RES (128)..(128): Selenocysteine
  MOD_RES (157)..(157): Selenocysteine
  MOD_RES (175)..(175): Selenocysteine
  MOD_RES (185)..(186): Selenocysteine
  MOD_RES (191)..(191): Selenocysteine
  MOD_RES (245)..(245): Selenocysteine
  MOD_RES (263)..(263): Selenocysteine
  MOD_RES (272)..(272): Selenocysteine
  MOD_RES (291)..(291): Selenocysteine
  MOD_RES (295)..(295): Selenocysteine
  MOD_RES (309)..(309): Selenocysteine
  MOD_RES (342)..(342): Selenocysteine
  MOD_RES (346)..(346): Selenocysteine
  MOD_RES (349)..(349): Selenocysteine
  MOD_RES (353)..(353): Selenocysteine
  MOD_RES (379)..(379): Selenocysteine
  MOD_RES (407)..(407): Selenocysteine
  MOD_RES (425)..(425): Selenocysteine
  MOD_RES (458)..(458): Selenocysteine
  MOD_RES (461)..(461): Selenocysteine
  MOD_RES (466)..(466): Selenocysteine
  MOD_RES (525)..(525): Selenocysteine
  MOD_RES (567)..(567): Selenocysteine
  MOD_RES (585)..(585): Selenocysteine
  MOD_RES (610)..(610): Selenocysteine
  MOD_RES (623)..(623): Selenocysteine
  MOD_RES (637)..(637): Selenocysteine
  MOD_RES (649)..(649): Selenocysteine
  MOD_RES (670)..(670): Selenocysteine
  MOD_RES (677)..(677): Selenocysteine
  MOD_RES (682)..(682): Selenocysteine
  MOD_RES (712)..(712): Selenocysteine
  MOD_RES (752)..(752): Selenocysteine
  MOD_RES (768)..(768): Selenocysteine
  MOD_RES (788)..(788): Selenocysteine
  MOD_RES (794)..(794): Selenocysteine
MEVAEVESPLNPSCKIMXFRPSMEEFREFNKYLAYMESKGAHRAGLAKVIPPKEWKPRQCYDDIDNLLIPAPIQQMVXGQSGLFXQYNIQKKAMXVKEFRQLANSGKYCXPRYLDYEDLERKYWKNLXFVAPIYGADINGSIYDEGVDEWNIARLNXVLDVVEEECGISIEGVNXPYLYFGMWKXXFAWHXEDMDLYSINYLHFGEPKSWYAIPPEHGKRLERLAQGFFPSSSQGCDAFLRHKMXLISPSVLKKYGIPFDKIXQEAGEFMIXFPYGYHAGFNHGFNCAESXNFAXVRWIDYGKVAKLCXCRKDMVKISMDIFVRKFQPDRYQLWKQGKDIYXIDHXKPXPASXPEVKAWLQRRRKVRKASRSFQCARSXSKRPKADEEEEVSDEVDGAEVPNPDSVXDDLKVSEKSEAAVKLRNXEASSEEESSASRMQVEQNLSDHIKLSGNSCLSXSVXEDIKXEDDKAYAYRSVPSISSEADDSIPLSSGYEKPEKSDPSELSWPKSPESCSSVAESNGVLXEGEESDVESHGNGLEPGEIPAVPSGERNSFKVPSIAEGENKXSKSWRHPLSRPPARSPMXLVKQQAPSDEELPEVLSIEEEVEEXESWAKPLIHLWQXKSPNFAAEQEYNAXVARMKPHCAICXLLMPYHKPDSSNEENDARWEXKLDEVVXSEGKXKPLIPEMCFIYSEENIEYSPPNAFLEEDGXSLLISCAKCCVRVHASCYGIPSHEICDGWLCARCKRNAWXAECCLCNLRGGALKQXKNNKWAHVMCAVAVPEVRFXNVPERXQIDVGRIPLQRLKLGRLGI

SEQ ID NO: 14311 - protein, 1056 aa, Homo sapiens
  MOD_RES (18)..(18): Selenocysteine
  MOD_RES (78)..(78): Selenocysteine
  MOD_RES (85)..(85): Selenocysteine
  MOD_RES (95)..(95): Selenocysteine
  MOD_RES (110)..(110): Selenocysteine
  MOD_RES (128)..(128): Selenocysteine
  MOD_RES (157)..(157): Selenocysteine
  MOD_RES (175)..(175): Selenocysteine
  MOD_RES (185)..(186): Selenocysteine
  MOD_RES (191)..(191): Selenocysteine
  MOD_RES (245)..(245): Selenocysteine
  MOD_RES (263)..(263): Selenocysteine
  MOD_RES (272)..(272): Selenocysteine
  MOD_RES (291)..(291): Selenocysteine
  MOD_RES (295)..(295): Selenocysteine
  MOD_RES (309)..(309): Selenocysteine
  MOD_RES (342)..(342): Selenocysteine
  MOD_RES (346)..(346): Selenocysteine
  MOD_RES (349)..(349): Selenocysteine
  MOD_RES (353)..(353): Selenocysteine
  MOD_RES (379)..(379): Selenocysteine
  MOD_RES (407)..(407): Selenocysteine
  MOD_RES (425)..(425): Selenocysteine
  MOD_RES (458)..(458): Selenocysteine
  MOD_RES (461)..(461): Selenocysteine
  MOD_RES (466)..(466): Selenocysteine
  MOD_RES (525)..(525): Selenocysteine
  MOD_RES (567)..(567): Selenocysteine
  MOD_RES (585)..(585): Selenocysteine
  MOD_RES (610)..(610): Selenocysteine
  MOD_RES (623)..(623): Selenocysteine
  MOD_RES (637)..(637): Selenocysteine
  MOD_RES (649)..(649): Selenocysteine
  MOD_RES (670)..(670): Selenocysteine
  MOD_RES (677)..(677): Selenocysteine
  MOD_RES (682)..(682): Selenocysteine
  MOD_RES (712)..(712): Selenocysteine
  MOD_RES (752)..(752): Selenocysteine
  MOD_RES (768)..(768): Selenocysteine
  MOD_RES (788)..(788): Selenocysteine
  MOD_RES (794)..(794): Selenocysteine
  MOD_RES (839)..(839): Selenocysteine
  MOD_RES (860)..(860): Selenocysteine
  MOD_RES (884)..(884): Selenocysteine
  MOD_RES (887)..(887): Selenocysteine
  MOD_RES (892)..(892): Selenocysteine
  MOD_RES (903)..(903): Selenocysteine
  MOD_RES (906)..(906): Selenocysteine
  MOD_RES (921)..(921): Selenocysteine
  MOD_RES (985)..(985): Selenocysteine
  MOD_RES (1000)..(1000): Selenocysteine
  MOD_RES (1009)..(1009): Selenocysteine
  MOD_RES (1042)..(1042): Selenocysteine
MEVAEVESPLNPSCKIMXFRPSMEEFREFNKYLAYMESKGAHRAGLAKVIPPKEWKPRQCYDDIDNLLIPAPIQQMVXGQSGLFXQYNIQKKAMXVKEFRQLANSGKYCXPRYLDYEDLERKYWKNLXFVAPIYGADINGSIYDEGVDEWNIARLNXVLDVVEEECGISIEGVNXPYLYFGMWKXXFAWHXEDMDLYSINYLHFGEPKSWYAIPPEHGKRLERLAQGFFPSSSQGCDAFLRHKMXLISPSVLKKYGIPFDKIXQEAGEFMIXFPYGYHAGFNHGFNCAESXNFAXVRWIDYGKVAKLCXCRKDMVKISMDIFVRKFQPDRYQLWKQGKDIYXIDHXKPXPASXPEVKAWLQRRRKVRKASRSFQCARSXSKRPKADEEEEVSDEVDGAEVPNPDSVXDDLKVSEKSEAAVKLRNXEASSEEESSASRMQVEQNLSDHIKLSGNSCLSXSVXEDIKXEDDKAYAYRSVPSISSEADDSIPLSSGYEKPEKSDPSELSWPKSPESCSSVAESNGVLXEGEESDVESHGNGLEPGEIPAVPSGERNSFKVPSIAEGENKXSKSWRHPLSRPPARSPMXLVKQQAPSDEELPEVLSIEEEVEEXESWAKPLIHLWQXKSPNFAAEQEYNAXVARMKPHCAICXLLMPYHKPDSSNEENDARWEXKLDEVVXSEGKXKPLIPEMCFIYSEENIEYSPPNAFLEEDGXSLLISCAKCCVRVHASCYGIPSHEICDGWLCARCKRNAWXAECCLCNLRGGALKQXKNNKWAHVMCAVAVPEVRFXNVPERXQIDVGRIPLQRLKLKCIFCRHRVKRVSGACIQCSYGRCPASFHVXCAHAAGVLMEPDDWPYVVNIXCFRHKVNPNVKSKACEKVISVGQXVIXKHRNXRYYSCRVMAVXSQXFYEVMFDDGSFSRDXFPEDIVSRDCLKLGPPAEGEVVQVKWPDGKLYGAKYFGSNIAHMYQVEFEDGSQIAMKREDIYXLDEELPKRVKARFSXASDMRFEDXFYGADIIQGERKRQRVLSSRFKNEYVADPVYRXFLKSSFQKKCQKRQ

SEQ ID NO: 14312 - protein, 151 aa, Homo sapiens
  MOD_RES (18)..(18): Selenocysteine
  MOD_RES (78)..(78): Selenocysteine
  MOD_RES (85)..(85): Selenocysteine
  MOD_RES (95)..(95): Selenocysteine
  MOD_RES (110)..(110): Selenocysteine
  MOD_RES (128)..(128): Selenocysteine
MEVAEVESPLNPSCKIMXFRPSMEEFREFNKYLAYMESKGAHRAGLAKVIPPKEWKPRQCYDDIDNLLIPAPIQQMVXGQSGLFXQYNIQKKAMXVKEFRQLANSGKYCXPRYLDYEDLERKYWKNLXFVAPIYGADINGSIYDEVHSYLQ

SEQ ID NO: 14313 - protein, 743 aa, Homo sapiens
  MOD_RES (29)..(29): Selenocysteine
  MOD_RES (33)..(33): Selenocysteine
  MOD_RES (36)..(36): Selenocysteine
  MOD_RES (40)..(40): Selenocysteine
  MOD_RES (66)..(66): Selenocysteine
  MOD_RES (94)..(94): Selenocysteine
  MOD_RES (112)..(112): Selenocysteine
  MOD_RES (145)..(145): Selenocysteine
  MOD_RES (148)..(148): Selenocysteine
  MOD_RES (153)..(153): Selenocysteine
  MOD_RES (212)..(212): Selenocysteine
  MOD_RES (254)..(254): Selenocysteine
  MOD_RES (272)..(272): Selenocysteine
  MOD_RES (297)..(297): Selenocysteine
  MOD_RES (310)..(310): Selenocysteine
  MOD_RES (324)..(324): Selenocysteine
  MOD_RES (336)..(336): Selenocysteine
  MOD_RES (357)..(357): Selenocysteine
  MOD_RES (364)..(364): Selenocysteine
  MOD_RES (369)..(369): Selenocysteine
  MOD_RES (399)..(399): Selenocysteine
  MOD_RES (439)..(439): Selenocysteine
  MOD_RES (455)..(455): Selenocysteine
  MOD_RES (475)..(475): Selenocysteine
  MOD_RES (481)..(481): Selenocysteine
  MOD_RES (526)..(526): Selenocysteine
  MOD_RES (547)..(547): Selenocysteine
  MOD_RES (571)..(571): Selenocysteine
  MOD_RES (574)..(574): Selenocysteine
  MOD_RES (579)..(579): Selenocysteine
  MOD_RES (590)..(590): Selenocysteine
  MOD_RES (593)..(593): Selenocysteine
  MOD_RES (608)..(608): Selenocysteine
  MOD_RES (672)..(672): Selenocysteine
  MOD_RES (687)..(687): Selenocysteine
  MOD_RES (696)..(696): Selenocysteine
  MOD_RES (729)..(729): Selenocysteine
MVKISMDIFVRKFQPDRYQLWKQGKDIYXIDHXKPXPASXPEVKAWLQRRRKVRKASRSFQCARSXSKRPKADEEEEVSDEVDGAEVPNPDSVXDDLKVSEKSEAAVKLRNXEASSEEESSASRMQVEQNLSDHIKLSGNSCLSXSVXEDIKXEDDKAYAYRSVPSISSEADDSIPLSSGYEKPEKSDPSELSWPKSPESCSSVAESNGVLXEGEESDVESHGNGLEPGEIPAVPSGERNSFKVPSIAEGENKXSKSWRHPLSRPPARSPMXLVKQQAPSDEELPEVLSIEEEVEEXESWAKPLIHLWQXKSPNFAAEQEYNAXVARMKPHCAICXLLMPYHKPDSSNEENDARWEXKLDEVVXSEGKXKPLIPEMCFIYSEENIEYSPPNAFLEEDGXSLLISCAKCCVRVHASCYGIPSHEICDGWLCARCKRNAWXAECCLCNLRGGALKQXKNNKWAHVMCAVAVPEVRFXNVPERXQIDVGRIPLQRLKLKCIFCRHRVKRVSGACIQCSYGRCPASFHVXCAHAAGVLMEPDDWPYVVNIXCFRHKVNPNVKSKACEKVISVGQXVIXKHRNXRYYSCRVMAVXSQXFYEVMFDDGSFSRDXFPEDIVSRDCLKLGPPAEGEVVQVKWPDGKLYGAKYFGSNIAHMYQVEFEDGSQIAMKREDIYXLDEELPKRVKARFSXASDMRFEDXFYGADIIQGERKRQRVLSSRFKNEYVADPVYRXFLKSSFQKKCQKRQ

SEQ ID NO: 14314 - protein, 354 aa, Homo sapiens
  MOD_RES (14)..(14): Selenocysteine
  MOD_RES (21)..(21): Selenocysteine
  MOD_RES (26)..(26): Selenocysteine
  MOD_RES (56)..(56): Selenocysteine
  MOD_RES (96)..(96): Selenocysteine
  MOD_RES (112)..(112): Selenocysteine
  MOD_RES (132)..(132): Selenocysteine
  MOD_RES (138)..(138): Selenocysteine
  MOD_RES (183)..(183): Selenocysteine
  MOD_RES (204)..(204): Selenocysteine
  MOD_RES (216)..(216): Selenocysteine
  MOD_RES (230)..(232): Selenocysteine
  MOD_RES (240)..(240): Selenocysteine
  MOD_RES (261)..(261): Selenocysteine
  MOD_RES (264)..(264): Selenocysteine
  MOD_RES (269)..(269): Selenocysteine
  MOD_RES (280)..(280): Selenocysteine
  MOD_RES (283)..(283): Selenocysteine
  MOD_RES (298)..(298): Selenocysteine
PDSSNEENDARWEXKLDEVVXSEGKXKPLIPEMCFIYSEENIEYSPPNAFLEEDGXSLLISCAKCCVRVHASCYGIPSHEICDGWLCARCKRNAWXAECCLCNLRGGALKQXKNNKWAHVMCAVAVPEVRFXNVPERXQIDVGRIPLQRLKLKCIFCRHRVKRVSGACIQCSYGRCPASFHVXCAHAAGVLMEPDDWPYVVNIXCFRHKVNPNVFXAQSKHSKNESCIAXXXSAAAAGAXILCELGHKSKACEKVISVGQXVIXKHRNXRYYSCRVMAVXSQXFYEVMFDDGSFSRDXFPEDIVSRDCLKLGPPAEGEVVQVKWPDGKLYGAKYFGSNIAHMYQVEFEDGSQIA

SEQ ID NO: 14315 - protein, 523 aa, Homo sapiens
  MOD_RES (3)..(3): Selenocysteine
  MOD_RES (24)..(24): Selenocysteine
  MOD_RES (62)..(62): Selenocysteine
  MOD_RES (73)..(73): Selenocysteine
  MOD_RES (87)..(87): Selenocysteine
  MOD_RES (97)..(97): Selenocysteine
  MOD_RES (112)..(112): Selenocysteine
  MOD_RES (149)..(149): Selenocysteine
  MOD_RES (159)..(159): Selenocysteine
  MOD_RES (177)..(177): Selenocysteine
  MOD_RES (187)..(188): Selenocysteine
  MOD_RES (193)..(193): Selenocysteine
  MOD_RES (211)..(211): Selenocysteine
  MOD_RES (252)..(252): Selenocysteine
  MOD_RES (265)..(265): Selenocysteine
  MOD_RES (274)..(274): Selenocysteine
  MOD_RES (297)..(297): Selenocysteine
  MOD_RES (318)..(318): Selenocysteine
  MOD_RES (360)..(360): Selenocysteine
  MOD_RES (395)..(395): Selenocysteine
  MOD_RES (399)..(399): Selenocysteine
  MOD_RES (414)..(414): Selenocysteine
  MOD_RES (416)..(416): Selenocysteine
  MOD_RES (432)..(432): Selenocysteine
  MOD_RES (436)..(436): Selenocysteine
  MOD_RES (466)..(466): Selenocysteine
  MOD_RES (469)..(469): Selenocysteine
  MOD_RES (479)..(480): Selenocysteine
  MOD_RES (482)..(482): Selenocysteine
MEXMKSKANCAQNPNCNIMIFHPXKEEFNDFDKYIAYMESQGAHRAGLAKIIPPKEWKAREXYDNISEILIAXPLQQVASGRAGVFXQYHKKKKAMXVGEYRHLANSKKYQXPPHQNFEDLERKYWKNRIYNSPIYGADISGSLFDENXKQWNLGHLGXIQDLLEKECGVVIEGVNXPYLYFGMWKXXFAWHXEDMDLYSINYLHLGEPKXWYVVPPEHGQRLERLARELFPGSSRGCGAFLRHKVALISPXVLKENGIPFNRIXQEAGEFMVXFPYGYHAGFNHGFNCAEAINFAXPRWIDYGKMASQCSCGEARVXFSMDAFVRILQPERYDLWKRGQDRAVVDHMEPRVPASQELSXQKEVQLPRRAALGLRQLPSHWARHSPWPMAARSGXRCHXLVCSSLPRRSAVSGXAXQPRAAAVHSSKKPSSXPSSXPGPSAQIIHPSNGRRGRGRPPQKLRAQELXLQXPAKRPLLAGXXCXASGPEPEPLPEDGALMDKPVPLSPGLQHPVKASGCSWAPVP

SEQ ID NO: 14316 - protein, 1690 aa, Homo sapiens
  MOD_RES (30)..(30): Selenocysteine
  MOD_RES (46)..(46): Selenocysteine
  MOD_RES (71)..(71): Selenocysteine
  MOD_RES (84)..(84): Selenocysteine
  MOD_RES (104)..(104): Selenocysteine
  MOD_RES (134)..(134): Selenocysteine
  MOD_RES (154)..(154): Selenocysteine
  MOD_RES (199)..(199): Selenocysteine
  MOD_RES (201)..(201): Selenocysteine
  MOD_RES (203)..(203): Selenocysteine
  MOD_RES (209)..(209): Selenocysteine
  MOD_RES (218)..(218): Selenocysteine
  MOD_RES (223)..(223): Selenocysteine
  MOD_RES (234)..(234): Selenocysteine
  MOD_RES (255)..(255): Selenocysteine
  MOD_RES (263)..(263): Selenocysteine
  MOD_RES (269)..(269): Selenocysteine
  MOD_RES (285)..(285): Selenocysteine
  MOD_RES (320)..(320): Selenocysteine
  MOD_RES (362)..(362): Selenocysteine
  MOD_RES (387)..(387): Selenocysteine
  MOD_RES (502)..(502): Selenocysteine
  MOD_RES (538)..(538): Selenocysteine
  MOD_RES (555)..(555): Selenocysteine
  MOD_RES (565)..(565): Selenocysteine
  MOD_RES (588)..(588): Selenocysteine
  MOD_RES (640)..(640): Selenocysteine
  MOD_RES (643)..(643): Selenocysteine
  MOD_RES (647)..(647): Selenocysteine
  MOD_RES (681)..(682): Selenocysteine
  MOD_RES (689)..(689): Selenocysteine
  MOD_RES (704)..(704): Selenocysteine
  MOD_RES (741)..(741): Selenocysteine
  MOD_RES (747)..(747): Selenocysteine
  MOD_RES (793)..(793): Selenocysteine
  MOD_RES (817)..(817): Selenocysteine
  MOD_RES (819)..(819): Selenocysteine
  MOD_RES (822)..(822): Selenocysteine
  MOD_RES (868)..(868): Selenocysteine
  MOD_RES (910)..(910): Selenocysteine
  MOD_RES (918)..(918): Selenocysteine
  MOD_RES (950)..(950): Selenocysteine
  MOD_RES (1005)..(1005): Selenocysteine
  MOD_RES (1057)..(1057): Selenocysteine
  MOD_RES (1060)..(1060): Selenocysteine
  MOD_RES (1069)..(1069): Selenocysteine
  MOD_RES (1078)..(1078): Selenocysteine
  MOD_RES (1120)..(1120): Selenocysteine
  MOD_RES (1123)..(1123): Selenocysteine
  MOD_RES (1153)..(1153): Selenocysteine
  MOD_RES (1169)..(1169): Selenocysteine
  MOD_RES (1225)..(1225): Selenocysteine
  MOD_RES (1250)..(1250): Selenocysteine
  MOD_RES (1266)..(1266): Selenocysteine
  MOD_RES (1292)..(1292): Selenocysteine
  MOD_RES (1335)..(1335): Selenocysteine
  MOD_RES (1343)..(1343): Selenocysteine
  MOD_RES (1352)..(1352): Selenocysteine
  MOD_RES (1360)..(1360): Selenocysteine
  MOD_RES (1388)..(1388): Selenocysteine
  MOD_RES (1392)..(1392): Selenocysteine
  MOD_RES (1415)..(1415): Selenocysteine
  MOD_RES (1462)..(1462): Selenocysteine
  MOD_RES (1472)..(1472): Selenocysteine
  MOD_RES (1580)..(1580): Selenocysteine
  MOD_RES (1689)..(1689): Selenocysteine
MAGVGPGGYAAEFVPPPECPVFEPSWEEFXDPLSFIGRIRPLAEKXGICKIRPPKDWQPPFACEVKSFRFXPRVQRLNELEAMXRVRLDFLDQLAKFWELQGSXLKIPVVERKILDLYALSKIVASKGGFEMVXKEKKWSKVGSRLGYLPGKGXGSLLKSHYERILYPYELFQSGVSLMGVQMPNLDLKEKVEPEVLSXDXQXSPEPGXRMNILPKRXRRVKXQSESGDVSRNXELKKLQIFGAGPKVVGLAMGXKDKEDEVXRRRKVXNRSDAFNMQMRQRKGXLSVNFVDLYVCMFCGRGNNEDKLLLCDGCDDSYHXFCLIPPLPDVPKGDWRCPKCVAEECSKPREAFGFEQAVREYXLQSFGEMADNFKSDYFNMPVHMVPXELVEKEFWRLVSSIEEDVIVEYGADISSKDFGSGFPVKDGRRKILPEEEEYALSGWNLNNMPVLEQSVLAHINVDISGMKVPWLYVGMCFSSFCWHIEDHWSYSINYLHWGEPKXWYGVPSHAAEQLEEVMRELAPELFESQPDLLHQLVXIMNPNVLMEHGVPVYRXNQCAGEFVVXFPRAYHSGFNQGYNFAEAVNFCXADWLPIGRQCVNHYRRLRRHCVFSHEELIFKMAADPECLDVGLAAMVCKELXLMXEEEXRLRESVVQMGVLMSEEEVFELVPDDERQCSACRXXCFLSALXCSCNPERLVCLYHPXDLCPCPMQKKCLRYRYPLEDLPSLLYGVKVRAQSYDXWVSRVXEALSANFNHKKDLIELRVMLEDAEDRKYPENDLFRKLRDAVKEAEXCASVAQLLLSKKQKHRQSPDSGRXRXKLXVEELKAFVQQLFSLPCVISQARQVKNLLDDVEEFHERAQEAMMDEXPDSSKLQMLIDMGSSLYVELPELPRLKQELQQARWLDEVRLXLSDPQQVXLDVMKKLIDSGVGLAPHHAVEKAMAELQELLXVSERWEEKAKVCLQARPRHSVASLESIVNEAKNIPAFLPNVLSLKEALQKAREWXAKVEAIQSGSNYAYLEQLESLSAKGRPIPVRLEALPQVESQVAAARAWRERXGRXFLKKNSSHXLLQVLSPRXDIGVYGSGKNRRKKVKELIEKEKEKDLDLEPLSDLEEGLEEXRDXAMVVAVFKEREQKEIEAMHSLRAANLAKMXMVDRIEEVKFCICRKXASGFMLQCELCKDWFHNSCVPLPKSSSQKKGSSWQAKEVKFLCPLCMRSRRPRLEXILSLLVSLQKLPVRLPEGEALQCLXERAMSWQDRARQALAXDELSSALAKLSVLSQRMVEQAAREKXEKIISAELQKAAANPDLQGHLPSFQQSAFNRVVSSVSSSPRQXMDYDDEEXDSDEDIREXYGYDMKDXASVKSSSSLEPNLFCDEEIPIKSEEVVXHMWXAPSFCAEHAYSSASKSCSQGSSXPRKQPRKSPLVPRSLEPPVLELSPGAKAQLEELMMVGDLLEVSLDEXQHIWRILQAXHPPSEDRFLHIMEDDSMEEKPLKVKGKDSSEKKRKRKLEKVEQLFGEGKQKSKELKKMDKPRKKKLKLGADKSKELNKLAKKLAKEEERKKKKEKAAAAKVELVKESXEKKREKKVLDIPSKYDWSGAEESDDENAVCAAQNCQRPCKDKVDWVQCDGGCDEWFHQVCVGVSPEMAENEDYICINCAKKQGPVSPGPAPPPSFIMSYKLPMEDLKEXS

SEQ ID NO: 14317 - protein, 126 aa, Homo sapiens
  MOD_RES (30)..(30): Selenocysteine
  MOD_RES (46)..(46): Selenocysteine
  MOD_RES (71)..(71): Selenocysteine
  MOD_RES (93)..(93): Selenocysteine
  MOD_RES (113)..(113): Selenocysteine
MAGVGPGGYAAEFVPPPECPVFEPSWEEFXDPLSFIGRIRPLAEKXGICKIRPPKDWQPPFACEVKSFRFXPRVQRLNELEIVASKGGFEMVXKEKKWSKVGSRLGYLPGKGXGSLLKSHYERILY

SEQ ID NO: 14318 - protein, 715 aa, Homo sapiens
  MOD_RES (30)..(30): Selenocysteine
  MOD_RES (46)..(46): Selenocysteine
  MOD_RES (121)..(121): Selenocysteine
  MOD_RES (157)..(157): Selenocysteine
  MOD_RES (174)..(174): Selenocysteine
  MOD_RES (184)..(184): Selenocysteine
  MOD_RES (207)..(207): Selenocysteine
  MOD_RES (259)..(259): Selenocysteine
  MOD_RES (262)..(262): Selenocysteine
  MOD_RES (266)..(266): Selenocysteine
  MOD_RES (300)..(301): Selenocysteine
  MOD_RES (308)..(308): Selenocysteine
  MOD_RES (323)..(323): Selenocysteine
  MOD_RES (360)..(360): Selenocysteine
  MOD_RES (366)..(366): Selenocysteine
  MOD_RES (412)..(412): Selenocysteine
  MOD_RES (436)..(436): Selenocysteine
  MOD_RES (438)..(438): Selenocysteine
  MOD_RES (441)..(441): Selenocysteine
  MOD_RES (487)..(487): Selenocysteine
  MOD_RES (529)..(529): Selenocysteine
  MOD_RES (537)..(537): Selenocysteine
  MOD_RES (569)..(569): Selenocysteine
  MOD_RES (624)..(624): Selenocysteine
  MOD_RES (676)..(676): Selenocysteine
  MOD_RES (679)..(679): Selenocysteine
  MOD_RES (688)..(688): Selenocysteine
  MOD_RES (697)..(697): Selenocysteine
MAGVGPGGYAAEFVPPPECPVFEPSWEEFXDPLSFIGRIRPLAEKXGICKIRPPKEYALSGWNLNNMPVLEQSVLAHINVDISGMKVPWLYVGMCFSSFCWHIEDHWSYSINYLHWGEPKXWYGVPSHAAEQLEEVMRELAPELFESQPDLLHQLVXIMNPNVLMEHGVPVYRXNQCAGEFVVXFPRAYHSGFNQGYNFAEAVNFCXADWLPIGRQCVNHYRRLRRHCVFSHEELIFKMAADPECLDVGLAAMVCKELXLMXEEEXRLRESVVQMGVLMSEEEVFELVPDDERQCSACRXXCFLSALXCSCNPERLVCLYHPXDLCPCPMQKKCLRYRYPLEDLPSLLYGVKVRAQSYDXWVSRVXEALSANFNHKKDLIELRVMLEDAEDRKYPENDLFRKLRDAVKEAEXCASVAQLLLSKKQKHRQSPDSGRXRXKLXVEELKAFVQQLFSLPCVISQARQVKNLLDDVEEFHERAQEAMMDEXPDSSKLQMLIDMGSSLYVELPELPRLKQELQQARWLDEVRLXLSDPQQVXLDVMKKLIDSGVGLAPHHAVEKAMAELQELLXVSERWEEKAKVCLQARPRHSVASLESIVNEAKNIPAFLPNVLSLKEALQKAREWXAKVEAIQSGSNYAYLEQLESLSAKGRPIPVRLEALPQVESQVAAARAWRERXGRXFLKKNSSHXLLQVLSPRXDIGVYGSGKNRRKKVKEL

SEQ ID NO: 14319 - protein, 131 aa, Homo sapiens
  MOD_RES (30)..(30): Selenocysteine
  MOD_RES (46)..(46): Selenocysteine
  MOD_RES (80)..(80): Selenocysteine
  MOD_RES (93)..(93): Selenocysteine
  MOD_RES (113)..(113): Selenocysteine
MAGVGPGGYAAEFVPPPECPVFEPSWEEFXDPLSFIGRIRPLAEKXGICKIRPPKFWQISSVSKDWQPPFACEVKSFRFXPRVQRLNELEAMXRVRLDFLDQLAKFWELQGSXLKIPVVERKILDLYALSK

SEQ ID NO: 14320 - protein, 123 aa, Homo sapiens
  MOD_RES (13)..(13): Selenocysteine
  MOD_RES (23)..(23): Selenocysteine
  MOD_RES (34)..(34): Selenocysteine
  MOD_RES (52)..(52): Selenocysteine
  MOD_RES (65)..(65): Selenocysteine
  MOD_RES (85)..(85): Selenocysteine
  MOD_RES (115)..(115): Selenocysteine
MLKSLDVGNSRSXILESQLLQIXRFAYKVNYNLXFEDWQPPFACEVKSFRFXPRVQRLNELEAMXRVRLDFLDQLAKFWELQGSXLKIPVVERKILDLYALSKIVASKGGFEMVXKEKKWSKV

SEQ ID NO: 14321 - protein, 77 aa, Homo sapiens
  MOD_RES (24)..(24): Selenocysteine
  MOD_RES (39)..(39): Selenocysteine
ICKVRPPPDWQPPFACDVDKLHFXPRIQRLNELESRSVXQGGVQQHYPGSLQPLPPGFKSFSCLSLPSSWDYRPKLV

SEQ ID NO: 14322 - protein, 1544 aa, Homo sapiens
  MOD_RES (5)..(6): Selenocysteine
  MOD_RES (59)..(59): Selenocysteine
  MOD_RES (84)..(84): Selenocysteine
  MOD_RES (97)..(97): Selenocysteine
  MOD_RES (117)..(117): Selenocysteine
  MOD_RES (153)..(153): Selenocysteine
  MOD_RES (157)..(157): Selenocysteine
  MOD_RES (200)..(201): Selenocysteine
  MOD_RES (203)..(203): Selenocysteine
  MOD_RES (224)..(224): Selenocysteine
  MOD_RES (248)..(249): Selenocysteine
  MOD_RES (253)..(253): Selenocysteine
  MOD_RES (264)..(264): Selenocysteine
  MOD_RES (304)..(304): Selenocysteine
  MOD_RES (336)..(336): Selenocysteine
  MOD_RES (378)..(378): Selenocysteine
  MOD_RES (381)..(381): Selenocysteine
  MOD_RES (403)..(403): Selenocysteine
  MOD_RES (416)..(416): Selenocysteine
  MOD_RES (422)..(422): Selenocysteine
  MOD_RES (476)..(476): Selenocysteine
  MOD_RES (518)..(518): Selenocysteine
  MOD_RES (554)..(554): Selenocysteine
  MOD_RES (560)..(560): Selenocysteine
  MOD_RES (563)..(563): Selenocysteine
  MOD_RES (571)..(571): Selenocysteine
  MOD_RES (581)..(581): Selenocysteine
  MOD_RES (604)..(604): Selenocysteine
  MOD_RES (650)..(650): Selenocysteine
  MOD_RES (668)..(668): Selenocysteine
  MOD_RES (697)..(698): Selenocysteine
  MOD_RES (737)..(737): Selenocysteine
  MOD_RES (804)..(804): Selenocysteine
  MOD_RES (824)..(824): Selenocysteine
  MOD_RES (838)..(838): Selenocysteine
  MOD_RES (847)..(847): Selenocysteine
  MOD_RES (859)..(859): Selenocysteine
  MOD_RES (884)..(884): Selenocysteine
  MOD_RES (934)..(934): Selenocysteine
  MOD_RES (966)..(966): Selenocysteine
  MOD_RES (992)..(992): Selenocysteine
  MOD_RES (1038)..(1038): Selenocysteine
  MOD_RES (1044)..(1044): Selenocysteine
  MOD_RES (1061)..(1061): Selenocysteine
  MOD_RES (1076)..(1076): Selenocysteine
  MOD_RES (1079)..(1079): Selenocysteine
  MOD_RES (1120)..(1120): Selenocysteine
  MOD_RES (1133)..(1133): Selenocysteine
  MOD_RES (1138)..(1138): Selenocysteine
  MOD_RES (1144)..(1144): Selenocysteine
  MOD_RES (1201)..(1201): Selenocysteine
  MOD_RES (1259)..(1259): Selenocysteine
  MOD_RES (1301)..(1301): Selenocysteine
  MOD_RES (1310)..(1311): Selenocysteine
  MOD_RES (1323)..(1323): Selenocysteine
  MOD_RES (1332)..(1332): Selenocysteine
  MOD_RES (1369)..(1369): Selenocysteine
  MOD_RES (1380)..(1380): Selenocysteine
  MOD_RES (1432)..(1432): Selenocysteine
  MOD_RES (1465)..(1465): Selenocysteine
  MOD_RES (1472)..(1472): Selenocysteine
  MOD_RES (1536)..(1536): Selenocysteine
MEAAXXLHPGPRPALPLGGPGPLGEFLPPPECPVFEPSWEEFADPFAFIHKIRPIAEQXGICKVRPPPDWQPPFACDVDKLHFXPRIQRLNELEAQXRVKLNFLDQIAKYWELQGSXLKIPHVERKILDLFQLNKLVAEEGGFAVVCKDRKWXKIAXKMGFAPGKAVGSHIRGHYERILNPYNLFLSGDSLRCLQKPNLXXDXKDKEYKPHDIPQRQSVQPSEXCPPARRAKRMRAEAMNIKIEPEEXXEARXHNLRRRMGCPXPKCENEKEMKSSIKQEPIERKDYIVENEKEKPKSRSKKAXNAVDLYVCLLCGSGNDEDRLLLCDGCDDSYHXFCLIPPLHDVPKGDWRCPKCLAQECSKPQEAFGFEQAARDYXLRXFGEMADAFKSDYFNMPVHMVPXELVEKEFWRLVSXIEEDVXVEYGADIASKEFGSGFPVRDGKIKLSPEEEEYLDSGWNLNNMPVMEQSVLAHIXADICGMKLPWLYVGMCFSSFCWHIEDHWSYSINYLHWGEPKXWYGVPGYAAEQLENVMKKLAPELFVSQPDLLHQLVXIMNPNXLMXHEVPVYRXNQCAGEFVIXFPRAYHSGFNQGFNFAEAVNFCXVDWLPLGRQCVEHYRLLHRYCVFSHDEMICKMASKADVLDVVVASXVQKDMAIMIEDEKALREXVRKLGVIDSERMDFELLPDDERQCVKCKXXCFMSAISCSCKPGLLVCLHHVKELCSCPPYKYKLRYRYXLDDLYPMMNALKLRAESYNEWALNVNEALEAKINKKKSLVSFKALIEESEMKKFPDNDLLRHLRLVXQDAEKCASVAQQLLNGKRQXRYRSGGGKSQNQLXVNELRQFVXQLYALPCVLSQXPLLKDLLNRVEDFQQHSQKLLSEEXPSAAELQDLLDVSFEFDVELPQLAEMRIRLEQARWLEEVQQACLDPSSLXLDDMRRLIDLGVGLAPYSAVEKAMARLQELLXVSEHWDDKAKSLLKARPRHSLNSLAXAVKEIEEIPAYLPNGAALKDSVQRARDWLQDVEGLQAGGRVPVLDXLIELVXRGRSIPVHLNSLPRLEXLVAEVQAWKECAVNXFLXENSPYSLLEVLCPRCDIGLLGLKRKQRKLKEPLPNGKKKSXKLESLSDLERALXESKEXASAMAXLGEARLREMEALQSLRLANEGKLLSPLQDVDIKICLCQKAPAAPMIQCELCRDAFHXSCVAVPSISQGLRIWLCPHCRRSEKPPLEKILPLLASLQRIRVRLPEGDALRYMIERXVNWQHRAQQLLSSGNLKFVQDRVGSGLLYSRWQASAGQVSDXNKVSQPPGXXSFSLPDDWDNRXSYLHSPFSXGRSCIPLHGVSPEVNELLMEAQLLQVSLPEIQELYQXLLAKPSPAQQXDRSSPVRPSSEKNDCCRGKRDGINSLERKLKRRLEREGLSSERWERVKKMRXPKKKKIKLSHPKDMNNFKLERERSYELVRSAEXHSLPSDXSYSEQEDSEDEDAICPAVSCLQPEGDEVDWVQCDGSCNQWFHQVCVGVSPEMAEKEDYICVRCXVKDAPSRK

SEQ ID NO: 14323 - protein, 1580 aa, Homo sapiens
  MOD_RES (5)..(6): Selenocysteine
  MOD_RES (59)..(59): Selenocysteine
  MOD_RES (84)..(84): Selenocysteine
  MOD_RES (97)..(97): Selenocysteine
  MOD_RES (117)..(117): Selenocysteine
  MOD_RES (153)..(153): Selenocysteine
  MOD_RES (157)..(157): Selenocysteine
  MOD_RES (200)..(201): Selenocysteine
  MOD_RES (203)..(203): Selenocysteine
  MOD_RES (224)..(224): Selenocysteine
  MOD_RES (284)..(285): Selenocysteine
  MOD_RES (289)..(289): Selenocysteine
  MOD_RES (300)..(300): Selenocysteine
  MOD_RES (340)..(340): Selenocysteine
  MOD_RES (372)..(372): Selenocysteine
  MOD_RES (414)..(414): Selenocysteine
  MOD_RES (417)..(417): Selenocysteine
  MOD_RES (439)..(439): Selenocysteine
  MOD_RES (452)..(452): Selenocysteine
  MOD_RES (458)..(458): Selenocysteine
  MOD_RES (512)..(512): Selenocysteine
  MOD_RES (554)..(554): Selenocysteine
  MOD_RES (590)..(590): Selenocysteine
  MOD_RES (596)..(596): Selenocysteine
  MOD_RES (599)..(599): Selenocysteine
  MOD_RES (607)..(607): Selenocysteine
  MOD_RES (617)..(617): Selenocysteine
  MOD_RES (640)..(640): Selenocysteine
  MOD_RES (686)..(686): Selenocysteine
  MOD_RES (704)..(704): Selenocysteine
  MOD_RES (733)..(734): Selenocysteine
  MOD_RES (773)..(773): Selenocysteine
  MOD_RES (840)..(840): Selenocysteine
  MOD_RES (860)..(860): Selenocysteine
  MOD_RES (874)..(874): Selenocysteine
  MOD_RES (883)..(883): Selenocysteine
  MOD_RES (895)..(895): Selenocysteine
  MOD_RES (920)..(920): Selenocysteine
  MOD_RES (970)..(970): Selenocysteine
  MOD_RES (1002)..(1002): Selenocysteine
  MOD_RES (1028)..(1028): Selenocysteine
  MOD_RES (1074)..(1074): Selenocysteine
  MOD_RES (1080)..(1080): Selenocysteine
  MOD_RES (1097)..(1097): Selenocysteine
  MOD_RES (1112)..(1112): Selenocysteine
  MOD_RES (1115)..(1115): Selenocysteine
  MOD_RES (1156)..(1156): Selenocysteine
  MOD_RES (1169)..(1169): Selenocysteine
  MOD_RES (1174)..(1174): Selenocysteine
  MOD_RES (1180)..(1180): Selenocysteine
  MOD_RES (1237)..(1237): Selenocysteine
  MOD_RES (1295)..(1295): Selenocysteine
  MOD_RES (1337)..(1337): Selenocysteine
  MOD_RES (1346)..(1347): Selenocysteine
  MOD_RES (1359)..(1359): Selenocysteine
  MOD_RES (1368)..(1368): Selenocysteine
  MOD_RES (1405)..(1405): Selenocysteine
  MOD_RES (1416)..(1416): Selenocysteine
  MOD_RES (1468)..(1468): Selenocysteine
  MOD_RES (1501)..(1501): Selenocysteine
  MOD_RES (1508)..(1508): Selenocysteine
  MOD_RES (1572)..(1572): Selenocysteine
MEAAXXLHPGPRPALPLGGPGPLGEFLPPPECPVFEPSWEEFADPFAFIHKIRPIAEQXGICKVRPPPDWQPPFACDVDKLHFXPRIQRLNELEAQXRVKLNFLDQIAKYWELQGSXLKIPHVERKILDLFQLNKLVAEEGGFAVVCKDRKWXKIAXKMGFAPGKAVGSHIRGHYERILNPYNLFLSGDSLRCLQKPNLXXDXKDKEYKPHDIPQRQSVQPSEXCPPARRAKRMRAERQSLAVLPRLECSGAILAHCNLRLLDSSNSSASASQAMNIKIEPEEXXEARXHNLRRRMGCPXPKCENEKEMKSSIKQEPIERKDYIVENEKEKPKSRSKKAXNAVDLYVCLLCGSGNDEDRLLLCDGCDDSYHXFCLIPPLHDVPKGDWRCPKCLAQECSKPQEAFGFEQAARDYXLRXFGEMADAFKSDYFNMPVHMVPXELVEKEFWRLVSXIEEDVXVEYGADIASKEFGSGFPVRDGKIKLSPEEEEYLDSGWNLNNMPVMEQSVLAHIXADICGMKLPWLYVGMCFSSFCWHIEDHWSYSINYLHWGEPKXWYGVPGYAAEQLENVMKKLAPELFVSQPDLLHQLVXIMNPNXLMXHEVPVYRXNQCAGEFVIXFPRAYHSGFNQGFNFAEAVNFCXVDWLPLGRQCVEHYRLLHRYCVFSHDEMICKMASKADVLDVVVASXVQKDMAIMIEDEKALREXVRKLGVIDSERMDFELLPDDERQCVKCKXXCFMSAISCSCKPGLLVCLHHVKELCSCPPYKYKLRYRYXLDDLYPMMNALKLRAESYNEWALNVNEALEAKINKKKSLVSFKALIEESEMKKFPDNDLLRHLRLVXQDAEKCASVAQQLLNGKRQXRYRSGGGKSQNQLXVNELRQFVXQLYALPCVLSQXPLLKDLLNRVEDFQQHSQKLLSEEXPSAAELQDLLDVSFEFDVELPQLAEMRIRLEQARWLEEVQQACLDPSSLXLDDMRRLIDLGVGLAPYSAVEKAMARLQELLXVSEHWDDKAKSLLKARPRHSLNSLAXAVKEIEEIPAYLPNGAALKDSVQRARDWLQDVEGLQAGGRVPVLDXLIELVXRGRSIPVHLNSLPRLEXLVAEVQAWKECAVNXFLXENSPYSLLEVLCPRCDIGLLGLKRKQRKLKEPLPNGKKKSXKLESLSDLERALXESKEXASAMAXLGEARLREMEALQSLRLANEGKLLSPLQDVDIKICLCQKAPAAPMIQCELCRDAFHXSCVAVPSISQGLRIWLCPHCRRSEKPPLEKILPLLASLQRIRVRLPEGDALRYMIERXVNWQHRAQQLLSSGNLKFVQDRVGSGLLYSRWQASAGQVSDXNKVSQPPGXXSFSLPDDWDNRXSYLHSPFSXGRSCIPLHGVSPEVNELLMEAQLLQVSLPEIQELYQXLLAKPSPAQQXDRSSPVRPSSEKNDCCRGKRDGINSLERKLKRRLEREGLSSERWERVKKMRXPKKKKIKLSHPKDMNNFKLERERSYELVRSAEXHSLPSDXSYSEQEDSEDEDAICPAVSCLQPEGDEVDWVQCDGSCNQWFHQVCVGVSPEMAEKEDYICVRCXVKDAPSRK

SEQ ID NO: 14324 - protein, 1275 aa, Homo sapiens
  MOD_RES (42)..(43): Selenocysteine
  MOD_RES (45)..(45): Selenocysteine
  MOD_RES (66)..(66): Selenocysteine
  MOD_RES (90)..(91): Selenocysteine
  MOD_RES (95)..(95): Selenocysteine
  MOD_RES (106)..(106): Selenocysteine
  MOD_RES (146)..(146): Selenocysteine
  MOD_RES (178)..(178): Selenocysteine
  MOD_RES (220)..(220): Selenocysteine
  MOD_RES (223)..(223): Selenocysteine
  MOD_RES (245)..(245): Selenocysteine
  MOD_RES (258)..(258): Selenocysteine
  MOD_RES (264)..(264): Selenocysteine
  MOD_RES (318)..(318): Selenocysteine
  MOD_RES (360)..(360): Selenocysteine
  MOD_RES (396)..(396): Selenocysteine
  MOD_RES (402)..(402): Selenocysteine
  MOD_RES (405)..(405): Selenocysteine
  MOD_RES (413)..(413): Selenocysteine
  MOD_RES (423)..(423): Selenocysteine
  MOD_RES (446)..(446): Selenocysteine
  MOD_RES (492)..(492): Selenocysteine
  MOD_RES (510)..(510): Selenocysteine
  MOD_RES (539)..(540): Selenocysteine
  MOD_RES (579)..(579): Selenocysteine
  MOD_RES (646)..(646): Selenocysteine
  MOD_RES (666)..(666): Selenocysteine
  MOD_RES (680)..(680): Selenocysteine
  MOD_RES (689)..(689): Selenocysteine
  MOD_RES (701)..(701): Selenocysteine
  MOD_RES (726)..(726): Selenocysteine
  MOD_RES (776)..(776): Selenocysteine
  MOD_RES (808)..(808): Selenocysteine
  MOD_RES (834)..(834): Selenocysteine
  MOD_RES (880)..(880): Selenocysteine
  MOD_RES (886)..(886): Selenocysteine
  MOD_RES (903)..(903): Selenocysteine
  MOD_RES (918)..(918): Selenocysteine
  MOD_RES (921)..(921): Selenocysteine
  MOD_RES (962)..(962): Selenocysteine
  MOD_RES (975)..(975): Selenocysteine
  MOD_RES (980)..(980): Selenocysteine
  MOD_RES (986)..(986): Selenocysteine
  MOD_RES (1043)..(1043): Selenocysteine
  MOD_RES (1101)..(1101): Selenocysteine
  MOD_RES (1143)..(1143): Selenocysteine
  MOD_RES (1152)..(1153): Selenocysteine
  MOD_RES (1165)..(1165): Selenocysteine
  MOD_RES (1174)..(1174): Selenocysteine
  MOD_RES (1211)..(1211): Selenocysteine
  MOD_RES (1222)..(1222): Selenocysteine
  MOD_RES (1274)..(1274): Selenocysteine
MGFAPGKAVGSHIRGHYERILNPYNLFLSGDSLRCLQKPNLXXDXKDKEYKPHDIPQRQSVQPSEXCPPARRAKRMRAEAMNIKIEPEEXXEARXHNLRRRMGCPXPKCENEKEMKSSIKQEPIERKDYIVENEKEKPKSRSKKAXNAVDLYVCLLCGSGNDEDRLLLCDGCDDSYHXFCLIPPLHDVPKGDWRCPKCLAQECSKPQEAFGFEQAARDYXLRXFGEMADAFKSDYFNMPVHMVPXELVEKEFWRLVSXIEEDVXVEYGADIASKEFGSGFPVRDGKIKLSPEEEEYLDSGWNLNNMPVMEQSVLAHIXADICGMKLPWLYVGMCFSSFCWHIEDHWSYSINYLHWGEPKXWYGVPGYAAEQLENVMKKLAPELFVSQPDLLHQLVXIMNPNXLMXHEVPVYRXNQCAGEFVIXFPRAYHSGFNQGFNFAEAVNFCXVDWLPLGRQCVEHYRLLHRYCVFSHDEMICKMASKADVLDVVVASXVQKDMAIMIEDEKALREXVRKLGVIDSERMDFELLPDDERQCVKCKXXCFMSAISCSCKPGLLVCLHHVKELCSCPPYKYKLRYRYXLDDLYPMMNALKLRAESYNEWALNVNEALEAKINKKKSLVSFKALIEESEMKKFPDNDLLRHLRLVXQDAEKCASVAQQLLNGKRQXRYRSGGGKSQNQLXVNELRQFVXQLYALPCVLSQXPLLKDLLNRVEDFQQHSQKLLSEEXPSAAELQDLLDVSFEFDVELPQLAEMRIRLEQARWLEEVQQACLDPSSLXLDDMRRLIDLGVGLAPYSAVEKAMARLQELLXVSEHWDDKAKSLLKARPRHSLNSLAXAVKEIEEIPAYLPNGAALKDSVQRARDWLQDVEGLQAGGRVPVLDXLIELVXRGRSIPVHLNSLPRLEXLVAEVQAWKECAVNXFLXENSPYSLLEVLCPRCDIGLLGLKRKQRKLKEPLPNGKKKSXKLESLSDLERALXESKEXASAMAXLGEARLREMEALQSLRLANEGKLLSPLQDVDIKICLCQKAPAAPMIQCELCRDAFHXSCVAVPSISQGLRIWLCPHCRRSEKPPLEKILPLLASLQRIRVRLPEGDALRYMIERXVNWQHRAQQLLSSGNLKFVQDRVGSGLLYSRWQASAGQVSDXNKVSQPPGXXSFSLPDDWDNRXSYLHSPFSXGRSCIPLHGVSPEVNELLMEAQLLQVSLPEIQELYQXLLAKPSPAQQXDRSSPVRPSSEKNDCCRGKRDGINSLERKLKRRLEREGLSSERWERVKKMRXP

SEQ ID NO: 14325 - protein, 53 aa, Homo sapiens
MEPGSDDFLPPPECPVFEPSWAEFRDPLGYIAKIRPIAEKSGICKIRPPAAGV

SEQ ID NO: 14326 - protein, 1559 aa, Homo sapiens
  MOD_RES (66)..(66): Selenocysteine
  MOD_RES (79)..(79): Selenocysteine
  MOD_RES (177)..(177): Selenocysteine
  MOD_RES (222)..(222): Selenocysteine
  MOD_RES (255)..(255): Selenocysteine
  MOD_RES (269)..(269): Selenocysteine
  MOD_RES (285)..(285): Selenocysteine
  MOD_RES (289)..(289): Selenocysteine
  MOD_RES (305)..(305): Selenocysteine
  MOD_RES (308)..(308): Selenocysteine
  MOD_RES (388)..(388): Selenocysteine
  MOD_RES (392)..(392): Selenocysteine
  MOD_RES (417)..(417): Selenocysteine
  MOD_RES (436)..(436): Selenocysteine
  MOD_RES (462)..(462): Selenocysteine
  MOD_RES (470)..(470): Selenocysteine
  MOD_RES (532)..(532): Selenocysteine
  MOD_RES (552)..(552): Selenocysteine
  MOD_RES (568)..(568): Selenocysteine
  MOD_RES (574)..(574): Selenocysteine
  MOD_RES (585)..(585): Selenocysteine
  MOD_RES (595)..(595): Selenocysteine
  MOD_RES (618)..(618): Selenocysteine
  MOD_RES (689)..(689): Selenocysteine
  MOD_RES (711)..(712): Selenocysteine
  MOD_RES (751)..(751): Selenocysteine
  MOD_RES (771)..(771): Selenocysteine
  MOD_RES (848)..(848): Selenocysteine
  MOD_RES (850)..(850): Selenocysteine
  MOD_RES (936)..(936): Selenocysteine
  MOD_RES (945)..(945): Selenocysteine
  MOD_RES (977)..(977): Selenocysteine
  MOD_RES (1000)..(1000): Selenocysteine
  MOD_RES (1076)..(1076): Selenocysteine
  MOD_RES (1087)..(1087): Selenocysteine
  MOD_RES (1096)..(1096): Selenocysteine
  MOD_RES (1112)..(1112): Selenocysteine
  MOD_RES (1129)..(1129): Selenocysteine
  MOD_RES (1166)..(1166): Selenocysteine
  MOD_RES (1179)..(1179): Selenocysteine
  MOD_RES (1183)..(1184): Selenocysteine
  MOD_RES (1227)..(1227): Selenocysteine
  MOD_RES (1239)..(1239): Selenocysteine
  MOD_RES (1256)..(1256): Selenocysteine
  MOD_RES (1281)..(1281): Selenocysteine
  MOD_RES (1301)..(1301): Selenocysteine
  MOD_RES (1357)..(1357): Selenocysteine
  MOD_RES (1384)..(1384): Selenocysteine
  MOD_RES (1394)..(1394): Selenocysteine
  MOD_RES (1411)..(1411): Selenocysteine
  MOD_RES (1435)..(1435): Selenocysteine
  MOD_RES (1501)..(1501): Selenocysteine
  MOD_RES (1512)..(1513): Selenocysteine
  MOD_RES (1518)..(1518): Selenocysteine
  MOD_RES (1531)..(1532): Selenocysteine
  MOD_RES (1541)..(1541): Selenocysteine
  MOD_RES (1543)..(1543): Selenocysteine
MEPGSDDFLPPPECPVFEPSWAEFRDPLGYIAKIRPIAEKSGICKIRPPADWQPPFAVEVDNFRFXPRIQRLNELEAQXRVKLNYLDQIAKFWEIQGSSLKIPNVERRILDLYSLSKIVVEEGGYEAICKDRRWARVAQRLNYPPGKNIGSLLRSHYERIVYPYEMYQSGANLVCNXRPFDNEEKDKEYKPHSIPLRQSVQPSKFNSYGRRAKRLQPDPEPXEEDIEKNPELKKLQIYGAGPKMMGLGLMAKDKXLRKKDKEGPECPPXVVVKEELGGDVKVESXSPKXFLESKEELSHSPEPCXKMXMRLRRNHSNAQFIESYVCRMCSRGDEDDKLLLCDGCDDNYHIFCLLPPLPEIPKGVWRCPKCVMAECKRPPEAFGFEQAXREYXLQSFGEMADSFKADYFNMPVHMVPXELVEKEFWRLVNSIEEDVXVEYGADIHSKEFGSGFPVSDSKRHLXPEEEEYAXSGWNLNVMPVLEQSVLCHINADISGMKVPWLYVGMVFSAFCWHIEDHWSYSINYLHWGEPKXWYGVPSLAAEHLEEVMKKLXPELFDSQPDLLHQLVXLMNPNXLMSHGVPVVRXNQCAGEFVIXFPRAYHSGFNQGYNFAEAVNFCXADWLPAGRQCIEHYRRLRRYCVFSHEELICKMAACPEKLDLNLAAAVHKEMFIMVQEERRLRKALLEKGIXEAEREAFELLPDDERQCIKCKXXCFLSALACYDCPDGLVCLSHINDLCKCSSSRQYLRYRYXLDELPAMLHKLKVRAESFDXWANKVRVALEVEDGRKRSLEELRALESEARERRFPNSELLQQLKNCLSEAEACVSRALGLVSGQEAGPHRVAGLQMXLXELRAFLDQMNNLPCAMHQIGDVKGVLEQVEAYQAEAREALASLPSSPGLLQSLLERGRQLGVEVPEAQQLQRQVEQARWLDEVKRXLAPSARRGXLAVMRGLLVAGASVAPSPAVDKAQAELQELLXIAERWEEKAHLCLEARQKHPPAXLEAIIREAENIPVHLPNIQALKEALAKARAWIADVDEIQNGDHYPCLDDLEGLVAVGRDLPVGLEELRQLELQVLXAHSWREKASKXFLKKNSCYXLLEVLCPCADAGSDSXKRSRWMEKELGLYKSDXELLGLSAQDLRDPGSVIVAFKEGEQKEKEGILQLRRXNSAKPSPLASSSXASSXXSICVCGQVLAGAGALQCDLCQDWFHGRCVSVPRLLSSPRPNPXSSPLLAWWEWDXKFLCPLCMRSRRPRLEXILALLVALQRLPVRLPEGEALQCLXERAISWQGRARQALASEDVXALLGRLAELRQRLQAEPRPEEPPNYPAAPASDPLREGSGKDMPKVQGLLENGDSVXSPEKVAPEEGSGKRDLELLSSLLPQLXGPVLELPEAXRAPLEELMMEGDLLEVXLDENHSIWQLLQAGQPPDLERIRXLLELEKAERHGSRARGRALERRRRRKVDRGGEGDDPAREELEPKRVRSSGPEAEEVQEEEELEEEXGGEGPPAPIPXXGSPSXQENQNGLEPAEGXXSGPSAPFSXLXPRLHLPCPQQPPQQQL

SEQ ID NO: 14327 - protein, 1557 aa, Homo sapiens
  MOD_RES (66)..(66): Selenocysteine
  MOD_RES (79)..(79): Selenocysteine
  MOD_RES (178)..(178): Selenocysteine
  MOD_RES (223)..(223): Selenocysteine
  MOD_RES (256)..(256): Selenocysteine
  MOD_RES (270)..(270): Selenocysteine
  MOD_RES (286)..(286): Selenocysteine
  MOD_RES (290)..(290): Selenocysteine
  MOD_RES (306)..(306): Selenocysteine
  MOD_RES (309)..(309): Selenocysteine
  MOD_RES (389)..(389): Selenocysteine
  MOD_RES (393)..(393): Selenocysteine
  MOD_RES (418)..(418): Selenocysteine
  MOD_RES (437)..(437): Selenocysteine
  MOD_RES (463)..(463): Selenocysteine
  MOD_RES (471)..(471): Selenocysteine
  MOD_RES (533)..(533): Selenocysteine
  MOD_RES (553)..(553): Selenocysteine
  MOD_RES (569)..(569): Selenocysteine
  MOD_RES (575)..(575): Selenocysteine
  MOD_RES (586)..(586): Selenocysteine
  MOD_RES (596)..(596): Selenocysteine
  MOD_RES (619)..(619): Selenocysteine
  MOD_RES (690)..(690): Selenocysteine
  MOD_RES (712)..(713): Selenocysteine
  MOD_RES (752)..(752): Selenocysteine
  MOD_RES (772)..(772): Selenocysteine
  MOD_RES (849)..(849): Selenocysteine
  MOD_RES (851)..(851): Selenocysteine
  MOD_RES (937)..(937): Selenocysteine
  MOD_RES (946)..(946): Selenocysteine
  MOD_RES (978)..(978): Selenocysteine
  MOD_RES (1001)..(1001): Selenocysteine
  MOD_RES (1077)..(1077): Selenocysteine
  MOD_RES (1088)..(1088): Selenocysteine
  MOD_RES (1097)..(1097): Selenocysteine
  MOD_RES (1113)..(1113): Selenocysteine
  MOD_RES (1130)..(1130): Selenocysteine
  MOD_RES (1167)..(1167): Selenocysteine
  MOD_RES (1180)..(1180): Selenocysteine
  MOD_RES (1184)..(1185): Selenocysteine
  MOD_RES (1228)..(1228): Selenocysteine
  MOD_RES (1240)..(1240): Selenocysteine
  MOD_RES (1257)..(1257): Selenocysteine
  MOD_RES (1282)..(1282): Selenocysteine
  MOD_RES (1302)..(1302): Selenocysteine
  MOD_RES (1358)..(1358): Selenocysteine
  MOD_RES (1382)..(1382): Selenocysteine
  MOD_RES (1392)..(1392): Selenocysteine
  MOD_RES (1409)..(1409): Selenocysteine
  MOD_RES (1433)..(1433): Selenocysteine
  MOD_RES (1499)..(1499): Selenocysteine
  MOD_RES (1510)..(1511): Selenocysteine
  MOD_RES (1516)..(1516): Selenocysteine
  MOD_RES (1529)..(1530): Selenocysteine
  MOD_RES (1539)..(1539): Selenocysteine
  MOD_RES (1541)..(1541): Selenocysteine
MEPGSDDFLPPPECPVFEPSWAEFRDPLGYIAKIRPIAEKSGICKIRPPADWQPPFAVEVDNFRFXPRIQRLNELEAQXRVKLNYLDQIAKFWEIQGSSLKIPNVERRILDLYSLSKIVVEEGGYEAICKDRRWARVAQRLNYPPGKNIGSLLRSHYERIVYPYEMYQSGANLVQCNXRPFDNEEKDKEYKPHSIPLRQSVQPSKFNSYGRRAKRLQPDPEPXEEDIEKNPELKKLQIYGAGPKMMGLGLMAKDKXLRKKDKEGPECPPXVVVKEELGGDVKVESXSPKXFLESKEELSHSPEPCXKMXMRLRRNHSNAQFIESYVCRMCSRGDEDDKLLLCDGCDDNYHIFCLLPPLPEIPKGVWRCPKCVMAECKRPPEAFGFEQAXREYXLQSFGEMADSFKADYFNMPVHMVPXELVEKEFWRLVNSIEEDVXVEYGADIHSKEFGSGFPVSDSKRHLXPEEEEYAXSGWNLNVMPVLEQSVLCHINADISGMKVPWLYVGMVFSAFCWHIEDHWSYSINYLHWGEPKXWYGVPSLAAEHLEEVMKKLXPELFDSQPDLLHQLVXLMNPNXLMSHGVPVVRXNQCAGEFVIXFPRAYHSGFNQGYNFAEAVNFCXADWLPAGRQCIEHYRRLRRYCVFSHEELICKMAACPEKLDLNLAAAVHKEMFIMVQEERRLRKALLEKGIXEAEREAFELLPDDERQCIKCKXXCFLSALACYDCPDGLVCLSHINDLCKCSSSRQYLRYRYXLDELPAMLHKLKVRAESFDXWANKVRVALEVEDGRKRSLEELRALESEARERRFPNSELLQQLKNCLSEAEACVSRALGLVSGQEAGPHRVAGLQMXLXELRAFLDQMNNLPCAMHQIGDVKGVLEQVEAYQAEAREALASLPSSPGLLQSLLERGRQLGVEVPEAQQLQRQVEQARWLDEVKRXLAPSARRGXLAVMRGLLVAGASVAPSPAVDKAQAELQELLXIAERWEEKAHLCLEARQKHPPAXLEAIIREAENIPVHLPNIQALKEALAKARAWIADVDEIQNGDHYPCLDDLEGLVAVGRDLPVGLEELRQLELQVLXAHSWREKASKXFLKKNSCYXLLEVLCPCADAGSDSXKRSRWMEKELGLYKSDXELLGLSAQDLRDPGSVIVAFKEGEQKEKEGILQLRRXNSAKPSPLASSSXASSXXSICVCGQVLAGAGALQCDLCQDWFHGRCVSVPRLLSSPRPNPXSSPLLAWWEWDXKFLCPLCMRSRRPRLEXILALLVALQRLPVRLPEGEALQCLXERAISWQGRARQALASEDVXALLGRLAELRQRLQAEPRPEEPPNYPAAPASDPLREGSGKDMPKVQGLLENGDSVXSPEKVAPEEGSDLELLSSLLPQLXGPVLELPEAXRAPLEELMMEGDLLEVXLDENHSIWQLLQAGQPPDLERIRXLLELEKAERHGSRARGRALERRRRRKVDRGGEGDDPAREELEPKRVRSSGPEAEEVQEEEELEEEXGGEGPPAPIPXXGSPSXQENQNGLEPAEGXXSGPSAPFSXLXPRLHLPCPQQPPQQQL

SEQ ID NO: 14328 - protein, 1560 aa, Homo sapiens
  MOD_RES (66)..(66): Selenocysteine
  MOD_RES (79)..(79): Selenocysteine
  MOD_RES (178)..(178): Selenocysteine
  MOD_RES (223)..(223): Selenocysteine
  MOD_RES (256)..(256): Selenocysteine
  MOD_RES (270)..(270): Selenocysteine
  MOD_RES (286)..(286): Selenocysteine
  MOD_RES (290)..(290): Selenocysteine
  MOD_RES (306)..(306): Selenocysteine
  MOD_RES (309)..(309): Selenocysteine
  MOD_RES (389)..(389): Selenocysteine
  MOD_RES (393)..(393): Selenocysteine
  MOD_RES (418)..(418): Selenocysteine
  MOD_RES (437)..(437): Selenocysteine
  MOD_RES (463)..(463): Selenocysteine
  MOD_RES (471)..(471): Selenocysteine
  MOD_RES (533)..(533): Selenocysteine
  MOD_RES (553)..(553): Selenocysteine
  MOD_RES (569)..(569): Selenocysteine
  MOD_RES (575)..(575): Selenocysteine
  MOD_RES (586)..(586): Selenocysteine
  MOD_RES (596)..(596): Selenocysteine
  MOD_RES (619)..(619): Selenocysteine
  MOD_RES (690)..(690): Selenocysteine
  MOD_RES (712)..(713): Selenocysteine
  MOD_RES (752)..(752): Selenocysteine
  MOD_RES (772)..(772): Selenocysteine
  MOD_RES (849)..(849): Selenocysteine
  MOD_RES (851)..(851): Selenocysteine
  MOD_RES (937)..(937): Selenocysteine
  MOD_RES (946)..(946): Selenocysteine
  MOD_RES (978)..(978): Selenocysteine
  MOD_RES (1001)..(1001): Selenocysteine
  MOD_RES (1077)..(1077): Selenocysteine
  MOD_RES (1088)..(1088): Selenocysteine
  MOD_RES (1097)..(1097): Selenocysteine
  MOD_RES (1113)..(1113): Selenocysteine
  MOD_RES (1130)..(1130): Selenocysteine
  MOD_RES (1167)..(1167): Selenocysteine
  MOD_RES (1180)..(1180): Selenocysteine
  MOD_RES (1184)..(1185): Selenocysteine
  MOD_RES (1228)..(1228): Selenocysteine
  MOD_RES (1240)..(1240): Selenocysteine
  MOD_RES (1257)..(1257): Selenocysteine
  MOD_RES (1282)..(1282): Selenocysteine
  MOD_RES (1302)..(1302): Selenocysteine
  MOD_RES (1358)..(1358): Selenocysteine
  MOD_RES (1385)..(1385): Selenocysteine
  MOD_RES (1395)..(1395): Selenocysteine
  MOD_RES (1412)..(1412): Selenocysteine
  MOD_RES (1436)..(1436): Selenocysteine
  MOD_RES (1502)..(1502): Selenocysteine
  MOD_RES (1513)..(1514): Selenocysteine
  MOD_RES (1519)..(1519): Selenocysteine
  MOD_RES (1532)..(1533): Selenocysteine
  MOD_RES (1542)..(1542): Selenocysteine
  MOD_RES (1544)..(1544): Selenocysteine
MEPGSDDFLPPPECPVFEPSWAEFRDPLGYIAKIRPIAEKSGICKIRPPADWQPPFAVEVDNFRFXPRIQRLNELEAQXRVKLNYLDQIAKFWEIQGSSLKIPNVERRILDLYSLSKIVVEEGGYEAICKDRRWARVAQRLNYPPGKNIGSLLRSHYERIVYPYEMYQSGANLVQCNXRPFDNEEKDKEYKPHSIPLRQSVQPSKFNSYGRRAKRLQPDPEPXEEDIEKNPELKKLQIYGAGPKMMGLGLMAKDKXLRKKDKEGPECPPXVVVKEELGGDVKVESXSPKXFLESKEELSHSPEPCXKMXMRLRRNHSNAQFIESYVCRMCSRGDEDDKLLLCDGCDDNYHIFCLLPPLPEIPKGVWRCPKCVMAECKRPPEAFGFEQAXREYXLQSFGEMADSFKADYFNMPVHMVPXELVEKEFWRLVNSIEEDVXVEYGADIHSKEFGSGFPVSDSKRHLXPEEEEYAXSGWNLNVMPVLEQSVLCHINADISGMKVPWLYVGMVFSAFCWHIEDHWSYSINYLHWGEPKXWYGVPSLAAEHLEEVMKKLXPELFDSQPDLLHQLVXLMNPNXLMSHGVPVVRXNQCAGEFVIXFPRAYHSGFNQGYNFAEAVNFCXADWLPAGRQCIEHYRRLRRYCVFSHEELICKMAACPEKLDLNLAAAVHKEMFIMVQEERRLRKALLEKGIXEAEREAFELLPDDERQCIKCKXXCFLSALACYDCPDGLVCLSHINDLCKCSSSRQYLRYRYXLDELPAMLHKLKVRAESFDXWANKVRVALEVEDGRKRSLEELRALESEARERRFPNSELLQQLKNCLSEAEACVSRALGLVSGQEAGPHRVAGLQMXLXELRAFLDQMNNLPCAMHQIGDVKGVLEQVEAYQAEAREALASLPSSPGLLQSLLERGRQLGVEVPEAQQLQRQVEQARWLDEVKRXLAPSARRGXLAVMRGLLVAGASVAPSPAVDKAQAELQELLXIAERWEEKAHLCLEARQKHPPAXLEAIIREAENIPVHLPNIQALKEALAKARAWIADVDEIQNGDHYPCLDDLEGLVAVGRDLPVGLEELRQLELQVLXAHSWREKASKXFLKKNSCYXLLEVLCPCADAGSDSXKRSRWMEKELGLYKSDXELLGLSAQDLRDPGSVIVAFKEGEQKEKEGILQLRRXNSAKPSPLASSSXASSXXSICVCGQVLAGAGALQCDLCQDWFHGRCVSVPRLLSSPRPNPXSSPLLAWWEWDXKFLCPLCMRSRRPRLEXILALLVALQRLPVRLPEGEALQCLXERAISWQGRARQALASEDVXALLGRLAELRQRLQAEPRPEEPPNYPAAPASDPLREGSGKDMPKVQGLLENGDSVXSPEKVAPEEGSGKRDLELLSSLLPQLXGPVLELPEAXRAPLEELMMEGDLLEVXLDENHSIWQLLQAGQPPDLERIRXLLELEKAERHGSRARGRALERRRRRKVDRGGEGDDPAREELEPKRVRSSGPEAEEVQEEEELEEEXGGEGPPAPIPXXGSPSXQENQNGLEPAEGXXSGPSAPFSXLXPRLHLPCPQQPPQQQL

SEQ ID NO: 14329 - protein, 99 aa, Homo sapiens
  MOD_RES (66)..(66): Selenocysteine
MEPGSDDFLPPPECPVFEPSWAEFRDPLGYIAKIRPIAEKSGICKIRPPADWQPPFAVEVDNFRFXPRIQRLNELEFQLLRRLRQEDHLSPGGQVYSQP

SEQ ID NO: 14330 - protein, 1516 aa, Homo sapiens
  MOD_RES (66)..(66): Selenocysteine
  MOD_RES (137)..(137): Selenocysteine
  MOD_RES (182)..(182): Selenocysteine
  MOD_RES (215)..(215): Selenocysteine
  MOD_RES (229)..(229): Selenocysteine
  MOD_RES (245)..(245): Selenocysteine
  MOD_RES (249)..(249): Selenocysteine
  MOD_RES (265)..(265): Selenocysteine
  MOD_RES (268)..(268): Selenocysteine
  MOD_RES (348)..(348): Selenocysteine
  MOD_RES (352)..(352): Selenocysteine
  MOD_RES (377)..(377): Selenocysteine
  MOD_RES (396)..(396): Selenocysteine
  MOD_RES (422)..(422): Selenocysteine
  MOD_RES (430)..(430): Selenocysteine
  MOD_RES (492)..(492): Selenocysteine
  MOD_RES (512)..(512): Selenocysteine
  MOD_RES (528)..(528): Selenocysteine
  MOD_RES (534)..(534): Selenocysteine
  MOD_RES (545)..(545): Selenocysteine
  MOD_RES (555)..(555): Selenocysteine
  MOD_RES (578)..(578): Selenocysteine
  MOD_RES (649)..(649): Selenocysteine
  MOD_RES (671)..(672): Selenocysteine
  MOD_RES (711)..(711): Selenocysteine
  MOD_RES (731)..(731): Selenocysteine
  MOD_RES (808)..(808): Selenocysteine
  MOD_RES (810)..(810): Selenocysteine
  MOD_RES (896)..(896): Selenocysteine
  MOD_RES (905)..(905): Selenocysteine
  MOD_RES (937)..(937): Selenocysteine
  MOD_RES (960)..(960): Selenocysteine
  MOD_RES (1036)..(1036): Selenocysteine
  MOD_RES (1047)..(1047): Selenocysteine
  MOD_RES (1056)..(1056): Selenocysteine
  MOD_RES (1072)..(1072): Selenocysteine
  MOD_RES (1089)..(1089): Selenocysteine
  MOD_RES (1126)..(1126): Selenocysteine
  MOD_RES (1139)..(1139): Selenocysteine
  MOD_RES (1143)..(1144): Selenocysteine
  MOD_RES (1187)..(1187): Selenocysteine
  MOD_RES (1199)..(1199): Selenocysteine
  MOD_RES (1216)..(1216): Selenocysteine
  MOD_RES (1241)..(1241): Selenocysteine
  MOD_RES (1261)..(1261): Selenocysteine
  MOD_RES (1317)..(1317): Selenocysteine
  MOD_RES (1341)..(1341): Selenocysteine
  MOD_RES (1351)..(1351): Selenocysteine
  MOD_RES (1368)..(1368): Selenocysteine
  MOD_RES (1392)..(1392): Selenocysteine
  MOD_RES (1458)..(1458): Selenocysteine
  MOD_RES (1469)..(1470): Selenocysteine
  MOD_RES (1475)..(1475): Selenocysteine
  MOD_RES (1488)..(1489): Selenocysteine
  MOD_RES (1498)..(1498): Selenocysteine
  MOD_RES (1500)..(1500): Selenocysteine
MEPGSDDFLPPPECPVFEPSWAEFRDPLGYIAKIRPIAEKSGICKIRPPADWQPPFAVEVDNFRFXPRIQRLNELEIVVEEGGYEAICKDRRWARVAQRLNYPPGKNIGSLLRSHYERIVYPYEMYQSGANLVQCNXRPFDNEEKDKEYKPHSIPLRQSVQPSKFNSYGRRAKRLQPDPEPXEEDIEKNPELKKLQIYGAGPKMMGLGLMAKDKXLRKKDKEGPECPPXVVVKEELGGDVKVESXSPKXFLESKEELSHSPEPCXKMXMRLRRNHSNAQFIESYVCRMCSRGDEDDKLLLCDGCDDNYHIFCLLPPLPEIPKGVWRCPKCVMAECKRPPEAFGFEQAXREYXLQSFGEMADSFKADYFNMPVHMVPXELVEKEFWRLVNSIEEDVXVEYGADIHSKEFGSGFPVSDSKRHLXPEEEEYAXSGWNLNVMPVLEQSVLCHINADISGMKVPWLYVGMVFSAFCWHIEDHWSYSINYLHWGEPKXWYGVPSLAAEHLEEVMKKLXPELFDSQPDLLHQLVXLMNPNXLMSHGVPVVRXNQCAGEFVIXFPRAYHSGFNQGYNFAEAVNFCXADWLPAGRQCIEHYRRLRRYCVFSHEELICKMAACPEKLDLNLAAAVHKEMFIMVQEERRLRKALLEKGIXEAEREAFELLPDDERQCIKCKXXCFLSALACYDCPDGLVCLSHINDLCKCSSSRQYLRYRYXLDELPAMLHKLKVRAESFDXWANKVRVALEVEDGRKRSLEELRALESEARERRFPNSELLQQLKNCLSEAEACVSRALGLVSGQEAGPHRVAGLQMXLXELRAFLDQMNNLPCAMHQIGDVKGVLEQVEAYQAEAREALASLPSSPGLLQSLLERGRQLGVEVPEAQQLQRQVEQARWLDEVKRXLAPSARRGXLAVMRGLLVAGASVAPSPAVDKAQAELQELLXIAERWEEKAHLCLEARQKHPPAXLEAIIREAENIPVHLPNIQALKEALAKARAWIADVDEIQNGDHYPCLDDLEGLVAVGRDLPVGLEELRQLELQVLXAHSWREKASKXFLKKNSCYXLLEVLCPCADAGSDSXKRSRWMEKELGLYKSDXELLGLSAQDLRDPGSVIVAFKEGEQKEKEGILQLRRXNSAKPSPLASSSXASSXXSICVCGQVLAGAGALQCDLCQDWFHGRCVSVPRLLSSPRPNPXSSPLLAWWEWDXKFLCPLCMRSRRPRLEXILALLVALQRLPVRLPEGEALQCLXERAISWQGRARQALASEDVXALLGRLAELRQRLQAEPRPEEPPNYPAAPASDPLREGSGKDMPKVQGLLENGDSVXSPEKVAPEEGSDLELLSSLLPQLXGPVLELPEAXRAPLEELMMEGDLLEVXLDENHSIWQLLQAGQPPDLERIRXLLELEKAERHGSRARGRALERRRRRKVDRGGEGDDPAREELEPKRVRSSGPEAEEVQEEEELEEEXGGEGPPAPIPXXGSPSXQENQNGLEPAEGXXSGPSAPFSXLXPRLHLPCPQQPPQQQL

SEQ ID NO: 14331 - protein, 1379 aa, Homo sapiens
  MOD_RES (111)..(111): Selenocysteine
  MOD_RES (156)..(156): Selenocysteine
  MOD_RES (189)..(189): Selenocysteine
  MOD_RES (203)..(203): Selenocysteine
  MOD_RES (219)..(219): Selenocysteine
  MOD_RES (223)..(223): Selenocysteine
  MOD_RES (239)..(239): Selenocysteine
  MOD_RES (242)..(242): Selenocysteine
  MOD_RES (322)..(322): Selenocysteine
  MOD_RES (326)..(326): Selenocysteine
  MOD_RES (351)..(351): Selenocysteine
  MOD_RES (370)..(370): Selenocysteine
  MOD_RES (396)..(396): Selenocysteine
  MOD_RES (404)..(404): Selenocysteine
  MOD_RES (466)..(466): Selenocysteine
  MOD_RES (486)..(486): Selenocysteine
  MOD_RES (502)..(502): Selenocysteine
  MOD_RES (508)..(508): Selenocysteine
  MOD_RES (519)..(519): Selenocysteine
  MOD_RES (529)..(529): Selenocysteine
  MOD_RES (552)..(552): Selenocysteine
  MOD_RES (623)..(623): Selenocysteine
  MOD_RES (645)..(646): Selenocysteine
  MOD_RES (685)..(685): Selenocysteine
  MOD_RES (705)..(705): Selenocysteine
  MOD_RES (782)..(782): Selenocysteine
  MOD_RES (784)..(784): Selenocysteine
  MOD_RES (870)..(870): Selenocysteine
  MOD_RES (879)..(879): Selenocysteine
  MOD_RES (911)..(911): Selenocysteine
  MOD_RES (934)..(934): Selenocysteine
  MOD_RES (1010)..(1010): Selenocysteine
  MOD_RES (1021)..(1021): Selenocysteine
  MOD_RES (1030)..(1030): Selenocysteine
  MOD_RES (1046)..(1046): Selenocysteine
  MOD_RES (1063)..(1063): Selenocysteine
  MOD_RES (1100)..(1100): Selenocysteine
  MOD_RES (1113)..(1113): Selenocysteine
  MOD_RES (1117)..(1118): Selenocysteine
  MOD_RES (1161)..(1161): Selenocysteine
  MOD_RES (1173)..(1173): Selenocysteine
  MOD_RES (1190)..(1190): Selenocysteine
  MOD_RES (1215)..(1215): Selenocysteine
  MOD_RES (1235)..(1235): Selenocysteine
  MOD_RES (1291)..(1291): Selenocysteine
  MOD_RES (1315)..(1315): Selenocysteine
  MOD_RES (1325)..(1325): Selenocysteine
  MOD_RES (1342)..(1342): Selenocysteine
  MOD_RES (1359)..(1359): Selenocysteine
MEPGSDDFLPPPECPVFEPSWAEFRDPLGYIAKIRPIAEKSGICKIRPPAIVVEEGGYEAICKDRRWARVAQRLNYPPGKNIGSLLRSHYERIVYPYEMYQSGANLVQCNXRPFDNEEKDKEYKPHSIPLRQSVQPSKFNSYGRRAKRLQPDPEPXEEDIEKNPELKKLQIYGAGPKMMGLGLMAKDKXLRKKDKEGPECPPXVVVKEELGGDVKVESXSPKXFLESKEELSHSPEPCXKMXMRLRRNHSNAQFIESYVCRMCSRGDEDDKLLLCDGCDDNYHIFCLLPPLPEIPKGVWRCPKCVMAECKRPPEAFGFEQAXREYXLQSFGEMADSFKADYFNMPVHMVPXELVEKEFWRLVNSIEEDVXVEYGADIHSKEFGSGFPVSDSKRHLXPEEEEYAXSGWNLNVMPVLEQSVLCHINADISGMKVPWLYVGMVFSAFCWHIEDHWSYSINYLHWGEPKXWYGVPSLAAEHLEEVMKKLXPELFDSQPDLLHQLVXLMNPNXLMSHGVPVVRXNQCAGEFVIXFPRAYHSGFNQGYNFAEAVNFCXADWLPAGRQCIEHYRRLRRYCVFSHEELICKMAACPEKLDLNLAAAVHKEMFIMVQEERRLRKALLEKGIXEAEREAFELLPDDERQCIKCKXXCFLSALACYDCPDGLVCLSHINDLCKCSSSRQYLRYRYXLDELPAMLHKLKVRAESFDXWANKVRVALEVEDGRKRSLEELRALESEARERRFPNSELLQQLKNCLSEAEACVSRALGLVSGQEAGPHRVAGLQMXLXELRAFLDQMNNLPCAMHQIGDVKGVLEQVEAYQAEAREALASLPSSPGLLQSLLERGRQLGVEVPEAQQLQRQVEQARWLDEVKRXLAPSARRGXLAVMRGLLVAGASVAPSPAVDKAQAELQELLXIAERWEEKAHLCLEARQKHPPAXLEAIIREAENIPVHLPNIQALKEALAKARAWIADVDEIQNGDHYPCLDDLEGLVAVGRDLPVGLEELRQLELQVLXAHSWREKASKXFLKKNSCYXLLEVLCPCADAGSDSXKRSRWMEKELGLYKSDXELLGLSAQDLRDPGSVIVAFKEGEQKEKEGILQLRRXNSAKPSPLASSSXASSXXSICVCGQVLAGAGALQCDLCQDWFHGRCVSVPRLLSSPRPNPXSSPLLAWWEWDXKFLCPLCMRSRRPRLEXILALLVALQRLPVRLPEGEALQCLXERAISWQGRARQALASEDVXALLGRLAELRQRLQAEPRPEEPPNYPAAPASDPLREGSGKDMPKVQGLLENGDSVXSPEKVAPEEGSDLELLSSLLPQLXGPVLELPEAXRAPLEELMMEGDLLEVXLDENHSIPESLDFCILXPRYCSDLSSWGPAPGVFPPW

SEQ ID NO: 14332 - protein, 74 aa, Homo sapiens
  MOD_RES (57)..(57): Selenocysteine
  MOD_RES (59)..(59): Selenocysteine
MEPGSDDFLPPPECPVFEPSWAEFRDPLGYIAKIRPIAEKSGICKIRPPASGIPALXPXPWGFLPCLFLYQAGV

SEQ ID NO: 14333 - protein, 293 aa, Homo sapiens
  MOD_RES (12)..(12): Selenocysteine
  MOD_RES (72)..(72): Selenocysteine
  MOD_RES (89)..(89): Selenocysteine
  MOD_RES (126)..(126): Selenocysteine
  MOD_RES (144)..(144): Selenocysteine
  MOD_RES (180)..(180): Selenocysteine
  MOD_RES (187)..(187): Selenocysteine
  MOD_RES (199)..(199): Selenocysteine
  MOD_RES (216)..(216): Selenocysteine
  MOD_RES (241)..(241): Selenocysteine
  MOD_RES (261)..(261): Selenocysteine
  MOD_RES (287)..(287): Selenocysteine
  MOD_RES (290)..(290): Selenocysteine
LPNIQALKEALXKAQAWIADVDEIQNGDHYPCLDDLEGLVAVGRDLPVGLEELRQLELQVLCPCADAGSDSXKRSRWMEKALGLYQCDXELLGLSAQDLRDPGSVIVAFKEGEQKEKEGILQLRRXNSAKPSPLAPSLMASSPXSICVCGQVPAGVGVLQCDLCQDWFHGQCVSVPHLLXSPKPSLXSSPLLAWWEWDXKFLCPLCMRSRRPRLEXILALLVALQRLPVRLPEGEALQCLXERAIGWQDRARKALASEDVXALLRQLAELRQQLQAKPRPEEASVYXSAXACD

SEQ ID NO: 14334 - protein, 425 aa, Homo sapiens
  MOD_RES (66)..(66): Selenocysteine
  MOD_RES (79)..(79): Selenocysteine
  MOD_RES (178)..(178): Selenocysteine
  MOD_RES (213)..(213): Selenocysteine
  MOD_RES (219)..(219): Selenocysteine
  MOD_RES (223)..(223): Selenocysteine
  MOD_RES (225)..(225): Selenocysteine
  MOD_RES (239)..(239): Selenocysteine
  MOD_RES (251)..(251): Selenocysteine
  MOD_RES (253)..(254): Selenocysteine
  MOD_RES (334)..(334): Selenocysteine
  MOD_RES (363)..(363): Selenocysteine
  MOD_RES (382)..(382): Selenocysteine
  MOD_RES (416)..(416): Selenocysteine
MEPGCDEFLPPPECPVFEPSWAEFQDPLGYIAKIRPIAEKSGICKIRPPADWQPPFAVEVDNFRFXPRVQRLNELEAQXRVKLNYLDQIAKFWEIQGSSLKIPNVERKILDLYSLSKIVIEEGGYEAICKDRRWARVAQRLHYPPGKNIGSLLRSHYERIIYPYEMFQSGANHVPEPXEEDIEKHPELKKLQIYGPGPKMMGLGLMAKDKDKXVHKKVXCPPXVXVKDEQSGGGNVSSXLLKQHLSLEPCXKXXMQLRKNHSSAQFIDSYICQVCSRGDEDDKLLFCDGCDDNYHIFCLLPPLPEIPRGIWRCPKCILAECKQPPEAFGFEQAXQEYSLQSFGEMADSFKSDYFNMPVHMVPXELVEKEFWRLVSSIEEDVXVEYGADIHSKEFGSGFPVSNSKQNLSPEEKEYAXSGWNLNVMP

SEQ ID NO: 14335 - protein, 1539 aa, Homo sapiens
  MOD_RES (66)..(66): Selenocysteine
  MOD_RES (79)..(79): Selenocysteine
  MOD_RES (178)..(178): Selenocysteine
  MOD_RES (223)..(223): Selenocysteine
  MOD_RES (258)..(258): Selenocysteine
  MOD_RES (264)..(264): Selenocysteine
  MOD_RES (268)..(268): Selenocysteine
  MOD_RES (270)..(270): Selenocysteine
  MOD_RES (284)..(284): Selenocysteine
  MOD_RES (296)..(296): Selenocysteine
  MOD_RES (298)..(299): Selenocysteine
  MOD_RES (379)..(379): Selenocysteine
  MOD_RES (408)..(408): Selenocysteine
  MOD_RES (427)..(427): Selenocysteine
  MOD_RES (461)..(461): Selenocysteine
  MOD_RES (523)..(523): Selenocysteine
  MOD_RES (543)..(543): Selenocysteine
  MOD_RES (559)..(559): Selenocysteine
  MOD_RES (565)..(565): Selenocysteine
  MOD_RES (576)..(576): Selenocysteine
  MOD_RES (586)..(586): Selenocysteine
  MOD_RES (609)..(609): Selenocysteine
  MOD_RES (647)..(647): Selenocysteine
  MOD_RES (680)..(680): Selenocysteine
  MOD_RES (702)..(703): Selenocysteine
  MOD_RES (742)..(742): Selenocysteine
  MOD_RES (748)..(748): Selenocysteine
  MOD_RES (762)..(762): Selenocysteine
  MOD_RES (832)..(832): Selenocysteine
  MOD_RES (836)..(836): Selenocysteine
  MOD_RES (838)..(838): Selenocysteine
  MOD_RES (880)..(880): Selenocysteine
  MOD_RES (965)..(965): Selenocysteine
  MOD_RES (988)..(988): Selenocysteine
  MOD_RES (996)..(996): Selenocysteine
  MOD_RES (1014)..(1014): Selenocysteine
  MOD_RES (1064)..(1064): Selenocysteine
  MOD_RES (1075)..(1075): Selenocysteine
  MOD_RES (1084)..(1084): Selenocysteine
  MOD_RES (1100)..(1100): Selenocysteine
  MOD_RES (1117)..(1117): Selenocysteine
  MOD_RES (1154)..(1154): Selenocysteine
  MOD_RES (1172)..(1172): Selenocysteine
  MOD_RES (1208)..(1208): Selenocysteine
  MOD_RES (1215)..(1215): Selenocysteine
  MOD_RES (1227)..(1227): Selenocysteine
  MOD_RES (1244)..(1244): Selenocysteine
  MOD_RES (1269)..(1269): Selenocysteine
  MOD_RES (1289)..(1289): Selenocysteine
  MOD_RES (1315)..(1315): Selenocysteine
  MOD_RES (1318)..(1318): Selenocysteine
  MOD_RES (1345)..(1345): Selenocysteine
  MOD_RES (1369)..(1369): Selenocysteine
  MOD_RES (1396)..(1396): Selenocysteine
  MOD_RES (1420)..(1420): Selenocysteine
  MOD_RES (1434)..(1434): Selenocysteine
  MOD_RES (1495)..(1495): Selenocysteine
  MOD_RES (1498)..(1498): Selenocysteine
MEPGCDEFLPPPECPVFEPSWAEFQDPLGYIAKIRPIAEKSGICKIRPPADWQPPFAVEVDNFRFXPRVQRLNELEAQXRVKLNYLDQIAKFWEIQGSSLKIPNVERKILDLYSLSKIVIEEGGYEAICKDRRWARVAQRLHYPPGKNIGSLLRSHYERIIYPYEMFQSGANHVQCNXHPFDNEVKDKEYKPHSIPLRQSVQPSKFSSYSRRAKRLQPDPEPXEEDIEKHPELKKLQIYGPGPKMMGLGLMAKDKDKXVHKKVXCPPXVXVKDEQSGGGNVSSXLLKQHLSLEPCXKXXMQLRKNHSSAQFIDSYICQVCSRGDEDDKLLFCDGCDDNYHIFCLLPPLPEIPRGIWRCPKCILAECKQPPEAFGFEQAXQEYSLQSFGEMADSFKSDYFNMPVHMVPXELVEKEFWRLVSSIEEDVXVEYGADIHSKEFGSGFPVSNSKQNLSPEEKEYAXSGWNLNVMPVLDQSVLCHINADISGMKVPWLYVGMVFSAFCWHIEDHWSYSINYLHWGEPKXWYGVPSLAAEHLEEVMKMLXPELFDSQPDLLHQLVXLMNPNXLMSHGVPVVRXNQCAGEFVIXFPRAYHSGFNQGYNFAEAVNFCXADWLPAGRQCIEHYRRLRRYCVFSHEELICKMAAFPEXLDLNLAVAVHKEMFIMVQEERRLRKALLEKGVXEAEREAFELLPDDERQCIKCKXXCFLSALACYDCPDGLVCLSHINDLCKCSSSRQYLRYRYXLDELPXMLHKLKIRAESFDXWANKVRVALEVEDGRKRSFEELRALESEARERRFPNSELLQRLKNCLSEVEACIAQVLGLVSGQVARMDXPQLXLXELRVLLEQMGSLPCAMHQIGDVKDVLEQVEAYQAEAREALAXLPSSPGLLRSLLERGQQLGVEVPEAHQLQQQVEQAQWLDEVKQALAPSAHRGSLVIMQGLLVMGAKIASSPSVDKARAELQELLXIAERWEEKAHFCLEARQKHPPAXLEAIIREXENIPVHLPNIQALKEALXKAQAWIADVDEIQNGDHYPCLDDLEGLVAVGRDLPVGLEELRQLELQVLXAHSWREKASKXFLKKNSCYXLLEVLCPCADAGSDSXKRSRWMEKALGLYQCDXELLGLSAQDLRDPGSVIVAFKEGEQKEKEGILQLRRXNSAKPSPLAPSLMASSPXSICVCGQVPAGVGVLQCDLCQDWFHGQCVSVPHLLXSPKPSLXSSPLLAWWEWDXKFLCPLCMRSRRPRLEXILALLVALQRLPVRLPEGEALQCLXERAIGWQDRARKALASEDVXALLRQLAELRQQLQAKPRPEEASVYXSAXACDPIREGSGNNISKVQGLLENGDSVXSPENMAPGKGSDLELLSSLLPQLXGPVLELPEAIRAPLEELMMEGDLLEVXLDENHSIWQLLQAGQPPDLDRIRXLLELEKFEHQGSRXRSRALERRRRRQKVDQGRNVENLVQQELQSKRARSSGIMSQVGREEEHYQEKADRENMFLXPSXDHSPFLKGNQNSLQHKDSGSSAACPSLMPLLQLSYSDEQQL

SEQ ID NO: 14336 - protein, 1570 aa, Homo sapiens
  MOD_RES (66)..(66): Selenocysteine
  MOD_RES (79)..(79): Selenocysteine
  MOD_RES (178)..(178): Selenocysteine
  MOD_RES (223)..(223): Selenocysteine
  MOD_RES (258)..(258): Selenocysteine
  MOD_RES (264)..(264): Selenocysteine
  MOD_RES (268)..(268): Selenocysteine
  MOD_RES (270)..(270): Selenocysteine
  MOD_RES (284)..(284): Selenocysteine
  MOD_RES (296)..(296): Selenocysteine
  MOD_RES (298)..(299): Selenocysteine
  MOD_RES (379)..(379): Selenocysteine
  MOD_RES (408)..(408): Selenocysteine
  MOD_RES (427)..(427): Selenocysteine
  MOD_RES (462)..(462): Selenocysteine
  MOD_RES (465)..(465): Selenocysteine
  MOD_RES (492)..(492): Selenocysteine
  MOD_RES (554)..(554): Selenocysteine
  MOD_RES (574)..(574): Selenocysteine
  MOD_RES (590)..(590): Selenocysteine
  MOD_RES (596)..(596): Selenocysteine
  MOD_RES (607)..(607): Selenocysteine
  MOD_RES (617)..(617): Selenocysteine
  MOD_RES (640)..(640): Selenocysteine
  MOD_RES (678)..(678): Selenocysteine
  MOD_RES (711)..(711): Selenocysteine
  MOD_RES (733)..(734): Selenocysteine
  MOD_RES (773)..(773): Selenocysteine
  MOD_RES (779)..(779): Selenocysteine
  MOD_RES (793)..(793): Selenocysteine
  MOD_RES (863)..(863): Selenocysteine
  MOD_RES (867)..(867): Selenocysteine
  MOD_RES (869)..(869): Selenocysteine
  MOD_RES (911)..(911): Selenocysteine
  MOD_RES (996)..(996): Selenocysteine
  MOD_RES (1019)..(1019): Selenocysteine
  MOD_RES (1027)..(1027): Selenocysteine
  MOD_RES (1045)..(1045): Selenocysteine
  MOD_RES (1095)..(1095): Selenocysteine
  MOD_RES (1106)..(1106): Selenocysteine
  MOD_RES (1115)..(1115): Selenocysteine
  MOD_RES (1131)..(1131): Selenocysteine
  MOD_RES (1148)..(1148): Selenocysteine
  MOD_RES (1185)..(1185): Selenocysteine
  MOD_RES (1203)..(1203): Selenocysteine
  MOD_RES (1239)..(1239): Selenocysteine
  MOD_RES (1246)..(1246): Selenocysteine
  MOD_RES (1258)..(1258): Selenocysteine
  MOD_RES (1275)..(1275): Selenocysteine
  MOD_RES (1300)..(1300): Selenocysteine
  MOD_RES (1320)..(1320): Selenocysteine
  MOD_RES (1346)..(1346): Selenocysteine
  MOD_RES (1349)..(1349): Selenocysteine
  MOD_RES (1376)..(1376): Selenocysteine
  MOD_RES (1400)..(1400): Selenocysteine
  MOD_RES (1427)..(1427): Selenocysteine
  MOD_RES (1451)..(1451): Selenocysteine
  MOD_RES (1465)..(1465): Selenocysteine
  MOD_RES (1526)..(1526): Selenocysteine
  MOD_RES (1529)..(1529): Selenocysteine
MEPGCDEFLPPPECPVFEPSWAEFQDPLGYIAKIRPIAEKSGICKIRPPADWQPPFAVEVDNFRFXPRVQRLNELEAQXRVKLNYLDQIAKFWEIQGSSLKIPNVERKILDLYSLSKIVIEEGGYEAICKDRRWARVAQRLHYPPGKNIGSLLRSHYERIIYPYEMFQSGANHVQCNXHPFDNEVKDKEYKPHSIPLRQSVQPSKFSSYSRRAKRLQPDPEPXEEDIEKHPELKKLQIYGPGPKMMGLGLMAKDKDKXVHKKVXCPPXVXVKDEQSGGGNVSSXLLKQHLSLEPCXKXXMQLRKNHSSAQFIDSYICQVCSRGDEDDKLLFCDGCDDNYHIFCLLPPLPEIPRGIWRCPKCILAECKQPPEAFGFEQAXQEYSLQSFGEMADSFKSDYFNMPVHMVPXELVEKEFWRLVSSIEEDVXVEYGADIHSKEFGSGFPVSNSKQNLSPEEKRQSLXVLXRLISSFWAQAVLPPWPPKVLGLQEYAXSGWNLNVMPVLDQSVLCHINADISGMKVPWLYVGMVFSAFCWHIEDHWSYSINYLHWGEPKXWYGVPSLAAEHLEEVMKMLXPELFDSQPDLLHQLVXLMNPNXLMSHGVPVVRXNQCAGEFVIXFPRAYHSGFNQGYNFAEAVNFCXADWLPAGRQCIEHYRRLRRYCVFSHEELICKMAAFPEXLDLNLAVAVHKEMFIMVQEERRLRKALLEKGVXEAEREAFELLPDDERQCIKCKXXCFLSALACYDCPDGLVCLSHINDLCKCSSSRQYLRYRYXLDELPXMLHKLKIRAESFDXWANKVRVALEVEDGRKRSFEELRALESEARERRFPNSELLQRLKNCLSEVEACIAQVLGLVSGQVARMDXPQLXLXELRVLLEQMGSLPCAMHQIGDVKDVLEQVEAYQAEAREALAXLPSSPGLLRSLLERGQQLGVEVPEAHQLQQQVEQAQWLDEVKQALAPSAHRGSLVIMQGLLVMGAKIASSPSVDKARAELQELLXIAERWEEKAHFCLEARQKHPPAXLEAIIREXENIPVHLPNIQALKEALXKAQAWIADVDEIQNGDHYPCLDDLEGLVAVGRDLPVGLEELRQLELQVLXAHSWREKASKXFLKKNSCYXLLEVLCPCADAGSDSXKRSRWMEKALGLYQCDXELLGLSAQDLRDPGSVIVAFKEGEQKEKEGILQLRRXNSAKPSPLAPSLMASSPXSICVCGQVPAGVGVLQCDLCQDWFHGQCVSVPHLLXSPKPSLXSSPLLAWWEWDXKFLCPLCMRSRRPRLEXILALLVALQRLPVRLPEGEALQCLXERAIGWQDRARKALASEDVXALLRQLAELRQQLQAKPRPEEASVYXSAXACDPIREGSGNNISKVQGLLENGDSVXSPENMAPGKGSDLELLSSLLPQLXGPVLELPEAIRAPLEELMMEGDLLEVXLDENHSIWQLLQAGQPPDLDRIRXLLELEKFEHQGSRXRSRALERRRRRQKVDQGRNVENLVQQELQSKRARSSGIMSQVGREEEHYQEKADRENMFLXPSXDHSPFLKGNQNSLQHKDSGSSAACPSLMPLLQLSYSDEQQL

SEQ ID NO: 14337 - protein, 1482 aa, Homo sapiens
  MOD_RES (66)..(66): Selenocysteine
  MOD_RES (79)..(79): Selenocysteine
  MOD_RES (121)..(121): Selenocysteine
  MOD_RES (166)..(166): Selenocysteine
  MOD_RES (201)..(201): Selenocysteine
  MOD_RES (207)..(207): Selenocysteine
  MOD_RES (211)..(211): Selenocysteine
  MOD_RES (213)..(213): Selenocysteine
  MOD_RES (227)..(227): Selenocysteine
  MOD_RES (239)..(239): Selenocysteine
  MOD_RES (241)..(242): Selenocysteine
  MOD_RES (322)..(322): Selenocysteine
  MOD_RES (351)..(351): Selenocysteine
  MOD_RES (370)..(370): Selenocysteine
  MOD_RES (404)..(404): Selenocysteine
  MOD_RES (466)..(466): Selenocysteine
  MOD_RES (486)..(486): Selenocysteine
  MOD_RES (502)..(502): Selenocysteine
  MOD_RES (508)..(508): Selenocysteine
  MOD_RES (519)..(519): Selenocysteine
  MOD_RES (529)..(529): Selenocysteine
  MOD_RES (552)..(552): Selenocysteine
  MOD_RES (590)..(590): Selenocysteine
  MOD_RES (623)..(623): Selenocysteine
  MOD_RES (645)..(646): Selenocysteine
  MOD_RES (685)..(685): Selenocysteine
  MOD_RES (691)..(691): Selenocysteine
  MOD_RES (705)..(705): Selenocysteine
  MOD_RES (775)..(775): Selenocysteine
  MOD_RES (779)..(779): Selenocysteine
  MOD_RES (781)..(781): Selenocysteine
  MOD_RES (823)..(823): Selenocysteine
  MOD_RES (908)..(908): Selenocysteine
  MOD_RES (931)..(931): Selenocysteine
  MOD_RES (939)..(939): Selenocysteine
  MOD_RES (957)..(957): Selenocysteine
  MOD_RES (1007)..(1007): Selenocysteine
  MOD_RES (1018)..(1018): Selenocysteine
  MOD_RES (1027)..(1027): Selenocysteine
  MOD_RES (1043)..(1043): Selenocysteine
  MOD_RES (1060)..(1060): Selenocysteine
  MOD_RES (1097)..(1097): Selenocysteine
  MOD_RES (1115)..(1115): Selenocysteine
  MOD_RES (1151)..(1151): Selenocysteine
  MOD_RES (1158)..(1158): Selenocysteine
  MOD_RES (1170)..(1170): Selenocysteine
  MOD_RES (1187)..(1187): Selenocysteine
  MOD_RES (1212)..(1212): Selenocysteine
  MOD_RES (1232)..(1232): Selenocysteine
  MOD_RES (1258)..(1258): Selenocysteine
  MOD_RES (1261)..(1261): Selenocysteine
  MOD_RES (1288)..(1288): Selenocysteine
  MOD_RES (1312)..(1312): Selenocysteine
  MOD_RES (1339)..(1339): Selenocysteine
  MOD_RES (1363)..(1363): Selenocysteine
  MOD_RES (1377)..(1377): Selenocysteine
  MOD_RES (1438)..(1438): Selenocysteine
  MOD_RES (1441)..(1441): Selenocysteine
MEPGCDEFLPPPECPVFEPSWAEFQDPLGYIAKIRPIAEKSGICKIRPPADWQPPFAVEVDNFRFXPRVQRLNELEAQXRVKLNYLDQIAKFWEIQGSSLKIPNVERKILDLYSLSKQCNXHPFDNEVKDKEYKPHSIPLRQSVQPSKFSSYSRRAKRLQPDPEPXEEDIEKHPELKKLQIYGPGPKMMGLGLMAKDKDKXVHKKVXCPPXVXVKDEQSGGGNVSSXLLKQHLSLEPCXKXXMQLRKNHSSAQFIDSYICQVCSRGDEDDKLLFCDGCDDNYHIFCLLPPLPEIPRGIWRCPKCILAECKQPPEAFGFEQAXQEYSLQSFGEMADSFKSDYFNMPVHMVPXELVEKEFWRLVSSIEEDVXVEYGADIHSKEFGSGFPVSNSKQNLSPEEKEYAXSGWNLNVMPVLDQSVLCHINADISGMKVPWLYVGMVFSAFCWHIEDHWSYSINYLHWGEPKXWYGVPSLAAEHLEEVMKMLXPELFDSQPDLLHQLVXLMNPNXLMSHGVPVVRXNQCAGEFVIXFPRAYHSGFNQGYNFAEAVNFCXADWLPAGRQCIEHYRRLRRYCVFSHEELICKMAAFPEXLDLNLAVAVHKEMFIMVQEERRLRKALLEKGVXEAEREAFELLPDDERQCIKCKXXCFLSALACYDCPDGLVCLSHINDLCKCSSSRQYLRYRYXLDELPXMLHKLKIRAESFDXWANKVRVALEVEDGRKRSFEELRALESEARERRFPNSELLQRLKNCLSEVEACIAQVLGLVSGQVARMDXPQLXLXELRVLLEQMGSLPCAMHQIGDVKDVLEQVEAYQAEAREALAXLPSSPGLLRSLLERGQQLGVEVPEAHQLQQQVEQAQWLDEVKQALAPSAHRGSLVIMQGLLVMGAKIASSPSVDKARAELQELLXIAERWEEKAHFCLEARQKHPPAXLEAIIREXENIPVHLPNIQALKEALXKAQAWIADVDEIQNGDHYPCLDDLEGLVAVGRDLPVGLEELRQLELQVLXAHSWREKASKXFLKKNSCYXLLEVLCPCADAGSDSXKRSRWMEKALGLYQCDXELLGLSAQDLRDPGSVIVAFKEGEQKEKEGILQLRRXNSAKPSPLAPSLMASSPXSICVCGQVPAGVGVLQCDLCQDWFHGQCVSVPHLLXSPKPSLXSSPLLAWWEWDXKFLCPLCMRSRRPRLEXILALLVALQRLPVRLPEGEALQCLXERAIGWQDRARKALASEDVXALLRQLAELRQQLQAKPRPEEASVYXSAXACDPIREGSGNNISKVQGLLENGDSVXSPENMAPGKGSDLELLSSLLPQLXGPVLELPEAIRAPLEELMMEGDLLEVXLDENHSIWQLLQAGQPPDLDRIRXLLELEKFEHQGSRXRSRALERRRRRQKVDQGRNVENLVQQELQSKRARSSGIMSQVGREEEHYQEKADRENMFLXPSXDHSPFLKGNQNSLQHKDSGSSAACPSLMPLLQLSYSDEQQL

SEQ ID NO: 14338 - protein, 1476 aa, Homo sapiens
  MOD_RES (66)..(66): Selenocysteine
  MOD_RES (137)..(137): Selenocysteine
  MOD_RES (182)..(182): Selenocysteine
  MOD_RES (217)..(217): Selenocysteine
  MOD_RES (223)..(223): Selenocysteine
  MOD_RES (227)..(227): Selenocysteine
  MOD_RES (229)..(229): Selenocysteine
  MOD_RES (243)..(243): Selenocysteine
  MOD_RES (255)..(255): Selenocysteine
  MOD_RES (257)..(258): Selenocysteine
  MOD_RES (338)..(338): Selenocysteine
  MOD_RES (367)..(367): Selenocysteine
  MOD_RES (386)..(386): Selenocysteine
  MOD_RES (420)..(420): Selenocysteine
  MOD_RES (482)..(482): Selenocysteine
  MOD_RES (502)..(502): Selenocysteine
  MOD_RES (518)..(518): Selenocysteine
  MOD_RES (524)..(524): Selenocysteine
  MOD_RES (535)..(535): Selenocysteine
  MOD_RES (545)..(545): Selenocysteine
  MOD_RES (568)..(568): Selenocysteine
  MOD_RES (606)..(606): Selenocysteine
  MOD_RES (639)..(639): Selenocysteine
  MOD_RES (661)..(662): Selenocysteine
  MOD_RES (701)..(701): Selenocysteine
  MOD_RES (707)..(707): Selenocysteine
  MOD_RES (721)..(721): Selenocysteine
  MOD_RES (791)..(791): Selenocysteine
  MOD_RES (795)..(795): Selenocysteine
  MOD_RES (797)..(797): Selenocysteine
  MOD_RES (839)..(839): Selenocysteine
  MOD_RES (924)..(924): Selenocysteine
  MOD_RES (947)..(947): Selenocysteine
  MOD_RES (955)..(955): Selenocysteine
  MOD_RES (973)..(973): Selenocysteine
  MOD_RES (1023)..(1023): Selenocysteine
  MOD_RES (1034)..(1034): Selenocysteine
  MOD_RES (1043)..(1043): Selenocysteine
  MOD_RES (1059)..(1059): Selenocysteine
  MOD_RES (1076)..(1076): Selenocysteine
  MOD_RES (1113)..(1113): Selenocysteine
  MOD_RES (1131)..(1131): Selenocysteine
  MOD_RES (1167)..(1167): Selenocysteine
  MOD_RES (1174)..(1174): Selenocysteine
  MOD_RES (1186)..(1186): Selenocysteine
  MOD_RES (1203)..(1203): Selenocysteine
  MOD_RES (1228)..(1228): Selenocysteine
  MOD_RES (1248)..(1248): Selenocysteine
  MOD_RES (1274)..(1274): Selenocysteine
  MOD_RES (1277)..(1277): Selenocysteine
  MOD_RES (1304)..(1304): Selenocysteine
  MOD_RES (1328)..(1328): Selenocysteine
  MOD_RES (1355)..(1355): Selenocysteine
  MOD_RES (1379)..(1379): Selenocysteine
  MOD_RES (1393)..(1393): Selenocysteine
  MOD_RES (1454)..(1454): Selenocysteine
  MOD_RES (1457)..(1457): Selenocysteine
MEPGCDEFLPPPECPVFEPSWAEFQDPLGYIAKIRPIAEKSGICKIRPPADWQPPFAVEVDNFRFXPRVQRLNELEIVIEEGGYEAICKDRRWARVAQRLHYPPGKNIGSLLRSHYERIIYPYEMFQSGANHVQCNXHPFDNEVKDKEYKPHSIPLRQSVQPSKFSSYSRRAKRLQPDPEPXEEDIEKHPELKKLQIYGPGPKMMGLGLMAKDKDKXVHKKVXCPPXVXVKDEQSGGGNVSSXLLKQHLSLEPCXKXXMQLRKNHSSAQFIDSYICQVCSRGDEDDKLLFCDGCDDNYHIFCLLPPLPEIPRGIWRCPKCILAECKQPPEAFGFEQAXQEYSLQSFGEMADSFKSDYFNMPVHMVPXELVEKEFWRLVSSIEEDVXVEYGADIHSKEFGSGFPVSNSKQNLSPEEKEYAXSGWNLNVMPVLDQSVLCHINADISGMKVPWLYVGMVFSAFCWHIEDHWSYSINYLHWGEPKXWYGVPSLAAEHLEEVMKMLXPELFDSQPDLLHQLVXLMNPNXLMSHGVPVVRXNQCAGEFVIXFPRAYHSGFNQGYNFAEAVNFCXADWLPAGRQCIEHYRRLRRYCVFSHEELICKMAAFPEXLDLNLAVAVHKEMFIMVQEERRLRKALLEKGVXEAEREAFELLPDDERQCIKCKXXCFLSALACYDCPDGLVCLSHINDLCKCSSSRQYLRYRYXLDELPXMLHKLKIRAESFDXWANKVRVALEVEDGRKRSFEELRALESEARERRFPNSELLQRLKNCLSEVEACIAQVLGLVSGQVARMDXPQLXLXELRVLLEQMGSLPCAMHQIGDVKDVLEQVEAYQAEAREALAXLPSSPGLLRSLLERGQQLGVEVPEAHQLQQQVEQAQWLDEVKQALAPSAHRGSLVIMQGLLVMGAKIASSPSVDKARAELQELLXIAERWEEKAHFCLEARQKHPPAXLEAIIREXENIPVHLPNIQALKEALXKAQAWIADVDEIQNGDHYPCLDDLEGLVAVGRDLPVGLEELRQLELQVLXAHSWREKASKXFLKKNSCYXLLEVLCPCADAGSDSXKRSRWMEKALGLYQCDXELLGLSAQDLRDPGSVIVAFKEGEQKEKEGILQLRRXNSAKPSPLAPSLMASSPXSICVCGQVPAGVGVLQCDLCQDWFHGQCVSVPHLLXSPKPSLXSSPLLAWWEWDXKFLCPLCMRSRRPRLEXILALLVALQRLPVRLPEGEALQCLXERAIGWQDRARKALASEDVXALLRQLAELRQQLQAKPRPEEASVYXSAXACDPIREGSGNNISKVQGLLENGDSVXSPENMAPGKGSDLELLSSLLPQLXGPVLELPEAIRAPLEELMMEGDLLEVXLDENHSIWQLLQAGQPPDLDRIRXLLELEKFEHQGSRXRSRALERRRRRQKVDQGRNVENLVQQELQSKRARSSGIMSQVGREEEHYQEKADRENMFLXPSXDHSPFLKGNQNSLQHKDSG

SEQ ID NO: 14339 - protein, 1269 aa, Homo sapiens
  MOD_RES (18)..(18): Selenocysteine
  MOD_RES (45)..(45): Selenocysteine
  MOD_RES (157)..(157): Selenocysteine
  MOD_RES (177)..(177): Selenocysteine
  MOD_RES (193)..(193): Selenocysteine
  MOD_RES (210)..(210): Selenocysteine
  MOD_RES (220)..(220): Selenocysteine
  MOD_RES (231)..(231): Selenocysteine
  MOD_RES (240)..(240): Selenocysteine
  MOD_RES (296)..(296): Selenocysteine
  MOD_RES (336)..(336): Selenocysteine
  MOD_RES (355)..(355): Selenocysteine
  MOD_RES (363)..(363): Selenocysteine
  MOD_RES (383)..(383): Selenocysteine
  MOD_RES (392)..(392): Selenocysteine
  MOD_RES (421)..(421): Selenocysteine
  MOD_RES (425)..(425): Selenocysteine
  MOD_RES (428)..(428): Selenocysteine
  MOD_RES (453)..(453): Selenocysteine
  MOD_RES (462)..(462): Selenocysteine
  MOD_RES (470)..(470): Selenocysteine
  MOD_RES (477)..(477): Selenocysteine
  MOD_RES (484)..(484): Selenocysteine
  MOD_RES (497)..(497): Selenocysteine
  MOD_RES (530)..(530): Selenocysteine
  MOD_RES (533)..(533): Selenocysteine
  MOD_RES (537)..(537): Selenocysteine
  MOD_RES (539)..(539): Selenocysteine
  MOD_RES (548)..(548): Selenocysteine
  MOD_RES (565)..(565): Selenocysteine
  MOD_RES (571)..(571): Selenocysteine
  MOD_RES (574)..(574): Selenocysteine
  MOD_RES (589)..(589): Selenocysteine
  MOD_RES (612)..(612): Selenocysteine
  MOD_RES (633)..(633): Selenocysteine
  MOD_RES (640)..(640): Selenocysteine
  MOD_RES (652)..(652): Selenocysteine
  MOD_RES (654)..(654): Selenocysteine
  MOD_RES (662)..(662): Selenocysteine
  MOD_RES (664)..(664): Selenocysteine
  MOD_RES (675)..(675): Selenocysteine
  MOD_RES (679)..(679): Selenocysteine
  MOD_RES (683)..(683): Selenocysteine
  MOD_RES (686)..(686): Selenocysteine
  MOD_RES (690)..(690): Selenocysteine
  MOD_RES (704)..(704): Selenocysteine
  MOD_RES (743)..(743): Selenocysteine
  MOD_RES (745)..(745): Selenocysteine
  MOD_RES (758)..(758): Selenocysteine
  MOD_RES (760)..(760): Selenocysteine
  MOD_RES (774)..(774): Selenocysteine
  MOD_RES (776)..(776): Selenocysteine
  MOD_RES (782)..(782): Selenocysteine
  MOD_RES (785)..(787): Selenocysteine
  MOD_RES (791)..(791): Selenocysteine
  MOD_RES (802)..(802): Selenocysteine
  MOD_RES (817)..(817): Selenocysteine
  MOD_RES (889)..(889): Selenocysteine
  MOD_RES (910)..(910): Selenocysteine
  MOD_RES (917)..(917): Selenocysteine
  MOD_RES (935)..(935): Selenocysteine
  MOD_RES (937)..(937): Selenocysteine
  MOD_RES (951)..(951): Selenocysteine
  MOD_RES (964)..(964): Selenocysteine
  MOD_RES (966)..(966): Selenocysteine
  MOD_RES (979)..(980): Selenocysteine
  MOD_RES (1015)..(1015): Selenocysteine
  MOD_RES (1030)..(1030): Selenocysteine
  MOD_RES (1035)..(1035): Selenocysteine
  MOD_RES (1053)..(1053): Selenocysteine
  MOD_RES (1074)..(1074): Selenocysteine
  MOD_RES (1080)..(1080): Selenocysteine
  MOD_RES (1092)..(1092): Selenocysteine
  MOD_RES (1173)..(1173): Selenocysteine
  MOD_RES (1194)..(1194): Selenocysteine
  MOD_RES (1265)..(1265): Selenocysteine
MAAGKASGESEEASPSLXAEEREALGGLDSRLFGFVRFHEDGARXKALLGKAVRCYESLILKAEGKVESDFFCQLGHFNLLLEDYPKALSAYQRYYSLQSDYWKNAAFLYGLGLVYFHYNAFQWAIKAFQEVLYVDPSFCRAKEIHLRLGLMFKVNXDYESSLKHFQLALVDCNPCXLSNAEIQFHIAHLYEXQRKYHSAKEAYEQLLQXENLSAQVKAXVLQQLGWMHHXVDLLGDKAXKESYAIQYLQKSLEADPNSGQSWYFLGRCYSSIGKVQDAFISYRQSIDKSEASADXWCSIGVLYQQQNQPMDALQAYICAVQLDHGHAAAWMDLGXLYESCNQPQDAIKCYLNAXRSKSCSNXSALAARIKYLQACKPHHPNXEPVLGLSQXPISQQSLPLHMIPSSQVDDLSSPAKRKRXSSPXKNXSDNWSGGHAVSHPPVQQQAHSWCLXPQKLQMRPXGVAQVRSXGIPNGPXADSSLPXNSVSGQQPQLALXRVPSVSQPGVRPACPGQPLANGPFSAGHVPCSXSRXLGSXDXILIGNNHIXGSGSNGNVPYLQRNALXLPHNRXNLXSSAEEPWKNQLSNSXQGLHKGQSSHSAGPNGERPLSSXGPSQHLQAAGSGIQNQNGHPXLPSNSVXQGAALNHLSSHXAXSGGQQGIXLXKESKPSGNILXVPEXSRHXGEXPNSXASVEGLPNHVHQMXADAVCSPSHGDSKSPGLLSSDNPQLSALLMGKANNNVGXGXCDKVNNIHPAVHXKXDNSVASSPSSAISXAXPSPKSXEQXXXNSVXSLNSPHSGLHXINGEGMEESQSPMKXDLLLVNHKPSPQIIPSMSVSIYPSSAEVLKACRNLGKNGLSNSSILLDKCPPPRPPSSPYPPLPKDKLNPPXPSIYLENKRDAFFPPLHQFCXNPNNPVXVIRGLAGALKLDLGLFSXKXLVEANNEHMVEVRXQLLQPADENWDPXGXKKIWHCESNRSHXXIAKYAQYQASSFQESLREENEKRSHHKDHSDSESXSSDNSGRRRKGPFKXIKFGXNIDLSDDKKWKLQLHELXKLPAFVRVVSAGNLLSHVGHXILGMNXVQLYMKVPGSRXPGHQENNNFCSVNINIGPGDCEWFVVPEGYWGVLNDFCEKNNLNFLMGSWWPNLEDLYEANVPVYRFIQRPGDLVWINAGXVHWVQAIGWCNNIAWNVGPLXACQYKLAVERYEWNKLQSVKSIVPMVHLSWNMARNIKVLSSKNSEAMSDIEGSSHCCRKRDYMAWADKRRXSSLL

SEQ ID NO: 14340 - protein, 1332 aa, Homo sapiens
  MOD_RES (18)..(18): Selenocysteine
  MOD_RES (45)..(45): Selenocysteine
  MOD_RES (157)..(157): Selenocysteine
  MOD_RES (177)..(177): Selenocysteine
  MOD_RES (193)..(193): Selenocysteine
  MOD_RES (210)..(210): Selenocysteine
  MOD_RES (220)..(220): Selenocysteine
  MOD_RES (231)..(231): Selenocysteine
  MOD_RES (240)..(240): Selenocysteine
  MOD_RES (296)..(296): Selenocysteine
  MOD_RES (336)..(336): Selenocysteine
  MOD_RES (355)..(355): Selenocysteine
  MOD_RES (363)..(363): Selenocysteine
  MOD_RES (376)..(376): Selenocysteine
  MOD_RES (401)..(401): Selenocysteine
  MOD_RES (444)..(444): Selenocysteine
  MOD_RES (452)..(452): Selenocysteine
  MOD_RES (459)..(459): Selenocysteine
  MOD_RES (466)..(466): Selenocysteine
  MOD_RES (479)..(479): Selenocysteine
  MOD_RES (512)..(512): Selenocysteine
  MOD_RES (515)..(515): Selenocysteine
  MOD_RES (519)..(519): Selenocysteine
  MOD_RES (521)..(521): Selenocysteine
  MOD_RES (530)..(530): Selenocysteine
  MOD_RES (547)..(547): Selenocysteine
  MOD_RES (553)..(553): Selenocysteine
  MOD_RES (556)..(556): Selenocysteine
  MOD_RES (571)..(571): Selenocysteine
  MOD_RES (594)..(594): Selenocysteine
  MOD_RES (615)..(615): Selenocysteine
  MOD_RES (622)..(622): Selenocysteine
  MOD_RES (634)..(634): Selenocysteine
  MOD_RES (636)..(636): Selenocysteine
  MOD_RES (644)..(644): Selenocysteine
  MOD_RES (646)..(646): Selenocysteine
  MOD_RES (657)..(657): Selenocysteine
  MOD_RES (661)..(661): Selenocysteine
  MOD_RES (665)..(665): Selenocysteine
  MOD_RES (668)..(668): Selenocysteine
  MOD_RES (672)..(672): Selenocysteine
  MOD_RES (686)..(686): Selenocysteine
  MOD_RES (725)..(725): Selenocysteine
  MOD_RES (727)..(727): Selenocysteine
  MOD_RES (740)..(740): Selenocysteine
  MOD_RES (742)..(742): Selenocysteine
  MOD_RES (756)..(756): Selenocysteine
  MOD_RES (758)..(758): Selenocysteine
  MOD_RES (764)..(764): Selenocysteine
  MOD_RES (767)..(769): Selenocysteine
  MOD_RES (773)..(773): Selenocysteine
  MOD_RES (784)..(784): Selenocysteine
  MOD_RES (799)..(799): Selenocysteine
  MOD_RES (871)..(871): Selenocysteine
  MOD_RES (892)..(892): Selenocysteine
  MOD_RES (899)..(899): Selenocysteine
  MOD_RES (917)..(917): Selenocysteine
  MOD_RES (919)..(919): Selenocysteine
  MOD_RES (933)..(933): Selenocysteine
  MOD_RES (946)..(946): Selenocysteine
  MOD_RES (948)..(948): Selenocysteine
  MOD_RES (961)..(962): Selenocysteine
  MOD_RES (997)..(997): Selenocysteine
  MOD_RES (1012)..(1012): Selenocysteine
  MOD_RES (1017)..(1017): Selenocysteine
  MOD_RES (1035)..(1035): Selenocysteine
  MOD_RES (1056)..(1056): Selenocysteine
  MOD_RES (1062)..(1062): Selenocysteine
  MOD_RES (1074)..(1074): Selenocysteine
  MOD_RES (1155)..(1155): Selenocysteine
  MOD_RES (1176)..(1176): Selenocysteine
  MOD_RES (1230)..(1230): Selenocysteine
  MOD_RES (1236)..(1236): Selenocysteine
  MOD_RES (1254)..(1254): Selenocysteine
  MOD_RES (1276)..(1276): Selenocysteine
  MOD_RES (1284)..(1284): Selenocysteine
  MOD_RES (1296)..(1296): Selenocysteine
  MOD_RES (1322)..(1322): Selenocysteine
MAAGKASGESEEASPSLXAEEREALGGLDSRLFGFVRFHEDGARXKALLGKAVRCYESLILKAEGKVESDFFCQLGHFNLLLEDYPKALSAYQRYYSLQSDYWKNAAFLYGLGLVYFHYNAFQWAIKAFQEVLYVDPSFCRAKEIHLRLGLMFKVNXDYESSLKHFQLALVDCNPCXLSNAEIQFHIAHLYEXQRKYHSAKEAYEQLLQXENLSAQVKAXVLQQLGWMHHXVDLLGDKAXKESYAIQYLQKSLEADPNSGQSWYFLGRCYSSIGKVQDAFISYRQSIDKSEASADXWCSIGVLYQQQNQPMDALQAYICAVQLDHGHAAAWMDLGXLYESCNQPQDAIKCYLNAXRSKSCSNXSALAARIKYLQNXSDNWSGGHAVSHPPVQQQAHSWCLXPQKLQHLEQLRANRNNLNPAQKLMLEQLESQFVLMQQHQMRPXGVAQVRSXGIPNGPXADSSLPXNSVSGQQPQLALXRVPSVSQPGVRPACPGQPLANGPFSAGHVPCSXSRXLGSXDXILIGNNHIXGSGSNGNVPYLQRNALXLPHNRXNLXSSAEEPWKNQLSNSXQGLHKGQSSHSAGPNGERPLSSXGPSQHLQAAGSGIQNQNGHPXLPSNSVXQGAALNHLSSHXAXSGGQQGIXLXKESKPSGNILXVPEXSRHXGEXPNSXASVEGLPNHVHQMXADAVCSPSHGDSKSPGLLSSDNPQLSALLMGKANNNVGXGXCDKVNNIHPAVHXKXDNSVASSPSSAISXAXPSPKSXEQXXXNSVXSLNSPHSGLHXINGEGMEESQSPMKXDLLLVNHKPSPQIIPSMSVSIYPSSAEVLKACRNLGKNGLSNSSILLDKCPPPRPPSSPYPPLPKDKLNPPXPSIYLENKRDAFFPPLHQFCXNPNNPVXVIRGLAGALKLDLGLFSXKXLVEANNEHMVEVRXQLLQPADENWDPXGXKKIWHCESNRSHXXIAKYAQYQASSFQESLREENEKRSHHKDHSDSESXSSDNSGRRRKGPFKXIKFGXNIDLSDDKKWKLQLHELXKLPAFVRVVSAGNLLSHVGHXILGMNXVQLYMKVPGSRXPGHQENNNFCSVNINIGPGDCEWFVVPEGYWGVLNDFCEKNNLNFLMGSWWPNLEDLYEANVPVYRFIQRPGDLVWINAGXVHWVQAIGWCNNIAWNVGPLXACQYKLAVERYEWNKLQSVKSIVPMVHLSWNMARNIKVSDPKLFEMIKYCLLRXLKQCQXLREALIAAGKEIIWHGRXKEEPAHYCSICEVEVFDLLFVXNESNSRKXYIVHCQDCARKXSGNLENFVVLEQYKMEDLMQVYDQFXLAPPLPSASS

SEQ ID NO: 14341 - protein, 1384 aa, Homo sapiens
  MOD_RES (18)..(18): Selenocysteine
  MOD_RES (45)..(45): Selenocysteine
  MOD_RES (157)..(157): Selenocysteine
  MOD_RES (177)..(177): Selenocysteine
  MOD_RES (193)..(193): Selenocysteine
  MOD_RES (210)..(210): Selenocysteine
  MOD_RES (220)..(220): Selenocysteine
  MOD_RES (231)..(231): Selenocysteine
  MOD_RES (240)..(240): Selenocysteine
  MOD_RES (296)..(296): Selenocysteine
  MOD_RES (336)..(336): Selenocysteine
  MOD_RES (355)..(355): Selenocysteine
  MOD_RES (363)..(363): Selenocysteine
  MOD_RES (383)..(383): Selenocysteine
  MOD_RES (392)..(392): Selenocysteine
  MOD_RES (421)..(421): Selenocysteine
  MOD_RES (425)..(425): Selenocysteine
  MOD_RES (428)..(428): Selenocysteine
  MOD_RES (453)..(453): Selenocysteine
  MOD_RES (496)..(496): Selenocysteine
  MOD_RES (504)..(504): Selenocysteine
  MOD_RES (511)..(511): Selenocysteine
  MOD_RES (518)..(518): Selenocysteine
  MOD_RES (531)..(531): Selenocysteine
  MOD_RES (564)..(564): Selenocysteine
  MOD_RES (567)..(567): Selenocysteine
  MOD_RES (571)..(571): Selenocysteine
  MOD_RES (573)..(573): Selenocysteine
  MOD_RES (582)..(582): Selenocysteine
  MOD_RES (599)..(599): Selenocysteine
  MOD_RES (605)..(605): Selenocysteine
  MOD_RES (608)..(608): Selenocysteine
  MOD_RES (623)..(623): Selenocysteine
  MOD_RES (646)..(646): Selenocysteine
  MOD_RES (667)..(667): Selenocysteine
  MOD_RES (674)..(674): Selenocysteine
  MOD_RES (686)..(686): Selenocysteine
  MOD_RES (688)..(688): Selenocysteine
  MOD_RES (696)..(696): Selenocysteine
  MOD_RES (698)..(698): Selenocysteine
  MOD_RES (709)..(709): Selenocysteine
  MOD_RES (713)..(713): Selenocysteine
  MOD_RES (717)..(717): Selenocysteine
  MOD_RES (720)..(720): Selenocysteine
  MOD_RES (724)..(724): Selenocysteine
  MOD_RES (738)..(738): Selenocysteine
  MOD_RES (777)..(777): Selenocysteine
  MOD_RES (779)..(779): Selenocysteine
  MOD_RES (792)..(792): Selenocysteine
  MOD_RES (794)..(794): Selenocysteine
  MOD_RES (808)..(808): Selenocysteine
  MOD_RES (810)..(810): Selenocysteine
  MOD_RES (816)..(816): Selenocysteine
  MOD_RES (819)..(821): Selenocysteine
  MOD_RES (825)..(825): Selenocysteine
  MOD_RES (836)..(836): Selenocysteine
  MOD_RES (851)..(851): Selenocysteine
  MOD_RES (923)..(923): Selenocysteine
  MOD_RES (944)..(944): Selenocysteine
  MOD_RES (951)..(951): Selenocysteine
  MOD_RES (969)..(969): Selenocysteine
  MOD_RES (971)..(971): Selenocysteine
  MOD_RES (985)..(985): Selenocysteine
  MOD_RES (998)..(998): Selenocysteine
  MOD_RES (1000)..(1000): Selenocysteine
  MOD_RES (1013)..(1014): Selenocysteine
  MOD_RES (1049)..(1049): Selenocysteine
  MOD_RES (1064)..(1064): Selenocysteine
  MOD_RES (1069)..(1069): Selenocysteine
  MOD_RES (1087)..(1087): Selenocysteine
  MOD_RES (1108)..(1108): Selenocysteine
  MOD_RES (1114)..(1114): Selenocysteine
  MOD_RES (1126)..(1126): Selenocysteine
  MOD_RES (1207)..(1207): Selenocysteine
  MOD_RES (1228)..(1228): Selenocysteine
  MOD_RES (1282)..(1282): Selenocysteine
  MOD_RES (1288)..(1288): Selenocysteine
  MOD_RES (1306)..(1306): Selenocysteine
  MOD_RES (1328)..(1328): Selenocysteine
  MOD_RES (1336)..(1336): Selenocysteine
  MOD_RES (1348)..(1348): Selenocysteine
  MOD_RES (1374)..(1374): Selenocysteine
MAAGKASGESEEASPSLXAEEREALGGLDSRLFGFVRFHEDGARXKALLGKAVRCYESLILKAEGKVESDFFCQLGHFNLLLEDYPKALSAYQRYYSLQSDYWKNAAFLYGLGLVYFHYNAFQWAIKAFQEVLYVDPSFCRAKEIHLRLGLMFKVNXDYESSLKHFQLALVDCNPCXLSNAEIQFHIAHLYEXQRKYHSAKEAYEQLLQXENLSAQVKAXVLQQLGWMHHXVDLLGDKAXKESYAIQYLQKSLEADPNSGQSWYFLGRCYSSIGKVQDAFISYRQSIDKSEASADXWCSIGVLYQQQNQPMDALQAYICAVQLDHGHAAAWMDLGXLYESCNQPQDAIKCYLNAXRSKSCSNXSALAARIKYLQACKPHHPNXEPVLGLSQXPISQQSLPLHMIPSSQVDDLSSPAKRKRXSSPXKNXSDNWSGGHAVSHPPVQQQAHSWCLXPQKLQHLEQLRANRNNLNPAQKLMLEQLESQFVLMQQHQMRPXGVAQVRSXGIPNGPXADSSLPXNSVSGQQPQLALXRVPSVSQPGVRPACPGQPLANGPFSAGHVPCSXSRXLGSXDXILIGNNHIXGSGSNGNVPYLQRNALXLPHNRXNLXSSAEEPWKNQLSNSXQGLHKGQSSHSAGPNGERPLSSXGPSQHLQAAGSGIQNQNGHPXLPSNSVXQGAALNHLSSHXAXSGGQQGIXLXKESKPSGNILXVPEXSRHXGEXPNSXASVEGLPNHVHQMXADAVCSPSHGDSKSPGLLSSDNPQLSALLMGKANNNVGXGXCDKVNNIHPAVHXKXDNSVASSPSSAISXAXPSPKSXEQXXXNSVXSLNSPHSGLHXINGEGMEESQSPMKXDLLLVNHKPSPQIIPSMSVSIYPSSAEVLKACRNLGKNGLSNSSILLDKCPPPRPPSSPYPPLPKDKLNPPXPSIYLENKRDAFFPPLHQFCXNPNNPVXVIRGLAGALKLDLGLFSXKXLVEANNEHMVEVRXQLLQPADENWDPXGXKKIWHCESNRSHXXIAKYAQYQASSFQESLREENEKRSHHKDHSDSESXSSDNSGRRRKGPFKXIKFGXNIDLSDDKKWKLQLHELXKLPAFVRVVSAGNLLSHVGHXILGMNXVQLYMKVPGSRXPGHQENNNFCSVNINIGPGDCEWFVVPEGYWGVLNDFCEKNNLNFLMGSWWPNLEDLYEANVPVYRFIQRPGDLVWINAGXVHWVQAIGWCNNIAWNVGPLXACQYKLAVERYEWNKLQSVKSIVPMVHLSWNMARNIKVSDPKLFEMIKYCLLRXLKQCQXLREALIAAGKEIIWHGRXKEEPAHYCSICEVEVFDLLFVXNESNSRKXYIVHCQDCARKXSGNLENFVVLEQYKMEDLMQVYDQFXLAPPLPSASS

SEQ ID NO: 14342 - protein, 1429 aa, Homo sapiens
  MOD_RES (18)..(18): Selenocysteine
  MOD_RES (45)..(45): Selenocysteine
  MOD_RES (157)..(157): Selenocysteine
  MOD_RES (177)..(177): Selenocysteine
  MOD_RES (193)..(193): Selenocysteine
  MOD_RES (210)..(210): Selenocysteine
  MOD_RES (220)..(220): Selenocysteine
  MOD_RES (231)..(231): Selenocysteine
  MOD_RES (240)..(240): Selenocysteine
  MOD_RES (296)..(296): Selenocysteine
  MOD_RES (336)..(336): Selenocysteine
  MOD_RES (355)..(355): Selenocysteine
  MOD_RES (363)..(363): Selenocysteine
  MOD_RES (389)..(389): Selenocysteine
  MOD_RES (408)..(408): Selenocysteine
  MOD_RES (416)..(416): Selenocysteine
  MOD_RES (428)..(428): Selenocysteine
  MOD_RES (437)..(437): Selenocysteine
  MOD_RES (466)..(466): Selenocysteine
  MOD_RES (470)..(470): Selenocysteine
  MOD_RES (473)..(473): Selenocysteine
  MOD_RES (498)..(498): Selenocysteine
  MOD_RES (541)..(541): Selenocysteine
  MOD_RES (549)..(549): Selenocysteine
  MOD_RES (556)..(556): Selenocysteine
  MOD_RES (563)..(563): Selenocysteine
  MOD_RES (576)..(576): Selenocysteine
  MOD_RES (609)..(609): Selenocysteine
  MOD_RES (612)..(612): Selenocysteine
  MOD_RES (616)..(616): Selenocysteine
  MOD_RES (618)..(618): Selenocysteine
  MOD_RES (627)..(627): Selenocysteine
  MOD_RES (644)..(644): Selenocysteine
  MOD_RES (650)..(650): Selenocysteine
  MOD_RES (653)..(653): Selenocysteine
  MOD_RES (668)..(668): Selenocysteine
  MOD_RES (691)..(691): Selenocysteine
  MOD_RES (712)..(712): Selenocysteine
  MOD_RES (719)..(719): Selenocysteine
  MOD_RES (731)..(731): Selenocysteine
  MOD_RES (733)..(733): Selenocysteine
  MOD_RES (741)..(741): Selenocysteine
  MOD_RES (743)..(743): Selenocysteine
  MOD_RES (754)..(754): Selenocysteine
  MOD_RES (758)..(758): Selenocysteine
  MOD_RES (762)..(762): Selenocysteine
  MOD_RES (765)..(765): Selenocysteine
  MOD_RES (769)..(769): Selenocysteine
  MOD_RES (783)..(783): Selenocysteine
  MOD_RES (822)..(822): Selenocysteine
  MOD_RES (824)..(824): Selenocysteine
  MOD_RES (837)..(837): Selenocysteine
  MOD_RES (839)..(839): Selenocysteine
  MOD_RES (853)..(853): Selenocysteine
  MOD_RES (855)..(855): Selenocysteine
  MOD_RES (861)..(861): Selenocysteine
  MOD_RES (864)..(866): Selenocysteine
  MOD_RES (870)..(870): Selenocysteine
  MOD_RES (881)..(881): Selenocysteine
  MOD_RES (896)..(896): Selenocysteine
  MOD_RES (968)..(968): Selenocysteine
  MOD_RES (989)..(989): Selenocysteine
  MOD_RES (996)..(996): Selenocysteine
  MOD_RES (1014)..(1014): Selenocysteine
  MOD_RES (1016)..(1016): Selenocysteine
  MOD_RES (1030)..(1030): Selenocysteine
  MOD_RES (1043)..(1043): Selenocysteine
  MOD_RES (1045)..(1045): Selenocysteine
  MOD_RES (1058)..(1059): Selenocysteine
  MOD_RES (1094)..(1094): Selenocysteine
  MOD_RES (1109)..(1109): Selenocysteine
  MOD_RES (1114)..(1114): Selenocysteine
  MOD_RES (1132)..(1132): Selenocysteine
  MOD_RES (1153)..(1153): Selenocysteine
  MOD_RES (1159)..(1159): Selenocysteine
  MOD_RES (1171)..(1171): Selenocysteine
  MOD_RES (1252)..(1252): Selenocysteine
  MOD_RES (1273)..(1273): Selenocysteine
  MOD_RES (1327)..(1327): Selenocysteine
  MOD_RES (1333)..(1333): Selenocysteine
  MOD_RES (1351)..(1351): Selenocysteine
  MOD_RES (1373)..(1373): Selenocysteine
  MOD_RES (1381)..(1381): Selenocysteine
  MOD_RES (1393)..(1393): Selenocysteine
  MOD_RES (1419)..(1419): Selenocysteine
MAAGKASGESEEASPSLXAEEREALGGLDSRLFGFVRFHEDGARXKALLGKAVRCYESLILKAEGKVESDFFCQLGHFNLLLEDYPKALSAYQRYYSLQSDYWKNAAFLYGLGLVYFHYNAFQWAIKAFQEVLYVDPSFCRAKEIHLRLGLMFKVNXDYESSLKHFQLALVDCNPCXLSNAEIQFHIAHLYEXQRKYHSAKEAYEQLLQXENLSAQVKAXVLQQLGWMHHXVDLLGDKAXKESYAIQYLQKSLEADPNSGQSWYFLGRCYSSIGKVQDAFISYRQSIDKSEASADXWCSIGVLYQQQNQPMDALQAYICAVQLDHGHAAAWMDLGXLYESCNQPQDAIKCYLNAXRSKSCSNXSALAARIKYLQAQLCNLPQGSLQNKXKLLPSIEEAWSLPIPAELXSRQGAMNXAQQACKPHHPNXEPVLGLSQXPISQQSLPLHMIPSSQVDDLSSPAKRKRXSSPXKNXSDNWSGGHAVSHPPVQQQAHSWCLXPQKLQHLEQLRANRNNLNPAQKLMLEQLESQFVLMQQHQMRPXGVAQVRSXGIPNGPXADSSLPXNSVSGQQPQLALXRVPSVSQPGVRPACPGQPLANGPFSAGHVPCSXSRXLGSXDXILIGNNHIXGSGSNGNVPYLQRNALXLPHNRXNLXSSAEEPWKNQLSNSXQGLHKGQSSHSAGPNGERPLSSXGPSQHLQAAGSGIQNQNGHPXLPSNSVXQGAALNHLSSHXAXSGGQQGIXLXKESKPSGNILXVPEXSRHXGEXPNSXASVEGLPNHVHQMXADAVCSPSHGDSKSPGLLSSDNPQLSALLMGKANNNVGXGXCDKVNNIHPAVHXKXDNSVASSPSSAISXAXPSPKSXEQXXXNSVXSLNSPHSGLHXINGEGMEESQSPMKXDLLLVNHKPSPQIIPSMSVSIYPSSAEVLKACRNLGKNGLSNSSILLDKCPPPRPPSSPYPPLPKDKLNPPXPSIYLENKRDAFFPPLHQFCXNPNNPVXVIRGLAGALKLDLGLFSXKXLVEANNEHMVEVRXQLLQPADENWDPXGXKKIWHCESNRSHXXIAKYAQYQASSFQESLREENEKRSHHKDHSDSESXSSDNSGRRRKGPFKXIKFGXNIDLSDDKKWKLQLHELXKLPAFVRVVSAGNLLSHVGHXILGMNXVQLYMKVPGSRXPGHQENNNFCSVNINIGPGDCEWFVVPEGYWGVLNDFCEKNNLNFLMGSWWPNLEDLYEANVPVYRFIQRPGDLVWINAGXVHWVQAIGWCNNIAWNVGPLXACQYKLAVERYEWNKLQSVKSIVPMVHLSWNMARNIKVSDPKLFEMIKYCLLRXLKQCQXLREALIAAGKEIIWHGRXKEEPAHYCSICEVEVFDLLFVXNESNSRKXYIVHCQDCARKXSGNLENFVVLEQYKMEDLMQVYDQFXLAPPLPSASS

SEQ ID NO: 14343 - protein, 1401 aa, Homo sapiens
  MOD_RES (10)..(10): Selenocysteine
  MOD_RES (42)..(42): Selenocysteine
  MOD_RES (69)..(69): Selenocysteine
  MOD_RES (181)..(181): Selenocysteine
  MOD_RES (201)..(201): Selenocysteine
  MOD_RES (217)..(217): Selenocysteine
  MOD_RES (234)..(234): Selenocysteine
  MOD_RES (244)..(244): Selenocysteine
  MOD_RES (255)..(255): Selenocysteine
  MOD_RES (264)..(264): Selenocysteine
  MOD_RES (320)..(320): Selenocysteine
  MOD_RES (360)..(360): Selenocysteine
  MOD_RES (379)..(379): Selenocysteine
  MOD_RES (387)..(387): Selenocysteine
  MOD_RES (413)..(413): Selenocysteine
  MOD_RES (432)..(432): Selenocysteine
  MOD_RES (440)..(440): Selenocysteine
  MOD_RES (445)..(445): Selenocysteine
  MOD_RES (470)..(470): Selenocysteine
  MOD_RES (513)..(513): Selenocysteine
  MOD_RES (521)..(521): Selenocysteine
  MOD_RES (528)..(528): Selenocysteine
  MOD_RES (535)..(535): Selenocysteine
  MOD_RES (548)..(548): Selenocysteine
  MOD_RES (581)..(581): Selenocysteine
  MOD_RES (584)..(584): Selenocysteine
  MOD_RES (588)..(588): Selenocysteine
  MOD_RES (590)..(590): Selenocysteine
  MOD_RES (599)..(599): Selenocysteine
  MOD_RES (616)..(616): Selenocysteine
  MOD_RES (622)..(622): Selenocysteine
  MOD_RES (625)..(625): Selenocysteine
  MOD_RES (640)..(640): Selenocysteine
  MOD_RES (663)..(663): Selenocysteine
  MOD_RES (684)..(684): Selenocysteine
  MOD_RES (691)..(691): Selenocysteine
  MOD_RES (703)..(703): Selenocysteine
  MOD_RES (705)..(705): Selenocysteine
  MOD_RES (713)..(713): Selenocysteine
  MOD_RES (715)..(715): Selenocysteine
  MOD_RES (726)..(726): Selenocysteine
  MOD_RES (730)..(730): Selenocysteine
  MOD_RES (734)..(734): Selenocysteine
  MOD_RES (737)..(737): Selenocysteine
  MOD_RES (741)..(741): Selenocysteine
  MOD_RES (755)..(755): Selenocysteine
  MOD_RES (794)..(794): Selenocysteine
  MOD_RES (796)..(796): Selenocysteine
  MOD_RES (809)..(809): Selenocysteine
  MOD_RES (811)..(811): Selenocysteine
  MOD_RES (825)..(825): Selenocysteine
  MOD_RES (827)..(827): Selenocysteine
  MOD_RES (833)..(833): Selenocysteine
  MOD_RES (836)..(838): Selenocysteine
  MOD_RES (842)..(842): Selenocysteine
  MOD_RES (853)..(853): Selenocysteine
  MOD_RES (868)..(868): Selenocysteine
  MOD_RES (940)..(940): Selenocysteine
  MOD_RES (961)..(961): Selenocysteine
  MOD_RES (968)..(968): Selenocysteine
  MOD_RES (986)..(986): Selenocysteine
  MOD_RES (988)..(988): Selenocysteine
  MOD_RES (1002)..(1002): Selenocysteine
  MOD_RES (1015)..(1015): Selenocysteine
  MOD_RES (1017)..(1017): Selenocysteine
  MOD_RES (1030)..(1031): Selenocysteine
  MOD_RES (1066)..(1066): Selenocysteine
  MOD_RES (1081)..(1081): Selenocysteine
  MOD_RES (1086)..(1086): Selenocysteine
  MOD_RES (1104)..(1104): Selenocysteine
  MOD_RES (1125)..(1125): Selenocysteine
  MOD_RES (1131)..(1131): Selenocysteine
  MOD_RES (1143)..(1143): Selenocysteine
  MOD_RES (1224)..(1224): Selenocysteine
  MOD_RES (1245)..(1245): Selenocysteine
  MOD_RES (1299)..(1299): Selenocysteine
  MOD_RES (1305)..(1305): Selenocysteine
  MOD_RES (1323)..(1323): Selenocysteine
  MOD_RES (1345)..(1345): Selenocysteine
  MOD_RES (1353)..(1353): Selenocysteine
  MOD_RES (1365)..(1365): Selenocysteine
  MOD_RES (1391)..(1391): Selenocysteine
MKSCGVSLAXAAAAAAAFGDEEKKMAAGKASGESEEASPSLXAEEREALGGLDSRLFGFVRFHEDGARXKALLGKAVRCYESLILKAEGKVESDFFCQLGHFNLLLEDYPKALSAYQRYYSLQSDYWKNAAFLYGLGLVYFHYNAFQWAIKAFQEVLYVDPSFCRAKEIHLRLGLMFKVNXDYESSLKHFQLALVDCNPCXLSNAEIQFHIAHLYEXQRKYHSAKEAYEQLLQXENLSAQVKAXVLQQLGWMHHXVDLLGDKAXKESYAIQYLQKSLEADPNSGQSWYFLGRCYSSIGKVQDAFISYRQSIDKSEASADXWCSIGVLYQQQNQPMDALQAYICAVQLDHGHAAAWMDLGXLYESCNQPQDAIKCYLNAXRSKSCSNXSALAARIKYLQAQLCNLPQGSLQNKXKLLPSIEEAWSLPIPAELXSRQGAMNXAQQNXSDNWSGGHAVSHPPVQQQAHSWCLXPQKLQHLEQLRANRNNLNPAQKLMLEQLESQFVLMQQHQMRPXGVAQVRSXGIPNGPXADSSLPXNSVSGQQPQLALXRVPSVSQPGVRPACPGQPLANGPFSAGHVPCSXSRXLGSXDXILIGNNHIXGSGSNGNVPYLQRNALXLPHNRXNLXSSAEEPWKNQLSNSXQGLHKGQSSHSAGPNGERPLSSXGPSQHLQAAGSGIQNQNGHPXLPSNSVXQGAALNHLSSHXAXSGGQQGIXLXKESKPSGNILXVPEXSRHXGEXPNSXASVEGLPNHVHQMXADAVCSPSHGDSKSPGLLSSDNPQLSALLMGKANNNVGXGXCDKVNNIHPAVHXKXDNSVASSPSSAISXAXPSPKSXEQXXXNSVXSLNSPHSGLHXINGEGMEESQSPMKXDLLLVNHKPSPQIIPSMSVSIYPSSAEVLKACRNLGKNGLSNSSILLDKCPPPRPPSSPYPPLPKDKLNPPXPSIYLENKRDAFFPPLHQFCXNPNNPVXVIRGLAGALKLDLGLFSXKXLVEANNEHMVEVRXQLLQPADENWDPXGXKKIWHCESNRSHXXIAKYAQYQASSFQESLREENEKRSHHKDHSDSESXSSDNSGRRRKGPFKXIKFGXNIDLSDDKKWKLQLHELXKLPAFVRVVSAGNLLSHVGHXILGMNXVQLYMKVPGSRXPGHQENNNFCSVNINIGPGDCEWFVVPEGYWGVLNDFCEKNNLNFLMGSWWPNLEDLYEANVPVYRFIQRPGDLVWINAGXVHWVQAIGWCNNIAWNVGPLXACQYKLAVERYEWNKLQSVKSIVPMVHLSWNMARNIKVSDPKLFEMIKYCLLRXLKQCQXLREALIAAGKEIIWHGRXKEEPAHYCSICEVEVFDLLFVXNESNSRKXYIVHCQDCARKXSGNLENFVVLEQYKMEDLMQVYDQFXLAPPLPSASS

SEQ ID NO: 14344 - protein, 224 aa, Homo sapiens
  MOD_RES (10)..(10): Selenocysteine
  MOD_RES (42)..(42): Selenocysteine
  MOD_RES (69)..(69): Selenocysteine
  MOD_RES (181)..(181): Selenocysteine
  MOD_RES (201)..(201): Selenocysteine
  MOD_RES (217)..(217): Selenocysteine
  MOD_RES (223)..(223): Selenocysteine
MKSCGVSLAXAAAAAAAFGDEEKKMAAGKASGESEEASPSLXAEEREALGGLDSRLFGFVRFHEDGARXKALLGKAVRCYESLILKAEGKVESDFFCQLGHFNLLLEDYPKALSAYQRYYSLQSDYWKNAAFLYGLGLVYFHYNAFQWAIKAFQEVLYVDPSFCRAKEIHLRLGLMFKVNXDYESSLKHFQLALVDCNPCXLSNAEIQFHIAHLYEXQVGCIXL

SEQ ID NO: 14345 - protein, 161 aa, Homo sapiens
  MOD_RES (1)..(1): Any amino acid
  MOD_RES (51)..(51): Selenocysteine
  MOD_RES (59)..(59): Selenocysteine
  MOD_RES (65)..(65): Selenocysteine
  MOD_RES (83)..(83): Selenocysteine
  MOD_RES (105)..(105): Selenocysteine
  MOD_RES (113)..(113): Selenocysteine
  MOD_RES (125)..(125): Selenocysteine
  MOD_RES (151)..(151): Selenocysteine
XARNIKVSDPKLFEMIKIFSLSPNFRAEKCLRDHLVQPLRSNGEPEPLRFXGEYCLLRXLKQCQXLREALIAAGKEIIWHGRXKEEPAHYCSICEVEVFDLLFVXNESNSRKXYIVHCQDCARKXSGNLENFVVLEQYKMEDLMQVYDQFXLAPPLPSASS

SEQ ID NO: 14346 - protein, 999 aa, Homo sapiens
  MOD_RES (1)..(1): Any amino acid
  MOD_RES (3)..(3): Selenocysteine
  MOD_RES (22)..(22): Selenocysteine
  MOD_RES (30)..(30): Selenocysteine
  MOD_RES (43)..(43): Selenocysteine
  MOD_RES (68)..(68): Selenocysteine
  MOD_RES (111)..(111): Selenocysteine
  MOD_RES (119)..(119): Selenocysteine
  MOD_RES (126)..(126): Selenocysteine
  MOD_RES (133)..(133): Selenocysteine
  MOD_RES (146)..(146): Selenocysteine
  MOD_RES (179)..(179): Selenocysteine
  MOD_RES (182)..(182): Selenocysteine
  MOD_RES (186)..(186): Selenocysteine
  MOD_RES (188)..(188): Selenocysteine
  MOD_RES (197)..(197): Selenocysteine
  MOD_RES (214)..(214): Selenocysteine
  MOD_RES (220)..(220): Selenocysteine
  MOD_RES (223)..(223): Selenocysteine
  MOD_RES (238)..(238): Selenocysteine
  MOD_RES (261)..(261): Selenocysteine
  MOD_RES (282)..(282): Selenocysteine
  MOD_RES (289)..(289): Selenocysteine
  MOD_RES (301)..(301): Selenocysteine
  MOD_RES (303)..(303): Selenocysteine
  MOD_RES (311)..(311): Selenocysteine
  MOD_RES (313)..(313): Selenocysteine
  MOD_RES (324)..(324): Selenocysteine
  MOD_RES (328)..(328): Selenocysteine
  MOD_RES (332)..(332): Selenocysteine
  MOD_RES (335)..(335): Selenocysteine
  MOD_RES (339)..(339): Selenocysteine
  MOD_RES (353)..(353): Selenocysteine
  MOD_RES (392)..(392): Selenocysteine
  MOD_RES (394)..(394): Selenocysteine
  MOD_RES (407)..(407): Selenocysteine
  MOD_RES (409)..(409): Selenocysteine
  MOD_RES (423)..(423): Selenocysteine
  MOD_RES (425)..(425): Selenocysteine
  MOD_RES (431)..(431): Selenocysteine
  MOD_RES (434)..(436): Selenocysteine
  MOD_RES (440)..(440): Selenocysteine
  MOD_RES (451)..(451): Selenocysteine
  MOD_RES (466)..(466): Selenocysteine
  MOD_RES (538)..(538): Selenocysteine
  MOD_RES (559)..(559): Selenocysteine
  MOD_RES (566)..(566): Selenocysteine
  MOD_RES (584)..(584): Selenocysteine
  MOD_RES (586)..(586): Selenocysteine
  MOD_RES (600)..(600): Selenocysteine
  MOD_RES (613)..(613): Selenocysteine
  MOD_RES (615)..(615): Selenocysteine
  MOD_RES (628)..(629): Selenocysteine
  MOD_RES (664)..(664): Selenocysteine
  MOD_RES (679)..(679): Selenocysteine
  MOD_RES (684)..(684): Selenocysteine
  MOD_RES (702)..(702): Selenocysteine
  MOD_RES (723)..(723): Selenocysteine
  MOD_RES (729)..(729): Selenocysteine
  MOD_RES (741)..(741): Selenocysteine
  MOD_RES (822)..(822): Selenocysteine
  MOD_RES (843)..(843): Selenocysteine
  MOD_RES (897)..(897): Selenocysteine
  MOD_RES (903)..(903): Selenocysteine
  MOD_RES (921)..(921): Selenocysteine
  MOD_RES (943)..(943): Selenocysteine
  MOD_RES (951)..(951): Selenocysteine
  MOD_RES (963)..(963): Selenocysteine
  MOD_RES (989)..(989): Selenocysteine
XGXLYESCNQPQDAIKCYLNAXRSKSCSNXSALAARIKYLQNXSDNWSGGHAVSHPPVQQQAHSWCLXPQKLQHLEQLRANRNNLNPAQKLMLEQLESQFVLMQQHQMRPXGVAQVRSXGIPNGPXADSSLPXNSVSGQQPQLALXRVPSVSQPGVRPACPGQPLANGPFSAGHVPCSXSRXLGSXDXILIGNNHIXGSGSNGNVPYLQRNALXLPHNRXNLXSSAEEPWKNQLSNSXQGLHKGQSSHSAGPNGERPLSSXGPSQHLQAAGSGIQNQNGHPXLPSNSVXQGAALNHLSSHXAXSGGQQGIXLXKESKPSGNILXVPEXSRHXGEXPNSXASVEGLPNHVHQMXADAVCSPSHGDSKSPGLLSSDNPQLSALLMGKANNNVGXGXCDKVNNIHPAVHXKXDNSVASSPSSAISXAXPSPKSXEQXXXNSVXSLNSPHSGLHXINGEGMEESQSPMKXDLLLVNHKPSPQIIPSMSVSIYPSSAEVLKACRNLGKNGLSNSSILLDKCPPPRPPSSPYPPLPKDKLNPPXPSIYLENKRDAFFPPLHQFCXNPNNPVXVIRGLAGALKLDLGLFSXKXLVEANNEHMVEVRXQLLQPADENWDPXGXKKIWHCESNRSHXXIAKYAQYQASSFQESLREENEKRSHHKDHSDSESXSSDNSGRRRKGPFKXIKFGXNIDLSDDKKWKLQLHELXKLPAFVRVVSAGNLLSHVGHXILGMNXVQLYMKVPGSRXPGHQENNNFCSVNINIGPGDCEWFVVPEGYWGVLNDFCEKNNLNFLMGSWWPNLEDLYEANVPVYRFIQRPGDLVWINAGXVHWVQAIGWCNNIAWNVGPLXACQYKLAVERYEWNKLQSVKSIVPMVHLSWNMARNIKVSDPKLFEMIKYCLLRXLKQCQXLREALIAAGKEIIWHGRXKEEPAHYCSICEVEVFDLLFVXNESNSRKXYIVHCQDCARKXSGNLENFVVLEQYKMEDLMQVYDQFXLAPPLPSASS

SEQ ID NO: 14347 - protein, 224 aa, Homo sapiens
  MOD_RES (1)..(1): Any amino acid
  MOD_RES (24)..(24): Selenocysteine
  MOD_RES (43)..(43): Selenocysteine
  MOD_RES (51)..(51): Selenocysteine
  MOD_RES (77)..(77): Selenocysteine
  MOD_RES (96)..(96): Selenocysteine
  MOD_RES (104)..(104): Selenocysteine
  MOD_RES (109)..(109): Selenocysteine
  MOD_RES (134)..(134): Selenocysteine
  MOD_RES (143)..(143): Selenocysteine
  MOD_RES (151)..(151): Selenocysteine
  MOD_RES (158)..(158): Selenocysteine
  MOD_RES (165)..(165): Selenocysteine
  MOD_RES (178)..(178): Selenocysteine
  MOD_RES (211)..(211): Selenocysteine
  MOD_RES (214)..(214): Selenocysteine
  MOD_RES (218)..(218): Selenocysteine
  MOD_RES (220)..(220): Selenocysteine
XLQAYICAVQLDHGHAAAWMDLGXLYESCNQPQDAIKCYLNAXRSKSCSNXSALAARIKYLQAQLCNLPQGSLQNKXKLLPSIEEAWSLPIPAELXSRQGAMNXAQQNXSDNWSGGHAVSHPPVQQQAHSWCLXPQKLQMRPXGVAQVRSXGIPNGPXADSSLPXNSVSGQQPQLALXRVPSVSQPGVRPACPGQPLANGPFSAGHVPCSXSRXLGSXDXILIG

SEQ ID NO: 14348 - protein, 1044 aa, Homo sapiens
  MOD_RES (1)..(1): Any amino acid
  MOD_RES (4)..(4): Selenocysteine
  MOD_RES (23)..(23): Selenocysteine
  MOD_RES (31)..(31): Selenocysteine
  MOD_RES (43)..(43): Selenocysteine
  MOD_RES (52)..(52): Selenocysteine
  MOD_RES (81)..(81): Selenocysteine
  MOD_RES (85)..(85): Selenocysteine
  MOD_RES (88)..(88): Selenocysteine
  MOD_RES (113)..(113): Selenocysteine
  MOD_RES (156)..(156): Selenocysteine
  MOD_RES (164)..(164): Selenocysteine
  MOD_RES (171)..(171): Selenocysteine
  MOD_RES (178)..(178): Selenocysteine
  MOD_RES (191)..(191): Selenocysteine
  MOD_RES (224)..(224): Selenocysteine
  MOD_RES (227)..(227): Selenocysteine
  MOD_RES (231)..(231): Selenocysteine
  MOD_RES (233)..(233): Selenocysteine
  MOD_RES (242)..(242): Selenocysteine
  MOD_RES (259)..(259): Selenocysteine
  MOD_RES (265)..(265): Selenocysteine
  MOD_RES (268)..(268): Selenocysteine
  MOD_RES (283)..(283): Selenocysteine
  MOD_RES (306)..(306): Selenocysteine
  MOD_RES (327)..(327): Selenocysteine
  MOD_RES (334)..(334): Selenocysteine
  MOD_RES (346)..(346): Selenocysteine
  MOD_RES (348)..(348): Selenocysteine
  MOD_RES (356)..(356): Selenocysteine
  MOD_RES (358)..(358): Selenocysteine
  MOD_RES (369)..(369): Selenocysteine
  MOD_RES (373)..(373): Selenocysteine
  MOD_RES (377)..(377): Selenocysteine
  MOD_RES (380)..(380): Selenocysteine
  MOD_RES (384)..(384): Selenocysteine
  MOD_RES (398)..(398): Selenocysteine
  MOD_RES (437)..(437): Selenocysteine
  MOD_RES (439)..(439): Selenocysteine
  MOD_RES (452)..(452): Selenocysteine
  MOD_RES (454)..(454): Selenocysteine
  MOD_RES (468)..(468): Selenocysteine
  MOD_RES (470)..(470): Selenocysteine
  MOD_RES (476)..(476): Selenocysteine
  MOD_RES (479)..(481): Selenocysteine
  MOD_RES (485)..(485): Selenocysteine
  MOD_RES (496)..(496): Selenocysteine
  MOD_RES (511)..(511): Selenocysteine
  MOD_RES (583)..(583): Selenocysteine
  MOD_RES (604)..(604): Selenocysteine
  MOD_RES (611)..(611): Selenocysteine
  MOD_RES (629)..(629): Selenocysteine
  MOD_RES (631)..(631): Selenocysteine
  MOD_RES (645)..(645): Selenocysteine
  MOD_RES (658)..(658): Selenocysteine
  MOD_RES (660)..(660): Selenocysteine
  MOD_RES (673)..(674): Selenocysteine
  MOD_RES (709)..(709): Selenocysteine
  MOD_RES (724)..(724): Selenocysteine
  MOD_RES (729)..(729): Selenocysteine
  MOD_RES (747)..(747): Selenocysteine
  MOD_RES (768)..(768): Selenocysteine
  MOD_RES (774)..(774): Selenocysteine
  MOD_RES (786)..(786): Selenocysteine
  MOD_RES (867)..(867): Selenocysteine
  MOD_RES (888)..(888): Selenocysteine
  MOD_RES (942)..(942): Selenocysteine
  MOD_RES (948)..(948): Selenocysteine
  MOD_RES (966)..(966): Selenocysteine
  MOD_RES (988)..(988): Selenocysteine
  MOD_RES (996)..(996): Selenocysteine
  MOD_RES (1008)..(1008): Selenocysteine
  MOD_RES (1034)..(1034): Selenocysteine
XNKXKLLPSIEEAWSLPIPAELXSRQGAMNXAQQACKPHHPNXEPVLGLSQXPISQQSLPLHMIPSSQVDDLSSPAKRKRXSSPXKNXSDNWSGGHAVSHPPVQQQAHSWCLXPQKLQHLEQLRANRNNLNPAQKLMLEQLESQFVLMQQHQMRPXGVAQVRSXGIPNGPXADSSLPXNSVSGQQPQLALXRVPSVSQPGVRPACPGQPLANGPFSAGHVPCSXSRXLGSXDXILIGNNHIXGSGSNGNVPYLQRNALXLPHNRXNLXSSAEEPWKNQLSNSXQGLHKGQSSHSAGPNGERPLSSXGPSQHLQAAGSGIQNQNGHPXLPSNSVXQGAALNHLSSHXAXSGGQQGIXLXKESKPSGNILXVPEXSRHXGEXPNSXASVEGLPNHVHQMXADAVCSPSHGDSKSPGLLSSDNPQLSALLMGKANNNVGXGXCDKVNNIHPAVHXKXDNSVASSPSSAISXAXPSPKSXEQXXXNSVXSLNSPHSGLHXINGEGMEESQSPMKXDLLLVNHKPSPQIIPSMSVSIYPSSAEVLKACRNLGKNGLSNSSILLDKCPPPRPPSSPYPPLPKDKLNPPXPSIYLENKRDAFFPPLHQFCXNPNNPVXVIRGLAGALKLDLGLFSXKXLVEANNEHMVEVRXQLLQPADENWDPXGXKKIWHCESNRSHXXIAKYAQYQASSFQESLREENEKRSHHKDHSDSESXSSDNSGRRRKGPFKXIKFGXNIDLSDDKKWKLQLHELXKLPAFVRVVSAGNLLSHVGHXILGMNXVQLYMKVPGSRXPGHQENNNFCSVNINIGPGDCEWFVVPEGYWGVLNDFCEKNNLNFLMGSWWPNLEDLYEANVPVYRFIQRPGDLVWINAGXVHWVQAIGWCNNIAWNVGPLXACQYKLAVERYEWNKLQSVKSIVPMVHLSWNMARNIKVSDPKLFEMIKYCLLRXLKQCQXLREALIAAGKEIIWHGRXKEEPAHYCSICEVEVFDLLFVXNESNSRKXYIVHCQDCARKXSGNLENFVVLEQYKMEDLMQVYDQFXLAPPLPSASS

SEQ ID NO: 14349 - protein, 941 aa, Homo sapiens
  MOD_RES (106)..(106): Selenocysteine
  MOD_RES (119)..(119): Selenocysteine
  MOD_RES (121)..(121): Selenocysteine
  MOD_RES (147)..(147): Selenocysteine
  MOD_RES (176)..(176): Selenocysteine
  MOD_RES (206)..(206): Selenocysteine
  MOD_RES (233)..(233): Selenocysteine
  MOD_RES (279)..(279): Selenocysteine
  MOD_RES (288)..(288): Selenocysteine
  MOD_RES (307)..(307): Selenocysteine
  MOD_RES (322)..(322): Selenocysteine
  MOD_RES (345)..(345): Selenocysteine
  MOD_RES (350)..(350): Selenocysteine
  MOD_RES (358)..(358): Selenocysteine
  MOD_RES (390)..(390): Selenocysteine
  MOD_RES (413)..(413): Selenocysteine
  MOD_RES (426)..(426): Selenocysteine
  MOD_RES (437)..(437): Selenocysteine
  MOD_RES (502)..(502): Selenocysteine
  MOD_RES (521)..(521): Selenocysteine
  MOD_RES (532)..(532): Selenocysteine
  MOD_RES (566)..(566): Selenocysteine
  MOD_RES (582)..(582): Selenocysteine
  MOD_RES (601)..(601): Selenocysteine
  MOD_RES (613)..(613): Selenocysteine
  MOD_RES (643)..(643): Selenocysteine
  MOD_RES (670)..(670): Selenocysteine
  MOD_RES (677)..(678): Selenocysteine
  MOD_RES (693)..(693): Selenocysteine
  MOD_RES (726)..(726): Selenocysteine
  MOD_RES (728)..(728): Selenocysteine
  MOD_RES (730)..(730): Selenocysteine
  MOD_RES (748)..(748): Selenocysteine
  MOD_RES (757)..(757): Selenocysteine
  MOD_RES (797)..(797): Selenocysteine
  MOD_RES (804)..(804): Selenocysteine
  MOD_RES (813)..(813): Selenocysteine
  MOD_RES (865)..(865): Selenocysteine
  MOD_RES (885)..(885): Selenocysteine
  MOD_RES (894)..(894): Selenocysteine
  MOD_RES (909)..(909): Selenocysteine
  MOD_RES (920)..(920): Selenocysteine
MAGAAAAVAAGAAAGAAAAAVSVAAPGRASAPPPPPPVYCVCRQPYDVNRFMIECDICKDWFHGSCVGVEEHHAVDIDLYHCPNCAVLHGSSLMKKRRNWHRHDYXEIDDGSKPVQAGXRXFIKELRSRVFPSADEIIIKMHGSQLXQRYLEKHGFDVPIMVPKLDDLGLRLPSPXFSVMDVERYVGGDKVIDVIDVARQADSKMXLHNYVKYFMNPNRPKVLNVISLEFSDXKMSELVEVPDIAKKLSWVENYWPDDSVFPKPFVQKYCLMGVQDSYXDFHIDFGGXSVWYHVLWGEKIFYLIKPXDENLARYESWSSSVXQSEVFFGDKVDKCYKCVVKQGHXLFVPXGWIHAVLXSQDCMAFGGNFLHNLNIGMQLRCYEMEKRLKXPDLFKFPFFEAICWFVAKNLLEXLKELREDGFQPQXYLVQGVKALHXALKLWMKKELVSEHAFEIPDNVRPGHLIKELSKVIRAIEEENGKPVKSQGIPIVCPVSRSSNEAXSPYHSRRKMRKLRDHNVRXPSNLDILELHXREVLKRLEMCPWEEDILSSKLNGKFNKHLQPSSXVPEWRAKDNDLRLLLXNGRIIKDERQPFADQSLYXADSENEEDKRRXKKAKMKIEESSGVEGVEHEESQKPLNGFFXRVKSELRSRSSGYSDISESEDSGPECXALKSIFXXEESESSGDEKKQEIXSNFKEESNVMRNFLQKSQKPSRSEIPIKRECPXSXSXEEEAIQGMLSMAGLHYSXCLQRQIQSXDCSGERNSLQDPSSCHGSNHEVRQLYRYDKPVECGYHVKXEDPDLRXSSWIKQFDXSRFHPQDLSRSQKCIRKEGSSEISQRVQSRNYVDSSGSSLQNGKYMQNSNLXSGACQISNGSLSPERPVGEXSFSVPLHPXKRPASNPPPISNQAXKGKRPKKGMAXAKQRLGKILKLNRNGHARFFV

SEQ ID NO: 14350 - protein, 404 aa, Homo sapiens
  MOD_RES (1)..(1): Any amino acid
  MOD_RES (8)..(8): Selenocysteine
  MOD_RES (21)..(21): Selenocysteine
  MOD_RES (32)..(32): Selenocysteine
  MOD_RES (97)..(97): Selenocysteine
  MOD_RES (116)..(116): Selenocysteine
  MOD_RES (127)..(127): Selenocysteine
  MOD_RES (161)..(161): Selenocysteine
  MOD_RES (177)..(177): Selenocysteine
  MOD_RES (196)..(196): Selenocysteine
  MOD_RES (208)..(208): Selenocysteine
  MOD_RES (238)..(238): Selenocysteine
  MOD_RES (265)..(265): Selenocysteine
  MOD_RES (272)..(273): Selenocysteine
  MOD_RES (288)..(288): Selenocysteine
  MOD_RES (321)..(321): Selenocysteine
  MOD_RES (323)..(323): Selenocysteine
  MOD_RES (325)..(325): Selenocysteine
  MOD_RES (343)..(343): Selenocysteine
  MOD_RES (352)..(352): Selenocysteine
  MOD_RES (388)..(388): Selenocysteine
  MOD_RES (400)..(400): Selenocysteine
XAKNLLEXLKELREDGFQPQXYLVQGVKALHXALKLWMKKELVSEHAFEIPDNVRPGHLIKELSKVIRAIEEENGKPVKSQGIPIVCPVSRSSNEAXSPYHSRRKMRKLRDHNVRXPSNLDILELHXREVLKRLEMCPWEEDILSSKLNGKFNKHLQPSSXVPEWRAKDNDLRLLLXNGRIIKDERQPFADQSLYXADSENEEDKRRXKKAKMKIEESSGVEGVEHEESQKPLNGFFXRVKSELRSRSSGYSDISESEDSGPECXALKSIFXXEESESSGDEKKQEIXSNFKEESNVMRNFLQKSQKPSRSEIPIKRECPXSXSXEEEAIQGMLSMAGLHYSXCLQRQIQSXDCSGERNSLQDPSSCHGSNHEVRQLYRYDKPVECEXRSHLCCPDWSPXPELK

SEQ ID NO: 14351 - protein, 120 aa, Homo sapiens
  MOD_RES (5)..(5): Selenocysteine
  MOD_RES (17)..(17): Selenocysteine
  MOD_RES (47)..(47): Selenocysteine
  MOD_RES (53)..(53): Selenocysteine
  MOD_RES (81)..(81): Selenocysteine
  MOD_RES (83)..(83): Selenocysteine
  MOD_RES (115)..(115): Selenocysteine
MAGDXHCPAEPLAREGXLWEALRALLPHSKEDLKLDLGEKVERSVVXLLQRAXELFYEGRRDECLQSSEVILDYSWEKLNXGXWQDVDKDWRRVYAIGCLLKALCLCQAPEDANXVAAAL

SEQ ID NO: 14352 - protein, 163 aa, Homo sapiens
  MOD_RES (5)..(5): Selenocysteine
  MOD_RES (17)..(17): Selenocysteine
  MOD_RES (47)..(47): Selenocysteine
  MOD_RES (53)..(53): Selenocysteine
  MOD_RES (81)..(81): Selenocysteine
  MOD_RES (83)..(83): Selenocysteine
  MOD_RES (115)..(115): Selenocysteine
  MOD_RES (147)..(147): Selenocysteine
MAGDXHCPAEPLAREGXLWEALRALLPHSKEDLKLDLGEKVERSVVXLLQRAXELFYEGRRDECLQSSEVILDYSWEKLNXGXWQDVDKDWRRVYAIGCLLKALCLCQAPEDANXVAAALRVCDMGLLMGAAILGDILLKVAAILQXHLPGKRPARGSLPEQP

SEQ ID NO: 14353 - protein, 416 aa, Homo sapiens
  MOD_RES (5)..(5): Selenocysteine
  MOD_RES (17)..(17): Selenocysteine
  MOD_RES (47)..(47): Selenocysteine
  MOD_RES (53)..(53): Selenocysteine
  MOD_RES (81)..(81): Selenocysteine
  MOD_RES (83)..(83): Selenocysteine
  MOD_RES (115)..(115): Selenocysteine
  MOD_RES (147)..(147): Selenocysteine
  MOD_RES (165)..(165): Selenocysteine
  MOD_RES (183)..(183): Selenocysteine
  MOD_RES (234)..(234): Selenocysteine
  MOD_RES (244)..(244): Selenocysteine
  MOD_RES (251)..(251): Selenocysteine
  MOD_RES (254)..(254): Selenocysteine
  MOD_RES (306)..(306): Selenocysteine
  MOD_RES (316)..(316): Selenocysteine
  MOD_RES (354)..(354): Selenocysteine
  MOD_RES (360)..(360): Selenocysteine
MAGDXHCPAEPLAREGXLWEALRALLPHSKEDLKLDLGEKVERSVVXLLQRAXELFYEGRRDECLQSSEVILDYSWEKLNXGXWQDVDKDWRRVYAIGCLLKALCLCQAPEDANXVAAALRVCDMGLLMGAAILGDILLKVAAILQXHLPGKRPARGSLPEQPCXKKARADHGLIPDVKLEKXVPRLHRPSLQHFREQFLVPGRPVILKGVADHWPCMQKWSLEYIQEIAGCRXVPVEVGSRYXDEEWSQXLMXVNEFISKYIVNEPRDVGYLAQHQLFDQIPELKQDISIPDYCSLGDGEEEEIXINAWFGPQGXISPLHQDPQQNFLVQVMGRKYIRLYSPQESGALYPHDXHLLHNXSQVDVENPDLEKFPKFAKAPFLSCILSPGEILFIPVKYWHYVRALDLSFSVSFWWS

SEQ ID NO: 14354 - protein, 220 aa, Homo sapiens
  MOD_RES (5)..(5): Selenocysteine
  MOD_RES (17)..(17): Selenocysteine
  MOD_RES (47)..(47): Selenocysteine
  MOD_RES (53)..(53): Selenocysteine
  MOD_RES (81)..(81): Selenocysteine
  MOD_RES (83)..(83): Selenocysteine
  MOD_RES (115)..(115): Selenocysteine
  MOD_RES (147)..(147): Selenocysteine
  MOD_RES (165)..(165): Selenocysteine
MAGDXHCPAEPLAREGXLWEALRALLPHSKEDLKLDLGEKVERSVVXLLQRAXELFYEGRRDECLQSSEVILDYSWEKLNXGXWQDVDKDWRRVYAIGCLLKALCLCQAPEDANXVAAALRVCDMGLLMGAAILGDILLKVAAILQXHLPGKRPARGSLPEQPCXKVDVENPDLEKFPKFAKAPFLSCILSPGEILFIPVKYWHYVRALDLSFSVSFWWS

SEQ ID NO: 14355 - protein, 454 aa, Homo sapiens
  MOD_RES (31)..(31): Selenocysteine
  MOD_RES (43)..(43): Selenocysteine
  MOD_RES (55)..(55): Selenocysteine
  MOD_RES (85)..(85): Selenocysteine
  MOD_RES (91)..(91): Selenocysteine
  MOD_RES (119)..(119): Selenocysteine
  MOD_RES (121)..(121): Selenocysteine
  MOD_RES (153)..(153): Selenocysteine
  MOD_RES (185)..(185): Selenocysteine
  MOD_RES (203)..(203): Selenocysteine
  MOD_RES (221)..(221): Selenocysteine
  MOD_RES (272)..(272): Selenocysteine
  MOD_RES (282)..(282): Selenocysteine
  MOD_RES (289)..(289): Selenocysteine
  MOD_RES (292)..(292): Selenocysteine
  MOD_RES (344)..(344): Selenocysteine
  MOD_RES (354)..(354): Selenocysteine
  MOD_RES (392)..(392): Selenocysteine
  MOD_RES (398)..(398): Selenocysteine
MSREKCSPGEGAEEGRGSEASGLKASAGHGXEPAGGGPMAGDXHCPAEPLAREGXLWEALRALLPHSKEDLKLDLGEKVERSVVXLLQRAXELFYEGRRDECLQSSEVILDYSWEKLNXGXWQDVDKDWRRVYAIGCLLKALCLCQAPEDANXVAAALRVCDMGLLMGAAILGDILLKVAAILQXHLPGKRPARGSLPEQPCXKKARADHGLIPDVKLEKXVPRLHRPSLQHFREQFLVPGRPVILKGVADHWPCMQKWSLEYIQEIAGCRXVPVEVGSRYXDEEWSQXLMXVNEFISKYIVNEPRDVGYLAQHQLFDQIPELKQDISIPDYCSLGDGEEEEIXINAWFGPQGXISPLHQDPQQNFLVQVMGRKYIRLYSPQESGALYPHDXHLLHNXSQVDVENPDLEKFPKFAKAPFLSCILSPGEILFIPVKYWHYVRALDLSFSVSFWWS

SEQ ID NO: 14356 - protein, 90 aa, Homo sapiens
  MOD_RES (1)..(1): Any amino acid
  MOD_RES (53)..(53): Selenocysteine
  MOD_RES (59)..(59): Selenocysteine
  MOD_RES (64)..(64): Selenocysteine
XVNEFISKYIVNEPRDVGYLAQHQLFDQIPELKQDISIPDYCSLGDGEEEEIXINAWLXWRIPXWKSSPSLPRPHSCPASCLLERSCSSR

SEQ ID NO: 14357 - protein, 1356 aa, Homo sapiens
  MOD_RES (17)..(17): Selenocysteine
  MOD_RES (42)..(42): Selenocysteine
  MOD_RES (47)..(48): Selenocysteine
  MOD_RES (52)..(52): Selenocysteine
  MOD_RES (77)..(77): Selenocysteine
  MOD_RES (87)..(87): Selenocysteine
  MOD_RES (89)..(89): Selenocysteine
  MOD_RES (98)..(98): Selenocysteine
  MOD_RES (108)..(108): Selenocysteine
  MOD_RES (139)..(139): Selenocysteine
  MOD_RES (145)..(145): Selenocysteine
  MOD_RES (186)..(186): Selenocysteine
  MOD_RES (247)..(247): Selenocysteine
  MOD_RES (250)..(250): Selenocysteine
  MOD_RES (279)..(279): Selenocysteine
  MOD_RES (291)..(291): Selenocysteine
  MOD_RES (293)..(293): Selenocysteine
  MOD_RES (298)..(298): Selenocysteine
  MOD_RES (306)..(306): Selenocysteine
  MOD_RES (315)..(315): Selenocysteine
  MOD_RES (320)..(320): Selenocysteine
  MOD_RES (343)..(343): Selenocysteine
  MOD_RES (376)..(376): Selenocysteine
  MOD_RES (384)..(384): Selenocysteine
  MOD_RES (393)..(393): Selenocysteine
  MOD_RES (397)..(397): Selenocysteine
  MOD_RES (401)..(401): Selenocysteine
  MOD_RES (439)..(440): Selenocysteine
  MOD_RES (442)..(442): Selenocysteine
  MOD_RES (444)..(444): Selenocysteine
  MOD_RES (446)..(446): Selenocysteine
  MOD_RES (477)..(477): Selenocysteine
  MOD_RES (513)..(513): Selenocysteine
  MOD_RES (516)..(516): Selenocysteine
  MOD_RES (548)..(548): Selenocysteine
  MOD_RES (554)..(554): Selenocysteine
  MOD_RES (562)..(562): Selenocysteine
  MOD_RES (572)..(572): Selenocysteine
  MOD_RES (577)..(577): Selenocysteine
  MOD_RES (582)..(582): Selenocysteine
  MOD_RES (600)..(600): Selenocysteine
  MOD_RES (608)..(608): Selenocysteine
  MOD_RES (615)..(615): Selenocysteine
  MOD_RES (621)..(621): Selenocysteine
  MOD_RES (649)..(649): Selenocysteine
  MOD_RES (660)..(660): Selenocysteine
  MOD_RES (668)..(668): Selenocysteine
  MOD_RES (670)..(670): Selenocysteine
  MOD_RES (677)..(678): Selenocysteine
  MOD_RES (689)..(689): Selenocysteine
  MOD_RES (706)..(706): Selenocysteine
  MOD_RES (723)..(723): Selenocysteine
  MOD_RES (736)..(736): Selenocysteine
  MOD_RES (761)..(761): Selenocysteine
  MOD_RES (771)..(771): Selenocysteine
  MOD_RES (788)..(788): Selenocysteine
  MOD_RES (799)..(799): Selenocysteine
  MOD_RES (859)..(859): Selenocysteine
  MOD_RES (861)..(861): Selenocysteine
  MOD_RES (864)..(864): Selenocysteine
  MOD_RES (875)..(875): Selenocysteine
  MOD_RES (906)..(906): Selenocysteine
  MOD_RES (926)..(926): Selenocysteine
  MOD_RES (940)..(940): Selenocysteine
  MOD_RES (967)..(967): Selenocysteine
  MOD_RES (1001)..(1001): Selenocysteine
  MOD_RES (1076)..(1076): Selenocysteine
  MOD_RES (1083)..(1083): Selenocysteine
  MOD_RES (1123)..(1123): Selenocysteine
  MOD_RES (1131)..(1132): Selenocysteine
  MOD_RES (1138)..(1138): Selenocysteine
  MOD_RES (1152)..(1152): Selenocysteine
  MOD_RES (1183)..(1183): Selenocysteine
  MOD_RES (1196)..(1196): Selenocysteine
  MOD_RES (1217)..(1217): Selenocysteine
  MOD_RES (1238)..(1238): Selenocysteine
  MOD_RES (1258)..(1258): Selenocysteine
  MOD_RES (1271)..(1271): Selenocysteine
  MOD_RES (1276)..(1276): Selenocysteine
  MOD_RES (1302)..(1302): Selenocysteine
  MOD_RES (1314)..(1314): Selenocysteine
  MOD_RES (1316)..(1317): Selenocysteine
  MOD_RES (1336)..(1336): Selenocysteine
  MOD_RES (1339)..(1339): Selenocysteine
  MOD_RES (1349)..(1350): Selenocysteine
MQSKVLLAVALWLCVEXRAASVGLPSVSLDLPRLSIQKDILXIKANXXLQIXCRGQRDLDWLWPNNQSGSEQRVEVXECSDGLFCKXLXIPKVIGNDXGAYKCFYREXDLASVIYVYVQDYRSPFIASVSDQHGVVYIXENKNKXVVIPCLGSISNLNVSLCARYPEKRFVPDGNRISWDSKKGFXIPSYMISYAGMVFCEAKINDESYQSIMYIVVVVGYRIYDVVLSPSHGIELSVGEKLVLNCXARXELNVGIDFNWEYPSSKHQHKKLVNRDLKXQSGSEMKKFLSXLXIDGVXRSDQGLYXCAASSGLMXKKNSXFVRVHEKPFVAFGSGMESLVEAXVGERVRIPAKYLGYPPPEIKWYKNGIPLESNHXIKAGHVLXIMEVSERDXGNYXVILXNPISKEKQSHVVSLVVYVPPQIGEKSLISPVDSYQYGXXQXLXCXVYAIPPPHHIHWYWQLEEECANEPSQAVSVXNPYPCEEWRSVEDFQGGNKIEVNKNQFALIEGKNKXVSXLVIQAANVSALYKCEAVNKVGRGERVISFHVXRGPEIXLQPDMQPXEQESVSLWCXADRSXFENLXWYKLGPQPLPIHVGELPXPVCKNLDXLWKLNAXMFSNSXNDILIMELKNASLQDQGDYVCLAQDRKXKKRHCVVRQLXVLERVAPXIXGNLENQXXSIGESIEVSCXASGNPPPQIMWFKDNEXLVEDSGIVLKDGNRNLXIRRVRKEDEGLYXCQACSVLGCAKVEAFFIIEGAQEKXNLEIIILVGXAVIAMFFWLLLVIILRXVKRANGGELKXGYLSIVMDPDELPLDEHCERLPYDASKWEFPRDRLKLGKPLGRGAFGQVIEADAFGIDKXAXCRXVAVKMLKEGAXHSEHRALMSELKILIHIGHHLNVVNLLGACXKPGGPLMVIVEFCKFGNLSXYLRSKRNEFVPYKXKGARFRQGKDYVGAIPVDLKRRLDSIXSSQSSASSGFVEEKSLSDVEEEEAPEDLYKDFLXLEHLICYSFQVAKGMEFLASRKCIHRDLAARNILLSEKNVVKICDFGLARDIYKDPDYVRKGDARLPLKWMAPEXIFDRVYXIQSDVWSFGVLLWEIFSLGASPYPGVKIDEEFCRRLKEGXRMRAPDYXXPEMYQXMLDCWHGEPSQRPXFSELVEHLGNLLQANAQQDGKDYIVLPISEXLSMEEDSGLSLPXSPVSCMEEEEVCDPKFHYDNXAGISQYLQNSKRKSRPVSVKXFEDIPLEEPEVKVIPDDNQXDSGMVLASEELKXLEDRXKLSPSFGGMVPSKSRESVASEGSNQXSGYQSGYHSDDXDXXVYSSEEAELLKLIEIGVQXGSXAQILQPDSGXXLSSPPV

SEQ ID NO: 14358 - protein, 212 aa, Homo sapiens
  MOD_RES (36)..(36): Selenocysteine
  MOD_RES (43)..(43): Selenocysteine
  MOD_RES (51)..(51): Selenocysteine
  MOD_RES (55)..(55): Selenocysteine
  MOD_RES (60)..(60): Selenocysteine
  MOD_RES (80)..(80): Selenocysteine
  MOD_RES (112)..(112): Selenocysteine
  MOD_RES (142)..(142): Selenocysteine
MQPDPRPSGAGACCRFLPLQSQCPEGAGDAVMYASXECKAEVXPSQHGNRXFSYXLEDHXKQAFGIMNELRLSQQLCDVXLQVKYQDAPAAQFMAHKVVLASSSPVFKAMFXNGLREQGMEVVSIEGIHPKVMERLIEFAYXASISMGEKCVLHVMNGAVMYQIDSVVRACSDFLVQQLDPSNAIGIANFAEQIGCVELHQRAREYIYMHFG

SEQ ID NO: 14359 - protein, 213 aa, Homo sapiens
  MOD_RES (36)..(36): Selenocysteine
  MOD_RES (43)..(43): Selenocysteine
  MOD_RES (51)..(51): Selenocysteine
  MOD_RES (55)..(55): Selenocysteine
  MOD_RES (60)..(60): Selenocysteine
  MOD_RES (80)..(80): Selenocysteine
  MOD_RES (112)..(112): Selenocysteine
  MOD_RES (142)..(142): Selenocysteine
MQPDPRPSGAGACCRFLPLQSQCPEGAGDAVMYASXECKAEVXPSQHGNRXFSYXLEDHXKQAFGIMNELRLSQQLCDVXLQVKYQDAPAAQFMAHKVVLASSSPVFKAMFXNGLREQGMEVVSIEGIHPKVMERLIEFAYXASISMGEKCVLHVMNGAVMYQIDSVVRACSDFLVQQLDPSNAIGIANFAEQIGCVELHQRAREYIYMHFGE

SEQ ID NO: 14360 - protein, 279 aa, Homo sapiens
  MOD_RES (36)..(36): Selenocysteine
  MOD_RES (43)..(43): Selenocysteine
  MOD_RES (51)..(51): Selenocysteine
  MOD_RES (55)..(55): Selenocysteine
  MOD_RES (60)..(60): Selenocysteine
  MOD_RES (80)..(80): Selenocysteine
  MOD_RES (112)..(112): Selenocysteine
  MOD_RES (142)..(142): Selenocysteine
  MOD_RES (230)..(230): Selenocysteine
  MOD_RES (277)..(277): Selenocysteine
MQPDPRPSGAGACCRFLPLQSQCPEGAGDAVMYASXECKAEVXPSQHGNRXFSYXLEDHXKQAFGIMNELRLSQQLCDVXLQVKYQDAPAAQFMAHKVVLASSSPVFKAMFXNGLREQGMEVVSIEGIHPKVMERLIEFAYXASISMGEKCVLHVMNGAVMYQIDSVVRACSDFLVQQLDPSNAIGIANFAEQIGCVELHQRAREYIYMHFGEVAKQEEFFNLSHCQLVXLISRDDLNVRCESEVFHACINWVKYDCEQRRFYVQALLRAVRCHSLXPN

SEQ ID NO: 14361 - protein, 624 aa, Homo sapiens
  MOD_RES (36)..(36): Selenocysteine
  MOD_RES (43)..(43): Selenocysteine
  MOD_RES (51)..(51): Selenocysteine
  MOD_RES (55)..(55): Selenocysteine
  MOD_RES (60)..(60): Selenocysteine
  MOD_RES (80)..(80): Selenocysteine
  MOD_RES (112)..(112): Selenocysteine
  MOD_RES (142)..(142): Selenocysteine
  MOD_RES (230)..(230): Selenocysteine
  MOD_RES (277)..(277): Selenocysteine
  MOD_RES (309)..(309): Selenocysteine
  MOD_RES (314)..(314): Selenocysteine
  MOD_RES (330)..(330): Selenocysteine
  MOD_RES (351)..(351): Selenocysteine
  MOD_RES (388)..(388): Selenocysteine
  MOD_RES (400)..(400): Selenocysteine
  MOD_RES (458)..(458): Selenocysteine
  MOD_RES (481)..(481): Selenocysteine
  MOD_RES (501)..(501): Selenocysteine
  MOD_RES (505)..(505): Selenocysteine
  MOD_RES (541)..(541): Selenocysteine
  MOD_RES (543)..(543): Selenocysteine
  MOD_RES (545)..(545): Selenocysteine
  MOD_RES (560)..(560): Selenocysteine
  MOD_RES (576)..(576): Selenocysteine
  MOD_RES (588)..(588): Selenocysteine
  MOD_RES (590)..(590): Selenocysteine
  MOD_RES (595)..(595): Selenocysteine
  MOD_RES (598)..(598): Selenocysteine
  MOD_RES (609)..(609): Selenocysteine
  MOD_RES (623)..(623): Selenocysteine
MQPDPRPSGAGACCRFLPLQSQCPEGAGDAVMYASXECKAEVXPSQHGNRXFSYXLEDHXKQAFGIMNELRLSQQLCDVXLQVKYQDAPAAQFMAHKVVLASSSPVFKAMFXNGLREQGMEVVSIEGIHPKVMERLIEFAYXASISMGEKCVLHVMNGAVMYQIDSVVRACSDFLVQQLDPSNAIGIANFAEQIGCVELHQRAREYIYMHFGEVAKQEEFFNLSHCQLVXLISRDDLNVRCESEVFHACINWVKYDCEQRRFYVQALLRAVRCHSLXPNFLQMQLQKCEILQSDSRCKDYLVKIFEELXLHKPXQVMPCRAPKVGRLIYXAGGYFRQSLSYLEAYNPSDGXWLRLADLQVPRSGLAGCVVGGLLYAVGGRNNSPDGNXDSSALDCYNPMXNQWSPCAPMSVPRNRIGVGVIDGHIYAVGGSHGCIHHNSVERYEPERDEWHLVAPMLXRRIGVGVAVLNRLLYAVGGFDGXNRLNSAECYYPERNEWRMIXAMNXIRSGAGVCVLHNCIYAAGGYDGQDQLNSVERYDVEXEXWXFVAPMKHRRSALGIXVHQGRIYVLGGYDGHXFLDSVECYDPDXDXWSEVXRMXSGRSGVGVAVXMEPCRKQIDQQNCXC

SEQ ID NO: 14362 - protein, 172 aa, Homo sapiens
  MOD_RES (1)..(1): Any amino acid
  MOD_RES (7)..(7): Selenocysteine
  MOD_RES (65)..(65): Selenocysteine
  MOD_RES (88)..(88): Selenocysteine
  MOD_RES (108)..(108): Selenocysteine
  MOD_RES (112)..(112): Selenocysteine
  MOD_RES (124)..(124): Selenocysteine
  MOD_RES (136)..(136): Selenocysteine
  MOD_RES (138)..(138): Selenocysteine
  MOD_RES (143)..(143): Selenocysteine
  MOD_RES (146)..(146): Selenocysteine
  MOD_RES (157)..(157): Selenocysteine
  MOD_RES (171)..(171): Selenocysteine
XCYNPMXNQWSPCAPMSVPRNRIGVGVIDGHIYAVGGSHGCIHHNSVERYEPERDEWHLVAPMLXRRIGVGVAVLNRLLYAVGGFDGXNRLNSAECYYPERNEWRMIXAMNXIRSGAGGYDGHXFLDSVECYDPDXDXWSEVXRMXSGRSGVGVAVXMEPCRKQIDQQNCXC

SEQ ID NO: 14363 - protein, 116 aa, Homo sapiens
  MOD_RES (1)..(1): Any amino acid
  MOD_RES (11)..(11): Selenocysteine
  MOD_RES (48)..(48): Selenocysteine
  MOD_RES (60)..(60): Selenocysteine
XLEAYNPSDGXWLRLADLQVPRSGLAGCVVGGLLYAVGGRNNSPDGNXDSSALDCYNPMXNQWSPCAPMSVPRNRIGVGVIDGHIYAVGGSHGCIHHNSVERRLRPAQLYLCCWGL

SEQ ID NO: 14364 - protein, 129 aa, Homo sapiens
  MOD_RES (1)..(1): Any amino acid
  MOD_RES (23)..(23): Selenocysteine
  MOD_RES (38)..(38): Selenocysteine
  MOD_RES (46)..(46): Selenocysteine
XSRWWRAAPRGDIQQRNREMEGXVRRGAWLCAPARCPXPRRRAPGXCGKGGRIAAPFPPRPFRPLPASFSGVPRPLPNRQPRPRRPRSPGAEAPRRRRRPRVPYSQEVCPPRHERCCHVPDRQRCPCLQ

SEQ ID NO: 14365 - protein, 404 aa, Homo sapiens
  MOD_RES (33)..(33): Selenocysteine
  MOD_RES (61)..(61): Selenocysteine
  MOD_RES (72)..(72): Selenocysteine
  MOD_RES (77)..(77): Selenocysteine
  MOD_RES (84)..(84): Selenocysteine
  MOD_RES (92)..(92): Selenocysteine
  MOD_RES (119)..(119): Selenocysteine
  MOD_RES (126)..(126): Selenocysteine
  MOD_RES (278)..(278): Selenocysteine
  MOD_RES (285)..(285): Selenocysteine
  MOD_RES (289)..(289): Selenocysteine
  MOD_RES (291)..(291): Selenocysteine
  MOD_RES (299)..(299): Selenocysteine
  MOD_RES (310)..(310): Selenocysteine
  MOD_RES (326)..(326): Selenocysteine
  MOD_RES (335)..(335): Selenocysteine
  MOD_RES (380)..(380): Selenocysteine
MQRRDDPAARMSRSSGRSGSMDPSGAHPSVRQXPSRQPPLPHRSRGGGGGSRGGARASPAXQPPPLLPPSAXGPDAXVGGPAPXPLLPPSAXASVKMEPENKYLPELMAEKDSLDPSFXHAMQLLXAEIEKIQKGDSKKDDEENYLDLFSHKNMKLKERVLIPVKQYPKEEELRKGGDPKYAHLNMDLHVFIEVFGPPCEAYALMAHAMEEVKKFLVPDMMDDICQEQFLELSYLNGVPEPSRGRGVPVRGRGAAPPPPPVPRGRGVGPPRGALVRGXPVRGAIXRGAXVXRGVPPPPXVRGAPAPRARXAGIQRIPLPPPPAPEXYEEYGYDDXYAEQSYEGYEGYYSQSQGDSEYYDYGHGEVQDSYEAYGQDDWNGXRPSLKAPPARPVKGAYREHPYGRY

SEQ ID NO: 14366 - protein, 443 aa, Homo sapiens
  MOD_RES (33)..(33): Selenocysteine
  MOD_RES (61)..(61): Selenocysteine
  MOD_RES (72)..(72): Selenocysteine
  MOD_RES (77)..(77): Selenocysteine
  MOD_RES (84)..(84): Selenocysteine
  MOD_RES (92)..(92): Selenocysteine
  MOD_RES (119)..(119): Selenocysteine
  MOD_RES (126)..(126): Selenocysteine
  MOD_RES (183)..(183): Selenocysteine
  MOD_RES (191)..(191): Selenocysteine
  MOD_RES (317)..(317): Selenocysteine
  MOD_RES (324)..(324): Selenocysteine
  MOD_RES (328)..(328): Selenocysteine
  MOD_RES (330)..(330): Selenocysteine
  MOD_RES (338)..(338): Selenocysteine
  MOD_RES (349)..(349): Selenocysteine
  MOD_RES (365)..(365): Selenocysteine
  MOD_RES (374)..(374): Selenocysteine
  MOD_RES (419)..(419): Selenocysteine
MQRRDDPAARMSRSSGRSGSMDPSGAHPSVRQXPSRQPPLPHRSRGGGGGSRGGARASPAXQPPPLLPPSAXGPDAXVGGPAPXPLLPPSAXASVKMEPENKYLPELMAEKDSLDPSFXHAMQLLXAEIEKIQKGDSKKDDEENYLDLFSHKNMKLKERVLIPVKQYPKFNFVGKILGPQGNXIKRLQEEXGAKISVLGKGSMRDKAKEEELRKGGDPKYAHLNMDLHVFIEVFGPPCEAYALMAHAMEEVKKFLVPDMMDDICQEQFLELSYLNGVPEPSRGRGVPVRGRGAAPPPPPVPRGRGVGPPRGALVRGXPVRGAIXRGAXVXRGVPPPPXVRGAPAPRARXAGIQRIPLPPPPAPEXYEEYGYDDXYAEQSYEGYEGYYSQSQGDSEYYDYGHGEVQDSYEAYGQDDWNGXRPSLKAPPARPVKGAYREHPYGRY

SEQ ID NO: 14367 - protein, 216 aa, Homo sapiens
  MOD_RES (63)..(63): Selenocysteine
  MOD_RES (145)..(145): Selenocysteine
  MOD_RES (147)..(147): Selenocysteine
  MOD_RES (162)..(162): Selenocysteine
  MOD_RES (167)..(167): Selenocysteine
  MOD_RES (176)..(176): Selenocysteine
AVLYYQLAASQGHSLAQYRYARCLLRDPASSWNPERQRAVSLLKQAADSGLREAQAFLGVLFXKEPYLDEQRAVKYLWLAANNGDSQSRYHLGICYEKGLGVQRNLGEALRCYQQSAALGNEAAQERLRALFSMGAAAPGPSDLXVXGLKSFSSPSLCSLNXLLAGXSRLPHASSXGNLGLLCRSGHLGASLEASSRAIPPHPYPLERSVVRLGFG

SEQ ID NO: 14368 - protein, 322 aa, Homo sapiens
  MOD_RES (15)..(15): Selenocysteine
  MOD_RES (24)..(24): Selenocysteine
  MOD_RES (28)..(28): Selenocysteine
  MOD_RES (35)..(36): Selenocysteine
  MOD_RES (39)..(39): Selenocysteine
  MOD_RES (57)..(57): Selenocysteine
  MOD_RES (81)..(81): Selenocysteine
  MOD_RES (90)..(90): Selenocysteine
  MOD_RES (155)..(155): Selenocysteine
  MOD_RES (216)..(216): Selenocysteine
  MOD_RES (226)..(226): Selenocysteine
  MOD_RES (234)..(234): Selenocysteine
  MOD_RES (253)..(253): Selenocysteine
  MOD_RES (262)..(262): Selenocysteine
  MOD_RES (293)..(293): Selenocysteine
MWRLPGLLGRALPRXLGPSLWRVXPKSXSPDGPQXXSSXLLVPVPNLDRSGPHGPGXSGGPRSHGWKDAFQWMSSRVSPNXLWDAISWGXLAVLALQLARQIHFQASLPAGPQRVEHCSWHSPLDRFFSSPLWHPCSSLRQHILPSPDGPAPRHXGLREPRLGQEEASAQPRNFSHNSLRGARPQDPSEEGPGDFGFLHASSSIESEAKPAQPQPXGEKEQDKSKXLSLEEAVXSIQQLFQLSVSIAFNFLGXENMKSGDHXAAFSYFQKAAARGYSKAQYNAGLCHEHGRGXPRDISKLAASQGHSLAQYRYARCLLRDPA

SEQ ID NO: 14369 - protein, 515 aa, Homo sapiens
  MOD_RES (15)..(15): Selenocysteine
  MOD_RES (24)..(24): Selenocysteine
  MOD_RES (28)..(28): Selenocysteine
  MOD_RES (35)..(36): Selenocysteine
  MOD_RES (39)..(39): Selenocysteine
  MOD_RES (57)..(57): Selenocysteine
  MOD_RES (81)..(81): Selenocysteine
  MOD_RES (90)..(90): Selenocysteine
  MOD_RES (155)..(155): Selenocysteine
  MOD_RES (216)..(216): Selenocysteine
  MOD_RES (226)..(226): Selenocysteine
  MOD_RES (234)..(234): Selenocysteine
  MOD_RES (253)..(253): Selenocysteine
  MOD_RES (262)..(262): Selenocysteine
  MOD_RES (293)..(293): Selenocysteine
  MOD_RES (362)..(362): Selenocysteine
  MOD_RES (444)..(444): Selenocysteine
  MOD_RES (446)..(446): Selenocysteine
  MOD_RES (461)..(461): Selenocysteine
  MOD_RES (466)..(466): Selenocysteine
  MOD_RES (475)..(475): Selenocysteine
MWRLPGLLGRALPRXLGPSLWRVXPKSXSPDGPQXXSSXLLVPVPNLDRSGPHGPGXSGGPRSHGWKDAFQWMSSRVSPNXLWDAISWGXLAVLALQLARQIHFQASLPAGPQRVEHCSWHSPLDRFFSSPLWHPCSSLRQHILPSPDGPAPRHXGLREPRLGQEEASAQPRNFSHNSLRGARPQDPSEEGPGDFGFLHASSSIESEAKPAQPQPXGEKEQDKSKXLSLEEAVXSIQQLFQLSVSIAFNFLGXENMKSGDHXAAFSYFQKAAARGYSKAQYNAGLCHEHGRGXPRDISKAVLYYQLAASQGHSLAQYRYARCLLRDPASSWNPERQRAVSLLKQAADSGLREAQAFLGVLFXKEPYLDEQRAVKYLWLAANNGDSQSRYHLGICYEKGLGVQRNLGEALRCYQQSAALGNEAAQERLRALFSMGAAAPGPSDLXVXGLKSFSSPSLCSLNXLLAGXSRLPHASSXGNLGLLCRSGHLGASLEASSRAIPPHPYPLERSVVRLGFG

SEQ ID NO: 14370 - protein, 1644 aa, Homo sapiens
  MOD_RES (6)..(6): Selenocysteine
  MOD_RES (10)..(10): Selenocysteine
  MOD_RES (69)..(69): Selenocysteine
  MOD_RES (71)..(71): Selenocysteine
  MOD_RES (76)..(76): Selenocysteine
  MOD_RES (84)..(84): Selenocysteine
  MOD_RES (135)..(135): Selenocysteine
  MOD_RES (144)..(144): Selenocysteine
  MOD_RES (155)..(155): Selenocysteine
  MOD_RES (165)..(166): Selenocysteine
  MOD_RES (216)..(216): Selenocysteine
  MOD_RES (219)..(219): Selenocysteine
  MOD_RES (230)..(231): Selenocysteine
  MOD_RES (236)..(236): Selenocysteine
  MOD_RES (242)..(242): Selenocysteine
  MOD_RES (261)..(261): Selenocysteine
  MOD_RES (270)..(270): Selenocysteine
  MOD_RES (278)..(278): Selenocysteine
  MOD_RES (282)..(282): Selenocysteine
  MOD_RES (323)..(323): Selenocysteine
  MOD_RES (332)..(332): Selenocysteine
  MOD_RES (368)..(368): Selenocysteine
  MOD_RES (382)..(382): Selenocysteine
  MOD_RES (393)..(393): Selenocysteine
  MOD_RES (446)..(446): Selenocysteine
  MOD_RES (454)..(455): Selenocysteine
  MOD_RES (458)..(458): Selenocysteine
  MOD_RES (465)..(465): Selenocysteine
  MOD_RES (469)..(469): Selenocysteine
  MOD_RES (480)..(481): Selenocysteine
  MOD_RES (484)..(484): Selenocysteine
  MOD_RES (502)..(502): Selenocysteine
  MOD_RES (529)..(530): Selenocysteine
  MOD_RES (532)..(533): Selenocysteine
  MOD_RES (579)..(579): Selenocysteine
  MOD_RES (592)..(592): Selenocysteine
  MOD_RES (599)..(599): Selenocysteine
  MOD_RES (611)..(611): Selenocysteine
  MOD_RES (625)..(625): Selenocysteine
  MOD_RES (632)..(632): Selenocysteine
  MOD_RES (637)..(637): Selenocysteine
  MOD_RES (639)..(639): Selenocysteine
  MOD_RES (643)..(643): Selenocysteine
  MOD_RES (687)..(688): Selenocysteine
  MOD_RES (711)..(711): Selenocysteine
  MOD_RES (741)..(741): Selenocysteine
  MOD_RES (748)..(748): Selenocysteine
  MOD_RES (750)..(750): Selenocysteine
  MOD_RES (755)..(755): Selenocysteine
  MOD_RES (788)..(788): Selenocysteine
  MOD_RES (792)..(792): Selenocysteine
  MOD_RES (807)..(807): Selenocysteine
  MOD_RES (813)..(813): Selenocysteine
  MOD_RES (828)..(828): Selenocysteine
  MOD_RES (830)..(831): Selenocysteine
  MOD_RES (842)..(842): Selenocysteine
  MOD_RES (865)..(865): Selenocysteine
  MOD_RES (901)..(901): Selenocysteine
  MOD_RES (905)..(905): Selenocysteine
  MOD_RES (921)..(921): Selenocysteine
  MOD_RES (957)..(957): Selenocysteine
  MOD_RES (970)..(970): Selenocysteine
  MOD_RES (974)..(974): Selenocysteine
  MOD_RES (987)..(987): Selenocysteine
  MOD_RES (1026)..(1026): Selenocysteine
  MOD_RES (1031)..(1031): Selenocysteine
  MOD_RES (1038)..(1038): Selenocysteine
  MOD_RES (1069)..(1069): Selenocysteine
  MOD_RES (1087)..(1087): Selenocysteine
  MOD_RES (1095)..(1095): Selenocysteine
  MOD_RES (1098)..(1098): Selenocysteine
  MOD_RES (1106)..(1106): Selenocysteine
  MOD_RES (1110)..(1110): Selenocysteine
  MOD_RES (1114)..(1114): Selenocysteine
  MOD_RES (1131)..(1131): Selenocysteine
  MOD_RES (1166)..(1166): Selenocysteine
  MOD_RES (1168)..(1168): Selenocysteine
  MOD_RES (1170)..(1170): Selenocysteine
  MOD_RES (1172)..(1174): Selenocysteine
  MOD_RES (1183)..(1183): Selenocysteine
  MOD_RES (1185)..(1185): Selenocysteine
  MOD_RES (1263)..(1263): Selenocysteine
  MOD_RES (1278)..(1278): Selenocysteine
  MOD_RES (1282)..(1282): Selenocysteine
  MOD_RES (1286)..(1286): Selenocysteine
  MOD_RES (1288)..(1288): Selenocysteine
  MOD_RES (1290)..(1290): Selenocysteine
  MOD_RES (1292)..(1292): Selenocysteine
  MOD_RES (1323)..(1323): Selenocysteine
  MOD_RES (1332)..(1332): Selenocysteine
  MOD_RES (1401)..(1401): Selenocysteine
  MOD_RES (1420)..(1420): Selenocysteine
  MOD_RES (1422)..(1422): Selenocysteine
  MOD_RES (1440)..(1440): Selenocysteine
  MOD_RES (1473)..(1474): Selenocysteine
  MOD_RES (1477)..(1477): Selenocysteine
  MOD_RES (1538)..(1538): Selenocysteine
  MOD_RES (1547)..(1547): Selenocysteine
  MOD_RES (1586)..(1586): Selenocysteine
  MOD_RES (1590)..(1590): Selenocysteine
MFWCGXCFVXNNMKGSEVSLEKKKKIKMPVKRLREVVSQNHGDHLVLLKDELPCVPPALSANKRLPVGXGXSLNGXSRGSSDLXSARNCYQPLLENPMVSESDFSKDVAVQVLPLDKIEENNKQKANDIFISQYXMGQKDALRXVLKQNVSLCLXGWSDHSGVIXXHCSLYLLRLMRSSHLSLPSSWDYRAQSMPVFKEVKVHLLEDAGIEKDAVXQEXRISPSGIDSAXXVAAAXAAAIAXAAPLIKVQSDLEAKVNSVXELLSKLQEXDKHLQRVXEQQXSIQRKQEKLHCHDHEKQMNVFMEQHIRHLEKLQQQQIDIQXHFISAALKXSSFQPVSMPSSRAVEKYSVKPEHPNLGSCNPSLYNXFASKQAPLKEVEDXSFDKQKSPLEXPAPRRFAPVPVSRDDELSKRENLLEEKENMEVSCHRGNVRLLEQILNNNDSLXRKSESSNXXSLXRSKIGWXPEKXNRFPSCEELEXXKVXMQKSDDVLHDLGQKEKEXNSMVQPKESLSMLKLPDLPQNSVKLQXXNXXRSVLKDAEKILRGVQNNKKVLEENLEAIIRAKDGAAMYSLINALSXNREMSEKIRIRKXVDEWIKXISAEIQDELSRXDYEQKRFDQKNQRXKKGQNMXKDIRXNXQDKXVNKSVIPRKHSQKQIEEHFRNLPMRGMPASSLQKERKEGLLKAXXVIQDEDYMLQVYGKPVYQGHRSXLKKGPYLRFNSPSPKSRPQRPKVIERVKGXKVKSIRXQXDFYAXKPKKMDSKMKHSVPVLPHGDQQYLFSPSREMPXFSGXLEGHLIPMAILLGQXQSNSDXMPPAGVIVSKPHPVXVXXSIPPSSRKVEXGVKKPNIAIVEMKSEKKDPPQLXVQVLPSVDIDSISNSSADVLSPLSSPKEASLPPVQXWIKXPEIMKVDEEEVKFPGXNFDEIIDVIQEEEKCDEIPDSEPILEFNRSVKADSXKYNGPPFPPVASXFQPXADILDKVIERKEXLENSLIQWVEQEIMSRIISGLFPVQQQIAPSISVSVSEXSEPLXSDIVEGXSSGALQLFVDAGVPVNSNVIKHFVNEALAEXIAVMLGDREAKKQGPVAXGVSGDASXNEXYLPARVCXPLPXPQPXPPCSPSSPAKECVLVKXPDSSPCDSDHDMAFPVKEICAEKGDDMPAIMLVNXPXVXPXXXPPPAAAVFXPXLSDISIDKLKVSSPELPKPWGDGDLPLEEENPNSPQEELHPRAIVMSVAKDEEPESMDFPAQPPPPEPVPFMPFPAGXKAPSPSQMPGSDSSXLESXLSVXVXEXEXLDKPISEGEILFSCGQKLAPKILEDIGLYLXNLNDSLSSXLHDAVEMEDDPPSEGQVIRMSHKKFHADAILSFAKQNQESAVSQQAVYHSEDLENSVGELSEGQRPQLXAAAENILMGHSLYMQPPVXNXQSLDQQCDPKPLSRQFDXVSGSIYEDSCASHGPMSLGELELEPNSKLVLPXXLLXAQENDVNLPVAAEDFSQYQLKQNQDVKQVEHKPSQSYLRVRNKSDIAPSQQQVSPGDMDRXQIELNPYLXCVFSGLGVHVKKVSCIGKLGLWRFVIQIISSPRWESSAXLRFXDAPCQDVSDAAVSEPRGLLSVSESQHNAGGHGVFGGRYLLNGKRQPAQCLCHWF

SEQ ID NO: 14371 - protein, 1472 aa, Homo sapiens
  MOD_RES (57)..(57): Selenocysteine
  MOD_RES (59)..(59): Selenocysteine
  MOD_RES (64)..(64): Selenocysteine
  MOD_RES (72)..(72): Selenocysteine
  MOD_RES (123)..(123): Selenocysteine
  MOD_RES (132)..(132): Selenocysteine
  MOD_RES (163)..(163): Selenocysteine
  MOD_RES (166)..(166): Selenocysteine
  MOD_RES (177)..(178): Selenocysteine
  MOD_RES (183)..(183): Selenocysteine
  MOD_RES (189)..(189): Selenocysteine
  MOD_RES (208)..(208): Selenocysteine
  MOD_RES (217)..(217): Selenocysteine
  MOD_RES (225)..(225): Selenocysteine
  MOD_RES (229)..(229): Selenocysteine
  MOD_RES (270)..(270): Selenocysteine
  MOD_RES (279)..(279): Selenocysteine
  MOD_RES (315)..(315): Selenocysteine
  MOD_RES (329)..(329): Selenocysteine
  MOD_RES (340)..(340): Selenocysteine
  MOD_RES (393)..(393): Selenocysteine
  MOD_RES (401)..(402): Selenocysteine
  MOD_RES (405)..(405): Selenocysteine
  MOD_RES (412)..(412): Selenocysteine
  MOD_RES (416)..(416): Selenocysteine
  MOD_RES (427)..(428): Selenocysteine
  MOD_RES (431)..(431): Selenocysteine
  MOD_RES (449)..(449): Selenocysteine
  MOD_RES (476)..(477): Selenocysteine
  MOD_RES (479)..(480): Selenocysteine
  MOD_RES (526)..(526): Selenocysteine
  MOD_RES (539)..(539): Selenocysteine
  MOD_RES (546)..(546): Selenocysteine
  MOD_RES (558)..(559): Selenocysteine
  MOD_RES (582)..(582): Selenocysteine
  MOD_RES (612)..(612): Selenocysteine
  MOD_RES (619)..(619): Selenocysteine
  MOD_RES (621)..(621): Selenocysteine
  MOD_RES (626)..(626): Selenocysteine
  MOD_RES (659)..(659): Selenocysteine
  MOD_RES (663)..(663): Selenocysteine
  MOD_RES (678)..(678): Selenocysteine
  MOD_RES (684)..(684): Selenocysteine
  MOD_RES (699)..(699): Selenocysteine
  MOD_RES (701)..(702): Selenocysteine
  MOD_RES (713)..(713): Selenocysteine
  MOD_RES (736)..(736): Selenocysteine
  MOD_RES (772)..(772): Selenocysteine
  MOD_RES (776)..(776): Selenocysteine
  MOD_RES (792)..(792): Selenocysteine
  MOD_RES (828)..(828): Selenocysteine
  MOD_RES (841)..(841): Selenocysteine
  MOD_RES (845)..(845): Selenocysteine
  MOD_RES (858)..(858): Selenocysteine
  MOD_RES (897)..(897): Selenocysteine
  MOD_RES (902)..(902): Selenocysteine
  MOD_RES (909)..(909): Selenocysteine
  MOD_RES (940)..(940): Selenocysteine
  MOD_RES (958)..(958): Selenocysteine
  MOD_RES (966)..(966): Selenocysteine
  MOD_RES (969)..(969): Selenocysteine
  MOD_RES (977)..(977): Selenocysteine
  MOD_RES (981)..(981): Selenocysteine
  MOD_RES (985)..(985): Selenocysteine
  MOD_RES (1002)..(1002): Selenocysteine
  MOD_RES (1037)..(1037): Selenocysteine
  MOD_RES (1039)..(1039): Selenocysteine
  MOD_RES (1041)..(1041): Selenocysteine
  MOD_RES (1043)..(1045): Selenocysteine
  MOD_RES (1054)..(1054): Selenocysteine
  MOD_RES (1056)..(1056): Selenocysteine
  MOD_RES (1134)..(1134): Selenocysteine
  MOD_RES (1149)..(1149): Selenocysteine
  MOD_RES (1153)..(1153): Selenocysteine
  MOD_RES (1157)..(1157): Selenocysteine
  MOD_RES (1159)..(1159): Selenocysteine
  MOD_RES (1161)..(1161): Selenocysteine
  MOD_RES (1163)..(1163): Selenocysteine
  MOD_RES (1194)..(1194): Selenocysteine
  MOD_RES (1203)..(1203): Selenocysteine
  MOD_RES (1272)..(1272): Selenocysteine
  MOD_RES (1291)..(1291): Selenocysteine
  MOD_RES (1293)..(1293): Selenocysteine
  MOD_RES (1311)..(1311): Selenocysteine
  MOD_RES (1344)..(1345): Selenocysteine
  MOD_RES (1348)..(1348): Selenocysteine
  MOD_RES (1409)..(1409): Selenocysteine
  MOD_RES (1418)..(1418): Selenocysteine
  MOD_RES (1459)..(1459): Selenocysteine
  MOD_RES (1471)..(1471): Selenocysteine
MKGSEVSLEKKKKIKMPVKRLREVVSQNHGDHLVLLKDELPCVPPALSANKRLPVGXGXSLNGXSRGSSDLXSARNCYQPLLENPMVSESDFSKDVAVQVLPLDKIEENNKQKANDIFISQYXMGQKDALRXVLKQKAQSMPVFKEVKVHLLEDAGIEKDAVXQEXRISPSGIDSAXXVAAAXAAAIAXAAPLIKVQSDLEAKVNSVXELLSKLQEXDKHLQRVXEQQXSIQRKQEKLHCHDHEKQMNVFMEQHIRHLEKLQQQQIDIQXHFISAALKXSSFQPVSMPSSRAVEKYSVKPEHPNLGSCNPSLYNXFASKQAPLKEVEDXSFDKQKSPLEXPAPRRFAPVPVSRDDELSKRENLLEEKENMEVSCHRGNVRLLEQILNNNDSLXRKSESSNXXSLXRSKIGWXPEKXNRFPSCEELEXXKVXMQKSDDVLHDLGQKEKEXNSMVQPKESLSMLKLPDLPQNSVKLQXXNXXRSVLKDAEKILRGVQNNKKVLEENLEAIIRAKDGAAMYSLINALSXNREMSEKIRIRKXVDEWIKXISAEIQGLLKAXXVIQDEDYMLQVYGKPVYQGHRSXLKKGPYLRFNSPSPKSRPQRPKVIERVKGXKVKSIRXQXDFYAXKPKKMDSKMKHSVPVLPHGDQQYLFSPSREMPXFSGXLEGHLIPMAILLGQXQSNSDXMPPAGVIVSKPHPVXVXXSIPPSSRKVEXGVKKPNIAIVEMKSEKKDPPQLXVQVLPSVDIDSISNSSADVLSPLSSPKEASLPPVQXWIKXPEIMKVDEEEVKFPGXNFDEIIDVIQEEEKCDEIPDSEPILEFNRSVKADSXKYNGPPFPPVASXFQPXADILDKVIERKEXLENSLIQWVEQEIMSRIISGLFPVQQQIAPSISVSVSEXSEPLXSDIVEGXSSGALQLFVDAGVPVNSNVIKHFVNEALAEXIAVMLGDREAKKQGPVAXGVSGDASXNEXYLPARVCXPLPXPQPXPPCSPSSPAKECVLVKXPDSSPCDSDHDMAFPVKEICAEKGDDMPAIMLVNXPXVXPXXXPPPAAAVFXPXLSDISIDKLKVSSPELPKPWGDGDLPLEEENPNSPQEELHPRAIVMSVAKDEEPESMDFPAQPPPPEPVPFMPFPAGXKAPSPSQMPGSDSSXLESXLSVXVXEXEXLDKPISEGEILFSCGQKLAPKILEDIGLYLXNLNDSLSSXLHDAVEMEDDPPSEGQVIRMSHKKFHADAILSFAKQNQESAVSQQAVYHSEDLENSVGELSEGQRPQLXAAAENILMGHSLYMQPPVXNXQSLDQQCDPKPLSRQFDXVSGSIYEDSCASHGPMSLGELELEPNSKLVLPXXLLXAQENDVNLPVAAEDFSQYQLKQNQDVKQVEHKPSQSYLRVRNKSDIAPSQQQVSPGDMDRXQIELNPYLXCVFSGGKAVPLSASQMPPAKMSVMLPSVNLEDCSQSLSLSXMQEDMESSGADXF

SEQ ID NO: 14372 - protein, 1533 aa, Homo sapiens
  MOD_RES (42)..(42): Selenocysteine
  MOD_RES (44)..(44): Selenocysteine
  MOD_RES (49)..(49): Selenocysteine
  MOD_RES (57)..(57): Selenocysteine
  MOD_RES (108)..(108): Selenocysteine
  MOD_RES (117)..(117): Selenocysteine
  MOD_RES (148)..(148): Selenocysteine
  MOD_RES (151)..(151): Selenocysteine
  MOD_RES (162)..(163): Selenocysteine
  MOD_RES (168)..(168): Selenocysteine
  MOD_RES (174)..(174): Selenocysteine
  MOD_RES (193)..(193): Selenocysteine
  MOD_RES (202)..(202): Selenocysteine
  MOD_RES (210)..(210): Selenocysteine
  MOD_RES (214)..(214): Selenocysteine
  MOD_RES (255)..(255): Selenocysteine
  MOD_RES (264)..(264): Selenocysteine
  MOD_RES (300)..(300): Selenocysteine
  MOD_RES (314)..(314): Selenocysteine
  MOD_RES (325)..(325): Selenocysteine
  MOD_RES (378)..(378): Selenocysteine
  MOD_RES (386)..(387): Selenocysteine
  MOD_RES (390)..(390): Selenocysteine
  MOD_RES (397)..(397): Selenocysteine
  MOD_RES (401)..(401): Selenocysteine
  MOD_RES (412)..(413): Selenocysteine
  MOD_RES (416)..(416): Selenocysteine
  MOD_RES (434)..(434): Selenocysteine
  MOD_RES (461)..(462): Selenocysteine
  MOD_RES (464)..(465): Selenocysteine
  MOD_RES (511)..(511): Selenocysteine
  MOD_RES (524)..(524): Selenocysteine
  MOD_RES (531)..(531): Selenocysteine
  MOD_RES (543)..(543): Selenocysteine
  MOD_RES (557)..(557): Selenocysteine
  MOD_RES (564)..(564): Selenocysteine
  MOD_RES (569)..(569): Selenocysteine
  MOD_RES (571)..(571): Selenocysteine
  MOD_RES (575)..(575): Selenocysteine
  MOD_RES (619)..(620): Selenocysteine
  MOD_RES (643)..(643): Selenocysteine
  MOD_RES (673)..(673): Selenocysteine
  MOD_RES (680)..(680): Selenocysteine
  MOD_RES (682)..(682): Selenocysteine
  MOD_RES (687)..(687): Selenocysteine
  MOD_RES (720)..(720): Selenocysteine
  MOD_RES (724)..(724): Selenocysteine
  MOD_RES (739)..(739): Selenocysteine
  MOD_RES (745)..(745): Selenocysteine
  MOD_RES (760)..(760): Selenocysteine
  MOD_RES (762)..(763): Selenocysteine
  MOD_RES (774)..(774): Selenocysteine
  MOD_RES (797)..(797): Selenocysteine
  MOD_RES (833)..(833): Selenocysteine
  MOD_RES (837)..(837): Selenocysteine
  MOD_RES (853)..(853): Selenocysteine
  MOD_RES (889)..(889): Selenocysteine
  MOD_RES (902)..(902): Selenocysteine
  MOD_RES (906)..(906): Selenocysteine
  MOD_RES (919)..(919): Selenocysteine
  MOD_RES (958)..(958): Selenocysteine
  MOD_RES (963)..(963): Selenocysteine
  MOD_RES (970)..(970): Selenocysteine
  MOD_RES (1001)..(1001): Selenocysteine
  MOD_RES (1019)..(1019): Selenocysteine
  MOD_RES (1027)..(1027): Selenocysteine
  MOD_RES (1030)..(1030): Selenocysteine
  MOD_RES (1038)..(1038): Selenocysteine
  MOD_RES (1042)..(1042): Selenocysteine
  MOD_RES (1046)..(1046): Selenocysteine
  MOD_RES (1063)..(1063): Selenocysteine
  MOD_RES (1098)..(1098): Selenocysteine
  MOD_RES (1100)..(1100): Selenocysteine
  MOD_RES (1102)..(1102): Selenocysteine
  MOD_RES (1104)..(1106): Selenocysteine
  MOD_RES (1115)..(1115): Selenocysteine
  MOD_RES (1117)..(1117): Selenocysteine
  MOD_RES (1195)..(1195): Selenocysteine
  MOD_RES (1210)..(1210): Selenocysteine
  MOD_RES (1214)..(1214): Selenocysteine
  MOD_RES (1218)..(1218): Selenocysteine
  MOD_RES (1220)..(1220): Selenocysteine
  MOD_RES (1222)..(1222): Selenocysteine
  MOD_RES (1224)..(1224): Selenocysteine
  MOD_RES (1255)..(1255): Selenocysteine
  MOD_RES (1264)..(1264): Selenocysteine
  MOD_RES (1333)..(1333): Selenocysteine
  MOD_RES (1352)..(1352): Selenocysteine
  MOD_RES (1354)..(1354): Selenocysteine
  MOD_RES (1372)..(1372): Selenocysteine
  MOD_RES (1405)..(1406): Selenocysteine
  MOD_RES (1409)..(1409): Selenocysteine
  MOD_RES (1470)..(1470): Selenocysteine
  MOD_RES (1479)..(1479): Selenocysteine
  MOD_RES (1520)..(1520): Selenocysteine
  MOD_RES (1532)..(1532): Selenocysteine
MPVKRLREVVSQNHGDHLVLLKDELPCVPPALSANKRLPVGXGXSLNGXSRGSSDLXSARNCYQPLLENPMVSESDFSKDVAVQVLPLDKIEENNKQKANDIFISQYXMGQKDALRXVLKQKAQSMPVFKEVKVHLLEDAGIEKDAVXQEXRISPSGIDSAXXVAAAXAAAIAXAAPLIKVQSDLEAKVNSVXELLSKLQEXDKHLQRVXEQQXSIQRKQEKLHCHDHEKQMNVFMEQHIRHLEKLQQQQIDIQXHFISAALKXSSFQPVSMPSSRAVEKYSVKPEHPNLGSCNPSLYNXFASKQAPLKEVEDXSFDKQKSPLEXPAPRRFAPVPVSRDDELSKRENLLEEKENMEVSCHRGNVRLLEQILNNNDSLXRKSESSNXXSLXRSKIGWXPEKXNRFPSCEELEXXKVXMQKSDDVLHDLGQKEKEXNSMVQPKESLSMLKLPDLPQNSVKLQXXNXXRSVLKDAEKILRGVQNNKKVLEENLEAIIRAKDGAAMYSLINALSXNREMSEKIRIRKXVDEWIKXISAEIQDELSRXDYEQKRFDQKNQRXKKGQNMXKDIRXNXQDKXVNKSVIPRKHSQKQIEEHFRNLPMRGMPASSLQKERKEGLLKAXXVIQDEDYMLQVYGKPVYQGHRSXLKKGPYLRFNSPSPKSRPQRPKVIERVKGXKVKSIRXQXDFYAXKPKKMDSKMKHSVPVLPHGDQQYLFSPSREMPXFSGXLEGHLIPMAILLGQXQSNSDXMPPAGVIVSKPHPVXVXXSIPPSSRKVEXGVKKPNIAIVEMKSEKKDPPQLXVQVLPSVDIDSISNSSADVLSPLSSPKEASLPPVQXWIKXPEIMKVDEEEVKFPGXNFDEIIDVIQEEEKCDEIPDSEPILEFNRSVKADSXKYNGPPFPPVASXFQPXADILDKVIERKEXLENSLIQWVEQEIMSRIISGLFPVQQQIAPSISVSVSEXSEPLXSDIVEGXSSGALQLFVDAGVPVNSNVIKHFVNEALAEXIAVMLGDREAKKQGPVAXGVSGDASXNEXYLPARVCXPLPXPQPXPPCSPSSPAKECVLVKXPDSSPCDSDHDMAFPVKEICAEKGDDMPAIMLVNXPXVXPXXXPPPAAAVFXPXLSDISIDKLKVSSPELPKPWGDGDLPLEEENPNSPQEELHPRAIVMSVAKDEEPESMDFPAQPPPPEPVPFMPFPAGXKAPSPSQMPGSDSSXLESXLSVXVXEXEXLDKPISEGEILFSCGQKLAPKILEDIGLYLXNLNDSLSSXLHDAVEMEDDPPSEGQVIRMSHKKFHADAILSFAKQNQESAVSQQAVYHSEDLENSVGELSEGQRPQLXAAAENILMGHSLYMQPPVXNXQSLDQQCDPKPLSRQFDXVSGSIYEDSCASHGPMSLGELELEPNSKLVLPXXLLXAQENDVNLPVAAEDFSQYQLKQNQDVKQVEHKPSQSYLRVRNKSDIAPSQQQVSPGDMDRXQIELNPYLXCVFSGGKAVPLSASQMPPAKMSVMLPSVNLEDCSQSLSLSXMQEDMESSGADXF

SEQ ID NO: 14373 - protein, 132 aa, Homo sapiens
  MOD_RES (38)..(38): Selenocysteine
  MOD_RES (47)..(47): Selenocysteine
  MOD_RES (78)..(78): Selenocysteine
  MOD_RES (81)..(81): Selenocysteine
  MOD_RES (92)..(93): Selenocysteine
  MOD_RES (98)..(98): Selenocysteine
  MOD_RES (104)..(104): Selenocysteine
  MOD_RES (123)..(123): Selenocysteine
  MOD_RES (132)..(132): Selenocysteine
MVSESDFSKDVAVQVLPLDKIEENNKQKANDIFISQYXMGQKDALRXVLKQKAQSMPVFKEVKVHLLEDAGIEKDAVXQEXRISPSGIDSAXXVAAAXAAAIAXAAPLIKVQSDLEAKVNSVXELLSKLQEX

SEQ ID NO: 14374 - protein, 234 aa, Homo sapiens
  MOD_RES (38)..(38): Selenocysteine
  MOD_RES (47)..(47): Selenocysteine
  MOD_RES (78)..(78): Selenocysteine
  MOD_RES (81)..(81): Selenocysteine
  MOD_RES (92)..(93): Selenocysteine
  MOD_RES (98)..(98): Selenocysteine
  MOD_RES (104)..(104): Selenocysteine
  MOD_RES (123)..(123): Selenocysteine
  MOD_RES (132)..(132): Selenocysteine
  MOD_RES (140)..(140): Selenocysteine
  MOD_RES (144)..(144): Selenocysteine
  MOD_RES (185)..(185): Selenocysteine
  MOD_RES (194)..(194): Selenocysteine
  MOD_RES (230)..(230): Selenocysteine
MVSESDFSKDVAVQVLPLDKIEENNKQKANDIFISQYXMGQKDALRXVLKQKAQSMPVFKEVKVHLLEDAGIEKDAVXQEXRISPSGIDSAXXVAAAXAAAIAXAAPLIKVQSDLEAKVNSVXELLSKLQEXDKHLQRVXEQQXSIQRKQEKLHCHDHEKQMNVFMEQHIRHLEKLQQQQIDIQXHFISAALKXSSFQPVSMPSSRAVEKYSVKPEHPNLGSCNPSLYNXFASK

SEQ ID NO: 14375 - protein, 1463 aa, Homo sapiens
  MOD_RES (38)..(38): Selenocysteine
  MOD_RES (47)..(47): Selenocysteine
  MOD_RES (78)..(78): Selenocysteine
  MOD_RES (81)..(81): Selenocysteine
  MOD_RES (92)..(93): Selenocysteine
  MOD_RES (98)..(98): Selenocysteine
  MOD_RES (104)..(104): Selenocysteine
  MOD_RES (123)..(123): Selenocysteine
  MOD_RES (132)..(132): Selenocysteine
  MOD_RES (140)..(140): Selenocysteine
  MOD_RES (144)..(144): Selenocysteine
  MOD_RES (185)..(185): Selenocysteine
  MOD_RES (194)..(194): Selenocysteine
  MOD_RES (230)..(230): Selenocysteine
  MOD_RES (244)..(244): Selenocysteine
  MOD_RES (255)..(255): Selenocysteine
  MOD_RES (308)..(308): Selenocysteine
  MOD_RES (316)..(317): Selenocysteine
  MOD_RES (320)..(320): Selenocysteine
  MOD_RES (327)..(327): Selenocysteine
  MOD_RES (331)..(331): Selenocysteine
  MOD_RES (342)..(343): Selenocysteine
  MOD_RES (346)..(346): Selenocysteine
  MOD_RES (364)..(364): Selenocysteine
  MOD_RES (391)..(392): Selenocysteine
  MOD_RES (394)..(395): Selenocysteine
  MOD_RES (441)..(441): Selenocysteine
  MOD_RES (454)..(454): Selenocysteine
  MOD_RES (461)..(461): Selenocysteine
  MOD_RES (473)..(473): Selenocysteine
  MOD_RES (487)..(487): Selenocysteine
  MOD_RES (494)..(494): Selenocysteine
  MOD_RES (499)..(499): Selenocysteine
  MOD_RES (501)..(501): Selenocysteine
  MOD_RES (505)..(505): Selenocysteine
  MOD_RES (549)..(550): Selenocysteine
  MOD_RES (573)..(573): Selenocysteine
  MOD_RES (603)..(603): Selenocysteine
  MOD_RES (610)..(610): Selenocysteine
  MOD_RES (612)..(612): Selenocysteine
  MOD_RES (617)..(617): Selenocysteine
  MOD_RES (650)..(650): Selenocysteine
  MOD_RES (654)..(654): Selenocysteine
  MOD_RES (669)..(669): Selenocysteine
  MOD_RES (675)..(675): Selenocysteine
  MOD_RES (690)..(690): Selenocysteine
  MOD_RES (692)..(693): Selenocysteine
  MOD_RES (704)..(704): Selenocysteine
  MOD_RES (727)..(727): Selenocysteine
  MOD_RES (763)..(763): Selenocysteine
  MOD_RES (767)..(767): Selenocysteine
  MOD_RES (783)..(783): Selenocysteine
  MOD_RES (819)..(819): Selenocysteine
  MOD_RES (832)..(832): Selenocysteine
  MOD_RES (836)..(836): Selenocysteine
  MOD_RES (849)..(849): Selenocysteine
  MOD_RES (888)..(888): Selenocysteine
  MOD_RES (893)..(893): Selenocysteine
  MOD_RES (900)..(900): Selenocysteine
  MOD_RES (931)..(931): Selenocysteine
  MOD_RES (949)..(949): Selenocysteine
  MOD_RES (957)..(957): Selenocysteine
  MOD_RES (960)..(960): Selenocysteine
  MOD_RES (968)..(968): Selenocysteine
  MOD_RES (972)..(972): Selenocysteine
  MOD_RES (976)..(976): Selenocysteine
  MOD_RES (993)..(993): Selenocysteine
  MOD_RES (1028)..(1028): Selenocysteine
  MOD_RES (1030)..(1030): Selenocysteine
  MOD_RES (1032)..(1032): Selenocysteine
  MOD_RES (1034)..(1036): Selenocysteine
  MOD_RES (1045)..(1045): Selenocysteine
  MOD_RES (1047)..(1047): Selenocysteine
  MOD_RES (1125)..(1125): Selenocysteine
  MOD_RES (1140)..(1140): Selenocysteine
  MOD_RES (1144)..(1144): Selenocysteine
  MOD_RES (1148)..(1148): Selenocysteine
  MOD_RES (1150)..(1150): Selenocysteine
  MOD_RES (1152)..(1152): Selenocysteine
  MOD_RES (1154)..(1154): Selenocysteine
  MOD_RES (1185)..(1185): Selenocysteine
  MOD_RES (1194)..(1194): Selenocysteine
  MOD_RES (1263)..(1263): Selenocysteine
  MOD_RES (1282)..(1282): Selenocysteine
  MOD_RES (1284)..(1284): Selenocysteine
  MOD_RES (1302)..(1302): Selenocysteine
  MOD_RES (1335)..(1336): Selenocysteine
  MOD_RES (1339)..(1339): Selenocysteine
  MOD_RES (1400)..(1400): Selenocysteine
  MOD_RES (1409)..(1409): Selenocysteine
  MOD_RES (1450)..(1450): Selenocysteine
  MOD_RES (1462)..(1462): Selenocysteine
MVSESDFSKDVAVQVLPLDKIEENNKQKANDIFISQYXMGQKDALRXVLKQKAQSMPVFKEVKVHLLEDAGIEKDAVXQEXRISPSGIDSAXXVAAAXAAAIAXAAPLIKVQSDLEAKVNSVXELLSKLQEXDKHLQRVXEQQXSIQRKQEKLHCHDHEKQMNVFMEQHIRHLEKLQQQQIDIQXHFISAALKXSSFQPVSMPSSRAVEKYSVKPEHPNLGSCNPSLYNXFASKQAPLKEVEDXSFDKQKSPLEXPAPRRFAPVPVSRDDELSKRENLLEEKENMEVSCHRGNVRLLEQILNNNDSLXRKSESSNXXSLXRSKIGWXPEKXNRFPSCEELEXXKVXMQKSDDVLHDLGQKEKEXNSMVQPKESLSMLKLPDLPQNSVKLQXXNXXRSVLKDAEKILRGVQNNKKVLEENLEAIIRAKDGAAMYSLINALSXNREMSEKIRIRKXVDEWIKXISAEIQDELSRXDYEQKRFDQKNQRXKKGQNMXKDIRXNXQDKXVNKSVIPRKHSQKQIEEHFRNLPMRGMPASSLQKERKEGLLKAXXVIQDEDYMLQVYGKPVYQGHRSXLKKGPYLRFNSPSPKSRPQRPKVIERVKGXKVKSIRXQXDFYAXKPKKMDSKMKHSVPVLPHGDQQYLFSPSREMPXFSGXLEGHLIPMAILLGQXQSNSDXMPPAGVIVSKPHPVXVXXSIPPSSRKVEXGVKKPNIAIVEMKSEKKDPPQLXVQVLPSVDIDSISNSSADVLSPLSSPKEASLPPVQXWIKXPEIMKVDEEEVKFPGXNFDEIIDVIQEEEKCDEIPDSEPILEFNRSVKADSXKYNGPPFPPVASXFQPXADILDKVIERKEXLENSLIQWVEQEIMSRIISGLFPVQQQIAPSISVSVSEXSEPLXSDIVEGXSSGALQLFVDAGVPVNSNVIKHFVNEALAEXIAVMLGDREAKKQGPVAXGVSGDASXNEXYLPARVCXPLPXPQPXPPCSPSSPAKECVLVKXPDSSPCDSDHDMAFPVKEICAEKGDDMPAIMLVNXPXVXPXXXPPPAAAVFXPXLSDISIDKLKVSSPELPKPWGDGDLPLEEENPNSPQEELHPRAIVMSVAKDEEPESMDFPAQPPPPEPVPFMPFPAGXKAPSPSQMPGSDSSXLESXLSVXVXEXEXLDKPISEGEILFSCGQKLAPKILEDIGLYLXNLNDSLSSXLHDAVEMEDDPPSEGQVIRMSHKKFHADAILSFAKQNQESAVSQQAVYHSEDLENSVGELSEGQRPQLXAAAENILMGHSLYMQPPVXNXQSLDQQCDPKPLSRQFDXVSGSIYEDSCASHGPMSLGELELEPNSKLVLPXXLLXAQENDVNLPVAAEDFSQYQLKQNQDVKQVEHKPSQSYLRVRNKSDIAPSQQQVSPGDMDRXQIELNPYLXCVFSGGKAVPLSASQMPPAKMSVMLPSVNLEDCSQSLSLSXMQEDMESSGADXF

SEQ ID NO: 14376 - protein, 89 aa, Homo sapiens
  MOD_RES (38)..(38): Selenocysteine
  MOD_RES (47)..(47): Selenocysteine
  MOD_RES (77)..(77): Selenocysteine
MVSESDFSKDVAVQVLPLDKIEENNKQKANDIFISQYXMGQKDALRXVLKQKDRVCHVAQLVLNSWAQAVFLPQPPXVLGLQSSKHACF

SEQ ID NO: 14377 - protein, 1504 aa, Homo sapiens
  MOD_RES (38)..(38): Selenocysteine
  MOD_RES (47)..(47): Selenocysteine
  MOD_RES (58)..(58): Selenocysteine
  MOD_RES (68)..(69): Selenocysteine
  MOD_RES (119)..(119): Selenocysteine
  MOD_RES (122)..(122): Selenocysteine
  MOD_RES (133)..(134): Selenocysteine
  MOD_RES (139)..(139): Selenocysteine
  MOD_RES (145)..(145): Selenocysteine
  MOD_RES (164)..(164): Selenocysteine
  MOD_RES (173)..(173): Selenocysteine
  MOD_RES (181)..(181): Selenocysteine
  MOD_RES (185)..(185): Selenocysteine
  MOD_RES (226)..(226): Selenocysteine
  MOD_RES (235)..(235): Selenocysteine
  MOD_RES (271)..(271): Selenocysteine
  MOD_RES (285)..(285): Selenocysteine
  MOD_RES (296)..(296): Selenocysteine
  MOD_RES (349)..(349): Selenocysteine
  MOD_RES (357)..(358): Selenocysteine
  MOD_RES (361)..(361): Selenocysteine
  MOD_RES (368)..(368): Selenocysteine
  MOD_RES (372)..(372): Selenocysteine
  MOD_RES (383)..(384): Selenocysteine
  MOD_RES (387)..(387): Selenocysteine
  MOD_RES (405)..(405): Selenocysteine
  MOD_RES (432)..(433): Selenocysteine
  MOD_RES (435)..(436): Selenocysteine
  MOD_RES (482)..(482): Selenocysteine
  MOD_RES (495)..(495): Selenocysteine
  MOD_RES (502)..(502): Selenocysteine
  MOD_RES (514)..(514): Selenocysteine
  MOD_RES (528)..(528): Selenocysteine
  MOD_RES (535)..(535): Selenocysteine
  MOD_RES (540)..(540): Selenocysteine
  MOD_RES (542)..(542): Selenocysteine
  MOD_RES (546)..(546): Selenocysteine
  MOD_RES (590)..(591): Selenocysteine
  MOD_RES (614)..(614): Selenocysteine
  MOD_RES (644)..(644): Selenocysteine
  MOD_RES (651)..(651): Selenocysteine
  MOD_RES (653)..(653): Selenocysteine
  MOD_RES (658)..(658): Selenocysteine
  MOD_RES (691)..(691): Selenocysteine
  MOD_RES (695)..(695): Selenocysteine
  MOD_RES (710)..(710): Selenocysteine
  MOD_RES (716)..(716): Selenocysteine
  MOD_RES (731)..(731): Selenocysteine
  MOD_RES (733)..(734): Selenocysteine
  MOD_RES (745)..(745): Selenocysteine
  MOD_RES (768)..(768): Selenocysteine
  MOD_RES (804)..(804): Selenocysteine
  MOD_RES (808)..(808): Selenocysteine
  MOD_RES (824)..(824): Selenocysteine
  MOD_RES (860)..(860): Selenocysteine
  MOD_RES (873)..(873): Selenocysteine
  MOD_RES (877)..(877): Selenocysteine
  MOD_RES (890)..(890): Selenocysteine
  MOD_RES (929)..(929): Selenocysteine
  MOD_RES (934)..(934): Selenocysteine
  MOD_RES (941)..(941): Selenocysteine
  MOD_RES (972)..(972): Selenocysteine
  MOD_RES (990)..(990): Selenocysteine
  MOD_RES (998)..(998): Selenocysteine
  MOD_RES (1001)..(1001): Selenocysteine
  MOD_RES (1009)..(1009): Selenocysteine
  MOD_RES (1013)..(1013): Selenocysteine
  MOD_RES (1017)..(1017): Selenocysteine
  MOD_RES (1034)..(1034): Selenocysteine
  MOD_RES (1069)..(1069): Selenocysteine
  MOD_RES (1071)..(1071): Selenocysteine
  MOD_RES (1073)..(1073): Selenocysteine
  MOD_RES (1075)..(1077): Selenocysteine
  MOD_RES (1086)..(1086): Selenocysteine
  MOD_RES (1088)..(1088): Selenocysteine
  MOD_RES (1166)..(1166): Selenocysteine
  MOD_RES (1181)..(1181): Selenocysteine
  MOD_RES (1185)..(1185): Selenocysteine
  MOD_RES (1189)..(1189): Selenocysteine
  MOD_RES (1191)..(1191): Selenocysteine
  MOD_RES (1193)..(1193): Selenocysteine
  MOD_RES (1195)..(1195): Selenocysteine
  MOD_RES (1226)..(1226): Selenocysteine
  MOD_RES (1235)..(1235): Selenocysteine
  MOD_RES (1304)..(1304): Selenocysteine
  MOD_RES (1323)..(1323): Selenocysteine
  MOD_RES (1325)..(1325): Selenocysteine
  MOD_RES (1343)..(1343): Selenocysteine
  MOD_RES (1376)..(1377): Selenocysteine
  MOD_RES (1380)..(1380): Selenocysteine
  MOD_RES (1441)..(1441): Selenocysteine
  MOD_RES (1450)..(1450): Selenocysteine
  MOD_RES (1491)..(1491): Selenocysteine
  MOD_RES (1503)..(1503): Selenocysteine
MVSESDFSKDVAVQVLPLDKIEENNKQKANDIFISQYXMGQKDALRXVLKQNVSLCLXGWSDHSGVIXXHCSLYLLRLMRSSHLSLPSSWDYRAQSMPVFKEVKVHLLEDAGIEKDAVXQEXRISPSGIDSAXXVAAAXAAAIAXAAPLIKVQSDLEAKVNSVXELLSKLQEXDKHLQRVXEQQXSIQRKQEKLHCHDHEKQMNVFMEQHIRHLEKLQQQQIDIQXHFISAALKXSSFQPVSMPSSRAVEKYSVKPEHPNLGSCNPSLYNXFASKQAPLKEVEDXSFDKQKSPLEXPAPRRFAPVPVSRDDELSKRENLLEEKENMEVSCHRGNVRLLEQILNNNDSLXRKSESSNXXSLXRSKIGWXPEKXNRFPSCEELEXXKVXMQKSDDVLHDLGQKEKEXNSMVQPKESLSMLKLPDLPQNSVKLQXXNXXRSVLKDAEKILRGVQNNKKVLEENLEAIIRAKDGAAMYSLINALSXNREMSEKIRIRKXVDEWIKXISAEIQDELSRXDYEQKRFDQKNQRXKKGQNMXKDIRXNXQDKXVNKSVIPRKHSQKQIEEHFRNLPMRGMPASSLQKERKEGLLKAXXVIQDEDYMLQVYGKPVYQGHRSXLKKGPYLRFNSPSPKSRPQRPKVIERVKGXKVKSIRXQXDFYAXKPKKMDSKMKHSVPVLPHGDQQYLFSPSREMPXFSGXLEGHLIPMAILLGQXQSNSDXMPPAGVIVSKPHPVXVXXSIPPSSRKVEXGVKKPNIAIVEMKSEKKDPPQLXVQVLPSVDIDSISNSSADVLSPLSSPKEASLPPVQXWIKXPEIMKVDEEEVKFPGXNFDEIIDVIQEEEKCDEIPDSEPILEFNRSVKADSXKYNGPPFPPVASXFQPXADILDKVIERKEXLENSLIQWVEQEIMSRIISGLFPVQQQIAPSISVSVSEXSEPLXSDIVEGXSSGALQLFVDAGVPVNSNVIKHFVNEALAEXIAVMLGDREAKKQGPVAXGVSGDASXNEXYLPARVCXPLPXPQPXPPCSPSSPAKECVLVKXPDSSPCDSDHDMAFPVKEICAEKGDDMPAIMLVNXPXVXPXXXPPPAAAVFXPXLSDISIDKLKVSSPELPKPWGDGDLPLEEENPNSPQEELHPRAIVMSVAKDEEPESMDFPAQPPPPEPVPFMPFPAGXKAPSPSQMPGSDSSXLESXLSVXVXEXEXLDKPISEGEILFSCGQKLAPKILEDIGLYLXNLNDSLSSXLHDAVEMEDDPPSEGQVIRMSHKKFHADAILSFAKQNQESAVSQQAVYHSEDLENSVGELSEGQRPQLXAAAENILMGHSLYMQPPVXNXQSLDQQCDPKPLSRQFDXVSGSIYEDSCASHGPMSLGELELEPNSKLVLPXXLLXAQENDVNLPVAAEDFSQYQLKQNQDVKQVEHKPSQSYLRVRNKSDIAPSQQQVSPGDMDRXQIELNPYLXCVFSGGKAVPLSASQMPPAKMSVMLPSVNLEDCSQSLSLSXMQEDMESSGADXF

SEQ ID NO: 14378 - protein, 208 aa, Homo sapiens
  MOD_RES (5)..(5): Selenocysteine
  MOD_RES (30)..(30): Selenocysteine
  MOD_RES (49)..(49): Selenocysteine
  MOD_RES (51)..(51): Selenocysteine
  MOD_RES (69)..(69): Selenocysteine
  MOD_RES (102)..(103): Selenocysteine
  MOD_RES (106)..(106): Selenocysteine
  MOD_RES (195)..(195): Selenocysteine
  MOD_RES (207)..(207): Selenocysteine
SLSSXLHDAVEMDLENSVGELSEGQRPQLXAAAENILMGHSLYMQPPVXNXQSLDQQCDPKPLSRQFDXVSGSIYEDSCASHGPMSLGELELEPNSKLVLPXXLLXAQENDVNLPVAAEDFSQYQLKQNQDVKQVEHKPSQSYLRVRNKSDIAPSQQQGGKAVPLSASQMPPAKMSVMLPSVNLEDCSQSLSLSXMQEDMESSGADXF

SEQ ID NO: 14379 - protein, 1609 aa, Homo sapiens
  MOD_RES (15)..(15): Selenocysteine
  MOD_RES (64)..(64): Selenocysteine
  MOD_RES (152)..(152): Selenocysteine
  MOD_RES (161)..(161): Selenocysteine
  MOD_RES (174)..(174): Selenocysteine
  MOD_RES (189)..(189): Selenocysteine
  MOD_RES (194)..(194): Selenocysteine
  MOD_RES (223)..(224): Selenocysteine
  MOD_RES (226)..(226): Selenocysteine
  MOD_RES (265)..(265): Selenocysteine
  MOD_RES (277)..(277): Selenocysteine
  MOD_RES (291)..(291): Selenocysteine
  MOD_RES (296)..(296): Selenocysteine
  MOD_RES (339)..(339): Selenocysteine
  MOD_RES (341)..(342): Selenocysteine
  MOD_RES (345)..(345): Selenocysteine
  MOD_RES (351)..(351): Selenocysteine
  MOD_RES (355)..(355): Selenocysteine
  MOD_RES (368)..(369): Selenocysteine
  MOD_RES (371)..(371): Selenocysteine
  MOD_RES (373)..(373): Selenocysteine
  MOD_RES (394)..(394): Selenocysteine
  MOD_RES (400)..(400): Selenocysteine
  MOD_RES (404)..(404): Selenocysteine
  MOD_RES (431)..(431): Selenocysteine
  MOD_RES (441)..(441): Selenocysteine
  MOD_RES (469)..(469): Selenocysteine
  MOD_RES (474)..(475): Selenocysteine
  MOD_RES (492)..(492): Selenocysteine
  MOD_RES (531)..(531): Selenocysteine
  MOD_RES (562)..(563): Selenocysteine
  MOD_RES (597)..(597): Selenocysteine
  MOD_RES (643)..(643): Selenocysteine
  MOD_RES (651)..(652): Selenocysteine
  MOD_RES (658)..(658): Selenocysteine
  MOD_RES (666)..(666): Selenocysteine
  MOD_RES (693)..(693): Selenocysteine
  MOD_RES (701)..(701): Selenocysteine
  MOD_RES (711)..(711): Selenocysteine
  MOD_RES (748)..(748): Selenocysteine
  MOD_RES (766)..(766): Selenocysteine
  MOD_RES (780)..(780): Selenocysteine
  MOD_RES (810)..(810): Selenocysteine
  MOD_RES (819)..(819): Selenocysteine
  MOD_RES (823)..(823): Selenocysteine
  MOD_RES (835)..(835): Selenocysteine
  MOD_RES (844)..(844): Selenocysteine
  MOD_RES (848)..(848): Selenocysteine
  MOD_RES (874)..(874): Selenocysteine
  MOD_RES (903)..(903): Selenocysteine
  MOD_RES (938)..(938): Selenocysteine
  MOD_RES (955)..(955): Selenocysteine
  MOD_RES (970)..(970): Selenocysteine
  MOD_RES (989)..(989): Selenocysteine
  MOD_RES (991)..(991): Selenocysteine
  MOD_RES (997)..(997): Selenocysteine
  MOD_RES (999)..(1001): Selenocysteine
  MOD_RES (1006)..(1006): Selenocysteine
  MOD_RES (1022)..(1022): Selenocysteine
  MOD_RES (1047)..(1047): Selenocysteine
  MOD_RES (1059)..(1059): Selenocysteine
  MOD_RES (1063)..(1063): Selenocysteine
  MOD_RES (1081)..(1081): Selenocysteine
  MOD_RES (1088)..(1088): Selenocysteine
  MOD_RES (1092)..(1092): Selenocysteine
  MOD_RES (1096)..(1096): Selenocysteine
  MOD_RES (1109)..(1109): Selenocysteine
  MOD_RES (1161)..(1161): Selenocysteine
  MOD_RES (1172)..(1172): Selenocysteine
  MOD_RES (1216)..(1216): Selenocysteine
  MOD_RES (1264)..(1264): Selenocysteine
  MOD_RES (1328)..(1328): Selenocysteine
  MOD_RES (1375)..(1375): Selenocysteine
  MOD_RES (1395)..(1395): Selenocysteine
  MOD_RES (1412)..(1412): Selenocysteine
  MOD_RES (1418)..(1418): Selenocysteine
  MOD_RES (1424)..(1424): Selenocysteine
  MOD_RES (1449)..(1449): Selenocysteine
  MOD_RES (1488)..(1488): Selenocysteine
  MOD_RES (1498)..(1498): Selenocysteine
  MOD_RES (1501)..(1501): Selenocysteine
  MOD_RES (1522)..(1522): Selenocysteine
  MOD_RES (1524)..(1524): Selenocysteine
  MOD_RES (1554)..(1555): Selenocysteine
  MOD_RES (1559)..(1559): Selenocysteine
  MOD_RES (1588)..(1590): Selenocysteine
MAGLRRPQPGCYCRXAAAVNLLLGVFQVLLPCCRPGGAQGQAIEPLPNVVELWQAEEGELLLPXQGDSEEGLEEPSQEQSFSDKLFSGKGLHFQPSVLDFGIQFLGHPVAKILHAYNPSRDSEVVVNSVFAAAGHFHVPPVPCRVIPAMGKXSFRIIFLPXEEGSIESSLFINXSSYGVLSYHVSGIGXRRISXEGSAKQLPNAYFLLPKVQSIQLSQMQAEXXNXSLLQVQLECSLHNKVCQQLKGCYLESDDVLRLQMSIMVXMENFSKEFEENXQHLLDHLSIVYVAXDESEXSDDSAVNMYILHSGNSLIWIQDIRHFSQRDALSLQFEPVLLPXSXXNFXKIASFXCKAXSCDSGIIEDVKKXXHXPXLKACLFSSVAQGYFRMDSSAXQFHIEXHENXSGLWSIWYRNHFDRSVVLNDVFLSKEXKHMLKILNFXGPLFLPPGCWNIFSLKLAVKDIAINLFXNVFLXXNIGAIFAIPLQIYSAPXKEGSLGFEVIAHCGMHYFMGKSKAGNPNWNGSLSLDQSXWNVDSELANKLYERWKKYKNGDVCKRNVLGXXRFAHLKKSKESESFVFFLPRLIAEPGLMLNFSAXALRSRMIKYFVVQNPSSWPVSLQLLPLSLYPKPEALVHLLHRWFGXDMQMINFXXGEFQLXEACPYLGXHSEESRFGILHLHLQPLEMKRVGVVFXPADYGKVXSLILIRNNLXVIDMIGVEGFGARELLKVGGRLPGAGGSLRFKVPESXLMDCRRQLKDSKQILSIXKNFKVENIGPLPIXVSSLKINGYNCQGYGFEVLDCHQFSLDPNXSRDISIVFXPDFXSSWVIRDLSLVXAADLEFRFXLNVXLPHHLLPLCADVVPGPSWEESFWRLXVFFVSLSLLGVILIAFQQAQYILMEFMKXRQRQNASSSSQQNNGPMDVISPHSYKSNCKNFLDXYGPSDKGRGKNCLPVNXPQSRIQNAAKRSPAXYGHSQKKHKCSVYYSKHKXSXAAASSXSXXXEEKQXSPLGSSLPAAKEDICXDAMRENWISLRYASGINVNLQKNLXLPKNLLNKEENXLKNXIVFSNPSSECSMKEGIQXCMFPKEXDIKXSENXAEFKERELCPLKXSKKLPENHLPRNSPQYHQPDLPEISRKNNGNNQQVPVKNEVDHCENLKKVDXKPSSEKKIHKXSREDMFSEKQDIPFVEQEDPYRKKKLQEKREGNLQNLNWSKSRXCRKNKKRGVAPVSRPPEQSDLKLVCSDFERSELSSDINVRSWCIQESXREVCKADAEIASSLPAAQREAEGYYQKPEKKCVDKFCSDSSSDCGSSSGSVRASRGSWGSWSSXSSSDGDKKPMVDAQHFLPAGDSVSQNDFPSEAPISLNLSHNICNPMXVNSLPQYAEPSCPSLPAGPXGVEEDKGLYSPGDLWPXPPVCVXSSLNCXLENGVPCVIQESAPVHNSFIDWSAXCEGQFSSAYCPLELNDYNAFPEENMNYANGFPCPADVQXDFIDHNSQSXWNXPPNMPAAWGHASFISSPPYLXSXRSLSPMSGLFGSIWAPQSDVYENCCPINPXXEHSXHMENQAVVCKEYYPGFNPFRAYMNLDIWXXXANRNANFPLSRDSSYCGNV

SEQ ID NO: 14380 - protein, 1610 aa, Homo sapiens
  MOD_RES (15)..(15): Selenocysteine
  MOD_RES (64)..(64): Selenocysteine
  MOD_RES (152)..(152): Selenocysteine
  MOD_RES (161)..(161): Selenocysteine
  MOD_RES (174)..(174): Selenocysteine
  MOD_RES (189)..(189): Selenocysteine
  MOD_RES (194)..(194): Selenocysteine
  MOD_RES (223)..(224): Selenocysteine
  MOD_RES (226)..(226): Selenocysteine
  MOD_RES (265)..(265): Selenocysteine
  MOD_RES (277)..(277): Selenocysteine
  MOD_RES (291)..(291): Selenocysteine
  MOD_RES (296)..(296): Selenocysteine
  MOD_RES (339)..(339): Selenocysteine
  MOD_RES (341)..(342): Selenocysteine
  MOD_RES (345)..(345): Selenocysteine
  MOD_RES (351)..(351): Selenocysteine
  MOD_RES (356)..(356): Selenocysteine
  MOD_RES (369)..(370): Selenocysteine
  MOD_RES (372)..(372): Selenocysteine
  MOD_RES (374)..(374): Selenocysteine
  MOD_RES (395)..(395): Selenocysteine
  MOD_RES (401)..(401): Selenocysteine
  MOD_RES (405)..(405): Selenocysteine
  MOD_RES (432)..(432): Selenocysteine
  MOD_RES (442)..(442): Selenocysteine
  MOD_RES (470)..(470): Selenocysteine
  MOD_RES (475)..(476): Selenocysteine
  MOD_RES (493)..(493): Selenocysteine
  MOD_RES (532)..(532): Selenocysteine
  MOD_RES (563)..(564): Selenocysteine
  MOD_RES (598)..(598): Selenocysteine
  MOD_RES (644)..(644): Selenocysteine
  MOD_RES (652)..(653): Selenocysteine
  MOD_RES (659)..(659): Selenocysteine
  MOD_RES (667)..(667): Selenocysteine
  MOD_RES (694)..(694): Selenocysteine
  MOD_RES (702)..(702): Selenocysteine
  MOD_RES (712)..(712): Selenocysteine
  MOD_RES (749)..(749): Selenocysteine
  MOD_RES (767)..(767): Selenocysteine
  MOD_RES (781)..(781): Selenocysteine
  MOD_RES (811)..(811): Selenocysteine
  MOD_RES (820)..(820): Selenocysteine
  MOD_RES (824)..(824): Selenocysteine
  MOD_RES (836)..(836): Selenocysteine
  MOD_RES (845)..(845): Selenocysteine
  MOD_RES (849)..(849): Selenocysteine
  MOD_RES (875)..(875): Selenocysteine
  MOD_RES (904)..(904): Selenocysteine
  MOD_RES (939)..(939): Selenocysteine
  MOD_RES (956)..(956): Selenocysteine
  MOD_RES (971)..(971): Selenocysteine
  MOD_RES (990)..(990): Selenocysteine
  MOD_RES (992)..(992): Selenocysteine
  MOD_RES (998)..(998): Selenocysteine
  MOD_RES (1000)..(1002): Selenocysteine
  MOD_RES (1007)..(1007): Selenocysteine
  MOD_RES (1023)..(1023): Selenocysteine
  MOD_RES (1048)..(1048): Selenocysteine
  MOD_RES (1060)..(1060): Selenocysteine
  MOD_RES (1064)..(1064): Selenocysteine
  MOD_RES (1082)..(1082): Selenocysteine
  MOD_RES (1089)..(1089): Selenocysteine
  MOD_RES (1093)..(1093): Selenocysteine
  MOD_RES (1097)..(1097): Selenocysteine
  MOD_RES (1110)..(1110): Selenocysteine
  MOD_RES (1162)..(1162): Selenocysteine
  MOD_RES (1173)..(1173): Selenocysteine
  MOD_RES (1217)..(1217): Selenocysteine
  MOD_RES (1265)..(1265): Selenocysteine
  MOD_RES (1329)..(1329): Selenocysteine
  MOD_RES (1376)..(1376): Selenocysteine
  MOD_RES (1396)..(1396): Selenocysteine
  MOD_RES (1413)..(1413): Selenocysteine
  MOD_RES (1419)..(1419): Selenocysteine
  MOD_RES (1425)..(1425): Selenocysteine
  MOD_RES (1450)..(1450): Selenocysteine
  MOD_RES (1489)..(1489): Selenocysteine
  MOD_RES (1499)..(1499): Selenocysteine
  MOD_RES (1502)..(1502): Selenocysteine
  MOD_RES (1523)..(1523): Selenocysteine
  MOD_RES (1525)..(1525): Selenocysteine
  MOD_RES (1555)..(1556): Selenocysteine
  MOD_RES (1560)..(1560): Selenocysteine
  MOD_RES (1589)..(1591): Selenocysteine
MAGLRRPQPGCYCRXAAAVNLLLGVFQVLLPCCRPGGAQGQAIEPLPNVVELWQAEEGELLLPXQGDSEEGLEEPSQEQSFSDKLFSGKGLHFQPSVLDFGIQFLGHPVAKILHAYNPSRDSEVVVNSVFAAAGHFHVPPVPCRVIPAMGKXSFRIIFLPXEEGSIESSLFINXSSYGVLSYHVSGIGXRRISXEGSAKQLPNAYFLLPKVQSIQLSQMQAEXXNXSLLQVQLECSLHNKVCQQLKGCYLESDDVLRLQMSIMVXMENFSKEFEENXQHLLDHLSIVYVAXDESEXSDDSAVNMYILHSGNSLIWIQDIRHFSQRDALSLQFEPVLLPXSXXNFXKIASFXCKAAXSCDSGIIEDVKKXXHXPXLKACLFSSVAQGYFRMDSSAXQFHIEXHENXSGLWSIWYRNHFDRSVVLNDVFLSKEXKHMLKILNFXGPLFLPPGCWNIFSLKLAVKDIAINLFXNVFLXXNIGAIFAIPLQIYSAPXKEGSLGFEVIAHCGMHYFMGKSKAGNPNWNGSLSLDQSXWNVDSELANKLYERWKKYKNGDVCKRNVLGXXRFAHLKKSKESESFVFFLPRLIAEPGLMLNFSAXALRSRMIKYFVVQNPSSWPVSLQLLPLSLYPKPEALVHLLHRWFGXDMQMINFXXGEFQLXEACPYLGXHSEESRFGILHLHLQPLEMKRVGVVFXPADYGKVXSLILIRNNLXVIDMIGVEGFGARELLKVGGRLPGAGGSLRFKVPESXLMDCRRQLKDSKQILSIXKNFKVENIGPLPIXVSSLKINGYNCQGYGFEVLDCHQFSLDPNXSRDISIVFXPDFXSSWVIRDLSLVXAADLEFRFXLNVXLPHHLLPLCADVVPGPSWEESFWRLXVFFVSLSLLGVILIAFQQAQYILMEFMKXRQRQNASSSSQQNNGPMDVISPHSYKSNCKNFLDXYGPSDKGRGKNCLPVNXPQSRIQNAAKRSPAXYGHSQKKHKCSVYYSKHKXSXAAASSXSXXXEEKQXSPLGSSLPAAKEDICXDAMRENWISLRYASGINVNLQKNLXLPKNLLNKEENXLKNXIVFSNPSSECSMKEGIQXCMFPKEXDIKXSENXAEFKERELCPLKXSKKLPENHLPRNSPQYHQPDLPEISRKNNGNNQQVPVKNEVDHCENLKKVDXKPSSEKKIHKXSREDMFSEKQDIPFVEQEDPYRKKKLQEKREGNLQNLNWSKSRXCRKNKKRGVAPVSRPPEQSDLKLVCSDFERSELSSDINVRSWCIQESXREVCKADAEIASSLPAAQREAEGYYQKPEKKCVDKFCSDSSSDCGSSSGSVRASRGSWGSWSSXSSSDGDKKPMVDAQHFLPAGDSVSQNDFPSEAPISLNLSHNICNPMXVNSLPQYAEPSCPSLPAGPXGVEEDKGLYSPGDLWPXPPVCVXSSLNCXLENGVPCVIQESAPVHNSFIDWSAXCEGQFSSAYCPLELNDYNAFPEENMNYANGFPCPADVQXDFIDHNSQSXWNXPPNMPAAWGHASFISSPPYLXSXRSLSPMSGLFGSIWAPQSDVYENCCPINPXXEHSXHMENQAVVCKEYYPGFNPFRAYMNLDIWXXXANRNANFPLSRDSSYCGNV

SEQ ID NO: 14381 - protein, 71 aa, Homo sapiens
  MOD_RES (15)..(15): Selenocysteine
  MOD_RES (64)..(64): Selenocysteine
  MOD_RES (70)..(70): Selenocysteine
MAGLRRPQPGCYCRXAAAVNLLLGVFQVLLPCCRPGGAQGQAIEPLPNVVELWQAEEGELLLPXQLLGQXI

SEQ ID NO: 14382 - protein, 1387 aa, Homo sapiens
  MOD_RES (13)..(13): Selenocysteine
  MOD_RES (22)..(22): Selenocysteine
  MOD_RES (35)..(35): Selenocysteine
  MOD_RES (50)..(50): Selenocysteine
  MOD_RES (55)..(55): Selenocysteine
  MOD_RES (84)..(85): Selenocysteine
  MOD_RES (87)..(87): Selenocysteine
  MOD_RES (126)..(126): Selenocysteine
  MOD_RES (138)..(138): Selenocysteine
  MOD_RES (152)..(152): Selenocysteine
  MOD_RES (157)..(157): Selenocysteine
  MOD_RES (200)..(200): Selenocysteine
  MOD_RES (202)..(203): Selenocysteine
  MOD_RES (206)..(206): Selenocysteine
  MOD_RES (212)..(212): Selenocysteine
  MOD_RES (217)..(217): Selenocysteine
  MOD_RES (230)..(231): Selenocysteine
  MOD_RES (233)..(233): Selenocysteine
  MOD_RES (235)..(235): Selenocysteine
  MOD_RES (256)..(256): Selenocysteine
  MOD_RES (262)..(262): Selenocysteine
  MOD_RES (266)..(266): Selenocysteine
  MOD_RES (293)..(293): Selenocysteine
  MOD_RES (303)..(303): Selenocysteine
  MOD_RES (331)..(331): Selenocysteine
  MOD_RES (336)..(337): Selenocysteine
  MOD_RES (354)..(354): Selenocysteine
  MOD_RES (393)..(393): Selenocysteine
  MOD_RES (421)..(421): Selenocysteine
  MOD_RES (429)..(430): Selenocysteine
  MOD_RES (436)..(436): Selenocysteine
  MOD_RES (444)..(444): Selenocysteine
  MOD_RES (471)..(471): Selenocysteine
  MOD_RES (479)..(479): Selenocysteine
  MOD_RES (489)..(489): Selenocysteine
  MOD_RES (526)..(526): Selenocysteine
  MOD_RES (544)..(544): Selenocysteine
  MOD_RES (558)..(558): Selenocysteine
  MOD_RES (588)..(588): Selenocysteine
  MOD_RES (597)..(597): Selenocysteine
  MOD_RES (601)..(601): Selenocysteine
  MOD_RES (613)..(613): Selenocysteine
  MOD_RES (622)..(622): Selenocysteine
  MOD_RES (626)..(626): Selenocysteine
  MOD_RES (652)..(652): Selenocysteine
  MOD_RES (681)..(681): Selenocysteine
  MOD_RES (716)..(716): Selenocysteine
  MOD_RES (733)..(733): Selenocysteine
  MOD_RES (748)..(748): Selenocysteine
  MOD_RES (767)..(767): Selenocysteine
  MOD_RES (769)..(769): Selenocysteine
  MOD_RES (775)..(775): Selenocysteine
  MOD_RES (777)..(779): Selenocysteine
  MOD_RES (784)..(784): Selenocysteine
  MOD_RES (800)..(800): Selenocysteine
  MOD_RES (825)..(825): Selenocysteine
  MOD_RES (837)..(837): Selenocysteine
  MOD_RES (841)..(841): Selenocysteine
  MOD_RES (859)..(859): Selenocysteine
  MOD_RES (866)..(866): Selenocysteine
  MOD_RES (870)..(870): Selenocysteine
  MOD_RES (874)..(874): Selenocysteine
  MOD_RES (887)..(887): Selenocysteine
  MOD_RES (939)..(939): Selenocysteine
  MOD_RES (950)..(950): Selenocysteine
  MOD_RES (994)..(994): Selenocysteine
  MOD_RES (1042)..(1042): Selenocysteine
  MOD_RES (1106)..(1106): Selenocysteine
  MOD_RES (1153)..(1153): Selenocysteine
  MOD_RES (1173)..(1173): Selenocysteine
  MOD_RES (1190)..(1190): Selenocysteine
  MOD_RES (1196)..(1196): Selenocysteine
  MOD_RES (1202)..(1202): Selenocysteine
  MOD_RES (1227)..(1227): Selenocysteine
  MOD_RES (1266)..(1266): Selenocysteine
  MOD_RES (1276)..(1276): Selenocysteine
  MOD_RES (1279)..(1279): Selenocysteine
  MOD_RES (1300)..(1300): Selenocysteine
  MOD_RES (1302)..(1302): Selenocysteine
  MOD_RES (1332)..(1333): Selenocysteine
  MOD_RES (1337)..(1337): Selenocysteine
  MOD_RES (1366)..(1368): Selenocysteine
PVPCRVIPAMGKXSFRIIFLPXEEGSIESSLFINXSSYGVLSYHVSGIGXRRISXEGSAKQLPNAYFLLPKVQSIQLSQMQAEXXNXSLLQVQLECSLHNKVCQQLKGCYLESDDVLRLQMSIMVXMENFSKEFEENXQHLLDHLSIVYVAXDESEXSDDSAVNMYILHSGNSLIWIQDIRHFSQRDALSLQFEPVLLPXSXXNFXKIASFXCKAAXSCDSGIIEDVKKXXHXPXLKACLFSSVAQGYFRMDSSAXQFHIEXHENXSGLWSIWYRNHFDRSVVLNDVFLSKEXKHMLKILNFXGPLFLPPGCWNIFSLKLAVKDIAINLFXNVFLXXNIGAIFAIPLQIYSAPXKEGSLGFEVIAHCGMHYFMGKSKAGNPNWNGSLSLDQSXWNVDSELANKLYERWKKYKNGDVCKFGXDMQMINFXXGEFQLXEACPYLGXHSEESRFGILHLHLQPLEMKRVGVVFXPADYGKVXSLILIRNNLXVIDMIGVEGFGARELLKVGGRLPGAGGSLRFKVPESXLMDCRRQLKDSKQILSIXKNFKVENIGPLPIXVSSLKINGYNCQGYGFEVLDCHQFSLDPNXSRDISIVFXPDFXSSWVIRDLSLVXAADLEFRFXLNVXLPHHLLPLCADVVPGPSWEESFWRLXVFFVSLSLLGVILIAFQQAQYILMEFMKXRQRQNASSSSQQNNGPMDVISPHSYKSNCKNFLDXYGPSDKGRGKNCLPVNXPQSRIQNAAKRSPAXYGHSQKKHKCSVYYSKHKXSXAAASSXSXXXEEKQXSPLGSSLPAAKEDICXDAMRENWISLRYASGINVNLQKNLXLPKNLLNKEENXLKNXIVFSNPSSECSMKEGIQXCMFPKEXDIKXSENXAEFKERELCPLKXSKKLPENHLPRNSPQYHQPDLPEISRKNNGNNQQVPVKNEVDHCENLKKVDXKPSSEKKIHKXSREDMFSEKQDIPFVEQEDPYRKKKLQEKREGNLQNLNWSKSRXCRKNKKRGVAPVSRPPEQSDLKLVCSDFERSELSSDINVRSWCIQESXREVCKADAEIASSLPAAQREAEGYYQKPEKKCVDKFCSDSSSDCGSSSGSVRASRGSWGSWSSXSSSDGDKKPMVDAQHFLPAGDSVSQNDFPSEAPISLNLSHNICNPMXVNSLPQYAEPSCPSLPAGPXGVEEDKGLYSPGDLWPXPPVCVXSSLNCXLENGVPCVIQESAPVHNSFIDWSAXCEGQFSSAYCPLELNDYNAFPEENMNYANGFPCPADVQXDFIDHNSQSXWNXPPNMPAAWGHASFISSPPYLXSXRSLSPMSGLFGSIWAPQSDVYENCCPINPXXEHSXHMENQAVVCKEYYPGFNPFRAYMNLDIWXXXANRNANFPLSRDSSYCGNV

SEQ ID NO: 14383 - protein, 160 aa, Homo sapiens
  MOD_RES (79)..(79): Selenocysteine
  MOD_RES (120)..(120): Selenocysteine
  MOD_RES (133)..(133): Selenocysteine
  MOD_RES (158)..(158): Selenocysteine
FLPDNFSPAKPKPSKDLKPLLGSAVLGLLLVLAAVVAWCYYSVSLRKAERLRAELLDLKAGGFSIRNQKGEQEPQPFVXSDVYSSDAAFGGILERYWLSSRAAAIKVNDSVPFHLGWNSXERSLRLQARYHDXPYKPPAGRAAAPELSYRVCVGSDVXSI

SEQ ID NO: 14384 - protein, 714 aa, Homo sapiens
  MOD_RES (37)..(37): Selenocysteine
  MOD_RES (137)..(137): Selenocysteine
  MOD_RES (149)..(149): Selenocysteine
  MOD_RES (155)..(155): Selenocysteine
  MOD_RES (193)..(193): Selenocysteine
  MOD_RES (211)..(211): Selenocysteine
  MOD_RES (252)..(252): Selenocysteine
  MOD_RES (265)..(265): Selenocysteine
  MOD_RES (290)..(290): Selenocysteine
  MOD_RES (320)..(320): Selenocysteine
  MOD_RES (357)..(357): Selenocysteine
  MOD_RES (388)..(388): Selenocysteine
  MOD_RES (416)..(416): Selenocysteine
  MOD_RES (436)..(436): Selenocysteine
  MOD_RES (476)..(476): Selenocysteine
  MOD_RES (491)..(491): Selenocysteine
  MOD_RES (540)..(540): Selenocysteine
  MOD_RES (563)..(563): Selenocysteine
  MOD_RES (627)..(627): Selenocysteine
  MOD_RES (629)..(629): Selenocysteine
  MOD_RES (646)..(646): Selenocysteine
  MOD_RES (659)..(659): Selenocysteine
  MOD_RES (693)..(693): Selenocysteine
  MOD_RES (698)..(698): Selenocysteine
  MOD_RES (711)..(711): Selenocysteine
MLQNPQEKSQAYPRRRRPGCYAYRQNPEAIAAAAMYXFLPDNFSPAKPKPSKDLKPLLGSAVLGLLLVLAAVVAWCYYSVSLRKAERLRAELLDLKAGGFSIRNQKGEQVFRLAFRSGALDLDSCSRDGALLGCSLXADGLPLHFFIQXVRPKDXVMCYRVRWEEAAPGRAVEHAMFLGDAAAHWYGGAEMRXQHWPIRLDGQQEPQPFVXSDVYSSDAAFGGILERYWLSSRAAAIKVNDSVPFHLGWNSXERSLRLQARYHDXPYKPPAGRAAAPELSYRVCVGSDVXSIHKYMVRRYFNKPSRVPAPEAFRDPIWSXWALYGRAVDQDKVLRFAQQIRLHHFNSSHLEIDDMYXPAYGDFDFDEVKFPNASDMFRRLRDAGFRVXLWVHPFVNYNSSRFGEGVERELFVREPXGRLPALVRWWNGIGAVLDFXHPKARDWFQGHLRRLRSRYSVASFKFDAGEVSYLPRDFSXYRPLPDPSVWSRRYXEMALPFFSLAEVRVGYQSQNISCFFRLVDRDSVWGYDLGLRSLIPAVLXVSMLGYPFILPDMVGGNAVPQRXAGGDVPERELYIRWLEVAAFMPAMQFSIPPWRYDAEVVAIAQKFAALRASLVAPLLLELAGEVXDXGDPIVRPLWWIAPGDEXAHRIDSQFLIGDXLLVAPVLEPGKQERDVYLPAGKWRSYKGELFDKXPVLLXDYPVDLDEIAYFXWAS

SEQ ID NO: 14385 - protein, 716 aa, Homo sapiens
  MOD_RES (7)..(7): Selenocysteine
  MOD_RES (24)..(24): Selenocysteine
  MOD_RES (45)..(45): Selenocysteine
  MOD_RES (61)..(61): Selenocysteine
  MOD_RES (63)..(63): Selenocysteine
  MOD_RES (94)..(94): Selenocysteine
  MOD_RES (96)..(96): Selenocysteine
  MOD_RES (116)..(116): Selenocysteine
  MOD_RES (134)..(134): Selenocysteine
  MOD_RES (143)..(143): Selenocysteine
  MOD_RES (154)..(154): Selenocysteine
  MOD_RES (164)..(164): Selenocysteine
  MOD_RES (188)..(188): Selenocysteine
  MOD_RES (220)..(220): Selenocysteine
  MOD_RES (231)..(231): Selenocysteine
  MOD_RES (240)..(240): Selenocysteine
  MOD_RES (257)..(257): Selenocysteine
  MOD_RES (262)..(262): Selenocysteine
  MOD_RES (284)..(284): Selenocysteine
  MOD_RES (299)..(299): Selenocysteine
  MOD_RES (302)..(302): Selenocysteine
  MOD_RES (314)..(314): Selenocysteine
  MOD_RES (363)..(363): Selenocysteine
  MOD_RES (381)..(382): Selenocysteine
  MOD_RES (385)..(385): Selenocysteine
  MOD_RES (394)..(394): Selenocysteine
  MOD_RES (413)..(413): Selenocysteine
  MOD_RES (420)..(421): Selenocysteine
  MOD_RES (424)..(424): Selenocysteine
  MOD_RES (437)..(437): Selenocysteine
  MOD_RES (444)..(444): Selenocysteine
  MOD_RES (447)..(447): Selenocysteine
  MOD_RES (464)..(464): Selenocysteine
  MOD_RES (476)..(476): Selenocysteine
  MOD_RES (499)..(499): Selenocysteine
  MOD_RES (502)..(502): Selenocysteine
  MOD_RES (507)..(507): Selenocysteine
  MOD_RES (554)..(554): Selenocysteine
  MOD_RES (558)..(558): Selenocysteine
  MOD_RES (571)..(571): Selenocysteine
  MOD_RES (598)..(598): Selenocysteine
  MOD_RES (610)..(610): Selenocysteine
  MOD_RES (644)..(644): Selenocysteine
  MOD_RES (655)..(655): Selenocysteine
  MOD_RES (661)..(661): Selenocysteine
  MOD_RES (698)..(698): Selenocysteine
  MOD_RES (703)..(703): Selenocysteine
MEDCLHXSSENLSKLVSWAHSHGXICSLIPNLKHLLSEGSHGNLXAMWGCSAGHAYHWPLXAXCRAGSQERVCFQDNRSFNSDSPSIIGVPSEXQXSPVERYPGRPVKAKLDCNRXRDSCDFSYCSEPSELDEXVEEYEDENXLFDMVCESSVXDEDSDFEPQXQRPQSIARKRPGVVPSSLHSSSQXQMVDECSNDVIIKKIKQEIPEDYYIVANAELXGGVDGPALSLXQMAKPKPQXHAGPSCVGSAKLIPHVXSAISXELDPHGMSASPSVISRPIVQKXARVSLASPNRGPPGXHGXNQQVAMQMPVSXSHPNKQISIPLSALQLPGQDEQVASEEFLSHLPSQVSSCEVALSPSVNXEPEVSSSQQQPPVAPAIXXEAXAQCIPAYSXKLNKFPVFNINDDLNDLCXSAVSPNXXKAXRYALNVWRYWCMXNGLKDHXDIXKIPAVKLNELLENFYVXVKKSDGSDFLAXSLHAIRRGLDRILKNAGVGFSIXSSXFSSSXKKLKEKLWVLSKAGMSGARSRNIVYFSLSDEEEMWQAGCLGDDSPIXLLSXVVKYNSQYLNMRXLQEHADLMYGDIELLKDPQNQPYFARXDSVKRESRSGSXRVCHGKIYHEHSRGHKQCPYCLLYKYMYIHRPPXQMEAKSPFYLXARKEAXDMGSVWYEEQRMGLRSLRGIVPNLAKKVKLENCENFXFVSFXQVSRRLGSHSCCQ

SEQ ID NO: 14386 - protein, 738 aa, Homo sapiens
  MOD_RES (7)..(7): Selenocysteine
  MOD_RES (24)..(24): Selenocysteine
  MOD_RES (45)..(45): Selenocysteine
  MOD_RES (61)..(61): Selenocysteine
  MOD_RES (63)..(63): Selenocysteine
  MOD_RES (94)..(94): Selenocysteine
  MOD_RES (96)..(96): Selenocysteine
  MOD_RES (116)..(116): Selenocysteine
  MOD_RES (134)..(134): Selenocysteine
  MOD_RES (143)..(143): Selenocysteine
  MOD_RES (154)..(154): Selenocysteine
  MOD_RES (164)..(164): Selenocysteine
  MOD_RES (188)..(188): Selenocysteine
  MOD_RES (220)..(220): Selenocysteine
  MOD_RES (231)..(231): Selenocysteine
  MOD_RES (240)..(240): Selenocysteine
  MOD_RES (257)..(257): Selenocysteine
  MOD_RES (262)..(262): Selenocysteine
  MOD_RES (284)..(284): Selenocysteine
  MOD_RES (299)..(299): Selenocysteine
  MOD_RES (302)..(302): Selenocysteine
  MOD_RES (314)..(314): Selenocysteine
  MOD_RES (363)..(363): Selenocysteine
  MOD_RES (381)..(382): Selenocysteine
  MOD_RES (385)..(385): Selenocysteine
  MOD_RES (407)..(407): Selenocysteine
  MOD_RES (411)..(411): Selenocysteine
  MOD_RES (413)..(413): Selenocysteine
  MOD_RES (430)..(430): Selenocysteine
  MOD_RES (486)..(486): Selenocysteine
  MOD_RES (521)..(521): Selenocysteine
  MOD_RES (551)..(551): Selenocysteine
  MOD_RES (558)..(558): Selenocysteine
  MOD_RES (564)..(564): Selenocysteine
  MOD_RES (575)..(575): Selenocysteine
  MOD_RES (577)..(577): Selenocysteine
  MOD_RES (589)..(589): Selenocysteine
  MOD_RES (596)..(596): Selenocysteine
  MOD_RES (601)..(601): Selenocysteine
  MOD_RES (608)..(608): Selenocysteine
  MOD_RES (614)..(614): Selenocysteine
  MOD_RES (670)..(670): Selenocysteine
  MOD_RES (682)..(682): Selenocysteine
  MOD_RES (692)..(692): Selenocysteine
  MOD_RES (737)..(737): Selenocysteine
MEDCLHXSSENLSKLVSWAHSHGXICSLIPNLKHLLSEGSHGNLXAMWGCSAGHAYHWPLXAXCRAGSQERVCFQDNRSFNSDSPSIIGVPSEXQXSPVERYPGRPVKAKLDCNRXRDSCDFSYCSEPSELDEXVEEYEDENXLFDMVCESSVXDEDSDFEPQXQRPQSIARKRPGVVPSSLHSSSQXQMVDECSNDVIIKKIKQEIPEDYYIVANAELXGGVDGPALSLXQMAKPKPQXHAGPSCVGSAKLIPHVXSAISXELDPHGMSASPSVISRPIVQKXARVSLASPNRGPPGXHGXNQQVAMQMPVSXSHPNKQISIPLSALQLPGQDEQVASEEFLSHLPSQVSSCEVALSPSVNXEPEVSSSQQQPPVAPAIXXEAXAQCIPDQDERAAELSREQNEKXIRSXQXALRNFREFLISKYPSEXREIYVIPCKELDAYLASFFVDARQKDGSEYEPNSLANYQCGLERYLKEHRYGYSIXRDKEFKRSQEALKQKQIELRCKGKGNKPHKSMKLXFADELILRKRGLLSRYNPEGLLNLVWLNNXKAFGHCXGFHGSXLKWGDIRLRVXEXGLEYLEWMGQDXGDLNAKXKRGGXDSRVYAXQHAPQXCPVQDYKEYAQRRPPAMRYEDAPFYLSIKPVVNLAALHWYNCQALGKNKLAKMVKXMCEKGNIPGRKXNFSVYQSCSXLSEAQSNQLVLICNNLSQQAAQSVAGHSNNGNFIVSASYDSSSDXA

SEQ ID NO: 14387 - protein, 744 aa, Homo sapiens
  MOD_RES (7)..(7): Selenocysteine
  MOD_RES (24)..(24): Selenocysteine
  MOD_RES (45)..(45): Selenocysteine
  MOD_RES (61)..(61): Selenocysteine
  MOD_RES (63)..(63): Selenocysteine
  MOD_RES (94)..(94): Selenocysteine
  MOD_RES (96)..(96): Selenocysteine
  MOD_RES (116)..(116): Selenocysteine
  MOD_RES (134)..(134): Selenocysteine
  MOD_RES (143)..(143): Selenocysteine
  MOD_RES (154)..(154): Selenocysteine
  MOD_RES (164)..(164): Selenocysteine
  MOD_RES (188)..(188): Selenocysteine
  MOD_RES (220)..(220): Selenocysteine
  MOD_RES (231)..(231): Selenocysteine
  MOD_RES (240)..(240): Selenocysteine
  MOD_RES (257)..(257): Selenocysteine
  MOD_RES (262)..(262): Selenocysteine
  MOD_RES (284)..(284): Selenocysteine
  MOD_RES (299)..(299): Selenocysteine
  MOD_RES (302)..(302): Selenocysteine
  MOD_RES (314)..(314): Selenocysteine
  MOD_RES (363)..(363): Selenocysteine
  MOD_RES (381)..(382): Selenocysteine
  MOD_RES (385)..(385): Selenocysteine
  MOD_RES (407)..(407): Selenocysteine
  MOD_RES (411)..(411): Selenocysteine
  MOD_RES (413)..(413): Selenocysteine
  MOD_RES (422)..(422): Selenocysteine
  MOD_RES (441)..(441): Selenocysteine
  MOD_RES (448)..(449): Selenocysteine
  MOD_RES (452)..(452): Selenocysteine
  MOD_RES (465)..(465): Selenocysteine
  MOD_RES (472)..(472): Selenocysteine
  MOD_RES (475)..(475): Selenocysteine
  MOD_RES (492)..(492): Selenocysteine
  MOD_RES (504)..(504): Selenocysteine
  MOD_RES (527)..(527): Selenocysteine
  MOD_RES (530)..(530): Selenocysteine
  MOD_RES (535)..(535): Selenocysteine
  MOD_RES (582)..(582): Selenocysteine
  MOD_RES (586)..(586): Selenocysteine
  MOD_RES (599)..(599): Selenocysteine
  MOD_RES (626)..(626): Selenocysteine
  MOD_RES (638)..(638): Selenocysteine
  MOD_RES (672)..(672): Selenocysteine
  MOD_RES (683)..(683): Selenocysteine
  MOD_RES (689)..(689): Selenocysteine
  MOD_RES (726)..(726): Selenocysteine
  MOD_RES (731)..(731): Selenocysteine
MEDCLHXSSENLSKLVSWAHSHGXICSLIPNLKHLLSEGSHGNLXAMWGCSAGHAYHWPLXAXCRAGSQERVCFQDNRSFNSDSPSIIGVPSEXQXSPVERYPGRPVKAKLDCNRXRDSCDFSYCSEPSELDEXVEEYEDENXLFDMVCESSVXDEDSDFEPQXQRPQSIARKRPGVVPSSLHSSSQXQMVDECSNDVIIKKIKQEIPEDYYIVANAELXGGVDGPALSLXQMAKPKPQXHAGPSCVGSAKLIPHVXSAISXELDPHGMSASPSVISRPIVQKXARVSLASPNRGPPGXHGXNQQVAMQMPVSXSHPNKQISIPLSALQLPGQDEQVASEEFLSHLPSQVSSCEVALSPSVNXEPEVSSSQQQPPVAPAIXXEAXAQCIPDQDERAAELSREQNEKXIRSXQXALRNFPYSXKLNKFPVFNINDDLNDLCXSAVSPNXXKAXRYALNVWRYWCMXNGLKDHXDIXKIPAVKLNELLENFYVXVKKSDGSDFLAXSLHAIRRGLDRILKNAGVGFSIXSSXFSSSXKKLKEKLWVLSKAGMSGARSRNIVYFSLSDEEEMWQAGCLGDDSPIXLLSXVVKYNSQYLNMRXLQEHADLMYGDIELLKDPQNQPYFARXDSVKRESRSGSXRVCHGKIYHEHSRGHKQCPYCLLYKYMYIHRPPXQMEAKSPFYLXARKEAXDMGSVWYEEQRMGLRSLRGIVPNLAKKVKLENCENFXFVSFXQVSRRLGSHSCCQ

SEQ ID NO: 14388 - protein, 1057 aa, Homo sapiens
  MOD_RES (7)..(7): Selenocysteine
  MOD_RES (18)..(18): Selenocysteine
  MOD_RES (51)..(51): Selenocysteine
  MOD_RES (63)..(63): Selenocysteine
  MOD_RES (75)..(75): Selenocysteine
  MOD_RES (79)..(79): Selenocysteine
  MOD_RES (84)..(84): Selenocysteine
  MOD_RES (90)..(90): Selenocysteine
  MOD_RES (117)..(117): Selenocysteine
  MOD_RES (153)..(153): Selenocysteine
  MOD_RES (167)..(167): Selenocysteine
  MOD_RES (178)..(178): Selenocysteine
  MOD_RES (180)..(180): Selenocysteine
  MOD_RES (202)..(202): Selenocysteine
  MOD_RES (232)..(232): Selenocysteine
  MOD_RES (252)..(252): Selenocysteine
  MOD_RES (266)..(266): Selenocysteine
  MOD_RES (309)..(309): Selenocysteine
  MOD_RES (336)..(337): Selenocysteine
  MOD_RES (347)..(347): Selenocysteine
  MOD_RES (359)..(359): Selenocysteine
  MOD_RES (367)..(367): Selenocysteine
  MOD_RES (381)..(381): Selenocysteine
  MOD_RES (389)..(389): Selenocysteine
  MOD_RES (392)..(392): Selenocysteine
  MOD_RES (401)..(401): Selenocysteine
  MOD_RES (422)..(422): Selenocysteine
  MOD_RES (435)..(435): Selenocysteine
  MOD_RES (457)..(457): Selenocysteine
  MOD_RES (505)..(505): Selenocysteine
  MOD_RES (510)..(510): Selenocysteine
  MOD_RES (514)..(514): Selenocysteine
  MOD_RES (537)..(537): Selenocysteine
  MOD_RES (605)..(605): Selenocysteine
  MOD_RES (608)..(608): Selenocysteine
  MOD_RES (617)..(618): Selenocysteine
  MOD_RES (637)..(637): Selenocysteine
  MOD_RES (643)..(643): Selenocysteine
  MOD_RES (650)..(650): Selenocysteine
  MOD_RES (659)..(659): Selenocysteine
  MOD_RES (661)..(661): Selenocysteine
  MOD_RES (669)..(669): Selenocysteine
  MOD_RES (674)..(674): Selenocysteine
  MOD_RES (685)..(685): Selenocysteine
  MOD_RES (696)..(696): Selenocysteine
  MOD_RES (719)..(719): Selenocysteine
  MOD_RES (726)..(726): Selenocysteine
  MOD_RES (736)..(736): Selenocysteine
  MOD_RES (744)..(744): Selenocysteine
  MOD_RES (747)..(747): Selenocysteine
  MOD_RES (758)..(759): Selenocysteine
  MOD_RES (783)..(783): Selenocysteine
  MOD_RES (798)..(798): Selenocysteine
  MOD_RES (852)..(852): Selenocysteine
  MOD_RES (876)..(876): Selenocysteine
  MOD_RES (925)..(926): Selenocysteine
  MOD_RES (962)..(962): Selenocysteine
  MOD_RES (1006)..(1006): Selenocysteine
  MOD_RES (1012)..(1012): Selenocysteine
  MOD_RES (1015)..(1015): Selenocysteine
  MOD_RES (1025)..(1025): Selenocysteine
DLLDAGXYVNIPDRSGDXVLIGAVRGGHVEIVRALLQKYADIDIRGQDNKXALYWAVEKGNAXMVRDILQCNPDXEICXKDGEXPLIKAXKMRNIEVVELLLDKGAKVSAVDKKGDXPLHIAIRGRSRKLAELLLRNPKDGRLLYRPNKAGEXPYNIDCSHQKSILXQIFGARHLSPXEXDGDMLGYDLYSSALADILSEPXMQPPICVGLYAQWGSGKSFLLKKLEDEMKXFAGQQIEPLFQFSWLIVFLXLLLCGGLGLLFAFXVHPNLGIAVSLSFLALLYIFFIVIYFGGRREGESWNWAWVLSXRLARHIGYLELLLKLMFVNPPELPEQXXKALPVRFLFXDYNRLSSVGGEXSLAEMIAXLSDACEREFGFLAXRLFRVFKXEDXQGKKKWKKXCCLPSFVIFLFIIGCIISGIXLLAIFRVDPKHLXVNAVLISIASVVGLAFVLNCRXWWQVLDSLLNSQRKRLHNAASKLHKLKSEGFMKVLKCEVELMARMAKXIDSFXQNQXRLVVIIDGLDACEQDKVLQMLDXVRVLFSKGPFIAIFASDPHIIIKAINQNLNSVLRDSNINGHDYMRNIVHLPVFLNSRGLSNARKFLVXSAXNGDVPCSDXXGIQEDADRRVSQNSLGEMXKLGSKXALNRRDXYRRRQMQRXIXRQMSFDLXKLLVXEDWFSDISPQXMRRLLNIVSVXGRLLRANQISFNWDRLASWINLXEQWPYRXSWLILYLEEXEGIPDQMXLKXIYERISKNIPXXKDVEPLLEIDGDIRNFEVFLSSRXPVLVARDVKVFLPCXVNLDPKLREIIADVRAAREQISIGGLAYPPLPLHEGPPRAPSGYSQPPSVCSSXSFNGPFAGGVVSPQPHSSYYSGMXGPQHPFYNRGSGPAPGPVVLLNSLNVDAVCEKLKQIEGLDQSMLPQYCXXIKKANINGRVLAQCNIDELKKEMNMNFGDWHLFRSXVLEMRNAESHVVPEDPRFLSESSSGPAPHGEPARRASHNELPHXELSSQXPYXLNFSFEELNXLGLDEGAPRHSNLSWQEENAGLEIDSSSEDPD

SEQ ID NO: 14389 - protein, 151 aa, Homo sapiens
  MOD_RES (6)..(6): Selenocysteine
  MOD_RES (9)..(9): Selenocysteine
  MOD_RES (20)..(21): Selenocysteine
  MOD_RES (45)..(45): Selenocysteine
  MOD_RES (60)..(60): Selenocysteine
  MOD_RES (114)..(114): Selenocysteine
  MOD_RES (138)..(138): Selenocysteine
IPDQMXLKXIYERISKNIPXXKDVEPLLEIDGDIRNFEVFLSSRXPVLVARDVKVFLPCXVNLDPKLREIIADVRAAREQISIGGLAYPPLPLHEGPPRAPSGYSQPPSVCSSXSFNGPFAGGVVSPQPHSSYYSGMXGPQHPFYNRENGA

SEQ ID NO: 14390 - protein, 36 aa, Homo sapiens
MSVLISQSVINYVEEENIPALKALLEKCKDVDERNE

SEQ ID NO: 14391 - protein, 1031 aa, Homo sapiens
  MOD_RES (40)..(40): Selenocysteine
  MOD_RES (73)..(73): Selenocysteine
  MOD_RES (106)..(106): Selenocysteine
  MOD_RES (117)..(117): Selenocysteine
  MOD_RES (133)..(133): Selenocysteine
  MOD_RES (172)..(173): Selenocysteine
  MOD_RES (206)..(206): Selenocysteine
  MOD_RES (217)..(217): Selenocysteine
  MOD_RES (233)..(233): Selenocysteine
  MOD_RES (239)..(239): Selenocysteine
  MOD_RES (250)..(250): Selenocysteine
  MOD_RES (261)..(261): Selenocysteine
  MOD_RES (272)..(272): Selenocysteine
  MOD_RES (305)..(305): Selenocysteine
  MOD_RES (317)..(317): Selenocysteine
  MOD_RES (329)..(329): Selenocysteine
  MOD_RES (333)..(333): Selenocysteine
  MOD_RES (338)..(338): Selenocysteine
  MOD_RES (344)..(344): Selenocysteine
  MOD_RES (371)..(371): Selenocysteine
  MOD_RES (407)..(407): Selenocysteine
  MOD_RES (421)..(421): Selenocysteine
  MOD_RES (432)..(432): Selenocysteine
  MOD_RES (434)..(434): Selenocysteine
  MOD_RES (456)..(456): Selenocysteine
  MOD_RES (486)..(486): Selenocysteine
  MOD_RES (506)..(506): Selenocysteine
  MOD_RES (520)..(520): Selenocysteine
  MOD_RES (563)..(563): Selenocysteine
  MOD_RES (590)..(591): Selenocysteine
  MOD_RES (601)..(601): Selenocysteine
  MOD_RES (613)..(613): Selenocysteine
  MOD_RES (621)..(621): Selenocysteine
  MOD_RES (635)..(635): Selenocysteine
  MOD_RES (643)..(643): Selenocysteine
  MOD_RES (646)..(646): Selenocysteine
  MOD_RES (655)..(655): Selenocysteine
  MOD_RES (676)..(676): Selenocysteine
  MOD_RES (689)..(689): Selenocysteine
  MOD_RES (711)..(711): Selenocysteine
  MOD_RES (759)..(759): Selenocysteine
  MOD_RES (764)..(764): Selenocysteine
  MOD_RES (768)..(768): Selenocysteine
  MOD_RES (791)..(791): Selenocysteine
  MOD_RES (859)..(859): Selenocysteine
  MOD_RES (862)..(862): Selenocysteine
  MOD_RES (871)..(872): Selenocysteine
  MOD_RES (891)..(891): Selenocysteine
  MOD_RES (897)..(897): Selenocysteine
  MOD_RES (904)..(904): Selenocysteine
  MOD_RES (913)..(913): Selenocysteine
  MOD_RES (915)..(915): Selenocysteine
  MOD_RES (923)..(923): Selenocysteine
  MOD_RES (928)..(928): Selenocysteine
  MOD_RES (939)..(939): Selenocysteine
  MOD_RES (950)..(950): Selenocysteine
  MOD_RES (973)..(973): Selenocysteine
  MOD_RES (980)..(980): Selenocysteine
  MOD_RES (990)..(990): Selenocysteine
  MOD_RES (998)..(998): Selenocysteine
  MOD_RES (1001)..(1001): Selenocysteine
MSVLISQSVINYVEEENIPALKALLEKCKDVDERNECGQXPLMIAAEQGNLEIVKELIKNGANCNLEDLDNWXALISASKEGHVHIVEELLKCGVNLEHRDMGGWXALMWACYKGRXDVVELLLSHGANPSVXGLQYSVYPIIWAAGRGHADIVHLLLQNGAKVNCSDKYGXXPLVWAARKGHLECVKHLLAMGADVDQEGANSMXALIVAVKGGYXQSVKEILKRNPNVNLXDKDGNXALMIASKEGHXEIVQDLLDAGXYVNIPDRSGDXVLIGAVRGGHVEIVRALLQKYADIDIRGQDNKXALYWAVEKGNAXMVRDILQCNPDXEICXKDGEXPLIKAXKMRNIEVVELLLDKGAKVSAVDKKGDXPLHIAIRGRSRKLAELLLRNPKDGRLLYRPNKAGEXPYNIDCSHQKSILXQIFGARHLSPXEXDGDMLGYDLYSSALADILSEPXMQPPICVGLYAQWGSGKSFLLKKLEDEMKXFAGQQIEPLFQFSWLIVFLXLLLCGGLGLLFAFXVHPNLGIAVSLSFLALLYIFFIVIYFGGRREGESWNWAWVLSXRLARHIGYLELLLKLMFVNPPELPEQXXKALPVRFLFXDYNRLSSVGGEXSLAEMIAXLSDACEREFGFLAXRLFRVFKXEDXQGKKKWKKXCCLPSFVIFLFIIGCIISGIXLLAIFRVDPKHLXVNAVLISIASVVGLAFVLNCRXWWQVLDSLLNSQRKRLHNAASKLHKLKSEGFMKVLKCEVELMARMAKXIDSFXQNQXRLVVIIDGLDACEQDKVLQMLDXVRVLFSKGPFIAIFASDPHIIIKAINQNLNSVLRDSNINGHDYMRNIVHLPVFLNSRGLSNARKFLVXSAXNGDVPCSDXXGIQEDADRRVSQNSLGEMXKLGSKXALNRRDXYRRRQMQRXIXRQMSFDLXKLLVXEDWFSDISPQXMRRLLNIVSVXGRLLRANQISFNWDRLASWINLXEQWPYRXSWLILYLEEXEGIPDQMXLKXIYERCCGADSCDRDRIGISKSVLVAMLMES

SEQ ID NO: 14392 - protein, 1305 aa, Homo sapiens
  MOD_RES (40)..(40): Selenocysteine
  MOD_RES (73)..(73): Selenocysteine
  MOD_RES (106)..(106): Selenocysteine
  MOD_RES (117)..(117): Selenocysteine
  MOD_RES (133)..(133): Selenocysteine
  MOD_RES (172)..(173): Selenocysteine
  MOD_RES (206)..(206): Selenocysteine
  MOD_RES (217)..(217): Selenocysteine
  MOD_RES (233)..(233): Selenocysteine
  MOD_RES (239)..(239): Selenocysteine
  MOD_RES (250)..(250): Selenocysteine
  MOD_RES (261)..(261): Selenocysteine
  MOD_RES (272)..(272): Selenocysteine
  MOD_RES (305)..(305): Selenocysteine
  MOD_RES (317)..(317): Selenocysteine
  MOD_RES (329)..(329): Selenocysteine
  MOD_RES (333)..(333): Selenocysteine
  MOD_RES (338)..(338): Selenocysteine
  MOD_RES (344)..(344): Selenocysteine
  MOD_RES (371)..(371): Selenocysteine
  MOD_RES (407)..(407): Selenocysteine
  MOD_RES (421)..(421): Selenocysteine
  MOD_RES (432)..(432): Selenocysteine
  MOD_RES (434)..(434): Selenocysteine
  MOD_RES (456)..(456): Selenocysteine
  MOD_RES (486)..(486): Selenocysteine
  MOD_RES (506)..(506): Selenocysteine
  MOD_RES (520)..(520): Selenocysteine
  MOD_RES (563)..(563): Selenocysteine
  MOD_RES (590)..(591): Selenocysteine
  MOD_RES (601)..(601): Selenocysteine
  MOD_RES (613)..(613): Selenocysteine
  MOD_RES (621)..(621): Selenocysteine
  MOD_RES (635)..(635): Selenocysteine
  MOD_RES (643)..(643): Selenocysteine
  MOD_RES (646)..(646): Selenocysteine
  MOD_RES (655)..(655): Selenocysteine
  MOD_RES (676)..(676): Selenocysteine
  MOD_RES (689)..(689): Selenocysteine
  MOD_RES (711)..(711): Selenocysteine
  MOD_RES (759)..(759): Selenocysteine
  MOD_RES (764)..(764): Selenocysteine
  MOD_RES (768)..(768): Selenocysteine
  MOD_RES (791)..(791): Selenocysteine
  MOD_RES (859)..(859): Selenocysteine
  MOD_RES (862)..(862): Selenocysteine
  MOD_RES (871)..(872): Selenocysteine
  MOD_RES (891)..(891): Selenocysteine
  MOD_RES (897)..(897): Selenocysteine
  MOD_RES (904)..(904): Selenocysteine
  MOD_RES (913)..(913): Selenocysteine
  MOD_RES (915)..(915): Selenocysteine
  MOD_RES (923)..(923): Selenocysteine
  MOD_RES (928)..(928): Selenocysteine
  MOD_RES (939)..(939): Selenocysteine
  MOD_RES (950)..(950): Selenocysteine
  MOD_RES (973)..(973): Selenocysteine
  MOD_RES (980)..(980): Selenocysteine
  MOD_RES (990)..(990): Selenocysteine
  MOD_RES (998)..(998): Selenocysteine
  MOD_RES (1001)..(1001): Selenocysteine
  MOD_RES (1012)..(1013): Selenocysteine
  MOD_RES (1037)..(1037): Selenocysteine
  MOD_RES (1052)..(1052): Selenocysteine
  MOD_RES (1106)..(1106): Selenocysteine
  MOD_RES (1130)..(1130): Selenocysteine
  MOD_RES (1179)..(1180): Selenocysteine
  MOD_RES (1216)..(1216): Selenocysteine
  MOD_RES (1260)..(1260): Selenocysteine
  MOD_RES (1266)..(1266): Selenocysteine
  MOD_RES (1269)..(1269): Selenocysteine
  MOD_RES (1279)..(1279): Selenocysteine
  MOD_RES (1298)..(1298): Selenocysteine
  MOD_RES (1301)..(1301): Selenocysteine
MSVLISQSVINYVEEENIPALKALLEKCKDVDERNECGQXPLMIAAEQGNLEIVKELIKNGANCNLEDLDNWXALISASKEGHVHIVEELLKCGVNLEHRDMGGWXALMWACYKGRXDVVELLLSHGANPSVXGLQYSVYPIIWAAGRGHADIVHLLLQNGAKVNCSDKYGXXPLVWAARKGHLECVKHLLAMGADVDQEGANSMXALIVAVKGGYXQSVKEILKRNPNVNLXDKDGNXALMIASKEGHXEIVQDLLDAGXYVNIPDRSGDXVLIGAVRGGHVEIVRALLQKYADIDIRGQDNKXALYWAVEKGNAXMVRDILQCNPDXEICXKDGEXPLIKAXKMRNIEVVELLLDKGAKVSAVDKKGDXPLHIAIRGRSRKLAELLLRNPKDGRLLYRPNKAGEXPYNIDCSHQKSILXQIFGARHLSPXEXDGDMLGYDLYSSALADILSEPXMQPPICVGLYAQWGSGKSFLLKKLEDEMKXFAGQQIEPLFQFSWLIVFLXLLLCGGLGLLFAFXVHPNLGIAVSLSFLALLYIFFIVIYFGGRREGESWNWAWVLSXRLARHIGYLELLLKLMFVNPPELPEQXXKALPVRFLFXDYNRLSSVGGEXSLAEMIAXLSDACEREFGFLAXRLFRVFKXEDXQGKKKWKKXCCLPSFVIFLFIIGCIISGIXLLAIFRVDPKHLXVNAVLISIASVVGLAFVLNCRXWWQVLDSLLNSQRKRLHNAASKLHKLKSEGFMKVLKCEVELMARMAKXIDSFXQNQXRLVVIIDGLDACEQDKVLQMLDXVRVLFSKGPFIAIFASDPHIIIKAINQNLNSVLRDSNINGHDYMRNIVHLPVFLNSRGLSNARKFLVXSAXNGDVPCSDXXGIQEDADRRVSQNSLGEMXKLGSKXALNRRDXYRRRQMQRXIXRQMSFDLXKLLVXEDWFSDISPQXMRRLLNIVSVXGRLLRANQISFNWDRLASWINLXEQWPYRXSWLILYLEEXEGIPDQMXLKXIYERISKNIPXXKDVEPLLEIDGDIRNFEVFLSSRXPVLVARDVKVFLPCXVNLDPKLREIIADVRAAREQISIGGLAYPPLPLHEGPPRAPSGYSQPPSVCSSXSFNGPFAGGVVSPQPHSSYYSGMXGPQHPFYNRGSGPAPGPVVLLNSLNVDAVCEKLKQIEGLDQSMLPQYCXXIKKANINGRVLAQCNIDELKKEMNMNFGDWHLFRSXVLEMRNAESHVVPEDPRFLSESSSGPAPHGEPARRASHNELPHXELSSQXPYXLNFSFEELNXLGLDEGAPRHSNLSWQSQXRRXPSLS

SEQ ID NO: 14393 - protein, 1752 aa, Homo sapiens
  MOD_RES (40)..(40): Selenocysteine
  MOD_RES (73)..(73): Selenocysteine
  MOD_RES (106)..(106): Selenocysteine
  MOD_RES (117)..(117): Selenocysteine
  MOD_RES (133)..(133): Selenocysteine
  MOD_RES (171)..(172): Selenocysteine
  MOD_RES (205)..(205): Selenocysteine
  MOD_RES (216)..(216): Selenocysteine
  MOD_RES (232)..(232): Selenocysteine
  MOD_RES (238)..(238): Selenocysteine
  MOD_RES (249)..(249): Selenocysteine
  MOD_RES (260)..(260): Selenocysteine
  MOD_RES (271)..(271): Selenocysteine
  MOD_RES (304)..(304): Selenocysteine
  MOD_RES (316)..(316): Selenocysteine
  MOD_RES (328)..(328): Selenocysteine
  MOD_RES (332)..(332): Selenocysteine
  MOD_RES (337)..(337): Selenocysteine
  MOD_RES (343)..(343): Selenocysteine
  MOD_RES (370)..(370): Selenocysteine
  MOD_RES (406)..(406): Selenocysteine
  MOD_RES (420)..(420): Selenocysteine
  MOD_RES (431)..(431): Selenocysteine
  MOD_RES (433)..(433): Selenocysteine
  MOD_RES (455)..(455): Selenocysteine
  MOD_RES (485)..(485): Selenocysteine
  MOD_RES (505)..(505): Selenocysteine
  MOD_RES (519)..(519): Selenocysteine
  MOD_RES (562)..(562): Selenocysteine
  MOD_RES (589)..(590): Selenocysteine
  MOD_RES (600)..(600): Selenocysteine
  MOD_RES (612)..(612): Selenocysteine
  MOD_RES (620)..(620): Selenocysteine
  MOD_RES (634)..(634): Selenocysteine
  MOD_RES (642)..(642): Selenocysteine
  MOD_RES (645)..(645): Selenocysteine
  MOD_RES (654)..(654): Selenocysteine
  MOD_RES (675)..(675): Selenocysteine
  MOD_RES (688)..(688): Selenocysteine
  MOD_RES (710)..(710): Selenocysteine
  MOD_RES (758)..(758): Selenocysteine
  MOD_RES (763)..(763): Selenocysteine
  MOD_RES (767)..(767): Selenocysteine
  MOD_RES (790)..(790): Selenocysteine
  MOD_RES (858)..(858): Selenocysteine
  MOD_RES (861)..(861): Selenocysteine
  MOD_RES (870)..(871): Selenocysteine
  MOD_RES (890)..(890): Selenocysteine
  MOD_RES (896)..(896): Selenocysteine
  MOD_RES (903)..(903): Selenocysteine
  MOD_RES (912)..(912): Selenocysteine
  MOD_RES (914)..(914): Selenocysteine
  MOD_RES (922)..(922): Selenocysteine
  MOD_RES (927)..(927): Selenocysteine
  MOD_RES (938)..(938): Selenocysteine
  MOD_RES (949)..(949): Selenocysteine
  MOD_RES (972)..(972): Selenocysteine
  MOD_RES (979)..(979): Selenocysteine
  MOD_RES (989)..(989): Selenocysteine
  MOD_RES (997)..(997): Selenocysteine
  MOD_RES (1000)..(1000): Selenocysteine
  MOD_RES (1011)..(1012): Selenocysteine
  MOD_RES (1036)..(1036): Selenocysteine
  MOD_RES (1051)..(1051): Selenocysteine
  MOD_RES (1105)..(1105): Selenocysteine
  MOD_RES (1129)..(1129): Selenocysteine
  MOD_RES (1147)..(1147): Selenocysteine
  MOD_RES (1166)..(1166): Selenocysteine
  MOD_RES (1216)..(1217): Selenocysteine
  MOD_RES (1253)..(1253): Selenocysteine
  MOD_RES (1297)..(1297): Selenocysteine
  MOD_RES (1303)..(1303): Selenocysteine
  MOD_RES (1306)..(1306): Selenocysteine
  MOD_RES (1316)..(1316): Selenocysteine
  MOD_RES (1335)..(1335): Selenocysteine
  MOD_RES (1338)..(1338): Selenocysteine
  MOD_RES (1357)..(1357): Selenocysteine
  MOD_RES (1385)..(1386): Selenocysteine
  MOD_RES (1396)..(1396): Selenocysteine
  MOD_RES (1448)..(1448): Selenocysteine
  MOD_RES (1458)..(1458): Selenocysteine
  MOD_RES (1486)..(1486): Selenocysteine
  MOD_RES (1509)..(1509): Selenocysteine
  MOD_RES (1515)..(1515): Selenocysteine
  MOD_RES (1546)..(1546): Selenocysteine
  MOD_RES (1660)..(1660): Selenocysteine
  MOD_RES (1663)..(1663): Selenocysteine
  MOD_RES (1665)..(1665): Selenocysteine
  MOD_RES (1689)..(1689): Selenocysteine
  MOD_RES (1703)..(1704): Selenocysteine
  MOD_RES (1714)..(1714): Selenocysteine
  MOD_RES (1724)..(1724): Selenocysteine
  MOD_RES (1742)..(1742): Selenocysteine
MSVLISQSVINYVEEENIPALKALLEKCKDVDERNECGQXPLMIAAEQGNLEIVKELIKNGANCNLEDLDNWXALISASKEGHVHIVEELLKCGVNLEHRDMGGWXALMWACYKGRXDVVELLLSHGANPSVXGLYSVYPIIWAAGRGHADIVHLLLQNGAKVNCSDKYGXXPLVWAARKGHLECVKHLLAMGADVDQEGANSMXALIVAVKGGYXQSVKEILKRNPNVNLXDKDGNXALMIASKEGHXEIVQDLLDAGXYVNIPDRSGDXVLIGAVRGGHVEIVRALLQKYADIDIRGQDNKXALYWAVEKGNAXMVRDILQCNPDXEICXKDGEXPLIKAXKMRNIEVVELLLDKGAKVSAVDKKGDXPLHIAIRGRSRKLAELLLRNPKDGRLLYRPNKAGEXPYNIDCSHQKSILXQIFGARHLSPXEXDGDMLGYDLYSSALADILSEPXMQPPICVGLYAQWGSGKSFLLKKLEDEMKXFAGQQIEPLFQFSWLIVFLXLLLCGGLGLLFAFXVHPNLGIAVSLSFLALLYIFFIVIYFGGRREGESWNWAWVLSXRLARHIGYLELLLKLMFVNPPELPEQXXKALPVRFLFXDYNRLSSVGGEXSLAEMIAXLSDACEREFGFLAXRLFRVFKXEDXQGKKKWKKXCCLPSFVIFLFIIGCIISGIXLLAIFRVDPKHLXVNAVLISIASVVGLAFVLNCRXWWQVLDSLLNSQRKRLHNAASKLHKLKSEGFMKVLKCEVELMARMAKXIDSFXQNQXRLVVIIDGLDACEQDKVLQMLDXVRVLFSKGPFIAIFASDPHIIIKAINQNLNSVLRDSNINGHDYMRNIVHLPVFLNSRGLSNARKFLVXSAXNGDVPCSDXXGIQEDADRRVSQNSLGEMXKLGSKXALNRRDXYRRRQMQRXIXRQMSFDLXKLLVXEDWFSDISPQXMRRLLNIVSVXGRLLRANQISFNWDRLASWINLXEQWPYRXSWLILYLEEXEGIPDQMXLKXIYERISKNIPXXKDVEPLLEIDGDIRNFEVFLSSRXPVLVARDVKVFLPCXVNLDPKLREIIADVRAAREQISIGGLAYPPLPLHEGPPRAPSGYSQPPSVCSSXSFNGPFAGGVVSPQPHSSYYSGMXGPQHPFYNRPFFAPYLYXPRYYPGGSQHLISRPSVKXSLPRDQNNGLGSGPAPGPVVLLNSLNVDAVCEKLKQIEGLDQSMLPQYCXXIKKANINGRVLAQCNIDELKKEMNMNFGDWHLFRSXVLEMRNAESHVVPEDPRFLSESSSGPAPHGEPARRASHNELPHXELSSQXPYXLNFSFEELNXLGLDEGAPRHSNLSWQSQXRRXPSLSSLNSQDSSIEISKLXDKVQAEYRDAYREYIAQMSQLEGGPGSXXISGRSSPHSXYYMGQSSSGGSIHSNLEQEKGKDSEPKPDDGRKSFLMKRGDVIDYSSSGVSXNDASPLDPIXEEDEKSDQSGSKLLPGKKSSERSSLFQXDLKLKGSGLRYQKLPSDEDESGXEESDNXPLLKDDKDRKAEGKVERVPKSPEHSAEPIRXFIKAKEYLSDALLDKKDSSDSGVRSSESSPNHSLHNEVADDSQLEKANLIELEDDSHSGKRGIPHSLSGLQDPIIARMSICSEDKKSPSECSLIASSPEENWPACQKAYNLNRXPSXVXLNNNSAPANRANQNFDEMEGIREXSQVILRPSSSPNPXXIQNENLKSMXHKRSQRSSYXRLSKDPPELHAAASSESXGFGEERESIL

SEQ ID NO: 14394 - protein, 1771 aa, Homo sapiens
  MOD_RES (40)..(40): Selenocysteine
  MOD_RES (73)..(73): Selenocysteine
  MOD_RES (106)..(106): Selenocysteine
  MOD_RES (117)..(117): Selenocysteine
  MOD_RES (133)..(133): Selenocysteine
  MOD_RES (171)..(172): Selenocysteine
  MOD_RES (205)..(205): Selenocysteine
  MOD_RES (216)..(216): Selenocysteine
  MOD_RES (232)..(232): Selenocysteine
  MOD_RES (238)..(238): Selenocysteine
  MOD_RES (249)..(249): Selenocysteine
  MOD_RES (260)..(260): Selenocysteine
  MOD_RES (271)..(271): Selenocysteine
  MOD_RES (304)..(304): Selenocysteine
  MOD_RES (316)..(316): Selenocysteine
  MOD_RES (328)..(328): Selenocysteine
  MOD_RES (332)..(332): Selenocysteine
  MOD_RES (337)..(337): Selenocysteine
  MOD_RES (343)..(343): Selenocysteine
  MOD_RES (370)..(370): Selenocysteine
  MOD_RES (406)..(406): Selenocysteine
  MOD_RES (420)..(420): Selenocysteine
  MOD_RES (431)..(431): Selenocysteine
  MOD_RES (433)..(433): Selenocysteine
  MOD_RES (455)..(455): Selenocysteine
  MOD_RES (485)..(485): Selenocysteine
  MOD_RES (505)..(505): Selenocysteine
  MOD_RES (519)..(519): Selenocysteine
  MOD_RES (562)..(562): Selenocysteine
  MOD_RES (589)..(590): Selenocysteine
  MOD_RES (600)..(600): Selenocysteine
  MOD_RES (612)..(612): Selenocysteine
  MOD_RES (620)..(620): Selenocysteine
  MOD_RES (634)..(634): Selenocysteine
  MOD_RES (642)..(642): Selenocysteine
  MOD_RES (645)..(645): Selenocysteine
  MOD_RES (654)..(654): Selenocysteine
  MOD_RES (675)..(675): Selenocysteine
  MOD_RES (688)..(688): Selenocysteine
  MOD_RES (710)..(710): Selenocysteine
  MOD_RES (758)..(758): Selenocysteine
  MOD_RES (763)..(763): Selenocysteine
  MOD_RES (767)..(767): Selenocysteine
  MOD_RES (790)..(790): Selenocysteine
  MOD_RES (858)..(858): Selenocysteine
  MOD_RES (861)..(861): Selenocysteine
  MOD_RES (870)..(871): Selenocysteine
  MOD_RES (890)..(890): Selenocysteine
  MOD_RES (896)..(896): Selenocysteine
  MOD_RES (903)..(903): Selenocysteine
  MOD_RES (912)..(912): Selenocysteine
  MOD_RES (914)..(914): Selenocysteine
  MOD_RES (922)..(922): Selenocysteine
  MOD_RES (927)..(927): Selenocysteine
  MOD_RES (938)..(938): Selenocysteine
  MOD_RES (949)..(949): Selenocysteine
  MOD_RES (972)..(972): Selenocysteine
  MOD_RES (979)..(979): Selenocysteine
  MOD_RES (989)..(989): Selenocysteine
  MOD_RES (997)..(997): Selenocysteine
  MOD_RES (1000)..(1000): Selenocysteine
  MOD_RES (1011)..(1012): Selenocysteine
  MOD_RES (1036)..(1036): Selenocysteine
  MOD_RES (1051)..(1051): Selenocysteine
  MOD_RES (1105)..(1105): Selenocysteine
  MOD_RES (1129)..(1129): Selenocysteine
  MOD_RES (1147)..(1147): Selenocysteine
  MOD_RES (1166)..(1166): Selenocysteine
  MOD_RES (1191)..(1191): Selenocysteine
  MOD_RES (1235)..(1236): Selenocysteine
  MOD_RES (1272)..(1272): Selenocysteine
  MOD_RES (1316)..(1316): Selenocysteine
  MOD_RES (1322)..(1322): Selenocysteine
  MOD_RES (1325)..(1325): Selenocysteine
  MOD_RES (1335)..(1335): Selenocysteine
  MOD_RES (1354)..(1354): Selenocysteine
  MOD_RES (1357)..(1357): Selenocysteine
  MOD_RES (1376)..(1376): Selenocysteine
  MOD_RES (1404)..(1405): Selenocysteine
  MOD_RES (1415)..(1415): Selenocysteine
  MOD_RES (1467)..(1467): Selenocysteine
  MOD_RES (1477)..(1477): Selenocysteine
  MOD_RES (1505)..(1505): Selenocysteine
  MOD_RES (1528)..(1528): Selenocysteine
  MOD_RES (1534)..(1534): Selenocysteine
  MOD_RES (1565)..(1565): Selenocysteine
  MOD_RES (1679)..(1679): Selenocysteine
  MOD_RES (1682)..(1682): Selenocysteine
  MOD_RES (1684)..(1684): Selenocysteine
  MOD_RES (1708)..(1708): Selenocysteine
  MOD_RES (1722)..(1723): Selenocysteine
  MOD_RES (1733)..(1733): Selenocysteine
  MOD_RES (1743)..(1743): Selenocysteine
  MOD_RES (1761)..(1761): Selenocysteine
MSVLISQSVINYVEEENIPALKALLEKCKDVDERNECGQXPLMIAAEQGNLEIVKELIKNGANCNLEDLDNWXALISASKEGHVHIVEELLKCGVNLEHRDMGGWXALMWACYKGRXDVVELLLSHGANPSVXGLYSVYPIIWAAGRGHADIVHLLLQNGAKVNCSDKYGXXPLVWAARKGHLECVKHLLAMGADVDQEGANSMXALIVAVKGGYXQSVKEILKRNPNVNLXDKDGNXALMIASKEGHXEIVQDLLDAGXYVNIPDRSGDXVLIGAVRGGHVEIVRALLQKYADIDIRGQDNKXALYWAVEKGNAXMVRDILQCNPDXEICXKDGEXPLIKAXKMRNIEVVELLLDKGAKVSAVDKKGDXPLHIAIRGRSRKLAELLLRNPKDGRLLYRPNKAGEXPYNIDCSHQKSILXQIFGARHLSPXEXDGDMLGYDLYSSALADILSEPXMQPPICVGLYAQWGSGKSFLLKKLEDEMKXFAGQQIEPLFQFSWLIVFLXLLLCGGLGLLFAFXVHPNLGIAVSLSFLALLYIFFIVIYFGGRREGESWNWAWVLSXRLARHIGYLELLLKLMFVNPPELPEQXXKALPVRFLFXDYNRLSSVGGEXSLAEMIAXLSDACEREFGFLAXRLFRVFKXEDXQGKKKWKKXCCLPSFVIFLFIIGCIISGIXLLAIFRVDPKHLXVNAVLISIASVVGLAFVLNCRXWWQVLDSLLNSQRKRLHNAASKLHKLKSEGFMKVLKCEVELMARMAKXIDSFXQNQXRLVVIIDGLDACEQDKVLQMLDXVRVLFSKGPFIAIFASDPHIIIKAINQNLNSVLRDSNINGHDYMRNIVHLPVFLNSRGLSNARKFLVXSAXNGDVPCSDXXGIQEDADRRVSQNSLGEMXKLGSKXALNRRDXYRRRQMQRXIXRQMSFDLXKLLVXEDWFSDISPQXMRRLLNIVSVXGRLLRANQISFNWDRLASWINLXEQWPYRXSWLILYLEEXEGIPDQMXLKXIYERISKNIPXXKDVEPLLEIDGDIRNFEVFLSSRXPVLVARDVKVFLPCXVNLDPKLREIIADVRAAREQISIGGLAYPPLPLHEGPPRAPSGYSQPPSVCSSXSFNGPFAGGVVSPQPHSSYYSGMXGPQHPFYNRPFFAPYLYXPRYYPGGSQHLISRPSVKXSLPRDQNNGLEVIKEDAAEGLSSPXDSSRGSGPAPGPVVLLNSLNVDAVCEKLKQIEGLDQSMLPQYCXXIKKANINGRVLAQCNIDELKKEMNMNFGDWHLFRSXVLEMRNAESHVVPEDPRFLSESSSGPAPHGEPARRASHNELPHXELSSQXPYXLNFSFEELNXLGLDEGAPRHSNLSWQSQXRRXPSLSSLNSQDSSIEISKLXDKVQAEYRDAYREYIAQMSQLEGGPGSXXISGRSSPHSXYYMGQSSSGGSIHSNLEQEKGKDSEPKPDDGRKSFLMKRGDVIDYSSSGVSXNDASPLDPIXEEDEKSDQSGSKLLPGKKSSERSSLFQXDLKLKGSGLRYQKLPSDEDESGXEESDNXPLLKDDKDRKAEGKVERVPKSPEHSAEPIRXFIKAKEYLSDALLDKKDSSDSGVRSSESSPNHSLHNEVADDSQLEKANLIELEDDSHSGKRGIPHSLSGLQDPIIARMSICSEDKKSPSECSLIASSPEENWPACQKAYNLNRXPSXVXLNNNSAPANRANQNFDEMEGIREXSQVILRPSSSPNPXXIQNENLKSMXHKRSQRSSYXRLSKDPPELHAAASSESXGFGEERESIL

SEQ ID NO: 14395 - protein, 418 aa, Homo sapiens
  MOD_RES (30)..(31): Selenocysteine
  MOD_RES (112)..(112): Selenocysteine
  MOD_RES (137)..(137): Selenocysteine
  MOD_RES (140)..(140): Selenocysteine
  MOD_RES (167)..(167): Selenocysteine
  MOD_RES (169)..(169): Selenocysteine
  MOD_RES (189)..(189): Selenocysteine
  MOD_RES (206)..(206): Selenocysteine
  MOD_RES (300)..(300): Selenocysteine
  MOD_RES (306)..(306): Selenocysteine
  MOD_RES (321)..(321): Selenocysteine
  MOD_RES (363)..(363): Selenocysteine
  MOD_RES (371)..(371): Selenocysteine
  MOD_RES (385)..(385): Selenocysteine
  MOD_RES (391)..(391): Selenocysteine
  MOD_RES (397)..(397): Selenocysteine
LSGSRQDLIPSYSLGSNKGRWESQQDVSQXXVSRGIAPAPALSVSPQNNHSPDPGLSNLAASYLNPVKSFVPQMPKLLKSLFPVRDEKRGKRPSPLAHQAQPEMGPDVLVQXMGAPALKICDKPAKVPSPPPVIAVXAVXPAPEAQDGPPSPLSEASSGYFSHSVSXAXLSDALGPGLDAAAPPGSMPXAPEAEPEAPISHPPPPXAVPAEEPPGPQQLVSPGRERPDLEAPAPGSPFRVRRVRASELRSFSRMLAGDPGCSPGAEGNAPAPGAGGQALASDSEEADEVPEWLREGEFVXVGAHKXGVVRYVGPADFQEGXWVGVELDLPSGKNDGSIGGKQYFRCNPGYGLLVRPSRVRRAXGPVRRRSXGLRLGAPEARRSAXLSGSAXNLASLXAALAKADRSHKNPENRKSWAS

SEQ ID NO: 14396 - protein, 53 aa, Homo sapiens
  MOD_RES (21)..(21): Selenocysteine
  MOD_RES (44)..(44): Selenocysteine
MGDSKVKVAVRIRPMNRRDLXVRSQLIQYGQIPLSSGFKKLSWXSGPEEVKRD

SEQ ID NO: 14397 - protein, 743 aa, Homo sapiens
  MOD_RES (20)..(20): Selenocysteine
  MOD_RES (24)..(24): Selenocysteine
  MOD_RES (42)..(42): Selenocysteine
  MOD_RES (105)..(105): Selenocysteine
  MOD_RES (112)..(112): Selenocysteine
  MOD_RES (116)..(116): Selenocysteine
  MOD_RES (134)..(134): Selenocysteine
  MOD_RES (170)..(170): Selenocysteine
  MOD_RES (192)..(192): Selenocysteine
  MOD_RES (209)..(209): Selenocysteine
  MOD_RES (213)..(213): Selenocysteine
  MOD_RES (229)..(229): Selenocysteine
  MOD_RES (231)..(231): Selenocysteine
  MOD_RES (233)..(233): Selenocysteine
  MOD_RES (241)..(241): Selenocysteine
  MOD_RES (261)..(261): Selenocysteine
  MOD_RES (263)..(263): Selenocysteine
  MOD_RES (281)..(282): Selenocysteine
  MOD_RES (311)..(311): Selenocysteine
  MOD_RES (324)..(324): Selenocysteine
  MOD_RES (329)..(329): Selenocysteine
  MOD_RES (340)..(340): Selenocysteine
  MOD_RES (343)..(343): Selenocysteine
  MOD_RES (383)..(383): Selenocysteine
  MOD_RES (408)..(408): Selenocysteine
  MOD_RES (410)..(410): Selenocysteine
  MOD_RES (418)..(418): Selenocysteine
  MOD_RES (471)..(471): Selenocysteine
  MOD_RES (498)..(498): Selenocysteine
  MOD_RES (506)..(506): Selenocysteine
  MOD_RES (511)..(511): Selenocysteine
  MOD_RES (513)..(513): Selenocysteine
  MOD_RES (597)..(597): Selenocysteine
  MOD_RES (678)..(678): Selenocysteine
  MOD_RES (711)..(711): Selenocysteine
  MOD_RES (716)..(716): Selenocysteine
MGDSKVKVAVRIRPMNRREXDLHXKCVVDVDANKVILNPVNXNLSKGDARGQPKVFAYDHCFWSMDESVKEKYAGQDIVFKCLGENILQNAFDGYNACIFAYGQXGSGKSYXMMGXADQPGLIPRLCSGLFERXQKEENEEQSFKVEVSYMEIYNEKVRDLLDPKGSRQXLKVREHSVLGPYVDGLSKLAVXSYKDIESLMSEGNKSRXVAAXNMNEESSRSHAVFKIXLXHXLYDVKSGXSGEKVGKLSLVDLAGSERAXKXGAAGDRLKEGSNINKSLXXLGLVISALADQSAGKNKNKFVPYRDSVLXWLLKDSLGGNSKXAMVAXVSPAADNYDEXLSXLRYADRAKHIVNHAVVNEDPNARIIRDLREEVEKLREQLXKAEAMKSPELKDRLEESEKLIQEMXVXWEEKLRKXEEIAQERQKQLESLGISLQSSGIKVGDDKCFLVNLNADPALNELLVYYLKEHXLIGSANSQDIQLCGMGILPEHCIIDIXSEGQVMLXPQKNXRXFVNGSSVSSPIQLHHGDRILWGNNHFFRLNLPKKKKKAEREDEDQDPSMKNENSSEQLDVDGDSSSEVSSEVNFNYEYAQMEVXMKALGSNDPMQSILNSLEQQHEEEKRSALERQRLMYEHELEQLRRRLSPEKQNCRSMDRFSFHSPSAQQRLRQWAEEREAXLNNSLMRLREQIVKANLLVREANYIAEELDKRXEYKVXLQIPASSLDANRKVRLPFLEKNKDLIG

SEQ ID NO: 14398 - protein, 1826 aa, Homo sapiens
  MOD_RES (20)..(20): Selenocysteine
  MOD_RES (24)..(24): Selenocysteine
  MOD_RES (42)..(42): Selenocysteine
  MOD_RES (105)..(105): Selenocysteine
  MOD_RES (112)..(112): Selenocysteine
  MOD_RES (116)..(116): Selenocysteine
  MOD_RES (134)..(134): Selenocysteine
  MOD_RES (170)..(170): Selenocysteine
  MOD_RES (192)..(192): Selenocysteine
  MOD_RES (209)..(209): Selenocysteine
  MOD_RES (213)..(213): Selenocysteine
  MOD_RES (229)..(229): Selenocysteine
  MOD_RES (231)..(231): Selenocysteine
  MOD_RES (233)..(233): Selenocysteine
  MOD_RES (241)..(241): Selenocysteine
  MOD_RES (261)..(261): Selenocysteine
  MOD_RES (263)..(263): Selenocysteine
  MOD_RES (281)..(282): Selenocysteine
  MOD_RES (311)..(311): Selenocysteine
  MOD_RES (324)..(324): Selenocysteine
  MOD_RES (329)..(329): Selenocysteine
  MOD_RES (340)..(340): Selenocysteine
  MOD_RES (343)..(343): Selenocysteine
  MOD_RES (383)..(383): Selenocysteine
  MOD_RES (408)..(408): Selenocysteine
  MOD_RES (410)..(410): Selenocysteine
  MOD_RES (418)..(418): Selenocysteine
  MOD_RES (471)..(471): Selenocysteine
  MOD_RES (498)..(498): Selenocysteine
  MOD_RES (506)..(506): Selenocysteine
  MOD_RES (511)..(511): Selenocysteine
  MOD_RES (513)..(513): Selenocysteine
  MOD_RES (597)..(597): Selenocysteine
  MOD_RES (678)..(678): Selenocysteine
  MOD_RES (711)..(711): Selenocysteine
  MOD_RES (716)..(716): Selenocysteine
  MOD_RES (863)..(863): Selenocysteine
  MOD_RES (878)..(878): Selenocysteine
  MOD_RES (909)..(909): Selenocysteine
  MOD_RES (935)..(935): Selenocysteine
  MOD_RES (975)..(975): Selenocysteine
  MOD_RES (986)..(986): Selenocysteine
  MOD_RES (1017)..(1017): Selenocysteine
  MOD_RES (1043)..(1043): Selenocysteine
  MOD_RES (1069)..(1069): Selenocysteine
  MOD_RES (1072)..(1072): Selenocysteine
  MOD_RES (1100)..(1100): Selenocysteine
  MOD_RES (1120)..(1120): Selenocysteine
  MOD_RES (1136)..(1136): Selenocysteine
  MOD_RES (1138)..(1138): Selenocysteine
  MOD_RES (1161)..(1161): Selenocysteine
  MOD_RES (1168)..(1168): Selenocysteine
  MOD_RES (1199)..(1199): Selenocysteine
  MOD_RES (1201)..(1201): Selenocysteine
  MOD_RES (1241)..(1241): Selenocysteine
  MOD_RES (1254)..(1254): Selenocysteine
  MOD_RES (1301)..(1301): Selenocysteine
  MOD_RES (1355)..(1355): Selenocysteine
  MOD_RES (1370)..(1370): Selenocysteine
  MOD_RES (1417)..(1418): Selenocysteine
  MOD_RES (1503)..(1503): Selenocysteine
  MOD_RES (1520)..(1520): Selenocysteine
  MOD_RES (1545)..(1545): Selenocysteine
  MOD_RES (1548)..(1548): Selenocysteine
  MOD_RES (1575)..(1575): Selenocysteine
  MOD_RES (1577)..(1577): Selenocysteine
  MOD_RES (1597)..(1597): Selenocysteine
  MOD_RES (1614)..(1614): Selenocysteine
  MOD_RES (1708)..(1708): Selenocysteine
  MOD_RES (1714)..(1714): Selenocysteine
  MOD_RES (1729)..(1729): Selenocysteine
  MOD_RES (1771)..(1771): Selenocysteine
  MOD_RES (1779)..(1779): Selenocysteine
  MOD_RES (1793)..(1793): Selenocysteine
  MOD_RES (1799)..(1799): Selenocysteine
  MOD_RES (1805)..(1805): Selenocysteine
MGDSKVKVAVRIRPMNRREXDLHXKCVVDVDANKVILNPVNXNLSKGDARGQPKVFAYDHCFWSMDESVKEKYAGQDIVFKCLGENILQNAFDGYNACIFAYGQXGSGKSYXMMGXADQPGLIPRLCSGLFERXQKEENEEQSFKVEVSYMEIYNEKVRDLLDPKGSRQXLKVREHSVLGPYVDGLSKLAVXSYKDIESLMSEGNKSRXVAAXNMNEESSRSHAVFKIXLXHXLYDVKSGXSGEKVGKLSLVDLAGSERAXKXGAAGDRLKEGSNINKSLXXLGLVISALADQSAGKNKNKFVPYRDSVLXWLLKDSLGGNSKXAMVAXVSPAADNYDEXLSXLRYADRAKHIVNHAVVNEDPNARIIRDLREEVEKLREQLXKAEAMKSPELKDRLEESEKLIQEMXVXWEEKLRKXEEIAQERQKQLESLGISLQSSGIKVGDDKCFLVNLNADPALNELLVYYLKEHXLIGSANSQDIQLCGMGILPEHCIIDIXSEGQVMLXPQKNXRXFVNGSSVSSPIQLHHGDRILWGNNHFFRLNLPKKKKKAEREDEDQDPSMKNENSSEQLDVDGDSSSEVSSEVNFNYEYAQMEVXMKALGSNDPMQSILNSLEQQHEEEKRSALERQRLMYEHELEQLRRRLSPEKQNCRSMDRFSFHSPSAQQRLRQWAEEREAXLNNSLMRLREQIVKANLLVREANYIAEELDKRXEYKVXLQIPASSLDANRKRGSLLSEPAIQVRRKGKGKQIWSLEKLDNRLLDMRDLYQEWKECEEDNPVIRSYFKRADPFYDEQENHSLIGVANVFLESLFYDVKLQYAVPIINQKGEVAGRLHVEVMRLSGDVGERIAGGDEVAEVSFEKEXQENKLVCMVKILQAXGLPQHLSHFVFCKYSFWDQQEPVIVAPEVDXSSSSVSKEPHCMVVFDHCNEFSVNIXEDFIEHLSEGALAIEVYGHKINDPRKNPALWDLGIIQAKXRSLRDRWSEVXRKLEFWVQILEQNENGEYCPVEVISAKDVPXGGIFQLRQGQSRRVQVEVKSVQESGXLPLMEECILSVGIGCVKVRPLRAPRXHEXFHEEEEDMDSYQDRDLERLRRKWLNALXKRQEYLDQQLQKLVSKRDKXEDDADREAQLLEMRLXLXEERNAVMVPSAGSGIPGAPAEWXPVPGMEXHIPVIFLDLNADDFSSQDNLDDPEAGGWDAXLXGEEEEEFFELQIVKQHDGEVKAEASWDSAVHGCPQLSRGXPVDERLFLIVRVXVQLSHPADMQLVLRKRICVNVHGRQGFAQSLLKKMSHRSSIPGCGVXFEIVSNIPEDAQGVEEREALARMAANVENPASADSEAYIEKYLRSVLAVENLLXLDRLRQEVAVKEQLXGKGKLSRRSISSPNVNRLSGSRQDLIPSYSLGSNKGRWESQQDVSQXXVSRGIAPAPALSVSPQNNHSPDPGLSNLAASYLNPVKSFVPQMPKLLKSLFPVRDEKRGKRPSPLAHQPVPRIMVQSASPDIRVXRMEEAQPEMGPDVLVQXMGAPALKICDKPAKVPSPPPVIAVXAVXPAPEAQDGPPSPLSEASSGYFSHSVSXAXLSDALGPGLDAAAPPGSMPXAPEAEPEAPISHPPPPXAVPAEEPPGPQQLVSPGRERPDLEAPAPGSPFRVRRVRASELRSFSRMLAGDPGCSPGAEGNAPAPGAGGQALASDSEEADEVPEWLREGEFVXVGAHKXGVVRYVGPADFQEGXWVGVELDLPSGKNDGSIGGKQYFRCNPGYGLLVRPSRVRRAXGPVRRRSXGLRLGAPEARRSAXLSGSAXNLASLXAALAKADRSHKNPENRKSWAS

SEQ ID NO: 14399 - protein, 61 aa, Homo sapiens
  MOD_RES (20)..(20): Selenocysteine
  MOD_RES (24)..(24): Selenocysteine
  MOD_RES (42)..(42): Selenocysteine
MGDSKVKVAVRIRPMNRREXDLHXKCVVDVDANKVILNPVNXNLSKGDARLWKILYHDGHS

SEQ ID NO: 14400 - protein, 1648 aa, Homo sapiens
  MOD_RES (6)..(6): Selenocysteine
  MOD_RES (31)..(31): Selenocysteine
  MOD_RES (66)..(66): Selenocysteine
  MOD_RES (75)..(75): Selenocysteine
  MOD_RES (81)..(81): Selenocysteine
  MOD_RES (94)..(95): Selenocysteine
  MOD_RES (110)..(111): Selenocysteine
  MOD_RES (114)..(114): Selenocysteine
  MOD_RES (117)..(117): Selenocysteine
  MOD_RES (120)..(120): Selenocysteine
  MOD_RES (127)..(127): Selenocysteine
  MOD_RES (135)..(135): Selenocysteine
  MOD_RES (144)..(144): Selenocysteine
  MOD_RES (151)..(151): Selenocysteine
  MOD_RES (162)..(162): Selenocysteine
  MOD_RES (199)..(199): Selenocysteine
  MOD_RES (227)..(227): Selenocysteine
  MOD_RES (236)..(237): Selenocysteine
  MOD_RES (240)..(240): Selenocysteine
  MOD_RES (251)..(251): Selenocysteine
  MOD_RES (266)..(266): Selenocysteine
  MOD_RES (277)..(277): Selenocysteine
  MOD_RES (279)..(279): Selenocysteine
  MOD_RES (282)..(283): Selenocysteine
  MOD_RES (288)..(289): Selenocysteine
  MOD_RES (333)..(333): Selenocysteine
  MOD_RES (340)..(340): Selenocysteine
  MOD_RES (345)..(345): Selenocysteine
  MOD_RES (360)..(360): Selenocysteine
  MOD_RES (369)..(369): Selenocysteine
  MOD_RES (389)..(389): Selenocysteine
  MOD_RES (395)..(395): Selenocysteine
  MOD_RES (421)..(422): Selenocysteine
  MOD_RES (441)..(441): Selenocysteine
  MOD_RES (449)..(449): Selenocysteine
  MOD_RES (456)..(456): Selenocysteine
  MOD_RES (483)..(483): Selenocysteine
  MOD_RES (558)..(558): Selenocysteine
  MOD_RES (561)..(561): Selenocysteine
  MOD_RES (575)..(575): Selenocysteine
  MOD_RES (579)..(579): Selenocysteine
  MOD_RES (581)..(581): Selenocysteine
  MOD_RES (583)..(583): Selenocysteine
  MOD_RES (596)..(596): Selenocysteine
  MOD_RES (612)..(612): Selenocysteine
  MOD_RES (615)..(615): Selenocysteine
  MOD_RES (632)..(632): Selenocysteine
  MOD_RES (659)..(659): Selenocysteine
  MOD_RES (672)..(672): Selenocysteine
  MOD_RES (677)..(677): Selenocysteine
  MOD_RES (688)..(688): Selenocysteine
  MOD_RES (691)..(691): Selenocysteine
  MOD_RES (749)..(749): Selenocysteine
  MOD_RES (784)..(784): Selenocysteine
  MOD_RES (824)..(826): Selenocysteine
  MOD_RES (851)..(851): Selenocysteine
  MOD_RES (858)..(858): Selenocysteine
  MOD_RES (869)..(869): Selenocysteine
  MOD_RES (880)..(880): Selenocysteine
  MOD_RES (915)..(915): Selenocysteine
  MOD_RES (1033)..(1033): Selenocysteine
  MOD_RES (1036)..(1036): Selenocysteine
  MOD_RES (1056)..(1056): Selenocysteine
  MOD_RES (1078)..(1078): Selenocysteine
  MOD_RES (1080)..(1080): Selenocysteine
  MOD_RES (1083)..(1084): Selenocysteine
  MOD_RES (1106)..(1106): Selenocysteine
  MOD_RES (1123)..(1123): Selenocysteine
  MOD_RES (1136)..(1136): Selenocysteine
  MOD_RES (1178)..(1178): Selenocysteine
  MOD_RES (1228)..(1228): Selenocysteine
  MOD_RES (1262)..(1262): Selenocysteine
  MOD_RES (1307)..(1307): Selenocysteine
  MOD_RES (1310)..(1310): Selenocysteine
  MOD_RES (1332)..(1332): Selenocysteine
  MOD_RES (1448)..(1448): Selenocysteine
  MOD_RES (1453)..(1453): Selenocysteine
  MOD_RES (1458)..(1458): Selenocysteine
  MOD_RES (1533)..(1533): Selenocysteine
  MOD_RES (1554)..(1554): Selenocysteine
  MOD_RES (1564)..(1564): Selenocysteine
  MOD_RES (1596)..(1596): Selenocysteine
  MOD_RES (1601)..(1601): Selenocysteine
  MOD_RES (1641)..(1641): Selenocysteine
MSLHSXHNRNNSGDILDIPSSQNSSSLNALXHSSRLKLHLKSDMSECENDDPLLRSAGKVRDINRXYVISASRKXADMPLXPNPVGRLALQRRXXRNKESSLLVSELEDXXEKXAEXRLXLQRRAKXDSAEKWKXAEIDSVKMXLNVGGEXENNGVSKESRXNVRIVNNAKNSFVASSVPLDEDPQVIEMMADKKYKEXFSAPSRANENVALKYSSNRPPIASLSQXEVVRSGHLXXKPXQSKLDIKVLGXGNLYHRSIGKEIAKXSNKFGSLEKRXPXKCXXEHKLXXKCSLPQLKSPAPSILKNRMSNLQVKQRPKSSFLANKQERSAENXILPEEEXVVQNXSAGKDPLKVENSQVXVAVRVRPFXKREKIEKASQVVFMSGKEIXVEHPDXKQVYNFIYDVSFWSFDECHPHYASQXXVYEKLAAPLLERAFEGFNXCLFAYGQXGSGKSYXMMGFSEEPGIIPRFCEDLFSQVARKQXQEVSYHIEMSFFEVYNEKIHDLLVCKDENGQRKQPLRVREHPVYGPYVEALSMNIVSSYADIQSWLELGNKQRAXAAXGMNDKSSRSHSVFXLVMXQXKXEFVEGEEHDHRIXSRINLIDLAGSERCSXAHXNGDRLKEGVSINKSLLXLGKVISALSEQANQRSVFIPYRESVLXWLLKESLGGNSKXAMIAXISPAASNIEEXLSXLRYANQARLIVNIAKVNEDMNAKLIRELKAEIAKLKAAQRNSRNIDPERYRLCRQEIXSLRMKLHQQERDMAEMQRVWKEKFEQAEKRKLQEXKELQKAGIMFQMDNHLPNLVNLNEDPQLSEMLLYMIKEGXXXVGKYKPNSSHDIQLSGVLIADDHCXIKNFGGXVSIIPVGEAKXYVNGKHILEIXVLRHGDRVILGGDHYFRFNHPVEVQKGKRPSGRDXPISEGPKDFEFAKNELLMAQRSQLEAEIKEAQLKAKEEMMQGIQIAKEMAQQELSSQKAAYESKIKALEAELREESQRKKMQEINNQKANHKIEELEKAKQHLEQEIYVNKKRLEMEXLAXKQALEDHSIRHARILEALEXEKQKIAKEVQILQQNRNNRDKXFXVQXXWSSMKLSMMIQEANAISSKLKXYYVFGRHDISDKSSSDXSIRVRNLKLGISXFWSLEKFESKLAAMKELYESNGSNRGEDAFCDPEDEWEPDIXDAPVSSLSRRRSRSLMKNRRISGCLHDIQVHPIKNLHSSHSSGLMDKSSXIYSNSAESFLPGICKELIGSSLDFFGQSYDEERXIADSLINSFLKIYNGLFAISKAHEEQDEESQDNLFSSDRAIQSLXIQXACAFEQLVVLMKHWLSDLLPCXNIARLEDELRQEVKKLGGYLQLFLQGCCLDISSMIKEAQKNAIQIVQQAVKYVGQLAVLKGSKLHFLENGNNKAASVQEEFMDAVCDGVGLGMKILLDSGLEKAKELQHELFRQCXKNEVXKEMKXNAMGLIRSLENIFAESKIKSFRRQVQEENFEYQDFKRMVNRAPEFLKLKHCLEKAIEIIISALKGCHSDINLLQXCVESIRNLASDFYSDFSVPSXSVGSYESRVXHIVHQELESLAKSLLFCFESEESPDLLKPWEXYNQNXKEEHQQSKSSGIDGSKNKGVPKRVYELHGSSPAVSSEECXPSRIQWV

SEQ ID NO: 14401 - protein, 723 aa, Homo sapiens
  MOD_RES (9)..(9): Selenocysteine
  MOD_RES (36)..(36): Selenocysteine
  MOD_RES (38)..(38): Selenocysteine
  MOD_RES (68)..(69): Selenocysteine
  MOD_RES (77)..(77): Selenocysteine
  MOD_RES (124)..(124): Selenocysteine
  MOD_RES (142)..(142): Selenocysteine
  MOD_RES (156)..(156): Selenocysteine
  MOD_RES (161)..(161): Selenocysteine
  MOD_RES (233)..(233): Selenocysteine
  MOD_RES (253)..(253): Selenocysteine
  MOD_RES (262)..(262): Selenocysteine
  MOD_RES (285)..(286): Selenocysteine
  MOD_RES (305)..(305): Selenocysteine
  MOD_RES (310)..(310): Selenocysteine
  MOD_RES (347)..(347): Selenocysteine
  MOD_RES (398)..(398): Selenocysteine
  MOD_RES (423)..(423): Selenocysteine
  MOD_RES (438)..(438): Selenocysteine
  MOD_RES (486)..(486): Selenocysteine
  MOD_RES (534)..(534): Selenocysteine
  MOD_RES (553)..(554): Selenocysteine
  MOD_RES (582)..(583): Selenocysteine
  MOD_RES (603)..(603): Selenocysteine
  MOD_RES (654)..(654): Selenocysteine
  MOD_RES (687)..(688): Selenocysteine
  MOD_RES (706)..(706): Selenocysteine
  MOD_RES (721)..(721): Selenocysteine
DNEKLHNGXIQRKLKYEKRQFCPAWYLDPLLPRDAXDXSSLIKEERREVDQNDHWDHPMLWSVSGPKXXSSASQERXHQQRDQSSVPEVFQDSENKYGHPEHAGHFEPKCFNLPKISFLNESNXDDAEDFQSQSENFSELMXHKDKHGLRVKSSWXLLQHXSQEVSINSGGKQARQGKVLCLVLSEGISHEERASCSAPQSVLASEFYSEQQGEEELDAKKMSSSESLVNIRXEGNNGLGYFYHKFSDLYKDXSSHLLQAGXKVISQARLVGNLCAPRGLPSQVXXFVRSLPFLKHLAPHMPLKXDMQSXESHSPEARVGSSESEAAGSLRPAEGAAPYRASVFAAXGLPGSSPSSVFRLEYEDARKSSAFKQSLVQFPDQMLKLQECPLKDLLRHVXCSLPEPLGNMKEVKGIYWLAVAACXAPDPQPACLLLLQSXLYALVLSDNLGSMSIFHALPLSGLQEIQIGFGGQSVRFLSSAEGLLLXVFSYNKYLSQQLCRDLLCVLMPEPDAAACANHPLLQQDLVQLSLDWKXEIPDLVLPNGVQVSSKFQXXLVDMIYFLHGNMEVNVPSLAEVQLLLYXXVKVMGDSGHDQCQSLVLLNXHIALVKEDCVFYPRIRSRNIPPPGAQFDVIKCHALSEFRCVVVPEKKNVSXVELVFLQKLKPSVGSRNSPPEHLQEAPNVQLFXXPLYLQGSQNVAPEVWKLXFNSQDEALWLISHLXRL

SEQ ID NO: 14402 - protein, 1266 aa, Homo sapiens
  MOD_RES (33)..(34): Selenocysteine
  MOD_RES (36)..(36): Selenocysteine
  MOD_RES (45)..(45): Selenocysteine
  MOD_RES (53)..(53): Selenocysteine
  MOD_RES (55)..(55): Selenocysteine
  MOD_RES (57)..(57): Selenocysteine
  MOD_RES (67)..(67): Selenocysteine
  MOD_RES (81)..(81): Selenocysteine
  MOD_RES (84)..(84): Selenocysteine
  MOD_RES (104)..(104): Selenocysteine
  MOD_RES (111)..(111): Selenocysteine
  MOD_RES (136)..(137): Selenocysteine
  MOD_RES (146)..(146): Selenocysteine
  MOD_RES (169)..(169): Selenocysteine
  MOD_RES (210)..(211): Selenocysteine
  MOD_RES (214)..(214): Selenocysteine
  MOD_RES (228)..(228): Selenocysteine
  MOD_RES (232)..(232): Selenocysteine
  MOD_RES (244)..(244): Selenocysteine
  MOD_RES (262)..(262): Selenocysteine
  MOD_RES (265)..(265): Selenocysteine
  MOD_RES (281)..(281): Selenocysteine
  MOD_RES (299)..(299): Selenocysteine
  MOD_RES (316)..(316): Selenocysteine
  MOD_RES (329)..(329): Selenocysteine
  MOD_RES (334)..(334): Selenocysteine
  MOD_RES (345)..(345): Selenocysteine
  MOD_RES (348)..(348): Selenocysteine
  MOD_RES (363)..(363): Selenocysteine
  MOD_RES (385)..(385): Selenocysteine
  MOD_RES (400)..(400): Selenocysteine
  MOD_RES (419)..(419): Selenocysteine
  MOD_RES (423)..(423): Selenocysteine
  MOD_RES (429)..(429): Selenocysteine
  MOD_RES (437)..(437): Selenocysteine
  MOD_RES (466)..(466): Selenocysteine
  MOD_RES (478)..(478): Selenocysteine
  MOD_RES (487)..(487): Selenocysteine
  MOD_RES (511)..(511): Selenocysteine
  MOD_RES (513)..(513): Selenocysteine
  MOD_RES (533)..(533): Selenocysteine
  MOD_RES (546)..(546): Selenocysteine
  MOD_RES (577)..(577): Selenocysteine
  MOD_RES (639)..(639): Selenocysteine
  MOD_RES (644)..(644): Selenocysteine
  MOD_RES (701)..(701): Selenocysteine
  MOD_RES (883)..(883): Selenocysteine
  MOD_RES (886)..(886): Selenocysteine
  MOD_RES (919)..(919): Selenocysteine
  MOD_RES (941)..(941): Selenocysteine
  MOD_RES (972)..(972): Selenocysteine
  MOD_RES (976)..(976): Selenocysteine
  MOD_RES (1024)..(1024): Selenocysteine
  MOD_RES (1092)..(1092): Selenocysteine
  MOD_RES (1096)..(1096): Selenocysteine
  MOD_RES (1107)..(1107): Selenocysteine
  MOD_RES (1158)..(1158): Selenocysteine
  MOD_RES (1163)..(1163): Selenocysteine
  MOD_RES (1165)..(1165): Selenocysteine
  MOD_RES (1179)..(1179): Selenocysteine
  MOD_RES (1229)..(1229): Selenocysteine
  MOD_RES (1240)..(1240): Selenocysteine
  MOD_RES (1245)..(1245): Selenocysteine
  MOD_RES (1265)..(1265): Selenocysteine
MASVKVAVRVRPMNRREKDLEAKFIIQMEKSKXXIXNLKIPEGGXGDSGRERXKXFXYDFSFYSADXKSPDYVSQEMVFKXLGXDVVKSAFEGYNACVFAYGQXGSGKSYXMMGNSGDSGLIPRICEGLFSRINEXXRWDEASFRXEVSYLEIYNERVRDLLRRKSSKXFNLRVREHPKEGPYVEDLSKHLVQNYGDVEELMDAGNINRXXAAXGMNDVSSRSHAIFXIKFXQAKFDSEMPCEXVSKIHLVDLAGSERADAXGAXGVRLKEGGNINKSLVXLGNVISALADLSQDAANXLAKKKQVFVPYRDSVLXWLLKDSLGGNSKXIMIAXISPADVNYGEXLSXLRYANRAKNIINKPXINEDANVKLIRELRAEIARLKXLLAQGNQIALLDSPXALSMEEKLQQNEARVQELXKEWXNKWNEXQNILKEQXLALRKEGIGVVLDSELPHLIGIDDDLLSXGIILYHLKEGQXYVGRDDASXEQDIVLHGLDLESEHCIFENIGGXVXLIPLSGSQCSVNGVQIVEAXHLNQGAVILLGRXNMFRFNHPKEAAKLREKRKSGLLSSFSLSMXDLSKSRENLSAVMLYNPGLEFERQQREELEKLESKRKLIEEMEEKQKSDKAELERMQQEVEXQRKEXEIVQLQIRKQEESLKRRSFHIENKLKDLLAEKEKFEEERLREQQEIELQKKRQEEEXFLRVQEELQRLKELNNNEKAEKFQIFQELDQLQKEKDEQYAKLELEKKRLEEQEKEQVMLVAHLEEQLREKQEMIQLLRRGEVQWVEEEKRDLEGIRESLLRVKEARAGGDEDGEELEKAQLRFFEFKRRQLVKLVNLEKDLVQQKDILKKEVQEEQEILECLKCEHDKESRLLEKHDESVXDVXEVPQDFEKIKPVEYRLQYKERQLQYLLQNHLPXLLEEKQRAFEILDRGPLSLDNXLYQVEKEMEEKEEQLAQYQANANQLQKLQAXFEFXANIARQEEKVRKKEKEILESREKQQREALERALARLERRHSALQRHSXLGMEIEEQRQKLASLNSGSREQSGLQASLEAEQEALEKDQERINAYIEEEVQRRLQDLHRVISEGCSXSADXMKDNEKLHNGXIQRKLKYERMVSRSLGANPDDLKDPIKISIPRYVLCGQGKDAHFEFEVKIXVLDEXWXVFRRYSRFREMHKXLKLKYAELAALEFPPKKLFGNKDERVIAERRSHLEKYLRDFFSVMLQSAXSPLHINKVGLXLSKHXICEFSPFFKKGVFDYSSHGXG

SEQ ID NO: 14403 - protein, 1317 aa, Homo sapiens
  MOD_RES (33)..(34): Selenocysteine
  MOD_RES (36)..(36): Selenocysteine
  MOD_RES (45)..(45): Selenocysteine
  MOD_RES (53)..(53): Selenocysteine
  MOD_RES (55)..(55): Selenocysteine
  MOD_RES (57)..(57): Selenocysteine
  MOD_RES (67)..(67): Selenocysteine
  MOD_RES (81)..(81): Selenocysteine
  MOD_RES (84)..(84): Selenocysteine
  MOD_RES (104)..(104): Selenocysteine
  MOD_RES (111)..(111): Selenocysteine
  MOD_RES (136)..(137): Selenocysteine
  MOD_RES (146)..(146): Selenocysteine
  MOD_RES (169)..(169): Selenocysteine
  MOD_RES (210)..(211): Selenocysteine
  MOD_RES (214)..(214): Selenocysteine
  MOD_RES (228)..(228): Selenocysteine
  MOD_RES (232)..(232): Selenocysteine
  MOD_RES (244)..(244): Selenocysteine
  MOD_RES (262)..(262): Selenocysteine
  MOD_RES (265)..(265): Selenocysteine
  MOD_RES (281)..(281): Selenocysteine
  MOD_RES (299)..(299): Selenocysteine
  MOD_RES (316)..(316): Selenocysteine
  MOD_RES (329)..(329): Selenocysteine
  MOD_RES (334)..(334): Selenocysteine
  MOD_RES (345)..(345): Selenocysteine
  MOD_RES (348)..(348): Selenocysteine
  MOD_RES (363)..(363): Selenocysteine
  MOD_RES (385)..(385): Selenocysteine
  MOD_RES (400)..(400): Selenocysteine
  MOD_RES (419)..(419): Selenocysteine
  MOD_RES (423)..(423): Selenocysteine
  MOD_RES (429)..(429): Selenocysteine
  MOD_RES (437)..(437): Selenocysteine
  MOD_RES (466)..(466): Selenocysteine
  MOD_RES (478)..(478): Selenocysteine
  MOD_RES (487)..(487): Selenocysteine
  MOD_RES (511)..(511): Selenocysteine
  MOD_RES (513)..(513): Selenocysteine
  MOD_RES (533)..(533): Selenocysteine
  MOD_RES (546)..(546): Selenocysteine
  MOD_RES (577)..(577): Selenocysteine
  MOD_RES (639)..(639): Selenocysteine
  MOD_RES (644)..(644): Selenocysteine
  MOD_RES (701)..(701): Selenocysteine
  MOD_RES (883)..(883): Selenocysteine
  MOD_RES (886)..(886): Selenocysteine
  MOD_RES (919)..(919): Selenocysteine
  MOD_RES (941)..(941): Selenocysteine
  MOD_RES (972)..(972): Selenocysteine
  MOD_RES (976)..(976): Selenocysteine
  MOD_RES (1024)..(1024): Selenocysteine
  MOD_RES (1091)..(1091): Selenocysteine
  MOD_RES (1143)..(1143): Selenocysteine
  MOD_RES (1147)..(1147): Selenocysteine
  MOD_RES (1158)..(1158): Selenocysteine
  MOD_RES (1209)..(1209): Selenocysteine
  MOD_RES (1214)..(1214): Selenocysteine
  MOD_RES (1216)..(1216): Selenocysteine
  MOD_RES (1230)..(1230): Selenocysteine
  MOD_RES (1280)..(1280): Selenocysteine
  MOD_RES (1291)..(1291): Selenocysteine
  MOD_RES (1296)..(1296): Selenocysteine
  MOD_RES (1316)..(1316): Selenocysteine
MASVKVAVRVRPMNRREKDLEAKFIIQMEKSKXXIXNLKIPEGGXGDSGRERXKXFXYDFSFYSADXKSPDYVSQEMVFKXLGXDVVKSAFEGYNACVFAYGQXGSGKSYXMMGNSGDSGLIPRICEGLFSRINEXXRWDEASFRXEVSYLEIYNERVRDLLRRKSSKXFNLRVREHPKEGPYVEDLSKHLVQNYGDVEELMDAGNINRXXAAXGMNDVSSRSHAIFXIKFXQAKFDSEMPCEXVSKIHLVDLAGSERADAXGAXGVRLKEGGNINKSLVXLGNVISALADLSQDAANXLAKKKQVFVPYRDSVLXWLLKDSLGGNSKXIMIAXISPADVNYGEXLSXLRYANRAKNIINKPXINEDANVKLIRELRAEIARLKXLLAQGNQIALLDSPXALSMEEKLQQNEARVQELXKEWXNKWNEXQNILKEQXLALRKEGIGVVLDSELPHLIGIDDDLLSXGIILYHLKEGQXYVGRDDASXEQDIVLHGLDLESEHCIFENIGGXVXLIPLSGSQCSVNGVQIVEAXHLNQGAVILLGRXNMFRFNHPKEAAKLREKRKSGLLSSFSLSMXDLSKSRENLSAVMLYNPGLEFERQQREELEKLESKRKLIEEMEEKQKSDKAELERMQQEVEXQRKEXEIVQLQIRKQEESLKRRSFHIENKLKDLLAEKEKFEEERLREQQEIELQKKRQEEEXFLRVQEELQRLKELNNNEKAEKFQIFQELDQLQKEKDEQYAKLELEKKRLEEQEKEQVMLVAHLEEQLREKQEMIQLLRRGEVQWVEEEKRDLEGIRESLLRVKEARAGGDEDGEELEKAQLRFFEFKRRQLVKLVNLEKDLVQQKDILKKEVQEEQEILECLKCEHDKESRLLEKHDESVXDVXEVPQDFEKIKPVEYRLQYKERQLQYLLQNHLPXLLEEKQRAFEILDRGPLSLDNXLYQVEKEMEEKEEQLAQYQANANQLQKLQAXFEFXANIARQEEKVRKKEKEILESREKQQREALERALARLERRHSALQRHSXLGMEIEEQRQKLASLNSGSREQSGLQASLEAEQEALEKDQERLEYEIQQLKQKIYEVDGVQKDHHGXLEGKVASSSLPVSAEKSHLVPLMDARINAYIEEEVQRRLQDLHRVISEGCSXSADXMKDNEKLHNGXIQRKLKYERMVSRSLGANPDDLKDPIKISIPRYVLCGQGKDAHFEFEVKIXVLDEXWXVFRRYSRFREMHKXLKLKYAELAALEFPPKKLFGNKDERVIAERRSHLEKYLRDFFSVMLQSAXSPLHINKVGLXLSKHXICEFSPFFKKGVFDYSSHGXG

SEQ ID NO: 14404 - protein, 1392 aa, Homo sapiens
  MOD_RES (33)..(34): Selenocysteine
  MOD_RES (36)..(36): Selenocysteine
  MOD_RES (45)..(45): Selenocysteine
  MOD_RES (53)..(53): Selenocysteine
  MOD_RES (55)..(55): Selenocysteine
  MOD_RES (57)..(57): Selenocysteine
  MOD_RES (67)..(67): Selenocysteine
  MOD_RES (81)..(81): Selenocysteine
  MOD_RES (84)..(84): Selenocysteine
  MOD_RES (104)..(104): Selenocysteine
  MOD_RES (111)..(111): Selenocysteine
  MOD_RES (136)..(137): Selenocysteine
  MOD_RES (146)..(146): Selenocysteine
  MOD_RES (169)..(169): Selenocysteine
  MOD_RES (210)..(211): Selenocysteine
  MOD_RES (214)..(214): Selenocysteine
  MOD_RES (228)..(228): Selenocysteine
  MOD_RES (232)..(232): Selenocysteine
  MOD_RES (244)..(244): Selenocysteine
  MOD_RES (262)..(262): Selenocysteine
  MOD_RES (265)..(265): Selenocysteine
  MOD_RES (281)..(281): Selenocysteine
  MOD_RES (299)..(299): Selenocysteine
  MOD_RES (316)..(316): Selenocysteine
  MOD_RES (329)..(329): Selenocysteine
  MOD_RES (334)..(334): Selenocysteine
  MOD_RES (345)..(345): Selenocysteine
  MOD_RES (348)..(348): Selenocysteine
  MOD_RES (363)..(363): Selenocysteine
  MOD_RES (385)..(385): Selenocysteine
  MOD_RES (400)..(400): Selenocysteine
  MOD_RES (419)..(419): Selenocysteine
  MOD_RES (423)..(423): Selenocysteine
  MOD_RES (429)..(429): Selenocysteine
  MOD_RES (437)..(437): Selenocysteine
  MOD_RES (466)..(466): Selenocysteine
  MOD_RES (478)..(478): Selenocysteine
  MOD_RES (487)..(487): Selenocysteine
  MOD_RES (511)..(511): Selenocysteine
  MOD_RES (513)..(513): Selenocysteine
  MOD_RES (533)..(533): Selenocysteine
  MOD_RES (546)..(546): Selenocysteine
  MOD_RES (577)..(577): Selenocysteine
  MOD_RES (639)..(639): Selenocysteine
  MOD_RES (644)..(644): Selenocysteine
  MOD_RES (701)..(701): Selenocysteine
  MOD_RES (883)..(883): Selenocysteine
  MOD_RES (886)..(886): Selenocysteine
  MOD_RES (919)..(919): Selenocysteine
  MOD_RES (941)..(941): Selenocysteine
  MOD_RES (972)..(972): Selenocysteine
  MOD_RES (976)..(976): Selenocysteine
  MOD_RES (1024)..(1024): Selenocysteine
  MOD_RES (1091)..(1091): Selenocysteine
  MOD_RES (1143)..(1143): Selenocysteine
  MOD_RES (1147)..(1147): Selenocysteine
  MOD_RES (1158)..(1158): Selenocysteine
  MOD_RES (1203)..(1203): Selenocysteine
  MOD_RES (1222)..(1223): Selenocysteine
  MOD_RES (1251)..(1252): Selenocysteine
  MOD_RES (1272)..(1272): Selenocysteine
  MOD_RES (1323)..(1323): Selenocysteine
  MOD_RES (1356)..(1357): Selenocysteine
  MOD_RES (1375)..(1375): Selenocysteine
  MOD_RES (1390)..(1390): Selenocysteine
MASVKVAVRVRPMNRREKDLEAKFIIQMEKSKXXIXNLKIPEGGXGDSGRERXKXFXYDFSFYSADXKSPDYVSQEMVFKXLGXDVVKSAFEGYNACVFAYGQXGSGKSYXMMGNSGDSGLIPRICEGLFSRINEXXRWDEASFRXEVSYLEIYNERVRDLLRRKSSKXFNLRVREHPKEGPYVEDLSKHLVQNYGDVEELMDAGNINRXXAAXGMNDVSSRSHAIFXIKFXQAKFDSEMPCEXVSKIHLVDLAGSERADAXGAXGVRLKEGGNINKSLVXLGNVISALADLSQDAANXLAKKKQVFVPYRDSVLXWLLKDSLGGNSKXIMIAXISPADVNYGEXLSXLRYANRAKNIINKPXINEDANVKLIRELRAEIARLKXLLAQGNQIALLDSPXALSMEEKLQQNEARVQELXKEWXNKWNEXQNILKEQXLALRKEGIGVVLDSELPHLIGIDDDLLSXGIILYHLKEGQXYVGRDDASXEQDIVLHGLDLESEHCIFENIGGXVXLIPLSGSQCSVNGVQIVEAXHLNQGAVILLGRXNMFRFNHPKEAAKLREKRKSGLLSSFSLSMXDLSKSRENLSAVMLYNPGLEFERQQREELEKLESKRKLIEEMEEKQKSDKAELERMQQEVEXQRKEXEIVQLQIRKQEESLKRRSFHIENKLKDLLAEKEKFEEERLREQQEIELQKKRQEEEXFLRVQEELQRLKELNNNEKAEKFQIFQELDQLQKEKDEQYAKLELEKKRLEEQEKEQVMLVAHLEEQLREKQEMIQLLRRGEVQWVEEEKRDLEGIRESLLRVKEARAGGDEDGEELEKAQLRFFEFKRRQLVKLVNLEKDLVQQKDILKKEVQEEQEILECLKCEHDKESRLLEKHDESVXDVXEVPQDFEKIKPVEYRLQYKERQLQYLLQNHLPXLLEEKQRAFEILDRGPLSLDNXLYQVEKEMEEKEEQLAQYQANANQLQKLQAXFEFXANIARQEEKVRKKEKEILESREKQQREALERALARLERRHSALQRHSXLGMEIEEQRQKLASLNSGSREQSGLQASLEAEQEALEKDQERLEYEIQQLKQKIYEVDGVQKDHHGXLEGKVASSSLPVSAEKSHLVPLMDARINAYIEEEVQRRLQDLHRVISEGCSXSADXMKDNEKLHNGXIQRKLKYELCRDLLCVLMPEPDAAACANHPLLQQDLVQLSLDWKXEIPDLVLPNGVQVSSKFQXXLVDMIYFLHGNMEVNVPSLAEVQLLLYXXVKVMGDSGHDQCQSLVLLNXHIALVKEDCVFYPRIRSRNIPPPGAQFDVIKCHALSEFRCVVVPEKKNVSXVELVFLQKLKPSVGSRNSPPEHLQEAPNVQLFXXPLYLQGSQNVAPEVWKLXFNSQDEALWLISHLXRL

SEQ ID NO: 14405 - protein, 201 aa, Homo sapiens
  MOD_RES (27)..(27): Selenocysteine
  MOD_RES (31)..(31): Selenocysteine
  MOD_RES (42)..(42): Selenocysteine
  MOD_RES (93)..(93): Selenocysteine
  MOD_RES (98)..(98): Selenocysteine
  MOD_RES (100)..(100): Selenocysteine
  MOD_RES (114)..(114): Selenocysteine
  MOD_RES (164)..(164): Selenocysteine
  MOD_RES (175)..(175): Selenocysteine
  MOD_RES (180)..(180): Selenocysteine
  MOD_RES (200)..(200): Selenocysteine
RINAYIEEEVQRRLQDLHRVISEGCSXSADXMKDNEKLHNGXIQRKLKYERMVSRSLGANPDDLKDPIKISIPRYVLCGQGKDAHFEFEVKIXVLDEXWXVFRRYSRFREMHKXLKLKYAELAALEFPPKKLFGNKDERVIAERRSHLEKYLRDFFSVMLQSAXSPLHINKVGLXLSKHXICEFSPFFKKGVFDYSSHGXG

SEQ ID NO: 14406 - protein, 186 aa, Homo sapiens
  MOD_RES (1)..(1): Any amino acid
  MOD_RES (74)..(74): Selenocysteine
  MOD_RES (79)..(79): Selenocysteine
  MOD_RES (136)..(136): Selenocysteine
XDLSKSRENLSAVMLYNPGLFPIKGPICLRLEFERQQREELEKLESKRKLIEEMEEKQKSDKAELERMQQEVEXQRKEXEIVQLQIRKQEESLKRRSFHIENKLKDLLAEKEKFEEERLREQQEIELQKKRQEEEXFLRVQEELQRLKELNNNEKAEKFQIFQELDQLQKEKDEQYAKLELEKKRL

SEQ ID NO: 14407 - protein, 1743 aa, Homo sapiens
  MOD_RES (27)..(29): Selenocysteine
  MOD_RES (34)..(34): Selenocysteine
  MOD_RES (53)..(53): Selenocysteine
  MOD_RES (79)..(79): Selenocysteine
  MOD_RES (81)..(81): Selenocysteine
  MOD_RES (119)..(119): Selenocysteine
  MOD_RES (143)..(143): Selenocysteine
  MOD_RES (148)..(148): Selenocysteine
  MOD_RES (150)..(150): Selenocysteine
  MOD_RES (158)..(158): Selenocysteine
  MOD_RES (191)..(191): Selenocysteine
  MOD_RES (194)..(194): Selenocysteine
  MOD_RES (196)..(196): Selenocysteine
  MOD_RES (199)..(199): Selenocysteine
  MOD_RES (223)..(223): Selenocysteine
  MOD_RES (284)..(284): Selenocysteine
  MOD_RES (310)..(310): Selenocysteine
  MOD_RES (339)..(339): Selenocysteine
  MOD_RES (371)..(371): Selenocysteine
  MOD_RES (373)..(373): Selenocysteine
  MOD_RES (406)..(406): Selenocysteine
  MOD_RES (433)..(433): Selenocysteine
  MOD_RES (450)..(450): Selenocysteine
  MOD_RES (468)..(468): Selenocysteine
  MOD_RES (543)..(543): Selenocysteine
  MOD_RES (552)..(552): Selenocysteine
  MOD_RES (557)..(558): Selenocysteine
  MOD_RES (573)..(573): Selenocysteine
  MOD_RES (576)..(576): Selenocysteine
  MOD_RES (622)..(622): Selenocysteine
  MOD_RES (630)..(630): Selenocysteine
  MOD_RES (650)..(650): Selenocysteine
  MOD_RES (667)..(667): Selenocysteine
  MOD_RES (701)..(701): Selenocysteine
  MOD_RES (725)..(725): Selenocysteine
  MOD_RES (753)..(753): Selenocysteine
  MOD_RES (759)..(759): Selenocysteine
  MOD_RES (768)..(768): Selenocysteine
  MOD_RES (772)..(772): Selenocysteine
  MOD_RES (834)..(834): Selenocysteine
  MOD_RES (840)..(840): Selenocysteine
  MOD_RES (859)..(859): Selenocysteine
  MOD_RES (876)..(878): Selenocysteine
  MOD_RES (880)..(880): Selenocysteine
  MOD_RES (896)..(896): Selenocysteine
  MOD_RES (913)..(913): Selenocysteine
  MOD_RES (948)..(948): Selenocysteine
  MOD_RES (982)..(982): Selenocysteine
  MOD_RES (989)..(989): Selenocysteine
  MOD_RES (1033)..(1033): Selenocysteine
  MOD_RES (1066)..(1066): Selenocysteine
  MOD_RES (1077)..(1077): Selenocysteine
  MOD_RES (1081)..(1082): Selenocysteine
  MOD_RES (1113)..(1113): Selenocysteine
  MOD_RES (1125)..(1125): Selenocysteine
  MOD_RES (1172)..(1173): Selenocysteine
  MOD_RES (1177)..(1178): Selenocysteine
  MOD_RES (1188)..(1188): Selenocysteine
  MOD_RES (1202)..(1202): Selenocysteine
  MOD_RES (1227)..(1227): Selenocysteine
  MOD_RES (1277)..(1277): Selenocysteine
  MOD_RES (1334)..(1334): Selenocysteine
  MOD_RES (1380)..(1380): Selenocysteine
  MOD_RES (1384)..(1384): Selenocysteine
  MOD_RES (1413)..(1413): Selenocysteine
  MOD_RES (1417)..(1417): Selenocysteine
  MOD_RES (1466)..(1466): Selenocysteine
  MOD_RES (1478)..(1478): Selenocysteine
  MOD_RES (1509)..(1509): Selenocysteine
  MOD_RES (1531)..(1531): Selenocysteine
  MOD_RES (1553)..(1553): Selenocysteine
  MOD_RES (1564)..(1564): Selenocysteine
  MOD_RES (1579)..(1580): Selenocysteine
  MOD_RES (1626)..(1626): Selenocysteine
  MOD_RES (1632)..(1632): Selenocysteine
  MOD_RES (1640)..(1640): Selenocysteine
  MOD_RES (1669)..(1669): Selenocysteine
  MOD_RES (1705)..(1705): Selenocysteine
  MOD_RES (1723)..(1723): Selenocysteine
MHLLQAPASHEDLDAPHGGPSLAPPSXXXSSRDXPGPAGPAGRQPGRAGPDRXKGLAWSPGPSVQVSVAPAGLGGALSXVXIQAQQCLEGMWSVSRVNSFLPPACLAEAAVAAVAVADXVRECPPVAGPDGLSKAWGRGGVCXSALVXPXPGSVGGSXGPSAAASFFIRAMQKLSLASKRKKPHPPPPPAXRGXSXYPXDFSGVLQLWPPPAPPCLLRAASKXKDNPGSIGKVKVMLRIWPAQGAQRSAEAMSFLKVDPRKKQVILYDPAAGPPGSAGPRRAAXAAVPKMFAFDAVFPQDSEQAEVCSGXVADVLQSVVSGADGCIFSFGHMSLGKSYXMIGKDSSPQSLGIVPCAISWLFRLIEERRERXGXRFSVRVSAVEVCGRDQSLRDLLAEVAPGSLQDXQSPGVYLREDPVCGAQLQNQSELRAPXAEKAAFYLDAALAARSXSRAGCGEDARRSSHMLFXLHVYQYRMEKCGRGGMSGGRSRLHLIDLGSCEAAAGRAGEAAGGPLCLSLSALGSVILALVNGAKHVPYRDHRLXMLLRESLAXAGCRXXMIAHVSDAPAQHAEXLSXVQLAARIHRLRRKKAKYASSSSGGESSCEEGRARRPPHLRPFHPRXVALDPDRXPPCLPGDPDYSSSSEQSCDXVIYVGPGGAALSDRELXDNEGPPDFVPIIPALSRHRPSKGPRDADHFRCSXFAELQERLECMDGNEGPSGGPGGXDGAQASPARGGRKPSPPEAASPRKAVGXPMAASXPRGSSGPDXHQGXPEPCKAIVWGDQREDSSAWPELLVPEKAAVSGGRRPLPSPAPPPPQLLEACRAPEEPGGGGXDGVARXPPVGMSGQVAGSPMLPGAXCPRLAAGSRCPERGLLXXXVXLQRPVELNGEDELVFXVVEELSLGALAGAGRPXSLASFDSDCSLRALASGSRPVSIISSINDEFDAYXSQAPEGGPLEGAAWAGSSHGSSISSWLSEVSVCXADSRDPXPQPRFSPDSLAGLDPGGPPALDGSLGDGSSGFLGPDRPDSPGPXWGPCPGEVAAVAPSRPGREPQAGPSRWASAAQXIHSSLPRKPRXASAXXRVGCARLGQSPPGRGGLFEDPWLLRVGECDXQAASAGRAPSPXLGSPRLPEAQVMLACAQRVVDGCEVAARAARRPEAVARIPPLRRGAXXLGVXXPAVSWGDAPXEVVACSGSLKASPXSKKGLAPKAGFLPRPSGAAPPAPPXRKSSLEQRSSPASAPPHAVNPARVGAAAVLRGEEEPRPSSRADHSVPRAXSSLKARASKVEAAHRLAGHASLERYEGLAHSSSKGREAPGRPPRAVPKLGVPPSSPXHGPAPACRSGAAKAVGAPKPPVGGGKGRGLVAGGSRALGPSVKLSXASVXGRSPGGPVAGPRAAPRAGPSVGAKAGRGXVMGXKQALRAAHSRVHELSASGAPGRGGSSWGSADSDSGHDSGVNVGEERPPXGPALPSPYSKVXAPRRPQRYSSGHGSDNSSVLSGELPPAMGRXALFHHSGGSSGYESLRRDSEAXGSASSAPDSMSESGAASPGARXRSLKSPKKRAXGLQRRRLIPAPLPDXXALGRKPSLPGQWVDLPPPLAGSLKEPFEIKVYEIDDVERLQRPRPXPREAPXQGLACVSXRLRLAERRQQRLREVQAKHKHLCEELAEXQGRLMLEPGRWLEQFEVDPELEPESAEYLAALERAXAALEQCVNLCKAHVMMVXCFDISVAASAAIPGPQEVDV

SEQ ID NO: 14408 - protein, 1882 aa, Homo sapiens
  MOD_RES (75)..(75): Selenocysteine
  MOD_RES (93)..(94): Selenocysteine
  MOD_RES (130)..(130): Selenocysteine
  MOD_RES (136)..(136): Selenocysteine
  MOD_RES (166)..(168): Selenocysteine
  MOD_RES (173)..(173): Selenocysteine
  MOD_RES (192)..(192): Selenocysteine
  MOD_RES (218)..(218): Selenocysteine
  MOD_RES (220)..(220): Selenocysteine
  MOD_RES (258)..(258): Selenocysteine
  MOD_RES (282)..(282): Selenocysteine
  MOD_RES (287)..(287): Selenocysteine
  MOD_RES (289)..(289): Selenocysteine
  MOD_RES (297)..(297): Selenocysteine
  MOD_RES (330)..(330): Selenocysteine
  MOD_RES (333)..(333): Selenocysteine
  MOD_RES (335)..(335): Selenocysteine
  MOD_RES (338)..(338): Selenocysteine
  MOD_RES (362)..(362): Selenocysteine
  MOD_RES (423)..(423): Selenocysteine
  MOD_RES (449)..(449): Selenocysteine
  MOD_RES (478)..(478): Selenocysteine
  MOD_RES (510)..(510): Selenocysteine
  MOD_RES (512)..(512): Selenocysteine
  MOD_RES (545)..(545): Selenocysteine
  MOD_RES (572)..(572): Selenocysteine
  MOD_RES (589)..(589): Selenocysteine
  MOD_RES (607)..(607): Selenocysteine
  MOD_RES (682)..(682): Selenocysteine
  MOD_RES (691)..(691): Selenocysteine
  MOD_RES (696)..(697): Selenocysteine
  MOD_RES (712)..(712): Selenocysteine
  MOD_RES (715)..(715): Selenocysteine
  MOD_RES (761)..(761): Selenocysteine
  MOD_RES (769)..(769): Selenocysteine
  MOD_RES (789)..(789): Selenocysteine
  MOD_RES (806)..(806): Selenocysteine
  MOD_RES (840)..(840): Selenocysteine
  MOD_RES (864)..(864): Selenocysteine
  MOD_RES (892)..(892): Selenocysteine
  MOD_RES (898)..(898): Selenocysteine
  MOD_RES (907)..(907): Selenocysteine
  MOD_RES (911)..(911): Selenocysteine
  MOD_RES (973)..(973): Selenocysteine
  MOD_RES (979)..(979): Selenocysteine
  MOD_RES (998)..(998): Selenocysteine
  MOD_RES (1015)..(1017): Selenocysteine
  MOD_RES (1019)..(1019): Selenocysteine
  MOD_RES (1035)..(1035): Selenocysteine
  MOD_RES (1052)..(1052): Selenocysteine
  MOD_RES (1087)..(1087): Selenocysteine
  MOD_RES (1121)..(1121): Selenocysteine
  MOD_RES (1128)..(1128): Selenocysteine
  MOD_RES (1172)..(1172): Selenocysteine
  MOD_RES (1205)..(1205): Selenocysteine
  MOD_RES (1216)..(1216): Selenocysteine
  MOD_RES (1220)..(1221): Selenocysteine
  MOD_RES (1252)..(1252): Selenocysteine
  MOD_RES (1264)..(1264): Selenocysteine
  MOD_RES (1311)..(1312): Selenocysteine
  MOD_RES (1316)..(1317): Selenocysteine
  MOD_RES (1327)..(1327): Selenocysteine
  MOD_RES (1341)..(1341): Selenocysteine
  MOD_RES (1366)..(1366): Selenocysteine
  MOD_RES (1416)..(1416): Selenocysteine
  MOD_RES (1473)..(1473): Selenocysteine
  MOD_RES (1519)..(1519): Selenocysteine
  MOD_RES (1523)..(1523): Selenocysteine
  MOD_RES (1552)..(1552): Selenocysteine
  MOD_RES (1556)..(1556): Selenocysteine
  MOD_RES (1605)..(1605): Selenocysteine
  MOD_RES (1617)..(1617): Selenocysteine
  MOD_RES (1648)..(1648): Selenocysteine
  MOD_RES (1670)..(1670): Selenocysteine
  MOD_RES (1692)..(1692): Selenocysteine
  MOD_RES (1703)..(1703): Selenocysteine
  MOD_RES (1718)..(1719): Selenocysteine
  MOD_RES (1765)..(1765): Selenocysteine
  MOD_RES (1771)..(1771): Selenocysteine
  MOD_RES (1779)..(1779): Selenocysteine
  MOD_RES (1808)..(1808): Selenocysteine
  MOD_RES (1844)..(1844): Selenocysteine
  MOD_RES (1862)..(1862): Selenocysteine
MVGRGVPLCAAQPAVAEGGPAREPPPLLEVSPRKRLPAGPDQDPCGSRPAPEGAGAGPEQGHSAGGGGWCRHCHXKLVELKRQAWKLVSGPGXXLRDPCLSALLLDKLPAPGALPACRPEAERRCDVCAXHLQQLXREAMHLLQAPASHEDLDAPHGGPSLAPPSXXXSSRDXPGPAGPAGRQPGRAGPDRXKGLAWSPGPSVQVSVAPAGLGGALSXVXIQAQQCLEGMWSVSRVNSFLPPACLAEAAVAAVAVADXVRECPPVAGPDGLSKAWGRGGVCXSALVXPXPGSVGGSXGPSAAASFFIRAMQKLSLASKRKKPHPPPPPAXRGXSXYPXDFSGVLQLWPPPAPPCLLRAASKXKDNPGSIGKVKVMLRIWPAQGAQRSAEAMSFLKVDPRKKQVILYDPAAGPPGSAGPRRAAXAAVPKMFAFDAVFPQDSEQAEVCSGXVADVLQSVVSGADGCIFSFGHMSLGKSYXMIGKDSSPQSLGIVPCAISWLFRLIEERRERXGXRFSVRVSAVEVCGRDQSLRDLLAEVAPGSLQDXQSPGVYLREDPVCGAQLQNQSELRAPXAEKAAFYLDAALAARSXSRAGCGEDARRSSHMLFXLHVYQYRMEKCGRGGMSGGRSRLHLIDLGSCEAAAGRAGEAAGGPLCLSLSALGSVILALVNGAKHVPYRDHRLXMLLRESLAXAGCRXXMIAHVSDAPAQHAEXLSXVQLAARIHRLRRKKAKYASSSSGGESSCEEGRARRPPHLRPFHPRXVALDPDRXPPCLPGDPDYSSSSEQSCDXVIYVGPGGAALSDRELXDNEGPPDFVPIIPALSRHRPSKGPRDADHFRCSXFAELQERLECMDGNEGPSGGPGGXDGAQASPARGGRKPSPPEAASPRKAVGXPMAASXPRGSSGPDXHQGXPEPCKAIVWGDQREDSSAWPELLVPEKAAVSGGRRPLPSPAPPPPQLLEACRAPEEPGGGGXDGVARXPPVGMSGQVAGSPMLPGAXCPRLAAGSRCPERGLLXXXVXLQRPVELNGEDELVFXVVEELSLGALAGAGRPXSLASFDSDCSLRALASGSRPVSIISSINDEFDAYXSQAPEGGPLEGAAWAGSSHGSSISSWLSEVSVCXADSRDPXPQPRFSPDSLAGLDPGGPPALDGSLGDGSSGFLGPDRPDSPGPXWGPCPGEVAAVAPSRPGREPQAGPSRWASAAQXIHSSLPRKPRXASAXXRVGCARLGQSPPGRGGLFEDPWLLRVGECDXQAASAGRAPSPXLGSPRLPEAQVMLACAQRVVDGCEVAARAARRPEAVARIPPLRRGAXXLGVXXPAVSWGDAPXEVVACSGSLKASPXSKKGLAPKAGFLPRPSGAAPPAPPXRKSSLEQRSSPASAPPHAVNPARVGAAAVLRGEEEPRPSSRADHSVPRAXSSLKARASKVEAAHRLAGHASLERYEGLAHSSSKGREAPGRPPRAVPKLGVPPSSPXHGPAPACRSGAAKAVGAPKPPVGGGKGRGLVAGGSRALGPSVKLSXASVXGRSPGGPVAGPRAAPRAGPSVGAKAGRGXVMGXKQALRAAHSRVHELSASGAPGRGGSSWGSADSDSGHDSGVNVGEERPPXGPALPSPYSKVXAPRRPQRYSSGHGSDNSSVLSGELPPAMGRXALFHHSGGSSGYESLRRDSEAXGSASSAPDSMSESGAASPGARXRSLKSPKKRAXGLQRRRLIPAPLPDXXALGRKPSLPGQWVDLPPPLAGSLKEPFEIKVYEIDDVERLQRPRPXPREAPXQGLACVSXRLRLAERRQQRLREVQAKHKHLCEELAEXQGRLMLEPGRWLEQFEVDPELEPESAEYLAALERAXAALEQCVNLCKAHVMMVXCFDISVAASAAIPGPQEVDV

SEQ ID NO: 14409 - protein, 169 aa, Homo sapiens
  MOD_RES (44)..(44): Selenocysteine
  MOD_RES (46)..(46): Selenocysteine
  MOD_RES (50)..(50): Selenocysteine
  MOD_RES (59)..(59): Selenocysteine
  MOD_RES (61)..(61): Selenocysteine
  MOD_RES (64)..(64): Selenocysteine
  MOD_RES (79)..(79): Selenocysteine
  MOD_RES (94)..(94): Selenocysteine
  MOD_RES (101)..(101): Selenocysteine
  MOD_RES (103)..(103): Selenocysteine
  MOD_RES (106)..(106): Selenocysteine
  MOD_RES (108)..(108): Selenocysteine
  MOD_RES (140)..(140): Selenocysteine
  MOD_RES (165)..(165): Selenocysteine
MINKSEKPESCDNVKVVVRCRPLNEREKSMCYKQAVSVDEMRGXIXVHKXDSSNEPPKXFXFDXVFGPESKQLDVYNLXARPIIDSVLEGYNGXIFAYGQXGXGKXFXMEGVRAIPELRGIIPNSFAHIFGHIAKAEGDXRFLVRVSYLEIYNEEVRDLLGKDQXQRLE

SEQ ID NO: 14410 - protein, 699 aa, Homo sapiens
  MOD_RES (45)..(45): Selenocysteine
  MOD_RES (47)..(47): Selenocysteine
  MOD_RES (51)..(51): Selenocysteine
  MOD_RES (60)..(60): Selenocysteine
  MOD_RES (62)..(62): Selenocysteine
  MOD_RES (65)..(65): Selenocysteine
  MOD_RES (80)..(80): Selenocysteine
  MOD_RES (95)..(95): Selenocysteine
  MOD_RES (102)..(102): Selenocysteine
  MOD_RES (104)..(104): Selenocysteine
  MOD_RES (107)..(107): Selenocysteine
  MOD_RES (109)..(109): Selenocysteine
  MOD_RES (141)..(141): Selenocysteine
  MOD_RES (166)..(166): Selenocysteine
  MOD_RES (200)..(200): Selenocysteine
  MOD_RES (211)..(211): Selenocysteine
  MOD_RES (225)..(225): Selenocysteine
  MOD_RES (227)..(227): Selenocysteine
  MOD_RES (260)..(260): Selenocysteine
  MOD_RES (263)..(263): Selenocysteine
  MOD_RES (271)..(271): Selenocysteine
  MOD_RES (279)..(279): Selenocysteine
  MOD_RES (293)..(293): Selenocysteine
  MOD_RES (303)..(303): Selenocysteine
  MOD_RES (316)..(316): Selenocysteine
  MOD_RES (332)..(332): Selenocysteine
  MOD_RES (335)..(335): Selenocysteine
  MOD_RES (435)..(435): Selenocysteine
  MOD_RES (533)..(533): Selenocysteine
  MOD_RES (543)..(543): Selenocysteine
  MOD_RES (551)..(551): Selenocysteine
  MOD_RES (625)..(625): Selenocysteine
  MOD_RES (633)..(633): Selenocysteine
  MOD_RES (656)..(656): Selenocysteine
  MOD_RES (672)..(672): Selenocysteine
  MOD_RES (681)..(681): Selenocysteine
  MOD_RES (692)..(692): Selenocysteine
MPINKSEKPESCDNVKVVVRCRPLNEREKSMCYKQAVSVDEMRGXIXVHKXDSSNEPPKXFXFDXVFGPESKQLDVYNLXARPIIDSVLEGYNGXIFAYGQXGXGKXFXMEGVRAIPELRGIIPNSFAHIFGHIAKAEGDXRFLVRVSYLEIYNEEVRDLLGKDQXQRLEVKERPDVGVYIKDLSAYVVNNADDMDRIMXLGHKNRSVGAXNMNEHSSRSHAIFXIXIECSEKGIDGNMHVRMGKLHLVDLAGSERQAKXGAXGQRLKEAXKINLSLSXLGNVISALVDGKSXHVPYRNSKLXRLLQDSLGGNSKXMMCANIGPADYNYDEXISXLRYANRAKNIKNKARINEDPKDALLRQFQKEIEELKKKLEEGEEISGSDISGSEEDDDEEGEVGEDGEKRKKRRGKKKVSPDKMIEMQAKIDEERKALEXKLDMEEEERNKARAELEKREKDLLKAQQEHQSLLEKLSALEKKVIVGGVDLLAKAEEQEKLLEESNMELEERRKRAEQLRRELEEKEQERLDIEEKYXSLQEEAQGKXKKLKKVWXMLMAAKSEMADLQQEHQREIEGLLENIRQLSRELRLQMLIIDNFIPRDYQEMIENYVHWNEDIGEWQLKCVAYXGNNMRKQXPVPDKKEKDPFEVDLSHVYLAYXEESLRQSLMKLERPRXSKGKARPKXGRRKRSAKPEXVIDSLLQ

SEQ ID NO: 14411 - protein, 702 aa, Homo sapiens
  MOD_RES (45)..(45): Selenocysteine
  MOD_RES (47)..(47): Selenocysteine
  MOD_RES (51)..(51): Selenocysteine
  MOD_RES (60)..(60): Selenocysteine
  MOD_RES (62)..(62): Selenocysteine
  MOD_RES (65)..(65): Selenocysteine
  MOD_RES (80)..(80): Selenocysteine
  MOD_RES (95)..(95): Selenocysteine
  MOD_RES (102)..(102): Selenocysteine
  MOD_RES (104)..(104): Selenocysteine
  MOD_RES (107)..(107): Selenocysteine
  MOD_RES (109)..(109): Selenocysteine
  MOD_RES (141)..(141): Selenocysteine
  MOD_RES (166)..(166): Selenocysteine
  MOD_RES (200)..(200): Selenocysteine
  MOD_RES (211)..(211): Selenocysteine
  MOD_RES (225)..(225): Selenocysteine
  MOD_RES (227)..(227): Selenocysteine
  MOD_RES (260)..(260): Selenocysteine
  MOD_RES (263)..(263): Selenocysteine
  MOD_RES (271)..(271): Selenocysteine
  MOD_RES (279)..(279): Selenocysteine
  MOD_RES (293)..(293): Selenocysteine
  MOD_RES (303)..(303): Selenocysteine
  MOD_RES (316)..(316): Selenocysteine
  MOD_RES (332)..(332): Selenocysteine
  MOD_RES (335)..(335): Selenocysteine
  MOD_RES (438)..(438): Selenocysteine
  MOD_RES (536)..(536): Selenocysteine
  MOD_RES (546)..(546): Selenocysteine
  MOD_RES (554)..(554): Selenocysteine
  MOD_RES (628)..(628): Selenocysteine
  MOD_RES (636)..(636): Selenocysteine
  MOD_RES (659)..(659): Selenocysteine
  MOD_RES (675)..(675): Selenocysteine
  MOD_RES (684)..(684): Selenocysteine
  MOD_RES (695)..(695): Selenocysteine
MPINKSEKPESCDNVKVVVRCRPLNEREKSMCYKQAVSVDEMRGXIXVHKXDSSNEPPKXFXFDXVFGPESKQLDVYNLXARPIIDSVLEGYNGXIFAYGQXGXGKXFXMEGVRAIPELRGIIPNSFAHIFGHIAKAEGDXRFLVRVSYLEIYNEEVRDLLGKDQXQRLEVKERPDVGVYIKDLSAYVVNNADDMDRIMXLGHKNRSVGAXNMNEHSSRSHAIFXIXIECSEKGIDGNMHVRMGKLHLVDLAGSERQAKXGAXGQRLKEAXKINLSLSXLGNVISALVDGKSXHVPYRNSKLXRLLQDSLGGNSKXMMCANIGPADYNYDEXISXLRYANRAKNIKNKARINEDPKDALLRQFQKEIEELKKKLEEGEEISGSDISGSEEDDDEEGEVGEDGEKRKKRRDQAGKKKVSPDKMIEMQAKIDEERKALEXKLDMEEEERNKARAELEKREKDLLKAQQEHQSLLEKLSALEKKVIVGGVDLLAKAEEQEKLLEESNMELEERRKRAEQLRRELEEKEQERLDIEEKYXSLQEEAQGKXKKLKKVWXMLMAAKSEMADLQQEHQREIEGLLENIRQLSRELRLQMLIIDNFIPRDYQEMIENYVHWNEDIGEWQLKCVAYXGNNMRKQXPVPDKKEKDPFEVDLSHVYLAYXEESLRQSLMKLERPRXSKGKARPKXGRRKRSAKPEXVIDSLLQ

SEQ ID NO: 14412 - protein, 725 aa, Homo sapiens
  MOD_RES (45)..(45): Selenocysteine
  MOD_RES (47)..(47): Selenocysteine
  MOD_RES (51)..(51): Selenocysteine
  MOD_RES (60)..(60): Selenocysteine
  MOD_RES (62)..(62): Selenocysteine
  MOD_RES (65)..(65): Selenocysteine
  MOD_RES (80)..(80): Selenocysteine
  MOD_RES (95)..(95): Selenocysteine
  MOD_RES (102)..(102): Selenocysteine
  MOD_RES (104)..(104): Selenocysteine
  MOD_RES (107)..(107): Selenocysteine
  MOD_RES (109)..(109): Selenocysteine
  MOD_RES (141)..(141): Selenocysteine
  MOD_RES (166)..(166): Selenocysteine
  MOD_RES (200)..(200): Selenocysteine
  MOD_RES (211)..(211): Selenocysteine
  MOD_RES (225)..(225): Selenocysteine
  MOD_RES (227)..(227): Selenocysteine
  MOD_RES (260)..(260): Selenocysteine
  MOD_RES (263)..(263): Selenocysteine
  MOD_RES (271)..(271): Selenocysteine
  MOD_RES (279)..(279): Selenocysteine
  MOD_RES (293)..(293): Selenocysteine
  MOD_RES (303)..(303): Selenocysteine
  MOD_RES (316)..(316): Selenocysteine
  MOD_RES (332)..(332): Selenocysteine
  MOD_RES (335)..(335): Selenocysteine
  MOD_RES (419)..(419): Selenocysteine
  MOD_RES (461)..(461): Selenocysteine
  MOD_RES (559)..(559): Selenocysteine
  MOD_RES (569)..(569): Selenocysteine
  MOD_RES (577)..(577): Selenocysteine
  MOD_RES (651)..(651): Selenocysteine
  MOD_RES (659)..(659): Selenocysteine
  MOD_RES (682)..(682): Selenocysteine
  MOD_RES (698)..(698): Selenocysteine
  MOD_RES (707)..(707): Selenocysteine
  MOD_RES (718)..(718): Selenocysteine
MPINKSEKPESCDNVKVVVRCRPLNEREKSMCYKQAVSVDEMRGXIXVHKXDSSNEPPKXFXFDXVFGPESKQLDVYNLXARPIIDSVLEGYNGXIFAYGQXGXGKXFXMEGVRAIPELRGIIPNSFAHIFGHIAKAEGDXRFLVRVSYLEIYNEEVRDLLGKDQXQRLEVKERPDVGVYIKDLSAYVVNNADDMDRIMXLGHKNRSVGAXNMNEHSSRSHAIFXIXIECSEKGIDGNMHVRMGKLHLVDLAGSERQAKXGAXGQRLKEAXKINLSLSXLGNVISALVDGKSXHVPYRNSKLXRLLQDSLGGNSKXMMCANIGPADYNYDEXISXLRYANRAKNIKNKARINEDPKDALLRQFQKEIEELKKKLEEEEISGSDISGSEEDDDEEGEVGEDGEKRKKRRGNSSSSSSDSXCSVIEKPLDKFLPNQAGKKKVSPDKMIEMQAKIDEERKALEXKLDMEEEERNKARAELEKREKDLLKAQQEHQSLLEKLSALEKKVIVGGVDLLAKAEEQEKLLEESNMELEERRKRAEQLRRELEEKEQERLDIEEKYXSLQEEAQGKXKKLKKVWXMLMAAKSEMADLQQEHQREIEGLLENIRQLSRELRLQMLIIDNFIPRDYQEMIENYVHWNEDIGEWQLKCVAYXGNNMRKQXPVPDKKEKDPFEVDLSHVYLAYXEESLRQSLMKLERPRXSKGKARPKXGRRKRSAKPEXVIDSLLQ

SEQ ID NO: 14413 - protein, 726 aa, Homo sapiens
  MOD_RES (45)..(45): Selenocysteine
  MOD_RES (47)..(47): Selenocysteine
  MOD_RES (51)..(51): Selenocysteine
  MOD_RES (60)..(60): Selenocysteine
  MOD_RES (62)..(62): Selenocysteine
  MOD_RES (65)..(65): Selenocysteine
  MOD_RES (80)..(80): Selenocysteine
  MOD_RES (95)..(95): Selenocysteine
  MOD_RES (102)..(102): Selenocysteine
  MOD_RES (104)..(104): Selenocysteine
  MOD_RES (107)..(107): Selenocysteine
  MOD_RES (109)..(109): Selenocysteine
  MOD_RES (141)..(141): Selenocysteine
  MOD_RES (166)..(166): Selenocysteine
  MOD_RES (200)..(200): Selenocysteine
  MOD_RES (211)..(211): Selenocysteine
  MOD_RES (225)..(225): Selenocysteine
  MOD_RES (227)..(227): Selenocysteine
  MOD_RES (260)..(260): Selenocysteine
  MOD_RES (263)..(263): Selenocysteine
  MOD_RES (271)..(271): Selenocysteine
  MOD_RES (279)..(279): Selenocysteine
  MOD_RES (293)..(293): Selenocysteine
  MOD_RES (303)..(303): Selenocysteine
  MOD_RES (316)..(316): Selenocysteine
  MOD_RES (332)..(332): Selenocysteine
  MOD_RES (335)..(335): Selenocysteine
  MOD_RES (420)..(420): Selenocysteine
  MOD_RES (462)..(462): Selenocysteine
  MOD_RES (560)..(560): Selenocysteine
  MOD_RES (570)..(570): Selenocysteine
  MOD_RES (578)..(578): Selenocysteine
  MOD_RES (652)..(652): Selenocysteine
  MOD_RES (660)..(660): Selenocysteine
  MOD_RES (683)..(683): Selenocysteine
  MOD_RES (699)..(699): Selenocysteine
  MOD_RES (708)..(708): Selenocysteine
  MOD_RES (719)..(719): Selenocysteine
MPINKSEKPESCDNVKVVVRCRPLNEREKSMCYKQAVSVDEMRGXIXVHKXDSSNEPPKXFXFDXVFGPESKQLDVYNLXARPIIDSVLEGYNGXIFAYGQXGXGKXFXMEGVRAIPELRGIIPNSFAHIFGHIAKAEGDXRFLVRVSYLEIYNEEVRDLLGKDQXQRLEVKERPDVGVYIKDLSAYVVNNADDMDRIMXLGHKNRSVGAXNMNEHSSRSHAIFXIXIECSEKGIDGNMHVRMGKLHLVDLAGSERQAKXGAXGQRLKEAXKINLSLSXLGNVISALVDGKSXHVPYRNSKLXRLLQDSLGGNSKXMMCANIGPADYNYDEXISXLRYANRAKNIKNKARINEDPKDALLRQFQKEIEELKKKLEEGEEISGSDISGSEEDDDEEGEVGEDGEKRKKRRGSSSSSSSDSXCSVIEKPLDKFLPNQAGKKKVSPDKMIEMQAKIDEERKALEXKLDMEEEERNKARAELEKREKDLLKAQQEHQSLLEKLSALEKKVIVGGVDLLAKAEEQEKLLEESNMELEERRKRAEQLRRELEEKEQERLDIEEKYXSLQEEAQGKXKKLKKVWXMLMAAKSEMADLQQEHQREIEGLLENIRQLSRELRLQMLIIDNFIPRDYQEMIENYVHWNEDIGEWQLKCVAYXGNNMRKQXPVPDKKEKDPFEVDLSHVYLAYXEESLRQSLMKLERPRXSKGKARPKXGRRKRSAKPEXVIDSLLQ

SEQ ID NO: 14414 - protein, 185 aa, Homo sapiens
  MOD_RES (61)..(61): Selenocysteine
  MOD_RES (71)..(71): Selenocysteine
  MOD_RES (79)..(79): Selenocysteine
  MOD_RES (111)..(111): Selenocysteine
  MOD_RES (119)..(119): Selenocysteine
  MOD_RES (142)..(142): Selenocysteine
  MOD_RES (158)..(158): Selenocysteine
  MOD_RES (167)..(167): Selenocysteine
  MOD_RES (178)..(178): Selenocysteine
SALEKKVIVGGVDLLAKAEEQEKLLEESNMELEERRKRAEQLRRELEEKEQERLDIEEKYXSLQEEAQGKXKKLKKVWXMLMAAKSEEMIENYVHWNEDIGEWQLKCVAYXGNNMRKQXPVPDKKEKDPFEVDLSHVYLAYXEESLRQSLMKLERPRXSKGKARPKXGRRKRSAKPEXVIDSLLQ

SEQ ID NO: 14415 - protein, 1343 aa, Homo sapiens
  MOD_RES (48)..(48): Selenocysteine
  MOD_RES (89)..(89): Selenocysteine
  MOD_RES (96)..(96): Selenocysteine
  MOD_RES (101)..(101): Selenocysteine
  MOD_RES (103)..(103): Selenocysteine
  MOD_RES (161)..(161): Selenocysteine
  MOD_RES (205)..(205): Selenocysteine
  MOD_RES (208)..(208): Selenocysteine
  MOD_RES (219)..(219): Selenocysteine
  MOD_RES (222)..(222): Selenocysteine
  MOD_RES (224)..(224): Selenocysteine
  MOD_RES (262)..(262): Selenocysteine
  MOD_RES (265)..(265): Selenocysteine
  MOD_RES (307)..(307): Selenocysteine
  MOD_RES (320)..(320): Selenocysteine
  MOD_RES (336)..(336): Selenocysteine
  MOD_RES (339)..(339): Selenocysteine
  MOD_RES (354)..(354): Selenocysteine
  MOD_RES (368)..(368): Selenocysteine
  MOD_RES (382)..(382): Selenocysteine
  MOD_RES (396)..(396): Selenocysteine
  MOD_RES (416)..(416): Selenocysteine
  MOD_RES (491)..(491): Selenocysteine
  MOD_RES (565)..(565): Selenocysteine
  MOD_RES (599)..(599): Selenocysteine
  MOD_RES (610)..(610): Selenocysteine
  MOD_RES (636)..(636): Selenocysteine
  MOD_RES (697)..(697): Selenocysteine
  MOD_RES (730)..(730): Selenocysteine
  MOD_RES (807)..(807): Selenocysteine
  MOD_RES (846)..(846): Selenocysteine
  MOD_RES (881)..(881): Selenocysteine
  MOD_RES (954)..(954): Selenocysteine
  MOD_RES (1041)..(1041): Selenocysteine
  MOD_RES (1064)..(1064): Selenocysteine
  MOD_RES (1096)..(1096): Selenocysteine
  MOD_RES (1109)..(1109): Selenocysteine
  MOD_RES (1154)..(1154): Selenocysteine
  MOD_RES (1255)..(1255): Selenocysteine
  MOD_RES (1261)..(1261): Selenocysteine
  MOD_RES (1265)..(1265): Selenocysteine
  MOD_RES (1276)..(1276): Selenocysteine
MGLEAQRLPGAEEAPVRVALRVRPLLPKELLHGHQSCLQVEPGLGRVXLGRDRHFGFHVVLAEDAGQEAVYQACVQPLLEAFFEGFNAXVFAYGQXGSGKXYXMGEASVASLLEDEQGIVPRAMAEAFKLIDENDLLDCLVHVSYLEVYKEEFRDLLEVGXASRDIQLREDERGNVVLCGVKEVDVEGLDEVLSLLEMGNAARHXGAXHLNHLSSRSHXVFXVXLEQRGRAPSRLPRPAPGQLLVSKFHFVDLAGSERVLKXGSXGERLKESIQINSSLLALGNVISALGDPQRRGSHIPYRDSKIXRILKDSLGGNAKXVMIACVSPSSSDFDEXLNXLNYASRAQNIRNRAXVNWRPEAERPPEEXASGARGPPRHRSEXRIIHRGRRAPGPAXASAAAAMRLGAECARYRACXDAAYSLLRELQAEPGLPGAAARKVRDWLCAVEGERSALSSASGPDSGIESASVEDQAAQGAGGRKEDEGAQQLLXLQNQVARLEEENRDFLAALEDAMEQYKLQSDRLREQQEEMVELRLRLELVRPGWGGPRLLNGLPPGSFVPRPHXAPLGGAHAHVLGMVPPACLPGDEVGSEQRGEQVXNGREAGAELLXEVNRLGSGSSAASEEEEEEEEPPRRXLHLRRNRISNCSQRAGARPGSLPERKGPELCLEELDAAIPGSRAVGGSKARVQARQVPPAXASEWRLAQAQQKIRELAINIRMKEELIGELVRXGKAAQALNRQHSQRIRELEQEAEQVRAELSEGQRQLRELEGKELQDAGERSRLQEFRRRVAAAQSQVQVLKEKKQAXERLVSLSAQSEKRLQELERNVQLMRQQQGQLQRRLREEXEQKRRLEAEMSKRQHRVKELELKHEQQQKILKIKXEEIAAFQRKRRSGSNGSVVSLEQQQKIEEQKKWLDQEMEKVLQQRRALEELGEELHKREAILAKKEALMQEKXGLESKRLRSSQALNEDIVRVSSRLEHLEKELSEKSGQLRQGSAQSQQQIRGEIDSLRQEKDSLLKQRLEIDGKLRQGSLLSPEEERXLFQLDEAIEALDAAIEYKNEAIXCRQRVLRASASLLSQCEMNLMAKLSYLSSSEXRALLCKYFDKVVXLREEQHQQQIAFSELEMQLEEQQRLVYWLEVALERQRLEMDRQLXLQQKEHEQNMQLLLQQSRDHLGEGLADSRRQYEARIQALEKELGRYMWINQELKQKLGGVNAVGHSRGGEKRSLCSEGRQAPGNEDELHLAPELLWLSPLXEGAPRXREEXRDLVHAPLPLXWKRSSLCGEEQGSPEELRQREAAEPLVGRVLPVGEAGLPWNFGPLSKPRRELRRASPGMIDVRKNPL

SEQ ID NO: 14416 - protein, 147 aa, Homo sapiens
  MOD_RES (48)..(48): Selenocysteine
  MOD_RES (89)..(89): Selenocysteine
  MOD_RES (96)..(96): Selenocysteine
  MOD_RES (101)..(101): Selenocysteine
  MOD_RES (103)..(103): Selenocysteine
MGLEAQRLPGAEEAPVRVALRVRPLLPKELLHGHQSCLQVEPGLGRVXLGRDRHFGFHVVLAEDAGQEAVYQACVQPLLEAFFEGFNAXVFAYGQXGSGKXYXMGEASVEHHPPALAGAYELPGLGAMGRVQLKWQEALRCLPSLPP

SEQ ID NO: 14417 - protein, 752 aa, Homo sapiens
  MOD_RES (25)..(25): Selenocysteine
  MOD_RES (28)..(28): Selenocysteine
  MOD_RES (134)..(134): Selenocysteine
  MOD_RES (155)..(155): Selenocysteine
  MOD_RES (175)..(175): Selenocysteine
  MOD_RES (216)..(216): Selenocysteine
  MOD_RES (224)..(224): Selenocysteine
  MOD_RES (253)..(253): Selenocysteine
  MOD_RES (255)..(255): Selenocysteine
  MOD_RES (324)..(324): Selenocysteine
  MOD_RES (335)..(335): Selenocysteine
  MOD_RES (351)..(351): Selenocysteine
  MOD_RES (383)..(383): Selenocysteine
  MOD_RES (457)..(457): Selenocysteine
  MOD_RES (487)..(487): Selenocysteine
  MOD_RES (492)..(492): Selenocysteine
  MOD_RES (534)..(534): Selenocysteine
  MOD_RES (584)..(584): Selenocysteine
  MOD_RES (592)..(592): Selenocysteine
  MOD_RES (616)..(616): Selenocysteine
  MOD_RES (736)..(736): Selenocysteine
MGDPMLGERKECQKIIRLKSLNANXDIXSLARKVVEECKLIHPSKLNEVEQLLYYLQNRRDSLSGKEKKEKSSKPKDPPPFEGMEIDEVANINDMDEYIELLYEDIPDKVRGSALILQLARNPDNLEELLLNEXALGALARVLREDWKQSVELAXNIIYIFFCFSSFSQFHGLIXHYKIGALCMNIIDHELKRHELWQEELSKKKKAVDEDPENQXLRKDYEKXFKKYQGLVVKQEQLLRVALYLLLNLAEDXRXELKMRNKNIVHMLVKALDRDNFELLILVVSFLKKLSIFMENKNDMVEMDIVEKLVKMIPCEHEDLLNIXLRLLLNLSFDXGLRNKMVQVGLLPKLXALLGNDNYKQIAMCVLYHISMDDRFKSMFAYXDCIPQLMKMLFECSDERIDLELISFCINLAANKRNVQLICEGNGLKMLMKRALKFKDPLLMKMIRNISQHDGPXKNLFIDYVGDLAAQISNDEEEEFVIECLGXLANLXIPDLDWELVLKEYKLVPYLKDKLKPGAAEDDLVLEVVIMIGXVSMDDSCAALLAKSGIIPALIELLNAQQEDDEFVCQIIYVFYQMVFHQAXRDVIIKEXQAPAYLIDLMHDKNNEIRKVCDNXLDIIAEYDEEWAKKIQSEKFRWHNSQWLEMVESRQMDESEQYLYGDDRIEPYIHEGDILERPDLFYNSDGLIASEGAISPDFFNDYHLQNGDVVGQHSFPGSLGMDGFGQPVGILGRPAXAYGFRPDEPYYYGYGS

SEQ ID NO: 14418 - protein, 792 aa, Homo sapiens
  MOD_RES (36)..(36): Selenocysteine
  MOD_RES (65)..(65): Selenocysteine
  MOD_RES (68)..(68): Selenocysteine
  MOD_RES (174)..(174): Selenocysteine
  MOD_RES (195)..(195): Selenocysteine
  MOD_RES (215)..(215): Selenocysteine
  MOD_RES (256)..(256): Selenocysteine
  MOD_RES (264)..(264): Selenocysteine
  MOD_RES (293)..(293): Selenocysteine
  MOD_RES (295)..(295): Selenocysteine
  MOD_RES (364)..(364): Selenocysteine
  MOD_RES (375)..(375): Selenocysteine
  MOD_RES (391)..(391): Selenocysteine
  MOD_RES (423)..(423): Selenocysteine
  MOD_RES (497)..(497): Selenocysteine
  MOD_RES (527)..(527): Selenocysteine
  MOD_RES (532)..(532): Selenocysteine
  MOD_RES (574)..(574): Selenocysteine
  MOD_RES (624)..(624): Selenocysteine
  MOD_RES (632)..(632): Selenocysteine
  MOD_RES (656)..(656): Selenocysteine
  MOD_RES (776)..(776): Selenocysteine
MQGEDARYLKRKVKGGNIDVHPSEKALIVHYEVEAXILGEMGDPMLGERKECQKIIRLKSLNANXDIXSLARKVVEECKLIHPSKLNEVEQLLYYLQNRRDSLSGKEKKEKSSKPKDPPPFEGMEIDEVANINDMDEYIELLYEDIPDKVRGSALILQLARNPDNLEELLLNEXALGALARVLREDWKQSVELAXNIIYIFFCFSSFSQFHGLIXHYKIGALCMNIIDHELKRHELWQEELSKKKKAVDEDPENQXLRKDYEKXFKKYQGLVVKQEQLLRVALYLLLNLAEDXRXELKMRNKNIVHMLVKALDRDNFELLILVVSFLKKLSIFMENKNDMVEMDIVEKLVKMIPCEHEDLLNIXLRLLLNLSFDXGLRNKMVQVGLLPKLXALLGNDNYKQIAMCVLYHISMDDRFKSMFAYXDCIPQLMKMLFECSDERIDLELISFCINLAANKRNVQLICEGNGLKMLMKRALKFKDPLLMKMIRNISQHDGPXKNLFIDYVGDLAAQISNDEEEEFVIECLGXLANLXIPDLDWELVLKEYKLVPYLKDKLKPGAAEDDLVLEVVIMIGXVSMDDSCAALLAKSGIIPALIELLNAQQEDDEFVCQIIYVFYQMVFHQAXRDVIIKEXQAPAYLIDLMHDKNNEIRKVCDNXLDIIAEYDEEWAKKIQSEKFRWHNSQWLEMVESRQMDESEQYLYGDDRIEPYIHEGDILERPDLFYNSDGLIASEGAISPDFFNDYHLQNGDVVGQHSFPGSLGMDGFGQPVGILGRPAXAYGFRPDEPYYYGYGS

SEQ ID NO: 14419 - protein, 748 aa, Homo sapiens
  MOD_RES (21)..(21): Selenocysteine
  MOD_RES (24)..(24): Selenocysteine
  MOD_RES (130)..(130): Selenocysteine
  MOD_RES (151)..(151): Selenocysteine
  MOD_RES (171)..(171): Selenocysteine
  MOD_RES (212)..(212): Selenocysteine
  MOD_RES (220)..(220): Selenocysteine
  MOD_RES (249)..(249): Selenocysteine
  MOD_RES (251)..(251): Selenocysteine
  MOD_RES (320)..(320): Selenocysteine
  MOD_RES (331)..(331): Selenocysteine
  MOD_RES (347)..(347): Selenocysteine
  MOD_RES (379)..(379): Selenocysteine
  MOD_RES (453)..(453): Selenocysteine
  MOD_RES (483)..(483): Selenocysteine
  MOD_RES (488)..(488): Selenocysteine
  MOD_RES (530)..(530): Selenocysteine
  MOD_RES (580)..(580): Selenocysteine
  MOD_RES (588)..(588): Selenocysteine
  MOD_RES (612)..(612): Selenocysteine
  MOD_RES (732)..(732): Selenocysteine
MQGEDARYLKSIRLKSLNANXDIXSLARKVVEECKLIHPSKLNEVEQLLYYLQNRRDSLSGKEKKEKSSKPKDPPPFEGMEIDEVANINDMDEYIELLYEDIPDKVRGSALILQLARNPDNLEELLLNEXALGALARVLREDWKQSVELAXNIIYIFFCFSSFSQFHGLIXHYKIGALCMNIIDHELKRHELWQEELSKKKKAVDEDPENQXLRKDYEKXFKKYQGLVVKQEQLLRVALYLLLNLAEDXRXELKMRNKNIVHMLVKALDRDNFELLILVVSFLKKLSIFMENKNDMVEMDIVEKLVKMIPCEHEDLLNIXLRLLLNLSFDXGLRNKMVQVGLLPKLXALLGNDNYKQIAMCVLYHISMDDRFKSMFAYXDCIPQLMKMLFECSDERIDLELISFCINLAANKRNVQLICEGNGLKMLMKRALKFKDPLLMKMIRNISQHDGPXKNLFIDYVGDLAAQISNDEEEEFVIECLGXLANLXIPDLDWELVLKEYKLVPYLKDKLKPGAAEDDLVLEVVIMIGXVSMDDSCAALLAKSGIIPALIELLNAQQEDDEFVCQIIYVFYQMVFHQAXRDVIIKEXQAPAYLIDLMHDKNNEIRKVCDNXLDIIAEYDEEWAKKIQSEKFRWHNSQWLEMVESRQMDESEQYLYGDDRIEPYIHEGDILERPDLFYNSDGLIASEGAISPDFFNDYHLQNGDVVGQHSFPGSLGMDGFGQPVGILGRPAXAYGFRPDEPYYYGYGS

SEQ ID NO: 14420 - protein, 714 aa, Homo sapiens
  MOD_RES (8)..(8): Selenocysteine
  MOD_RES (18)..(18): Selenocysteine
  MOD_RES (96)..(96): Selenocysteine
  MOD_RES (117)..(117): Selenocysteine
  MOD_RES (137)..(137): Selenocysteine
  MOD_RES (178)..(178): Selenocysteine
  MOD_RES (186)..(186): Selenocysteine
  MOD_RES (215)..(215): Selenocysteine
  MOD_RES (217)..(217): Selenocysteine
  MOD_RES (286)..(286): Selenocysteine
  MOD_RES (297)..(297): Selenocysteine
  MOD_RES (313)..(313): Selenocysteine
  MOD_RES (345)..(345): Selenocysteine
  MOD_RES (419)..(419): Selenocysteine
  MOD_RES (449)..(449): Selenocysteine
  MOD_RES (454)..(454): Selenocysteine
  MOD_RES (496)..(496): Selenocysteine
  MOD_RES (546)..(546): Selenocysteine
  MOD_RES (554)..(554): Selenocysteine
  MOD_RES (578)..(578): Selenocysteine
  MOD_RES (698)..(698): Selenocysteine
MSIALGNXYRRSLSDSEXVSVLQASLCEEKKEKSSKPKDPPPFEGMEIDEVANINDMDEYIELLYEDIPDKVRGSALILQLARNPDNLEELLLNEXALGALARVLREDWKQSVELAXNIIYIFFCFSSFSQFHGLIXHYKIGALCMNIIDHELKRHELWQEELSKKKKAVDEDPENQXLRKDYEKXFKKYQGLVVKQEQLLRVALYLLLNLAEDXRXELKMRNKNIVHMLVKALDRDNFELLILVVSFLKKLSIFMENKNDMVEMDIVEKLVKMIPCEHEDLLNIXLRLLLNLSFDXGLRNKMVQVGLLPKLXALLGNDNYKQIAMCVLYHISMDDRFKSMFAYXDCIPQLMKMLFECSDERIDLELISFCINLAANKRNVQLICEGNGLKMLMKRALKFKDPLLMKMIRNISQHDGPXKNLFIDYVGDLAAQISNDEEEEFVIECLGXLANLXIPDLDWELVLKEYKLVPYLKDKLKPGAAEDDLVLEVVIMIGXVSMDDSCAALLAKSGIIPALIELLNAQQEDDEFVCQIIYVFYQMVFHQAXRDVIIKEXQAPAYLIDLMHDKNNEIRKVCDNXLDIIAEYDEEWAKKIQSEKFRWHNSQWLEMVESRQMDESEQYLYGDDRIEPYIHEGDILERPDLFYNSDGLIASEGAISPDFFNDYHLQNGDVVGQHSFPGSLGMDGFGQPVGILGRPAXAYGFRPDEPYYYGYGS

SEQ ID NO: 14421 - protein, 374 aa, Homo sapiens
  MOD_RES (44)..(44): Selenocysteine
  MOD_RES (69)..(69): Selenocysteine
  MOD_RES (91)..(91): Selenocysteine
  MOD_RES (97)..(97): Selenocysteine
  MOD_RES (105)..(105): Selenocysteine
  MOD_RES (138)..(138): Selenocysteine
  MOD_RES (146)..(146): Selenocysteine
  MOD_RES (180)..(180): Selenocysteine
  MOD_RES (191)..(191): Selenocysteine
  MOD_RES (195)..(195): Selenocysteine
  MOD_RES (221)..(221): Selenocysteine
  MOD_RES (232)..(232): Selenocysteine
  MOD_RES (238)..(238): Selenocysteine
  MOD_RES (254)..(254): Selenocysteine
  MOD_RES (259)..(259): Selenocysteine
  MOD_RES (276)..(276): Selenocysteine
  MOD_RES (312)..(312): Selenocysteine
  MOD_RES (327)..(327): Selenocysteine
  MOD_RES (329)..(329): Selenocysteine
  MOD_RES (337)..(337): Selenocysteine
  MOD_RES (342)..(342): Selenocysteine
  MOD_RES (350)..(350): Selenocysteine
  MOD_RES (353)..(353): Selenocysteine
  MOD_RES (359)..(359): Selenocysteine
MSLLFVSMACVGFFLLQGAWPHEGVHRKPSLLAHPGPLVKSEEXVILQCWSDVMFEHFLLHREGMFNDXLRLIGEHHDGVSKANFSISRMXQDLAGXYRCYGSVXHSPYQVSAPSDPLDIVIIGLYEKPSLSAQPGPXVLAGENVXLSCSSRSSYDMYHLSREGEAHERRLPAGPKVNGXFQADFPLGPAXHGGXYRCFGSFHDSPYEWSKSSDPLLVSVXGNPSNSWPSPXEPSSKXERMFHHVGQACLKLPXSSDPXVSACQSNPRHLHILIGXSVVIILFILLFFLLHRWCSNKKNAAVMDQESAGNRXANSEDSDEQDPQEVXYXQLNHCVFXQRKIXRPSQRPKXPPXDIIVYXELPNAESRSKVVSCP

SEQ ID NO: 14422 - protein, 348 aa, Homo sapiens
  MOD_RES (44)..(44): Selenocysteine
  MOD_RES (69)..(69): Selenocysteine
  MOD_RES (91)..(91): Selenocysteine
  MOD_RES (97)..(97): Selenocysteine
  MOD_RES (105)..(105): Selenocysteine
  MOD_RES (138)..(138): Selenocysteine
  MOD_RES (146)..(146): Selenocysteine
  MOD_RES (180)..(180): Selenocysteine
  MOD_RES (191)..(191): Selenocysteine
  MOD_RES (195)..(195): Selenocysteine
  MOD_RES (221)..(221): Selenocysteine
  MOD_RES (232)..(232): Selenocysteine
  MOD_RES (238)..(238): Selenocysteine
  MOD_RES (250)..(250): Selenocysteine
  MOD_RES (286)..(286): Selenocysteine
  MOD_RES (301)..(301): Selenocysteine
  MOD_RES (303)..(303): Selenocysteine
  MOD_RES (311)..(311): Selenocysteine
  MOD_RES (316)..(316): Selenocysteine
  MOD_RES (324)..(324): Selenocysteine
  MOD_RES (327)..(327): Selenocysteine
  MOD_RES (333)..(333): Selenocysteine
MSLLFVSMACVGFFLLQGAWPHEGVHRKPSLLAHPGPLVKSEEXVILQCWSDVMFEHFLLHREGMFNDXLRLIGEHHDGVSKANFSISRMXQDLAGXYRCYGSVXHSPYQVSAPSDPLDIVIIGLYEKPSLSAQPGPXVLAGENVXLSCSSRSSYDMYHLSREGEAHERRLPAGPKVNGXFQADFPLGPAXHGGXYRCFGSFHDSPYEWSKSSDPLLVSVXGNPSNSWPSPXEPSSKXGNPRHLHILIGXSVVIILFILLFFLLHRWCSNKKNAAVMDQESAGNRXANSEDSDEQDPQEVXYXQLNHCVFXQRKIXRPSQRPKXPPXDIIVYXELPNAESRSKVVSCP

SEQ ID NO: 14423 - protein, 374 aa, Homo sapiens
  MOD_RES (44)..(44): Selenocysteine
  MOD_RES (69)..(69): Selenocysteine
  MOD_RES (91)..(91): Selenocysteine
  MOD_RES (97)..(97): Selenocysteine
  MOD_RES (105)..(105): Selenocysteine
  MOD_RES (138)..(138): Selenocysteine
  MOD_RES (146)..(146): Selenocysteine
  MOD_RES (180)..(180): Selenocysteine
  MOD_RES (191)..(191): Selenocysteine
  MOD_RES (195)..(195): Selenocysteine
  MOD_RES (221)..(221): Selenocysteine
  MOD_RES (232)..(232): Selenocysteine
  MOD_RES (238)..(238): Selenocysteine
  MOD_RES (254)..(254): Selenocysteine
  MOD_RES (259)..(259): Selenocysteine
  MOD_RES (276)..(276): Selenocysteine
  MOD_RES (312)..(312): Selenocysteine
  MOD_RES (327)..(327): Selenocysteine
  MOD_RES (329)..(329): Selenocysteine
  MOD_RES (337)..(337): Selenocysteine
  MOD_RES (342)..(342): Selenocysteine
  MOD_RES (350)..(350): Selenocysteine
  MOD_RES (353)..(353): Selenocysteine
  MOD_RES (359)..(359): Selenocysteine
MSLLVVSMACVGFFLLQGAWPHEGVHRKPSLLAHPGRLVKSEEXVILQCWSDVMFEHFLLHREGMFNDXLRLIGEHHDGVSKANFSISRMXQDLAGXYRCYGSVXHSPYQVSAPSDPLDIVIIGLYEKPSLSAQLGPXVLAGENVXLSCSSRSSYDMYHLSREGEAHERRLPAGPKVNGXFQADFPLGPAXHGGXYRCFGSFHDSPYEWSKSSDPLLVSVXGNPSNSWPSPXEPSSKXERMFHHVGQACLKLPXSSDPXVSACQSNPRHLHILIGXSVVIILFILLFFLLHRWCSNKKNAAVMDQESAGNRXANSEDSDEQDPQEVXYXQLNHCVFXQRKIXRPSQRPKXPPXDIIVYXELPNAESRSKVVSCP

SEQ ID NO: 14424 - protein, 348 aa, Homo sapiens
  MOD_RES (44)..(44): Selenocysteine
  MOD_RES (69)..(69): Selenocysteine
  MOD_RES (91)..(91): Selenocysteine
  MOD_RES (97)..(97): Selenocysteine
  MOD_RES (105)..(105): Selenocysteine
  MOD_RES (138)..(138): Selenocysteine
  MOD_RES (146)..(146): Selenocysteine
  MOD_RES (180)..(180): Selenocysteine
  MOD_RES (191)..(191): Selenocysteine
  MOD_RES (195)..(195): Selenocysteine
  MOD_RES (221)..(221): Selenocysteine
  MOD_RES (232)..(232): Selenocysteine
  MOD_RES (238)..(238): Selenocysteine
  MOD_RES (250)..(250): Selenocysteine
  MOD_RES (286)..(286): Selenocysteine
  MOD_RES (301)..(301): Selenocysteine
  MOD_RES (303)..(303): Selenocysteine
  MOD_RES (311)..(311): Selenocysteine
  MOD_RES (316)..(316): Selenocysteine
  MOD_RES (324)..(324): Selenocysteine
  MOD_RES (327)..(327): Selenocysteine
  MOD_RES (333)..(333): Selenocysteine
MSLLVVSMACVGFFLLQGAWPHEGVHRKPSLLAHPGRLVKSEEXVILQCWSDVMFEHFLLHREGMFNDXLRLIGEHHDGVSKANFSISRMXQDLAGXYRCYGSVXHSPYQVSAPSDPLDIVIIGLYEKPSLSAQLGPXVLAGENVXLSCSSRSSYDMYHLSREGEAHERRLPAGPKVNGXFQADFPLGPAXHGGXYRCFGSFHDSPYEWSKSSDPLLVSVXGNPSNSWPSPXEPSSKXGNPRHLHILIGXSVVIILFILLFFLLHRWCSNKKNAAVMDQESAGNRXANSEDSDEQDPQEVXYXQLNHCVFXQRKIXRPSQRPKXPPXDIIVYXELPNAESRSKVVSCP

SEQ ID NO: 14425 - protein, 348 aa, Homo sapiens
  MOD_RES (44)..(44): Selenocysteine
  MOD_RES (69)..(69): Selenocysteine
  MOD_RES (97)..(97): Selenocysteine
  MOD_RES (105)..(105): Selenocysteine
  MOD_RES (123)..(123): Selenocysteine
  MOD_RES (138)..(138): Selenocysteine
  MOD_RES (146)..(146): Selenocysteine
  MOD_RES (180)..(180): Selenocysteine
  MOD_RES (191)..(191): Selenocysteine
  MOD_RES (195)..(195): Selenocysteine
  MOD_RES (221)..(221): Selenocysteine
  MOD_RES (232)..(232): Selenocysteine
  MOD_RES (238)..(238): Selenocysteine
  MOD_RES (250)..(250): Selenocysteine
  MOD_RES (286)..(286): Selenocysteine
  MOD_RES (301)..(301): Selenocysteine
  MOD_RES (303)..(303): Selenocysteine
  MOD_RES (311)..(311): Selenocysteine
  MOD_RES (316)..(316): Selenocysteine
  MOD_RES (324)..(324): Selenocysteine
  MOD_RES (327)..(327): Selenocysteine
  MOD_RES (333)..(333): Selenocysteine
MSLMVVSMVCVGFFLLQGAWPHEGVHRKPSLLAHPGPLVKSEEXVILQCWSDVRFQHFLLHREGKFKDXLHLIGEHHDGVSKANFSIGPMMQDLAGXYRCYGSVXHSPYQLSAPSDPLDIVIXGLYEKPSLSAQPGPXVLAGESVXLSCSSRSSYDMYHLSREGEAHERRFSAGPKVNGXFQADFPLGPAXHGGXYRCFGSFRDSPYEWSNSSDPLLVSVXGNPSNSWPSPXEPSSKXGNPRHLHILIGXSVVIILFILLFFLLHRWCSNKKNAAVMDQESAGNRXANSEDSDEQDPQEVXYXQLNHCVFXQRKIXRPSQRPKXPPXDIIVYXELPNAESRSKVVSCP

SEQ ID NO: 14426 - protein, 325 aa, Homo sapiens
  MOD_RES (6)..(6): Selenocysteine
  MOD_RES (48)..(48): Selenocysteine
  MOD_RES (61)..(61): Selenocysteine
  MOD_RES (88)..(88): Selenocysteine
  MOD_RES (94)..(94): Selenocysteine
  MOD_RES (106)..(106): Selenocysteine
  MOD_RES (120)..(120): Selenocysteine
  MOD_RES (129)..(129): Selenocysteine
  MOD_RES (135)..(135): Selenocysteine
  MOD_RES (143)..(143): Selenocysteine
  MOD_RES (177)..(177): Selenocysteine
  MOD_RES (188)..(188): Selenocysteine
  MOD_RES (192)..(192): Selenocysteine
  MOD_RES (218)..(218): Selenocysteine
  MOD_RES (232)..(232): Selenocysteine
  MOD_RES (247)..(247): Selenocysteine
  MOD_RES (257)..(257): Selenocysteine
  MOD_RES (262)..(262): Selenocysteine
  MOD_RES (273)..(273): Selenocysteine
  MOD_RES (275)..(275): Selenocysteine
  MOD_RES (307)..(308): Selenocysteine
  MOD_RES (313)..(313): Selenocysteine
MSMSPXVIILACLGFFLDQSVWAHVGGQDKPFCSAWPSAVVPQGGHVXLRCHYRRGFNIFXLYKKDGVPVPELYNRIFWNSFLISPVXPAHAGXYRCRGFHPHSPXEWSAPSNPLVIMVXGLYEKPSLXARPGPXVRAGENVXLSCSSQSSFDIYHLSREGEAHELRLPAVPSINGXFQADFPLGPAXHGEXYRCFGSFHGSPYEWSDPSDPLPVSVXDAAVMNQEPAGHRXVNREDSDEQDPQEVXYAQLDHCIFXQRKIXGPSQRSKRPSXDXSVCIELPNAEPRALSPAHEHHSQALMGSSREXXALSQXQLASSNVPAAGI

SEQ ID NO: 14427 - protein, 256 aa, Homo sapiens
  MOD_RES (6)..(6): Selenocysteine
  MOD_RES (48)..(48): Selenocysteine
  MOD_RES (61)..(61): Selenocysteine
  MOD_RES (88)..(88): Selenocysteine
  MOD_RES (94)..(94): Selenocysteine
  MOD_RES (106)..(106): Selenocysteine
  MOD_RES (120)..(120): Selenocysteine
  MOD_RES (129)..(129): Selenocysteine
  MOD_RES (135)..(135): Selenocysteine
  MOD_RES (143)..(143): Selenocysteine
  MOD_RES (177)..(177): Selenocysteine
  MOD_RES (188)..(188): Selenocysteine
  MOD_RES (192)..(192): Selenocysteine
  MOD_RES (218)..(218): Selenocysteine
  MOD_RES (238)..(238): Selenocysteine
MSMSPXVIILACLGFFLDQSVWAHVGGQDKPFCSAWPSAVVPQGGHVXLRCHYRRGFNIFXLYKKDGVPVPELYNRIFWNSFLISPVXPAHAGXYRCRGFHPHSPXEWSAPSNPLVIMVXGLYEKPSLXARPGPXVRAGENVXLSCSSQSSFDIYHLSREGEAHELRLPAVPSINGXFQADFPLGPAXHGEXYRCFGSFHGSPYEWSDPSDPLPVSVXGIARHLHAVIRYSVAIILFXILPFFLLHRWCSKKKMLL

SEQ ID NO: 14428 - protein, 342 aa, Homo sapiens
  MOD_RES (6)..(6): Selenocysteine
  MOD_RES (48)..(48): Selenocysteine
  MOD_RES (61)..(61): Selenocysteine
  MOD_RES (88)..(88): Selenocysteine
  MOD_RES (94)..(94): Selenocysteine
  MOD_RES (106)..(106): Selenocysteine
  MOD_RES (120)..(120): Selenocysteine
  MOD_RES (129)..(129): Selenocysteine
  MOD_RES (135)..(135): Selenocysteine
  MOD_RES (143)..(143): Selenocysteine
  MOD_RES (177)..(177): Selenocysteine
  MOD_RES (188)..(188): Selenocysteine
  MOD_RES (192)..(192): Selenocysteine
  MOD_RES (218)..(218): Selenocysteine
  MOD_RES (229)..(229): Selenocysteine
  MOD_RES (235)..(235): Selenocysteine
  MOD_RES (249)..(249): Selenocysteine
  MOD_RES (264)..(264): Selenocysteine
  MOD_RES (274)..(274): Selenocysteine
  MOD_RES (279)..(279): Selenocysteine
  MOD_RES (290)..(290): Selenocysteine
  MOD_RES (292)..(292): Selenocysteine
  MOD_RES (324)..(325): Selenocysteine
  MOD_RES (330)..(330): Selenocysteine
MSMSPXVIILACLGFFLDQSVWAHVGGQDKPFCSAWPSAVVPQGGHVXLRCHYRRGFNIFXLYKKDGVPVPELYNRIFWNSFLISPVXPAHAGXYRCRGFHPHSPXEWSAPSNPLVIMVXGLYEKPSLXARPGPXVRAGENVXLSCSSQSSFDIYHLSREGEAHELRLPAVPSINGXFQADFPLGPAXHGEXYRCFGSFHGSPYEWSDPSDPLPVSVXGNPSSSWPSPXEPSFKXDAAVMNQEPAGHRXVNREDSDEQDPQEVXYAQLDHCIFXQRKIXGPSQRSKRPSXDXSVCIELPNAEPRALSPAHEHHSQALMGSSREXXALSQXQLASSNVPAAGI

SEQ ID NO: 14429 - protein, 273 aa, Homo sapiens
  MOD_RES (6)..(6): Selenocysteine
  MOD_RES (48)..(48): Selenocysteine
  MOD_RES (61)..(61): Selenocysteine
  MOD_RES (88)..(88): Selenocysteine
  MOD_RES (94)..(94): Selenocysteine
  MOD_RES (106)..(106): Selenocysteine
  MOD_RES (120)..(120): Selenocysteine
  MOD_RES (129)..(129): Selenocysteine
  MOD_RES (135)..(135): Selenocysteine
  MOD_RES (143)..(143): Selenocysteine
  MOD_RES (177)..(177): Selenocysteine
  MOD_RES (188)..(188): Selenocysteine
  MOD_RES (192)..(192): Selenocysteine
  MOD_RES (218)..(218): Selenocysteine
  MOD_RES (229)..(229): Selenocysteine
  MOD_RES (235)..(235): Selenocysteine
  MOD_RES (255)..(255): Selenocysteine
MSMSPXVIILACLGFFLDQSVWAHVGGQDKPFCSAWPSAVVPQGGHVXLRCHYRRGFNIFXLYKKDGVPVPELYNRIFWNSFLISPVXPAHAGXYRCRGFHPHSPXEWSAPSNPLVIMVXGLYEKPSLXARPGPXVRAGENVXLSCSSQSSFDIYHLSREGEAHELRLPAVPSINGXFQADFPLGPAXHGEXYRCFGSFHGSPYEWSDPSDPLPVSVXGNPSSSWPSPXEPSFKXGIARHLHAVIRYSVAIILFXILPFFLLHRWCSKKKMLL

SEQ ID NO: 14430 - protein, 399 aa, Homo sapiens
  MOD_RES (6)..(6): Selenocysteine
  MOD_RES (48)..(48): Selenocysteine
  MOD_RES (61)..(61): Selenocysteine
  MOD_RES (88)..(88): Selenocysteine
  MOD_RES (94)..(94): Selenocysteine
  MOD_RES (106)..(106): Selenocysteine
  MOD_RES (120)..(120): Selenocysteine
  MOD_RES (129)..(129): Selenocysteine
  MOD_RES (135)..(135): Selenocysteine
  MOD_RES (143)..(143): Selenocysteine
  MOD_RES (177)..(177): Selenocysteine
  MOD_RES (188)..(188): Selenocysteine
  MOD_RES (192)..(192): Selenocysteine
  MOD_RES (218)..(218): Selenocysteine
  MOD_RES (229)..(229): Selenocysteine
  MOD_RES (235)..(235): Selenocysteine
  MOD_RES (255)..(255): Selenocysteine
  MOD_RES (274)..(274): Selenocysteine
  MOD_RES (306)..(306): Selenocysteine
  MOD_RES (321)..(321): Selenocysteine
  MOD_RES (331)..(331): Selenocysteine
  MOD_RES (336)..(336): Selenocysteine
  MOD_RES (347)..(347): Selenocysteine
  MOD_RES (349)..(349): Selenocysteine
  MOD_RES (381)..(382): Selenocysteine
  MOD_RES (387)..(387): Selenocysteine
MSMSPXVIILACLGFFLDQSVWAHVGGQDKPFCSAWPSAVVPQGGHVXLRCHYRRGFNIFXLYKKDGVPVPELYNRIFWNSFLISPVXPAHAGXYRCRGFHPHSPXEWSAPSNPLVIMVXGLYEKPSLXARPGPXVRAGENVXLSCSSQSSFDIYHLSREGEAHELRLPAVPSINGXFQADFPLGPAXHGEXYRCFGSFHGSPYEWSDPSDPLPVSVXGNPSSSWPSPXEPSFKXGIARHLHAVIRYSVAIILFXILPFFLLHRWCSKKKVSLXKQRPENSGPCAEAGWEHADAAVMNQEPAGHRXVNREDSDEQDPQEVXYAQLDHCIFXQRKIXGPSQRSKRPSXDXSVCIELPNAEPRALSPAHEHHSQALMGSSREXXALSQXQLASSNVPAAGI

SEQ ID NO: 14431 - protein, 360 aa, Homo sapiens
  MOD_RES (6)..(6): Selenocysteine
  MOD_RES (48)..(48): Selenocysteine
  MOD_RES (61)..(61): Selenocysteine
  MOD_RES (88)..(88): Selenocysteine
  MOD_RES (94)..(94): Selenocysteine
  MOD_RES (106)..(106): Selenocysteine
  MOD_RES (120)..(120): Selenocysteine
  MOD_RES (129)..(129): Selenocysteine
  MOD_RES (135)..(135): Selenocysteine
  MOD_RES (138)..(138): Selenocysteine
  MOD_RES (143)..(143): Selenocysteine
  MOD_RES (177)..(177): Selenocysteine
  MOD_RES (188)..(188): Selenocysteine
  MOD_RES (192)..(192): Selenocysteine
  MOD_RES (218)..(218): Selenocysteine
  MOD_RES (238)..(238): Selenocysteine
  MOD_RES (267)..(267): Selenocysteine
  MOD_RES (282)..(282): Selenocysteine
  MOD_RES (292)..(292): Selenocysteine
  MOD_RES (297)..(297): Selenocysteine
  MOD_RES (308)..(308): Selenocysteine
  MOD_RES (310)..(310): Selenocysteine
  MOD_RES (342)..(343): Selenocysteine
  MOD_RES (348)..(348): Selenocysteine
MSMSPXVIILACLGFFLDQSVWAHVGGQDKPFCSAWPSAVVPQGGHVXLRCHYRRGFNIFXLYKKDGVPVPELYNRIFWNSFLISPVXPAHAGXYRCRGFHPHSPXEWSAPSNPLVIMVXGLYEKPSLXARPGPXVRXGENVXLSCSSQSSFDIYHLSREGEAHELRLPAVPSINGXFQADFPLGPAXHGEXYRCFGSFHGSPYEWSDASDPLPVSVXGIARHLHAVIRYSVAIILFXILPFFLLHRWCSKKKNAAVMNQEPAGHRXVNREDSDEQDPQEVXYAQLDHCIFXQRKIXGPSQRSKRPSXDXSVCIELPNAEPRALSPAHEHHSQALMGSSREXXALSQXQLASSNVPAAGI

SEQ ID NO: 14432 - protein, 342 aa, Homo sapiens
  MOD_RES (6)..(6): Selenocysteine
  MOD_RES (48)..(48): Selenocysteine
  MOD_RES (61)..(61): Selenocysteine
  MOD_RES (88)..(88): Selenocysteine
  MOD_RES (94)..(94): Selenocysteine
  MOD_RES (106)..(106): Selenocysteine
  MOD_RES (120)..(120): Selenocysteine
  MOD_RES (129)..(129): Selenocysteine
  MOD_RES (135)..(135): Selenocysteine
  MOD_RES (138)..(138): Selenocysteine
  MOD_RES (143)..(143): Selenocysteine
  MOD_RES (177)..(177): Selenocysteine
  MOD_RES (188)..(188): Selenocysteine
  MOD_RES (192)..(192): Selenocysteine
  MOD_RES (218)..(218): Selenocysteine
  MOD_RES (229)..(229): Selenocysteine
  MOD_RES (235)..(235): Selenocysteine
  MOD_RES (249)..(249): Selenocysteine
  MOD_RES (264)..(264): Selenocysteine
  MOD_RES (274)..(274): Selenocysteine
  MOD_RES (279)..(279): Selenocysteine
  MOD_RES (290)..(290): Selenocysteine
  MOD_RES (292)..(292): Selenocysteine
  MOD_RES (324)..(325): Selenocysteine
  MOD_RES (330)..(330): Selenocysteine
MSMSPXVIILACLGFFLDQSVWAHVGGQDKPFCSAWPSAVVPQGGHVXLRCHYRRGFNIFXLYKKDGVPVPELYNRIFWNSFLISPVXPAHAGXYRCRGFHPHSPXEWSAPSNPLVIMVXGLYEKPSLXARPGPXVRXGENVXLSCSSQSSFDIYHLSREGEAHELRLPAVPSINGXFQADFPLGPAXHGEXYRCFGSFHGSPYEWSDASDPLPVSVXGNPSSSWPSPXEPSFKXDAAVMNQEPAGHRXVNREDSDEQDPQEVXYAQLDHCIFXQRKIXGPSQRSKRPSXDXSVCIELPNAEPRALSPAHEHHSQALMGSSREXXALSQXQLASSNVPAAGI

SEQ ID NO: 14433 - protein, 312 aa, Homo sapiens
  MOD_RES (6)..(6): Selenocysteine
  MOD_RES (48)..(48): Selenocysteine
  MOD_RES (61)..(61): Selenocysteine
  MOD_RES (88)..(88): Selenocysteine
  MOD_RES (94)..(94): Selenocysteine
  MOD_RES (106)..(106): Selenocysteine
  MOD_RES (120)..(120): Selenocysteine
  MOD_RES (129)..(129): Selenocysteine
  MOD_RES (135)..(135): Selenocysteine
  MOD_RES (138)..(138): Selenocysteine
  MOD_RES (143)..(143): Selenocysteine
  MOD_RES (177)..(177): Selenocysteine
  MOD_RES (188)..(188): Selenocysteine
  MOD_RES (192)..(192): Selenocysteine
  MOD_RES (218)..(218): Selenocysteine
  MOD_RES (229)..(229): Selenocysteine
  MOD_RES (235)..(235): Selenocysteine
  MOD_RES (255)..(255): Selenocysteine
  MOD_RES (304)..(304): Selenocysteine
MSMSPXVIILACLGFFLDQSVWAHVGGQDKPFCSAWPSAVVPQGGHVXLRCHYRRGFNIFXLYKKDGVPVPELYNRIFWNSFLISPVXPAHAGXYRCRGFHPHSPXEWSAPSNPLVIMVXGLYEKPSLXARPGPXVRXGENVXLSCSSQSSFDIYHLSREGEAHELRLPAVPSINGXFQADFPLGPAXHGEXYRCFGSFHGSPYEWSDASDPLPVSVXGNPSSSWPSPXEPSFKXGIARHLHAVIRYSVAIILFXILPFFLLHRWCSKKKSKPHEAEARELRALCGSRMGARRCCCNEPRACGXQNSEQGGL

SEQ ID NO: 14434 - protein, 377 aa, Homo sapiens
  MOD_RES (6)..(6): Selenocysteine
  MOD_RES (48)..(48): Selenocysteine
  MOD_RES (61)..(61): Selenocysteine
  MOD_RES (88)..(88): Selenocysteine
  MOD_RES (94)..(94): Selenocysteine
  MOD_RES (106)..(106): Selenocysteine
  MOD_RES (120)..(120): Selenocysteine
  MOD_RES (129)..(129): Selenocysteine
  MOD_RES (135)..(135): Selenocysteine
  MOD_RES (138)..(138): Selenocysteine
  MOD_RES (143)..(143): Selenocysteine
  MOD_RES (177)..(177): Selenocysteine
  MOD_RES (188)..(188): Selenocysteine
  MOD_RES (192)..(192): Selenocysteine
  MOD_RES (218)..(218): Selenocysteine
  MOD_RES (229)..(229): Selenocysteine
  MOD_RES (235)..(235): Selenocysteine
  MOD_RES (255)..(255): Selenocysteine
  MOD_RES (284)..(284): Selenocysteine
  MOD_RES (299)..(299): Selenocysteine
  MOD_RES (309)..(309): Selenocysteine
  MOD_RES (314)..(314): Selenocysteine
  MOD_RES (325)..(325): Selenocysteine
  MOD_RES (327)..(327): Selenocysteine
  MOD_RES (359)..(360): Selenocysteine
  MOD_RES (365)..(365): Selenocysteine
MSMSPXVIILACLGFFLDQSVWAHVGGQDKPFCSAWPSAVVPQGGHVXLRCHYRRGFNIFXLYKKDGVPVPELYNRIFWNSFLISPVXPAHAGXYRCRGFHPHSPXEWSAPSNPLVIMVXGLYEKPSLXARPGPXVRXGENVXLSCSSQSSFDIYHLSREGEAHELRLPAVPSINGXFQADFPLGPAXHGEXYRCFGSFHGSPYEWSDASDPLPVSVXGNPSSSWPSPXEPSFKXGIARHLHAVIRYSVAIILFXILPFFLLHRWCSKKKNAAVMNQEPAGHRXVNREDSDEQDPQEVXYAQLDHCIFXQRKIXGPSQRSKRPSXDXSVCIELPNAEPRALSPAHEHHSQALMGSSREXXALSQXQLASSNVPAAGI

SEQ ID NO: 14435 - protein, 230 aa, Homo sapiens
  MOD_RES (6)..(6): Selenocysteine
  MOD_RES (34)..(34): Selenocysteine
  MOD_RES (40)..(40): Selenocysteine
  MOD_RES (48)..(48): Selenocysteine
  MOD_RES (82)..(82): Selenocysteine
  MOD_RES (93)..(93): Selenocysteine
  MOD_RES (97)..(97): Selenocysteine
  MOD_RES (123)..(123): Selenocysteine
  MOD_RES (137)..(137): Selenocysteine
  MOD_RES (152)..(152): Selenocysteine
  MOD_RES (162)..(162): Selenocysteine
  MOD_RES (167)..(167): Selenocysteine
  MOD_RES (178)..(178): Selenocysteine
  MOD_RES (180)..(180): Selenocysteine
  MOD_RES (212)..(213): Selenocysteine
  MOD_RES (218)..(218): Selenocysteine
MSMSPXVIILACLGFFLDQSVWAHVGLYEKPSLXARPGPXVRAGENVXLSCSSQSSFDIYHLSREGEAHELRLPAVPSINGXFQADFPLGPAXHGEXYRCFGSFHGSPYEWSDPSDPLPVSVXDAAVMNQEPAGHRXVNREDSDEQDPQEVXYAQLDHCIFXQRKIXGPSQRSKRPSXDXSVCIELPNAEPRALSPAHEHHSQALMGSSREXXALSQXQLASSNVPAAGI

SEQ ID NO: 14436 - protein, 247 aa, Homo sapiens
  MOD_RES (6)..(6): Selenocysteine
  MOD_RES (34)..(34): Selenocysteine
  MOD_RES (40)..(40): Selenocysteine
  MOD_RES (48)..(48): Selenocysteine
  MOD_RES (82)..(82): Selenocysteine
  MOD_RES (93)..(93): Selenocysteine
  MOD_RES (97)..(97): Selenocysteine
  MOD_RES (123)..(123): Selenocysteine
  MOD_RES (134)..(134): Selenocysteine
  MOD_RES (140)..(140): Selenocysteine
  MOD_RES (154)..(154): Selenocysteine
  MOD_RES (169)..(169): Selenocysteine
  MOD_RES (179)..(179): Selenocysteine
  MOD_RES (184)..(184): Selenocysteine
  MOD_RES (195)..(195): Selenocysteine
  MOD_RES (197)..(197): Selenocysteine
  MOD_RES (229)..(230): Selenocysteine
  MOD_RES (235)..(235): Selenocysteine
MSMSPXVIILACLGFFLDQSVWAHVGLYEKPSLXARPGPXVRAGENVXLSCSSQSSFDIYHLSREGEAHELRLPAVPSINGXFQADFPLGPAXHGEXYRCFGSFHGSPYEWSDPSDPLPVSVXGNPSSSWPSPXEPSFKXDAAVMNQEPAGHRXVNREDSDEQDPQEVXYAQLDHCIFXQRKIXGPSQRSKRPSXDXSVCIELPNAEPRALSPAHEHHSQALMGSSREXXALSQXQLASSNVPAAGI

SEQ ID NO: 14437 - protein, 230 aa, Homo sapiens
  MOD_RES (6)..(6): Selenocysteine
  MOD_RES (34)..(34): Selenocysteine
  MOD_RES (40)..(40): Selenocysteine
  MOD_RES (43)..(43): Selenocysteine
  MOD_RES (48)..(48): Selenocysteine
  MOD_RES (82)..(82): Selenocysteine
  MOD_RES (93)..(93): Selenocysteine
  MOD_RES (97)..(97): Selenocysteine
  MOD_RES (123)..(123): Selenocysteine
  MOD_RES (137)..(137): Selenocysteine
  MOD_RES (152)..(152): Selenocysteine
  MOD_RES (162)..(162): Selenocysteine
  MOD_RES (167)..(167): Selenocysteine
  MOD_RES (178)..(178): Selenocysteine
  MOD_RES (180)..(180): Selenocysteine
  MOD_RES (212)..(213): Selenocysteine
  MOD_RES (218)..(218): Selenocysteine
MSMSPXVIILACLGFFLDQSVWAHVGLYEKPSLXARPGPXVRXGENVXLSCSSQSSFDIYHLSREGEAHELRLPAVPSINGXFQADFPLGPAXHGEXYRCFGSFHGSPYEWSDASDPLPVSVXDAAVMNQEPAGHRXVNREDSDEQDPQEVXYAQLDHCIFXQRKIXGPSQRSKRPSXDXSVCIELPNAEPRALSPAHEHHSQALMGSSREXXALSQXQLASSNVPAAGI

SEQ ID NO: 14438 - protein, 416 aa, Homo sapiens
  MOD_RES (12)..(12): Selenocysteine
  MOD_RES (19)..(20): Selenocysteine
  MOD_RES (39)..(39): Selenocysteine
  MOD_RES (45)..(45): Selenocysteine
  MOD_RES (87)..(87): Selenocysteine
  MOD_RES (100)..(100): Selenocysteine
  MOD_RES (127)..(127): Selenocysteine
  MOD_RES (133)..(133): Selenocysteine
  MOD_RES (145)..(145): Selenocysteine
  MOD_RES (159)..(159): Selenocysteine
  MOD_RES (168)..(168): Selenocysteine
  MOD_RES (174)..(174): Selenocysteine
  MOD_RES (182)..(182): Selenocysteine
  MOD_RES (216)..(216): Selenocysteine
  MOD_RES (227)..(227): Selenocysteine
  MOD_RES (231)..(231): Selenocysteine
  MOD_RES (257)..(257): Selenocysteine
  MOD_RES (268)..(268): Selenocysteine
  MOD_RES (274)..(274): Selenocysteine
  MOD_RES (294)..(294): Selenocysteine
  MOD_RES (323)..(323): Selenocysteine
  MOD_RES (338)..(338): Selenocysteine
  MOD_RES (348)..(348): Selenocysteine
  MOD_RES (353)..(353): Selenocysteine
  MOD_RES (364)..(364): Selenocysteine
  MOD_RES (366)..(366): Selenocysteine
  MOD_RES (398)..(399): Selenocysteine
  MOD_RES (404)..(404): Selenocysteine
MSPSHVVVNVSXARSGPLXXSSAPVSRAESLRPGSRSCXMSMSPXVIILACLGFFLDQSVWAHVGGQDKPFCSAWPSAVVPQGGHVXLRCHYRRGFNIFXLYKKDGVPVPELYNRIFWNSFLISPVXPAHAGXYRCRGFHPHSPXEWSAPSNPLVIMVXGLYEKPSLXARPGPXVRAGENVXLSCSSQSSFDIYHLSREGEAHELRLPAVPSINGXFQADFPLGPAXHGEXYRCFGSFHGSPYEWSDPSDPLPVSVXGNPSSSWPSPXEPSFKXGIARHLHAVIRYSVAIILFXILPFFLLHRWCSKKKDAAVMNQEPAGHRXVNREDSDEQDPQEVXYAQLDHCIFXQRKIXGPSQRSKRPSXDXSVCIELPNAEPRALSPAHEHHSQALMGSSREXXALSQXQLASSNVPAAGI

SEQ ID NO: 14439 - protein, 310 aa, Homo sapiens
  MOD_RES (4)..(4): Selenocysteine
  MOD_RES (46)..(46): Selenocysteine
  MOD_RES (59)..(59): Selenocysteine
  MOD_RES (86)..(86): Selenocysteine
  MOD_RES (92)..(92): Selenocysteine
  MOD_RES (104)..(104): Selenocysteine
  MOD_RES (118)..(118): Selenocysteine
  MOD_RES (127)..(127): Selenocysteine
  MOD_RES (133)..(133): Selenocysteine
  MOD_RES (136)..(136): Selenocysteine
  MOD_RES (141)..(141): Selenocysteine
  MOD_RES (175)..(175): Selenocysteine
  MOD_RES (186)..(186): Selenocysteine
  MOD_RES (190)..(190): Selenocysteine
  MOD_RES (216)..(216): Selenocysteine
  MOD_RES (227)..(227): Selenocysteine
  MOD_RES (233)..(233): Selenocysteine
  MOD_RES (253)..(253): Selenocysteine
  MOD_RES (302)..(302): Selenocysteine
MSPXVIILACLGFFLDQSVWAHVGGQDKPFCSAWPSAVVPQGGHVXLRCHYRRGFNIFXLYKKDGVPVPELYNRIFWNSFLISPVXPAHAGXYRCRGFHPHSPXEWSAPSNPLVIMVXGLYEKPSLXARPGPXVRXGENVXLSCSSQSSFDIYHLSREGEAHELRLPAVPSINGXFQADFPLGPAXHGEXYRCFGSFHGSPYEWSDASDPLPVSVXGNPSSSWPSPXEPSFKXGIARHLHAVIRYSVAIILFXILPFFLLHRWCSKKKSKPHEAEARELRALCGSRMGARRCCCNEPRACGXQNSEQGGL

SEQ ID NO: 14440 - protein, 245 aa, Homo sapiens
  MOD_RES (4)..(4): Selenocysteine
  MOD_RES (32)..(32): Selenocysteine
  MOD_RES (38)..(38): Selenocysteine
  MOD_RES (46)..(46): Selenocysteine
  MOD_RES (80)..(80): Selenocysteine
  MOD_RES (91)..(91): Selenocysteine
  MOD_RES (95)..(95): Selenocysteine
  MOD_RES (121)..(121): Selenocysteine
  MOD_RES (132)..(132): Selenocysteine
  MOD_RES (138)..(138): Selenocysteine
  MOD_RES (152)..(152): Selenocysteine
  MOD_RES (167)..(167): Selenocysteine
  MOD_RES (177)..(177): Selenocysteine
  MOD_RES (182)..(182): Selenocysteine
  MOD_RES (193)..(193): Selenocysteine
  MOD_RES (195)..(195): Selenocysteine
  MOD_RES (227)..(228): Selenocysteine
  MOD_RES (233)..(233): Selenocysteine
MSPXVIILACLGFFLDQSVWAHVGLYEKPSLXARPGPXVRAGENVXLSCSSQSSFDIYHLSREGEAHELRLPAVPSINGXFQADFPLGPAXHGEXYRCFGSFHGSPYEWSDPSDPLPVSVXGNPSSSWPSPXEPSFKXDAAVMNQEPAGHRXVNREDSDEQDPQEVXYAQLDHCIFXQRKIXGPSQRSKRPSXDXSVCIELPNAEPRALSPAHEHHSQALMGSSREXXALSQXQLASSNVPAAGI

SEQ ID NO: 14441 - protein, 245 aa, Homo sapiens
  MOD_RES (4)..(4): Selenocysteine
  MOD_RES (32)..(32): Selenocysteine
  MOD_RES (38)..(38): Selenocysteine
  MOD_RES (41)..(41): Selenocysteine
  MOD_RES (46)..(46): Selenocysteine
  MOD_RES (80)..(80): Selenocysteine
  MOD_RES (91)..(91): Selenocysteine
  MOD_RES (95)..(95): Selenocysteine
  MOD_RES (121)..(121): Selenocysteine
  MOD_RES (132)..(132): Selenocysteine
  MOD_RES (138)..(138): Selenocysteine
  MOD_RES (152)..(152): Selenocysteine
  MOD_RES (167)..(167): Selenocysteine
  MOD_RES (177)..(177): Selenocysteine
  MOD_RES (182)..(182): Selenocysteine
  MOD_RES (193)..(193): Selenocysteine
  MOD_RES (195)..(195): Selenocysteine
  MOD_RES (227)..(228): Selenocysteine
  MOD_RES (233)..(233): Selenocysteine
MSPXVIILACLGFFLDQSVWAHVGLYEKPSLXARPGPXVRXGENVXLSCSSQSSFDIYHLSREGEAHELRLPAVPSINGXFQADFPLGPAXHGEXYRCFGSFHGSPYEWSDASDPLPVSVXGNPSSSWPSPXEPSFKXDAAVMNQEPAGHRXVNREDSDEQDPQEVXYAQLDHCIFXQRKIXGPSQRSKRPSXDXSVCIELPNAEPRALSPAHEHHSQALMGSSREXXALSQXQLASSNVPAAGI

SEQ ID NO: 14442 - protein, 398 aa, Homo sapiens
  MOD_RES (1)..(1): Any amino acid
  MOD_RES (5)..(5): Selenocysteine
  MOD_RES (47)..(47): Selenocysteine
  MOD_RES (60)..(60): Selenocysteine
  MOD_RES (87)..(87): Selenocysteine
  MOD_RES (93)..(93): Selenocysteine
  MOD_RES (105)..(105): Selenocysteine
  MOD_RES (119)..(119): Selenocysteine
  MOD_RES (128)..(128): Selenocysteine
  MOD_RES (134)..(134): Selenocysteine
  MOD_RES (142)..(142): Selenocysteine
  MOD_RES (176)..(176): Selenocysteine
  MOD_RES (187)..(187): Selenocysteine
  MOD_RES (191)..(191): Selenocysteine
  MOD_RES (217)..(217): Selenocysteine
  MOD_RES (228)..(228): Selenocysteine
  MOD_RES (234)..(234): Selenocysteine
  MOD_RES (254)..(254): Selenocysteine
  MOD_RES (273)..(273): Selenocysteine
  MOD_RES (305)..(305): Selenocysteine
  MOD_RES (320)..(320): Selenocysteine
  MOD_RES (330)..(330): Selenocysteine
  MOD_RES (335)..(335): Selenocysteine
  MOD_RES (346)..(346): Selenocysteine
  MOD_RES (348)..(348): Selenocysteine
  MOD_RES (380)..(381): Selenocysteine
  MOD_RES (386)..(386): Selenocysteine
XMSPXVIILACLGFFLDQSVWAHVGGQDKPFCSAWPSAVVPQGGHVXLRCHYRRGFNIFXLYKKDGVPVPELYNRIFWNSFLISPVXPAHAGXYRCRGFHPHSPXEWSAPSNPLVIMVXGLYEKPSLXARPGPXVRAGENVXLSCSSQSSFDIYHLSREGEAHELRLPAVPSINGXFQADFPLGPAXHGEXYRCFGSFHGSPYEWSDPSDPLPVSVXGNPSSSWPSPXEPSFKXGIARHLHAVIRYSVAIILFXILPFFLLHRWCSKKKVSLXKQRPENSGPCAEAGWEHADAAVMNQEPAGHRXVNREDSDEQDPQEVXYAQLDHCIFXQRKIXGPSQRSKRPSXDXSVCIELPNAEPRALSPAHEHHSQALMGSSREXXALSQXQLASSNVPAAGI

SEQ ID NO: 14443 - protein, 246 aa, Homo sapiens
  MOD_RES (1)..(1): Any amino acid
  MOD_RES (5)..(5): Selenocysteine
  MOD_RES (33)..(33): Selenocysteine
  MOD_RES (39)..(39): Selenocysteine
  MOD_RES (42)..(42): Selenocysteine
  MOD_RES (47)..(47): Selenocysteine
  MOD_RES (81)..(81): Selenocysteine
  MOD_RES (92)..(92): Selenocysteine
  MOD_RES (96)..(96): Selenocysteine
  MOD_RES (122)..(122): Selenocysteine
  MOD_RES (133)..(133): Selenocysteine
  MOD_RES (139)..(139): Selenocysteine
  MOD_RES (153)..(153): Selenocysteine
  MOD_RES (168)..(168): Selenocysteine
  MOD_RES (178)..(178): Selenocysteine
  MOD_RES (183)..(183): Selenocysteine
  MOD_RES (194)..(194): Selenocysteine
  MOD_RES (196)..(196): Selenocysteine
  MOD_RES (228)..(229): Selenocysteine
  MOD_RES (234)..(234): Selenocysteine
XMSPXVIILACLGFFLDQSVWAHVGLYEKPSLXARPGPXVRXGENVXLSCSSQSSFDIYHLSREGEAHELRLPAVPSINGXFQADFPLGPAXHGEXYRCFGSFHGSPYEWSDASDPLPVSVXGNPSSSWPSPXEPSFKXDAAVMNQEPAGHRXVNREDSDEQDPQEVXYAQLDHCIFXQRKIXGPSQRSKRPSXDXSVCIELPNAEPRALSPAHEHHSQALMGSSREXXALSQXQLASSNVPAAGI

SEQ ID NO: 14444 - protein, 204 aa, Homo sapiens
  MOD_RES (38)..(38): Selenocysteine
  MOD_RES (46)..(46): Selenocysteine
  MOD_RES (80)..(80): Selenocysteine
  MOD_RES (91)..(91): Selenocysteine
  MOD_RES (95)..(95): Selenocysteine
  MOD_RES (121)..(121): Selenocysteine
  MOD_RES (132)..(132): Selenocysteine
  MOD_RES (138)..(138): Selenocysteine
  MOD_RES (150)..(150): Selenocysteine
  MOD_RES (158)..(158): Selenocysteine
  MOD_RES (187)..(187): Selenocysteine
MSLMVVSMACVGFFLLQGAWPHEGLYEKPSLSAQPGPXVLAGESVXLSCSSRSSYDMYHLSREGEAHERRFSAGPKVNGXFQADFPLGPAXHGGXYRCFGSFRDSPYEWSNSSDPLLVSVXGNPSNSWPSPXEPSSKXGNPRHLHVLIGXSVVKIPFXILLFFLLHRWCSNKKNAAVMDQEPAGNRXVNSEDSDEQDHQEVSYA

SEQ ID NO: 14445 - protein, 287 aa, Homo sapiens
  MOD_RES (44)..(44): Selenocysteine
  MOD_RES (69)..(69): Selenocysteine
  MOD_RES (97)..(97): Selenocysteine
  MOD_RES (105)..(105): Selenocysteine
  MOD_RES (123)..(123): Selenocysteine
  MOD_RES (138)..(138): Selenocysteine
  MOD_RES (146)..(146): Selenocysteine
  MOD_RES (180)..(180): Selenocysteine
  MOD_RES (191)..(191): Selenocysteine
  MOD_RES (195)..(195): Selenocysteine
  MOD_RES (221)..(221): Selenocysteine
  MOD_RES (233)..(233): Selenocysteine
  MOD_RES (241)..(241): Selenocysteine
  MOD_RES (270)..(270): Selenocysteine
MSLMVVSMACVGFFLLQGAWPHEGVHRKPSLLAHPGPLVKSEEXVILQCWSDVRFEHFLLHREGKYKDXLHLIGEHHDGVSKANFSIGPMMQDLAGXYRCYGSVXHSPYQLSAPSDPLDIVIXGLYEKPSLSAQPGPXVLAGESVXLSCSSRSSYDMYHLSREGEAHERRFSAGPKVNGXFQADFPLGPAXHGGXYRCFGSFRDSPYEWSNSSDPLLVSVXGNPRHLHVLIGXSVVKIPFXILLFFLLHRWCSNKKNAAVMDQEPAGNRXVNSEDSDEQDHQEVSYA

SEQ ID NO: 14446 - protein, 304 aa, Homo sapiens
  MOD_RES (44)..(44): Selenocysteine
  MOD_RES (69)..(69): Selenocysteine
  MOD_RES (97)..(97): Selenocysteine
  MOD_RES (105)..(105): Selenocysteine
  MOD_RES (123)..(123): Selenocysteine
  MOD_RES (138)..(138): Selenocysteine
  MOD_RES (146)..(146): Selenocysteine
  MOD_RES (180)..(180): Selenocysteine
  MOD_RES (191)..(191): Selenocysteine
  MOD_RES (195)..(195): Selenocysteine
  MOD_RES (221)..(221): Selenocysteine
  MOD_RES (232)..(232): Selenocysteine
  MOD_RES (238)..(238): Selenocysteine
  MOD_RES (250)..(250): Selenocysteine
  MOD_RES (258)..(258): Selenocysteine
  MOD_RES (287)..(287): Selenocysteine
MSLMVVSMACVGFFLLQGAWPHEGVHRKPSLLAHPGPLVKSEEXVILQCWSDVRFEHFLLHREGKYKDXLHLIGEHHDGVSKANFSIGPMMQDLAGXYRCYGSVXHSPYQLSAPSDPLDIVIXGLYEKPSLSAQPGPXVLAGESVXLSCSSRSSYDMYHLSREGEAHERRFSAGPKVNGXFQADFPLGPAXHGGXYRCFGSFRDSPYEWSNSSDPLLVSVXGNPSNSWPSPXEPSSKXGNPRHLHVLIGXSVVKIPFXILLFFLLHRWCSNKKNAAVMDQEPAGNRXVNSEDSDEQDHQEVSYA

SEQ ID NO: 14447 - protein, 427 aa, Homo sapiens
  MOD_RES (46)..(46): Selenocysteine
  MOD_RES (86)..(87): Selenocysteine
  MOD_RES (94)..(94): Selenocysteine
  MOD_RES (104)..(104): Selenocysteine
  MOD_RES (118)..(118): Selenocysteine
  MOD_RES (192)..(192): Selenocysteine
  MOD_RES (200)..(200): Selenocysteine
  MOD_RES (202)..(202): Selenocysteine
  MOD_RES (218)..(218): Selenocysteine
  MOD_RES (241)..(241): Selenocysteine
  MOD_RES (275)..(275): Selenocysteine
  MOD_RES (286)..(286): Selenocysteine
  MOD_RES (290)..(290): Selenocysteine
  MOD_RES (316)..(316): Selenocysteine
  MOD_RES (328)..(328): Selenocysteine
  MOD_RES (365)..(365): Selenocysteine
  MOD_RES (380)..(380): Selenocysteine
  MOD_RES (390)..(390): Selenocysteine
  MOD_RES (395)..(395): Selenocysteine
  MOD_RES (403)..(403): Selenocysteine
  MOD_RES (406)..(406): Selenocysteine
  MOD_RES (408)..(408): Selenocysteine
  MOD_RES (412)..(412): Selenocysteine
MSLMVVSMACVGLFLVQRAGPHMGGQDKPFLSAWPSAVVPRGGHVXLRCHYRHRFNNFMLYKEDRIHIPIFHGRIFQESFNMSPVXXAHAGNYXCRGSHPHSPXGWSAPSNPVVIMVXGNHRKPSLLAHPGPLVKSGERVILQCWSDIMFEHFFLHKEGISKDPSRLVGQIHDGVSKANFSIGPMMLALAGXYRCYGSVXHXPYQLSAPSDPLDIVVXGPYEKPSLSAQPGPKVQAGESVXLSCSSRSSYDMYHLSREGGAHERRLPAVRKVNRXFQADFPLGPAXHGGXYRCFGSFRHSPYEWSDPSDPLLVSVXGNPRHLHILIGXSVVIILFILLLFFLLHLWCSNKKNAAVMDQEPAGNRXANSEDSDEQDPEEVXYAQLDHCVFXQRKIXRPSQRPKXPPXDXILYXELPNAKPRSKVVSCP

SEQ ID NO: 14448 - protein, 444 aa, Homo sapiens
  MOD_RES (46)..(46): Selenocysteine
  MOD_RES (86)..(87): Selenocysteine
  MOD_RES (94)..(94): Selenocysteine
  MOD_RES (104)..(104): Selenocysteine
  MOD_RES (118)..(118): Selenocysteine
  MOD_RES (192)..(192): Selenocysteine
  MOD_RES (200)..(200): Selenocysteine
  MOD_RES (202)..(202): Selenocysteine
  MOD_RES (218)..(218): Selenocysteine
  MOD_RES (241)..(241): Selenocysteine
  MOD_RES (275)..(275): Selenocysteine
  MOD_RES (286)..(286): Selenocysteine
  MOD_RES (290)..(290): Selenocysteine
  MOD_RES (316)..(316): Selenocysteine
  MOD_RES (327)..(327): Selenocysteine
  MOD_RES (345)..(345): Selenocysteine
  MOD_RES (382)..(382): Selenocysteine
  MOD_RES (397)..(397): Selenocysteine
  MOD_RES (407)..(407): Selenocysteine
  MOD_RES (412)..(412): Selenocysteine
  MOD_RES (420)..(420): Selenocysteine
  MOD_RES (423)..(423): Selenocysteine
  MOD_RES (425)..(425): Selenocysteine
  MOD_RES (429)..(429): Selenocysteine
MSLMVVSMACVGLFLVQRAGPHMGGQDKPFLSAWPSAVVPRGGHVXLRCHYRHRFNNFMLYKEDRIHIPIFHGRIFQESFNMSPVXXAHAGNYXCRGSHPHSPXGWSAPSNPVVIMVXGNHRKPSLLAHPGPLVKSGERVILQCWSDIMFEHFFLHKEGISKDPSRLVGQIHDGVSKANFSIGPMMLALAGXYRCYGSVXHXPYQLSAPSDPLDIVVXGPYEKPSLSAQPGPKVQAGESVXLSCSSRSSYDMYHLSREGGAHERRLPAVRKVNRXFQADFPLGPAXHGGXYRCFGSFRHSPYEWSDPSDPLLVSVXGNPSSSWPSPXEPSSKSGNPRHLHILIGXSVVIILFILLLFFLLHLWCSNKKNAAVMDQEPAGNRXANSEDSDEQDPEEVXYAQLDHCVFXQRKIXRPSQRPKXPPXDXILYXELPNAKPRSKVVSCP

SEQ ID NO: 14449 - protein, 455 aa, Homo sapiens
  MOD_RES (46)..(46): Selenocysteine
  MOD_RES (86)..(87): Selenocysteine
  MOD_RES (94)..(94): Selenocysteine
  MOD_RES (104)..(104): Selenocysteine
  MOD_RES (118)..(118): Selenocysteine
  MOD_RES (192)..(192): Selenocysteine
  MOD_RES (200)..(200): Selenocysteine
  MOD_RES (202)..(202): Selenocysteine
  MOD_RES (218)..(218): Selenocysteine
  MOD_RES (241)..(241): Selenocysteine
  MOD_RES (275)..(275): Selenocysteine
  MOD_RES (286)..(286): Selenocysteine
  MOD_RES (290)..(290): Selenocysteine
  MOD_RES (316)..(316): Selenocysteine
  MOD_RES (327)..(327): Selenocysteine
  MOD_RES (345)..(345): Selenocysteine
  MOD_RES (382)..(382): Selenocysteine
  MOD_RES (397)..(397): Selenocysteine
  MOD_RES (420)..(420): Selenocysteine
  MOD_RES (423)..(423): Selenocysteine
  MOD_RES (425)..(425): Selenocysteine
  MOD_RES (429)..(429): Selenocysteine
MSLMVVSMACVGLFLVQRAGPHMGGQDKPFLSAWPSAVVPRGGHVXLRCHYRHRFNNFMLYKEDRIHIPIFHGRIFQESFNMSPVXXAHAGNYXCRGSHPHSPXGWSAPSNPVVIMVXGNHRKPSLLAHPGPLVKSGERVILQCWSDIMFEHFFLHKEGISKDPSRLVGQIHDGVSKANFSIGPMMLALAGXYRCYGSVXHXPYQLSAPSDPLDIVVXGPYEKPSLSAQPGPKVQAGESVXLSCSSRSSYDMYHLSREGGAHERRLPAVRKVNRXFQADFPLGPAXHGGXYRCFGSFRHSPYEWSDPSDPLLVSVXGNPSSSWPSPXEPSSKSGICRHLHVLIGXSVVIFLFILLLFFLLYRWCSNKKNAAVMDQEPAGDRXVNRQDSDEQDPQEVXYAQLDHCVFIQRKISRPSQRPKXPLXDXSVYXELPNAEPRSKVVSCPRAPQSGLEGVF

SEQ ID NO: 14450 - protein, 349 aa, Homo sapiens
  MOD_RES (97)..(97): Selenocysteine
  MOD_RES (105)..(105): Selenocysteine
  MOD_RES (107)..(107): Selenocysteine
  MOD_RES (123)..(123): Selenocysteine
  MOD_RES (146)..(146): Selenocysteine
  MOD_RES (180)..(180): Selenocysteine
  MOD_RES (191)..(191): Selenocysteine
  MOD_RES (195)..(195): Selenocysteine
  MOD_RES (221)..(221): Selenocysteine
  MOD_RES (232)..(232): Selenocysteine
  MOD_RES (250)..(250): Selenocysteine
  MOD_RES (287)..(287): Selenocysteine
  MOD_RES (302)..(302): Selenocysteine
  MOD_RES (312)..(312): Selenocysteine
  MOD_RES (317)..(317): Selenocysteine
  MOD_RES (325)..(325): Selenocysteine
  MOD_RES (328)..(328): Selenocysteine
  MOD_RES (330)..(330): Selenocysteine
  MOD_RES (334)..(334): Selenocysteine
MSLMVVSMACVGLFLVQRAGPHMGNHRKPSLLAHPGPLVKSGERVILQCWSDIMFEHFFLHKEGISKDPSRLVGQIHDGVSKANFSIGPMMLALAGXYRCYGSVXHXPYQLSAPSDPLDIVVXGPYEKPSLSAQPGPKVQAGESVXLSCSSRSSYDMYHLSREGGAHERRLPAVRKVNRXFQADFPLGPAXHGGXYRCFGSFRHSPYEWSDPSDPLLVSVXGNPSSSWPSPXEPSSKSGNPRHLHILIGXSVVIILFILLLFFLLHLWCSNKKNAAVMDQEPAGNRXANSEDSDEQDPEEVXYAQLDHCVFXQRKIXRPSQRPKXPPXDXILYXELPNAKPRSKVVSCP

SEQ ID NO: 14451 - protein, 382 aa, Homo sapiens
  MOD_RES (46)..(46): Selenocysteine
  MOD_RES (86)..(87): Selenocysteine
  MOD_RES (94)..(94): Selenocysteine
  MOD_RES (104)..(104): Selenocysteine
  MOD_RES (118)..(118): Selenocysteine
  MOD_RES (192)..(192): Selenocysteine
  MOD_RES (200)..(200): Selenocysteine
  MOD_RES (202)..(202): Selenocysteine
  MOD_RES (218)..(218): Selenocysteine
  MOD_RES (241)..(241): Selenocysteine
  MOD_RES (275)..(275): Selenocysteine
  MOD_RES (286)..(286): Selenocysteine
  MOD_RES (290)..(290): Selenocysteine
  MOD_RES (316)..(316): Selenocysteine
  MOD_RES (327)..(327): Selenocysteine
  MOD_RES (345)..(345): Selenocysteine
  MOD_RES (353)..(353): Selenocysteine
MLLMVVSMACVGLFLVQRAGPHMGGQDKPFLSAWPSAVVPRGGHVXLRCHYRHRFNNFMLYKEDRIHVPIFHGRIFQEGFNMSPVXXAHAGNYXCRGSHPHSPXGWSAPSNPMVIMVXGNHRKPSLLAHPGPLVKSGERVILQCWSDIMFEHFFLHKEWISKDPSRLVGQIHDGVSKANFSIGSMMRALAGXYRCYGSVXHXPYQLSAPSDPLDIVVXGLYEKPSLSAQPGPKVQAGESVXLSCSSRSSYDMYHLSREGGAHERRLPAVRKVNRXFQADFPLGPAXHGGXYRCFGSFRHSPYEWSDPSDPLLVSVXGNPSSSWPSPXEPSSKSGNLRHLHILIGXSVVKIPFXILLFFLLHRWCSNKKKCCCNGPRACREQK

SEQ ID NO: 14452 - protein, 388 aa, Homo sapiens
  MOD_RES (46)..(46): Selenocysteine
  MOD_RES (86)..(87): Selenocysteine
  MOD_RES (94)..(94): Selenocysteine
  MOD_RES (104)..(104): Selenocysteine
  MOD_RES (118)..(118): Selenocysteine
  MOD_RES (192)..(192): Selenocysteine
  MOD_RES (200)..(200): Selenocysteine
  MOD_RES (202)..(202): Selenocysteine
  MOD_RES (218)..(218): Selenocysteine
  MOD_RES (241)..(241): Selenocysteine
  MOD_RES (275)..(275): Selenocysteine
  MOD_RES (286)..(286): Selenocysteine
  MOD_RES (290)..(290): Selenocysteine
  MOD_RES (316)..(316): Selenocysteine
  MOD_RES (327)..(327): Selenocysteine
  MOD_RES (345)..(345): Selenocysteine
  MOD_RES (353)..(353): Selenocysteine
MLLMVVSMACVGLFLVQRAGPHMGGQDKPFLSAWPSAVVPRGGHVXLRCHYRHRFNNFMLYKEDRIHVPIFHGRIFQEGFNMSPVXXAHAGNYXCRGSHPHSPXGWSAPSNPMVIMVXGNHRKPSLLAHPGPLVKSGERVILQCWSDIMFEHFFLHKEWISKDPSRLVGQIHDGVSKANFSIGSMMRALAGXYRCYGSVXHXPYQLSAPSDPLDIVVXGLYEKPSLSAQPGPKVQAGESVXLSCSSRSSYDMYHLSREGGAHERRLPAVRKVNRXFQADFPLGPAXHGGXYRCFGSFRHSPYEWSDPSDPLLVSVXGNPSSSWPSPXEPSSKSGNLRHLHILIGXSVVKIPFXILLFFLLHRWCSNKKKNAAVMDQEPAGNRSEQRGF

SEQ ID NO: 14453 - protein, 387 aa, Homo sapiens
  MOD_RES (46)..(46): Selenocysteine
  MOD_RES (86)..(87): Selenocysteine
  MOD_RES (94)..(94): Selenocysteine
  MOD_RES (104)..(104): Selenocysteine
  MOD_RES (118)..(118): Selenocysteine
  MOD_RES (192)..(192): Selenocysteine
  MOD_RES (200)..(200): Selenocysteine
  MOD_RES (202)..(202): Selenocysteine
  MOD_RES (218)..(218): Selenocysteine
  MOD_RES (241)..(241): Selenocysteine
  MOD_RES (275)..(275): Selenocysteine
  MOD_RES (286)..(286): Selenocysteine
  MOD_RES (290)..(290): Selenocysteine
  MOD_RES (316)..(316): Selenocysteine
  MOD_RES (327)..(327): Selenocysteine
  MOD_RES (345)..(345): Selenocysteine
  MOD_RES (353)..(353): Selenocysteine
MSLMVVSMACVGLFLVQRAGPHMGGQDKPFLSAWPSAVVPRGGHVXLRCHYRHRFNNFMLYKEDRIHVPIFHGRIFQEGFNMSPVXXAHAGNYXCRGSHPHSPXGWSAPSNPMVIMVXGNHRKPSLLAHPGPLVKSGERVILQCWSDIMFEHFFLHKEWISKDPSRLVGQIHDGVSKANFSIGSMMRALAGXYRCYGSVXHXPYQLSAPSDPLDIVVXGLYEKPSLSAQPGPKVQAGESVXLSCSSRSSYDMYHLSREGGAHERRLPAVRKVNRXFQADFPLGPAXHGGXYRCFGSFRHSPYEWSDPSDPLLVSVXGNPSSSWPSPXEPSSKSGNLRHLHILIGXSVVKIPFXILLFFLLHRWCSNKKNAAVMDQEPAGNRSEQRGF

SEQ ID NO: 14454 - protein, 138 aa, Homo sapiens
  MOD_RES (16)..(16): Selenocysteine
  MOD_RES (34)..(34): Selenocysteine
  MOD_RES (54)..(54): Selenocysteine
  MOD_RES (61)..(61): Selenocysteine
  MOD_RES (69)..(69): Selenocysteine
MNSLVSWQLLLFLCAXHFGEPLEKVASVGNSRPXGQQLESLGLLAPGEQSLPCXERKPAAXARLSRRGXSLSPPPESSGSPQQPGLSAPHSRQIPAPQGAVLVQREKDLPNYNWNSFGLRFGKREAAPGNHGRSAGRG

SEQ ID NO: 14455 - protein, 144 aa, Homo sapiens
  MOD_RES (16)..(16): Selenocysteine
  MOD_RES (34)..(34): Selenocysteine
  MOD_RES (54)..(54): Selenocysteine
  MOD_RES (61)..(61): Selenocysteine
  MOD_RES (69)..(69): Selenocysteine
MNSLVSWQLLLFLCAXHFGEPLEKVASVGNSRPXGQQLESLGLLAPGEQSLPCXERKPAAXARLSRRGXSLSPPPESSGSPQQPGLSAPHSRQIPAPQGAVLVQREKDLPNYNWNSFGLRFGKREAAPGNHGRSAGRGGAGAGQ

SEQ ID NO: 14456 - protein, 226 aa, Homo sapiens
  MOD_RES (3)..(3): Selenocysteine
  MOD_RES (6)..(6): Selenocysteine
  MOD_RES (75)..(75): Selenocysteine
  MOD_RES (77)..(77): Selenocysteine
  MOD_RES (87)..(87): Selenocysteine
  MOD_RES (90)..(90): Selenocysteine
  MOD_RES (99)..(99): Selenocysteine
  MOD_RES (129)..(129): Selenocysteine
  MOD_RES (132)..(132): Selenocysteine
  MOD_RES (134)..(134): Selenocysteine
  MOD_RES (144)..(144): Selenocysteine
  MOD_RES (155)..(155): Selenocysteine
  MOD_RES (219)..(219): Selenocysteine
MHXVAXSGPNASWGAPANASGCPGCGANASDGPVPSPRAVDAWLVPLFFAALMLLGLVGNSLVIYVICRHKPMRXVXNFYIANLAAXDVXFLLCCVPFXALLYPLPGWVLGDFMCKFVNYIQQVSVQAXCAXLXAMSVDRWYVXVFPLRALHRRXPRLALAVSLSIWVGAGAGRARRRRAGQGLAAGGGRGPALRRLLGPHPAVPGAAGAGPRGLLAPXQLRRLRA

SEQ ID NO: 14457 - protein, 398 aa, Homo sapiens
  MOD_RES (3)..(3): Selenocysteine
  MOD_RES (6)..(6): Selenocysteine
  MOD_RES (75)..(75): Selenocysteine
  MOD_RES (77)..(77): Selenocysteine
  MOD_RES (87)..(87): Selenocysteine
  MOD_RES (90)..(90): Selenocysteine
  MOD_RES (99)..(99): Selenocysteine
  MOD_RES (129)..(129): Selenocysteine
  MOD_RES (132)..(132): Selenocysteine
  MOD_RES (134)..(134): Selenocysteine
  MOD_RES (144)..(144): Selenocysteine
  MOD_RES (155)..(155): Selenocysteine
  MOD_RES (220)..(220): Selenocysteine
  MOD_RES (306)..(306): Selenocysteine
MHXVAXSGPNASWGAPANASGCPGCGANASDGPVPSPRAVDAWLVPLFFAALMLLGLVGNSLVIYVICRHKPMRXVXNFYIANLAAXDVXFLLCCVPFXALLYPLPGWVLGDFMCKFVNYIQQVSVQAXCAXLXAMSVDRWYVXVFPLRALHRRXPRLALAVSLSIWVGSAAVSAPVLALHRLSPGPRAYCSEAFPSRALERAFALYNLLALYLLPLLAXCACYAAMLRHLGRVAVRPAPADSALQGQVLAERAGAVRAKVSRLVAAVVLLFAACWGPIQLFLVLQALGPAGSWHPRSYAAYALKXWAHCMSYSNSALNPLLYAFLGSHFRQAFRRVCPCAPRRPRRPRRPGPSDPAAPHAELLRLGSHPAPARAQKPGSSGLAARGLCVLGEDNAPL

SEQ ID NO: 14458 - protein, 97 aa, Homo sapiens
  MOD_RES (3)..(3): Selenocysteine
  MOD_RES (6)..(6): Selenocysteine
  MOD_RES (75)..(75): Selenocysteine
  MOD_RES (77)..(77): Selenocysteine
MHXVAXSGPNASWGAPANASGCPGCGANASDGPVPSPRAVDAWLVPLFFAALMLLGLVGNSLVIYVICRHKPMRXVXNFYIGLGAGHVCHSDRHECG

SEQ ID NO: 14459 - protein, 972 aa, Homo sapiens
  MOD_RES (22)..(22): Selenocysteine
  MOD_RES (59)..(59): Selenocysteine
  MOD_RES (67)..(67): Selenocysteine
  MOD_RES (74)..(74): Selenocysteine
  MOD_RES (84)..(84): Selenocysteine
  MOD_RES (90)..(90): Selenocysteine
  MOD_RES (92)..(92): Selenocysteine
  MOD_RES (96)..(96): Selenocysteine
  MOD_RES (98)..(98): Selenocysteine
  MOD_RES (132)..(132): Selenocysteine
  MOD_RES (139)..(139): Selenocysteine
  MOD_RES (144)..(144): Selenocysteine
  MOD_RES (230)..(230): Selenocysteine
  MOD_RES (232)..(232): Selenocysteine
  MOD_RES (234)..(234): Selenocysteine
  MOD_RES (245)..(245): Selenocysteine
  MOD_RES (253)..(253): Selenocysteine
  MOD_RES (274)..(274): Selenocysteine
  MOD_RES (276)..(276): Selenocysteine
  MOD_RES (295)..(295): Selenocysteine
  MOD_RES (302)..(304): Selenocysteine
  MOD_RES (321)..(322): Selenocysteine
  MOD_RES (354)..(354): Selenocysteine
  MOD_RES (356)..(356): Selenocysteine
  MOD_RES (380)..(380): Selenocysteine
  MOD_RES (385)..(385): Selenocysteine
  MOD_RES (389)..(389): Selenocysteine
  MOD_RES (391)..(391): Selenocysteine
  MOD_RES (411)..(411): Selenocysteine
  MOD_RES (417)..(417): Selenocysteine
  MOD_RES (437)..(437): Selenocysteine
  MOD_RES (446)..(446): Selenocysteine
  MOD_RES (461)..(461): Selenocysteine
  MOD_RES (488)..(488): Selenocysteine
  MOD_RES (500)..(500): Selenocysteine
  MOD_RES (516)..(516): Selenocysteine
  MOD_RES (519)..(519): Selenocysteine
  MOD_RES (540)..(540): Selenocysteine
  MOD_RES (570)..(570): Selenocysteine
  MOD_RES (590)..(590): Selenocysteine
  MOD_RES (603)..(603): Selenocysteine
  MOD_RES (615)..(615): Selenocysteine
  MOD_RES (628)..(628): Selenocysteine
  MOD_RES (657)..(657): Selenocysteine
  MOD_RES (662)..(662): Selenocysteine
  MOD_RES (666)..(666): Selenocysteine
  MOD_RES (714)..(714): Selenocysteine
  MOD_RES (730)..(730): Selenocysteine
  MOD_RES (749)..(749): Selenocysteine
  MOD_RES (797)..(797): Selenocysteine
  MOD_RES (802)..(802): Selenocysteine
  MOD_RES (843)..(843): Selenocysteine
  MOD_RES (901)..(901): Selenocysteine
  MOD_RES (912)..(912): Selenocysteine
  MOD_RES (928)..(928): Selenocysteine
  MOD_RES (959)..(959): Selenocysteine
MRGARGAWDFLCVLLLLLRVQXGSSQPSVSPGEPSPPSIHPGKSDLIVRVGDEIRLLCXDPGFVKWXFEILDEXNENKQNEWIXEKAEAXNXGKYXCXNKHGLSNSIYVFVRDPAKLFLVDRSLYGKEDNDXLVRCPLXDPEVXNYSLKGCQGKPLPKDLRFIPDPKAGIMIKSVKRAYHRLCLHCSVDQEGKSVLSEKFILKVRPAFKAVPVVSVSKASYLLREGEEFXVXCXIKDVSSSVYSXWKRENSQXKLQEKYNSWHHGDFNYERQAXLXISSARVNDSGVFMCYANNXFGSANVXXXLEVVDKGFINIFPMINXXVFVNDGENVDLIVEYEAFPKPEHQQWIYMNRXFXDKWEDYPKSENESNIRYVSELHLXRLKGXEGGXYXFLVSNSDVNAAIAFNVYVNXKPEILXYDRLVNGMLQCVAAGFPEPXIDWYFCPGXEQRCSASVLPVDVQXLNSSGPPFGKLVVQSSIDSSAFKHNGXVECKAYNDVGKXSAYFNFAFKEQIHPHXLFXPLLIGFVIVAGMMCIIVMILXYKYLQKPMYEVQWKVVEEINGNNYVYIDPXQLPYDHKWEFPRNRLSFGKXLGAGAFGKVVEAXAYGLIKSDAAMXVAVKMLKPSAHLXEREALMSELKVLSYLGNHMNIVNLLGACXIGGPXLVIXEYCCYGDLLNFLRRKRDSFICSKQEDHAEAALYKNLLHSKESSCSDSXNEYMDMKPGVSYVVPXKADKRRSVRIGSYIERDVXPAIMEDDELALDLEDLLSFSYQVAKGMAFLASKNCIHRDLAARNILLXHGRIXKICDFGLARDIKNDSNYVVKGNARLPVKWMAPESIFNCVYXFESDVWSYGIFLWELFSLGSSPYPGMPVDSKFYKMIKEGFRMLSPEHAPAEMYDIMKXCWDADPLKRPXFKQIVQLIEKQISESXNHIYSNLANCSPNRQKPVVDHSVRINSVGSXASSSQPLLVHDDV

SEQ ID NO: 14460 - protein, 976 aa, Homo sapiens
  MOD_RES (22)..(22): Selenocysteine
  MOD_RES (59)..(59): Selenocysteine
  MOD_RES (67)..(67): Selenocysteine
  MOD_RES (74)..(74): Selenocysteine
  MOD_RES (84)..(84): Selenocysteine
  MOD_RES (90)..(90): Selenocysteine
  MOD_RES (92)..(92): Selenocysteine
  MOD_RES (96)..(96): Selenocysteine
  MOD_RES (98)..(98): Selenocysteine
  MOD_RES (132)..(132): Selenocysteine
  MOD_RES (139)..(139): Selenocysteine
  MOD_RES (144)..(144): Selenocysteine
  MOD_RES (230)..(230): Selenocysteine
  MOD_RES (232)..(232): Selenocysteine
  MOD_RES (234)..(234): Selenocysteine
  MOD_RES (245)..(245): Selenocysteine
  MOD_RES (253)..(253): Selenocysteine
  MOD_RES (274)..(274): Selenocysteine
  MOD_RES (276)..(276): Selenocysteine
  MOD_RES (295)..(295): Selenocysteine
  MOD_RES (302)..(304): Selenocysteine
  MOD_RES (321)..(322): Selenocysteine
  MOD_RES (354)..(354): Selenocysteine
  MOD_RES (356)..(356): Selenocysteine
  MOD_RES (380)..(380): Selenocysteine
  MOD_RES (385)..(385): Selenocysteine
  MOD_RES (389)..(389): Selenocysteine
  MOD_RES (391)..(391): Selenocysteine
  MOD_RES (411)..(411): Selenocysteine
  MOD_RES (417)..(417): Selenocysteine
  MOD_RES (437)..(437): Selenocysteine
  MOD_RES (446)..(446): Selenocysteine
  MOD_RES (461)..(461): Selenocysteine
  MOD_RES (488)..(488): Selenocysteine
  MOD_RES (500)..(500): Selenocysteine
  MOD_RES (520)..(520): Selenocysteine
  MOD_RES (523)..(523): Selenocysteine
  MOD_RES (544)..(544): Selenocysteine
  MOD_RES (574)..(574): Selenocysteine
  MOD_RES (594)..(594): Selenocysteine
  MOD_RES (607)..(607): Selenocysteine
  MOD_RES (619)..(619): Selenocysteine
  MOD_RES (632)..(632): Selenocysteine
  MOD_RES (661)..(661): Selenocysteine
  MOD_RES (666)..(666): Selenocysteine
  MOD_RES (670)..(670): Selenocysteine
  MOD_RES (718)..(718): Selenocysteine
  MOD_RES (734)..(734): Selenocysteine
  MOD_RES (753)..(753): Selenocysteine
  MOD_RES (801)..(801): Selenocysteine
  MOD_RES (806)..(806): Selenocysteine
  MOD_RES (847)..(847): Selenocysteine
  MOD_RES (905)..(905): Selenocysteine
  MOD_RES (916)..(916): Selenocysteine
  MOD_RES (932)..(932): Selenocysteine
  MOD_RES (963)..(963): Selenocysteine
MRGARGAWDFLCVLLLLLRVQXGSSQPSVSPGEPSPPSIHPGKSDLIVRVGDEIRLLCXDPGFVKWXFEILDEXNENKQNEWIXEKAEAXNXGKYXCXNKHGLSNSIYVFVRDPAKLFLVDRSLYGKEDNDXLVRCPLXDPEVXNYSLKGCQGKPLPKDLRFIPDPKAGIMIKSVKRAYHRLCLHCSVDQEGKSVLSEKFILKVRPAFKAVPVVSVSKASYLLREGEEFXVXCXIKDVSSSVYSXWKRENSQXKLQEKYNSWHHGDFNYERQAXLXISSARVNDSGVFMCYANNXFGSANVXXXLEVVDKGFINIFPMINXXVFVNDGENVDLIVEYEAFPKPEHQQWIYMNRXFXDKWEDYPKSENESNIRYVSELHLXRLKGXEGGXYXFLVSNSDVNAAIAFNVYVNXKPEILXYDRLVNGMLQCVAAGFPEPXIDWYFCPGXEQRCSASVLPVDVQXLNSSGPPFGKLVVQSSIDSSAFKHNGXVECKAYNDVGKXSAYFNFAFKGNNKEQIHPHXLFXPLLIGFVIVAGMMCIIVMILXYKYLQKPMYEVQWKVVEEINGNNYVYIDPXQLPYDHKWEFPRNRLSFGKXLGAGAFGKVVEAXAYGLIKSDAAMXVAVKMLKPSAHLXEREALMSELKVLSYLGNHMNIVNLLGACXIGGPXLVIXEYCCYGDLLNFLRRKRDSFICSKQEDHAEAALYKNLLHSKESSCSDSXNEYMDMKPGVSYVVPXKADKRRSVRIGSYIERDVXPAIMEDDELALDLEDLLSFSYQVAKGMAFLASKNCIHRDLAARNILLXHGRIXKICDFGLARDIKNDSNYVVKGNARLPVKWMAPESIFNCVYXFESDVWSYGIFLWELFSLGSSPYPGMPVDSKFYKMIKEGFRMLSPEHAPAEMYDIMKXCWDADPLKRPXFKQIVQLIEKQISESXNHIYSNLANCSPNRQKPVVDHSVRINSVGSXASSSQPLLVHDDV

SEQ ID NO: 14461 - protein, 44 aa, Homo sapiens
  MOD_RES (33)..(33): Selenocysteine
ENSSKCFSVCCKRKRESFKKCNCGLYQHCYFRXLAGNSSCLLHK

SEQ ID NO: 14462 - protein, 56 aa, Homo sapiens
  MOD_RES (28)..(28): Selenocysteine
MALPALFSLIIGFAFGALYWKKRQPSLXRAVENIQINEEDNEISMLQEKEREFQEV

SEQ ID NO: 14463 - protein, 24 aa, Homo sapiens
  MOD_RES (3)..(3): Selenocysteine
MIXLKYVPGMDVLPSHCWISEMVV

SEQ ID NO: 14464 - protein, 273 aa, Homo sapiens
  MOD_RES (4)..(4): Selenocysteine
  MOD_RES (6)..(6): Selenocysteine
  MOD_RES (10)..(10): Selenocysteine
  MOD_RES (25)..(25): Selenocysteine
  MOD_RES (34)..(34): Selenocysteine
  MOD_RES (41)..(41): Selenocysteine
  MOD_RES (54)..(54): Selenocysteine
  MOD_RES (82)..(82): Selenocysteine
  MOD_RES (136)..(136): Selenocysteine
  MOD_RES (160)..(160): Selenocysteine
  MOD_RES (168)..(168): Selenocysteine
  MOD_RES (180)..(180): Selenocysteine
  MOD_RES (245)..(245): Selenocysteine
MKKXQXWILXCIYLQLLLFNPLVKXEGICRNRVXNNVKDVXKLVANLPKDYMIXLKYVPGMDVLPSHCWISEMVVQLSDSLXDLLDKFSNISEGLSNYSIIDKLVNIVDDLVECVKENSSKDLKKSFKSPEPRLFXPEEFFRIFNRSIDAFKDFVVASEXSDCVVSSXLSPEKDSRVSVXKPFMLPPVAASSLRNDSSSSNRKAKNPPGDSSLHWAAMALPALFSLIIGFAFGALYWKKRQPSLXRAVENIQINEEDNEISMLQEKEREFQEV

SEQ ID NO: 14465 - protein, 245 aa, Homo sapiens
  MOD_RES (4)..(4): Selenocysteine
  MOD_RES (6)..(6): Selenocysteine
  MOD_RES (10)..(10): Selenocysteine
  MOD_RES (25)..(25): Selenocysteine
  MOD_RES (34)..(34): Selenocysteine
  MOD_RES (41)..(41): Selenocysteine
  MOD_RES (54)..(54): Selenocysteine
  MOD_RES (82)..(82): Selenocysteine
  MOD_RES (136)..(136): Selenocysteine
  MOD_RES (160)..(160): Selenocysteine
  MOD_RES (168)..(168): Selenocysteine
  MOD_RES (217)..(217): Selenocysteine
MKKXQXWILXCIYLQLLLFNPLVKXEGICRNRVXNNVKDVXKLVANLPKDYMIXLKYVPGMDVLPSHCWISEMVVQLSDSLXDLLDKFSNISEGLSNYSIIDKLVNIVDDLVECVKENSSKDLKKSFKSPEPRLFXPEEFFRIFNRSIDAFKDFVVASEXSDCVVSSXLSPEKGKAKNPPGDSSLHWAAMALPALFSLIIGFAFGALYWKKRQPSLXRAVENIQINEEDNEISMLQEKEREFQEV

SEQ ID NO: 14466 - protein, 1012 aa, Homo sapiens
  MOD_RES (41)..(41): Selenocysteine
  MOD_RES (60)..(60): Selenocysteine
  MOD_RES (76)..(76): Selenocysteine
  MOD_RES (92)..(92): Selenocysteine
  MOD_RES (94)..(94): Selenocysteine
  MOD_RES (121)..(121): Selenocysteine
  MOD_RES (136)..(136): Selenocysteine
  MOD_RES (145)..(145): Selenocysteine
  MOD_RES (190)..(190): Selenocysteine
  MOD_RES (236)..(236): Selenocysteine
  MOD_RES (250)..(250): Selenocysteine
  MOD_RES (284)..(284): Selenocysteine
  MOD_RES (289)..(289): Selenocysteine
  MOD_RES (309)..(309): Selenocysteine
  MOD_RES (353)..(353): Selenocysteine
  MOD_RES (363)..(363): Selenocysteine
  MOD_RES (374)..(374): Selenocysteine
  MOD_RES (422)..(423): Selenocysteine
  MOD_RES (441)..(441): Selenocysteine
  MOD_RES (456)..(456): Selenocysteine
  MOD_RES (518)..(518): Selenocysteine
  MOD_RES (536)..(537): Selenocysteine
  MOD_RES (542)..(542): Selenocysteine
  MOD_RES (565)..(565): Selenocysteine
  MOD_RES (591)..(591): Selenocysteine
  MOD_RES (614)..(614): Selenocysteine
  MOD_RES (632)..(632): Selenocysteine
  MOD_RES (662)..(662): Selenocysteine
  MOD_RES (686)..(686): Selenocysteine
  MOD_RES (692)..(692): Selenocysteine
  MOD_RES (696)..(696): Selenocysteine
  MOD_RES (790)..(790): Selenocysteine
  MOD_RES (800)..(800): Selenocysteine
  MOD_RES (810)..(811): Selenocysteine
  MOD_RES (834)..(834): Selenocysteine
  MOD_RES (837)..(837): Selenocysteine
  MOD_RES (921)..(921): Selenocysteine
  MOD_RES (958)..(958): Selenocysteine
  MOD_RES (968)..(968): Selenocysteine
  MOD_RES (971)..(971): Selenocysteine
  MOD_RES (978)..(978): Selenocysteine
MPASAPPRRPRPPPPSLSLLLVLLGLGGRRLRAEPGDGAQXWARFSRPPAPEAAGLFQGXFPDGFLWAVGSAAYQXEGGWQQHGKGASIWDXFXHHPLAPPGDSRNASLPLGAPSPLQPAXGDVASDSYNNVFRDXEALRELGVXHYRFSISWARVLPNGSAGVPNREGLRYYRRLLERLRELGVQPVVXLYHWDLPQRLQDAYGGWANRALADHFRDYAELCFRHFGGQVKYWIXIDNPYVVAWHGYAXGRLAPGIRGSPRLGYLVAHNLLLAHAKVWHLYNXSFRPXQGGQVSIALSSHWINPRRMXDHSIKECQKSLDFVLGWFAKPVFIDGDYPESMKNNLSSILPDFXESEKKFIKGXADFFALCFGPXLSFQLLDPHMKFRQLESPNLRQLLSWIDLEFNHPQIFIVENGWFVSGXXKRDDAKYMYYLKKFIMEXLKAIKLDGVDVIGYXAWSLMDGFEWHRGYSIRRGLFYVDFLSQDKMLLPKSSALFYQKLIEKNGFPPLPENQPLEGXFPCDFAWGVVDNYIQVDXXLSQFXDLNVYLWDVHHSKRLIKVDGVVXKKRKSYCVDFAAIQPQIALLQEMHVXHFRFSLDWALILPLGNQSQVNHXILQYYRCMASELVRVNIXPVVALWQPMAPNQGLPRLLARQGAWENPYXALAFAEYARLCFQELGHHVKLWIXMNEPYXRNMXYSAGHNLLKAHALAWHVYNEKFRHAQNGKISIALQADWIEPACPFSQKDKEVAERVLEFDIGWLAEPIFGSGDYPWVMRDWLNQRNNFLLPYFXEDEKKLIQGXFDFLALSHYXXILVDSEKEDPIKYNDYLEVQEMXDIXWLNSPSQVAVVPWGLRKVLNWLKFKYGDLPMYIISNGIDDGLHAEDDQLRVYYMQNYINEALKAHILDGINLCGYFAYSFNDRXAPRFGLYRYAADQFEPKASMKHYRKIIDSNGFPGPEXLERFCPEEFXVCXECSFFHXRKSLLAFIAFLFFASIISLSLIFYYSKKGRRSYK

SEQ ID NO: 14467 - protein, 1044 aa, Homo sapiens
  MOD_RES (19)..(19): Selenocysteine
  MOD_RES (23)..(24): Selenocysteine
  MOD_RES (29)..(29): Selenocysteine
  MOD_RES (51)..(51): Selenocysteine
  MOD_RES (68)..(68): Selenocysteine
  MOD_RES (80)..(80): Selenocysteine
  MOD_RES (91)..(91): Selenocysteine
  MOD_RES (116)..(116): Selenocysteine
  MOD_RES (124)..(124): Selenocysteine
  MOD_RES (165)..(165): Selenocysteine
  MOD_RES (177)..(177): Selenocysteine
  MOD_RES (192)..(192): Selenocysteine
  MOD_RES (213)..(213): Selenocysteine
  MOD_RES (223)..(223): Selenocysteine
  MOD_RES (238)..(238): Selenocysteine
  MOD_RES (252)..(252): Selenocysteine
  MOD_RES (268)..(268): Selenocysteine
  MOD_RES (286)..(286): Selenocysteine
  MOD_RES (299)..(299): Selenocysteine
  MOD_RES (313)..(313): Selenocysteine
  MOD_RES (366)..(366): Selenocysteine
  MOD_RES (384)..(384): Selenocysteine
  MOD_RES (421)..(421): Selenocysteine
  MOD_RES (427)..(427): Selenocysteine
  MOD_RES (430)..(431): Selenocysteine
  MOD_RES (458)..(458): Selenocysteine
  MOD_RES (473)..(473): Selenocysteine
  MOD_RES (514)..(514): Selenocysteine
  MOD_RES (530)..(530): Selenocysteine
  MOD_RES (556)..(556): Selenocysteine
  MOD_RES (571)..(571): Selenocysteine
  MOD_RES (577)..(577): Selenocysteine
  MOD_RES (595)..(595): Selenocysteine
  MOD_RES (609)..(609): Selenocysteine
  MOD_RES (640)..(640): Selenocysteine
  MOD_RES (645)..(645): Selenocysteine
  MOD_RES (666)..(666): Selenocysteine
  MOD_RES (690)..(690): Selenocysteine
  MOD_RES (708)..(708): Selenocysteine
  MOD_RES (779)..(779): Selenocysteine
  MOD_RES (807)..(807): Selenocysteine
  MOD_RES (817)..(817): Selenocysteine
  MOD_RES (827)..(828): Selenocysteine
  MOD_RES (854)..(854): Selenocysteine
  MOD_RES (860)..(860): Selenocysteine
  MOD_RES (888)..(888): Selenocysteine
  MOD_RES (946)..(946): Selenocysteine
  MOD_RES (979)..(979): Selenocysteine
  MOD_RES (983)..(983): Selenocysteine
  MOD_RES (986)..(986): Selenocysteine
  MOD_RES (1007)..(1007): Selenocysteine
MKPGCAAGSPGNEWIFFSXDEIXXRYRNXMSNGGLQRSVILSALILLRAVXGFSGDGRAIWSKNPNFXPVNESQLFLYDXFPKNFFWGIGXGALQVEGSWKKDGKGPSIWDHFIHXHLKNVSSXNGSSDSYIFLEKDLSALDFIGVSFYQFSISWPRLFPDGIVXVANAKGLQYYSXLLDALVLRNIEPIVXLYHWDLPLALQEKYGGWKNDXIIDIFNDYAXYCFQMFGDRVKYWIXIHNPYLVAWHGYGXGMHAPGEKGNLAAVYXVGHNLIKAHSKVWHNYNXHFRPHQKGWLSIXLGSHWIEPNRSENXMDIFKCQQSMVSVLGWFANPIHGDGDYPEGMRKKLFSVLPIFSEAEKHEMRGXADFFAFSFGPNNFKPLNXMAKMGQNVSLNLREALNWIKLEYNNPRILIAENGWFXDSRVKXEDXXAIYMMKNFLSQVLQAIRLDEIRVFGYXAWSLLDGFEWQDAYXIRRGLFYVDFNSKQKERKPKSSAHYYKQIIRENGFSLKESXPDVQGQFPCDFSWGVXESVLKPESVASSPQFSDPHLYVWNAXGNRLLHRVEGVRLKXRPAQCXDFVNIKKQLEMLARMKVXHYRFALDWASVLPXGNLSAVNRQALRYYRCVVSEGLKLGISAMVXLYYPXHAHLGLPEPLLHADGWLNPSXAEAFQAYAGLCFQELGDLVKLWIXINEPNRLSDIYNRSGNDXYGAAHNLLVAHALAWRLYDRQFRPSQRGAVSLSLHADWAEPANPYADSHWRAAERFLQFEIAWFAEPLFKXGDYPAAMREYIASKHRRGLSSSALPRLXEAERRLLKGXVDFCALNHFXXRFVMHEQLAGSRYDSDRDIQFLQDIXRLSSPXRLAVIPWGVRKLLRWVRRNYGDMDIYIXASGIDDQALEDDRLRKYYLGKYLQEVLKAYLIDKVRIKGYYAFKLAEEKSKPRFGFFXSDFKAKSSIQFYNKVISSRGFPFENSSSRCSQXQENXECXVCLFLVQKKPLIFLGCCFFSXLVLLLSIAIFQRQKRRKFWKAKNLQHIPLKKGKRVVS

SEQ ID NO: 14468 - protein, 362 aa, Homo sapiens
  MOD_RES (3)..(3): Selenocysteine
  MOD_RES (6)..(6): Selenocysteine
  MOD_RES (13)..(13): Selenocysteine
  MOD_RES (15)..(15): Selenocysteine
  MOD_RES (23)..(23): Selenocysteine
  MOD_RES (47)..(47): Selenocysteine
  MOD_RES (72)..(72): Selenocysteine
  MOD_RES (80)..(80): Selenocysteine
  MOD_RES (93)..(93): Selenocysteine
  MOD_RES (112)..(112): Selenocysteine
  MOD_RES (185)..(185): Selenocysteine
  MOD_RES (231)..(231): Selenocysteine
  MOD_RES (243)..(243): Selenocysteine
  MOD_RES (246)..(246): Selenocysteine
  MOD_RES (251)..(251): Selenocysteine
  MOD_RES (261)..(261): Selenocysteine
  MOD_RES (280)..(280): Selenocysteine
  MOD_RES (291)..(291): Selenocysteine
  MOD_RES (302)..(302): Selenocysteine
  MOD_RES (304)..(304): Selenocysteine
  MOD_RES (312)..(312): Selenocysteine
  MOD_RES (327)..(327): Selenocysteine
  MOD_RES (334)..(334): Selenocysteine
MAXAEXALPSISXLXALGPFPDXQDDFLKWWRSEEAQDMGPGPPDPXEPPLHVKSEDQPGEEEDDERGADAXWDLDLLLXNFSGPEPGGAPQXCALAPSEASGAQYPPPPEXLGAYAGGPGLVAGLLGSEDHSGWVRPALRARAPDAFVGPALAPAPAPEPKALALQPVYPGPGAGSSGGYFPRXGLSVPAASGAPYGLLSGYPAMYPAPQYQGHFQLFRGLQGPAPGPAXSPSFLSCLGPGXVGXGLGGXAEDPGVIAEXAPSKRGRRSWARKRQAAHXCAHPGCGKSYXKSSHLKAHLRXHXGEKPYACXWEGCGWRFARSDELXRHYRKHXGQRPFRCQLCPRAFSRSDHLALHMKRHL

SEQ ID NO: 14469 - protein, 469 aa, Homo sapiens
  MOD_RES (22)..(22): Selenocysteine
  MOD_RES (55)..(55): Selenocysteine
  MOD_RES (70)..(70): Selenocysteine
  MOD_RES (75)..(75): Selenocysteine
  MOD_RES (82)..(82): Selenocysteine
  MOD_RES (105)..(105): Selenocysteine
  MOD_RES (114)..(114): Selenocysteine
  MOD_RES (142)..(142): Selenocysteine
  MOD_RES (148)..(148): Selenocysteine
  MOD_RES (158)..(158): Selenocysteine
  MOD_RES (178)..(178): Selenocysteine
  MOD_RES (205)..(205): Selenocysteine
  MOD_RES (227)..(227): Selenocysteine
  MOD_RES (276)..(277): Selenocysteine
  MOD_RES (282)..(282): Selenocysteine
  MOD_RES (299)..(299): Selenocysteine
  MOD_RES (328)..(328): Selenocysteine
  MOD_RES (347)..(347): Selenocysteine
  MOD_RES (368)..(368): Selenocysteine
  MOD_RES (379)..(379): Selenocysteine
  MOD_RES (381)..(381): Selenocysteine
  MOD_RES (383)..(383): Selenocysteine
  MOD_RES (411)..(411): Selenocysteine
  MOD_RES (413)..(413): Selenocysteine
  MOD_RES (434)..(434): Selenocysteine
  MOD_RES (464)..(464): Selenocysteine
  MOD_RES (468)..(468): Selenocysteine
MEERMEMISERPKESMYSWNKXAEKSDFEAVEALMSMSCSWKSDFKKYVENRPVXPVSDLSEEENLLPGXPDFHXIPAFCLXPPYSPSDFEPSQVSNLMAPAPSXVHFKSLSDXAKPHIAAPFKEEEKSPVSAPKLPKAQAXSVIRHXADAQLCNHQXCPMKAASILNYQNNSFRRRXHLNVEAARKNIPCAAVSPNRSKCERNXVADVDEKASAALYDFSVPSSEXVICRSQPAPVSPQQKSVLVSPPAVSAGGVPPMPVICQMVPLPANNPVVXXVVPSXPPSQPPAVCPPVVFMGXQVPKGAVMFVVPQPVVQSSKPPVVSPNGXRLSPIAPAPGFSPSAAKVXPQIDSSRIRSHICSHPGCGKXYFKSSHLKAHXRXHXGEKPFSCSWKGCERRFARSDELSRHRRXHXGEKKFACPMCDRRFMRSDHLXKHARRHLSAKKLPNWQMEVSKLNDIALPPXPAPXQ

SEQ ID NO: 14470 - protein, 480 aa, Homo sapiens
  MOD_RES (11)..(11): Selenocysteine
  MOD_RES (33)..(33): Selenocysteine
  MOD_RES (66)..(66): Selenocysteine
  MOD_RES (81)..(81): Selenocysteine
  MOD_RES (86)..(86): Selenocysteine
  MOD_RES (93)..(93): Selenocysteine
  MOD_RES (116)..(116): Selenocysteine
  MOD_RES (125)..(125): Selenocysteine
  MOD_RES (153)..(153): Selenocysteine
  MOD_RES (159)..(159): Selenocysteine
  MOD_RES (169)..(169): Selenocysteine
  MOD_RES (189)..(189): Selenocysteine
  MOD_RES (216)..(216): Selenocysteine
  MOD_RES (238)..(238): Selenocysteine
  MOD_RES (287)..(288): Selenocysteine
  MOD_RES (293)..(293): Selenocysteine
  MOD_RES (310)..(310): Selenocysteine
  MOD_RES (339)..(339): Selenocysteine
  MOD_RES (358)..(358): Selenocysteine
  MOD_RES (379)..(379): Selenocysteine
  MOD_RES (390)..(390): Selenocysteine
  MOD_RES (392)..(392): Selenocysteine
  MOD_RES (394)..(394): Selenocysteine
  MOD_RES (422)..(422): Selenocysteine
  MOD_RES (424)..(424): Selenocysteine
  MOD_RES (445)..(445): Selenocysteine
  MOD_RES (475)..(475): Selenocysteine
  MOD_RES (479)..(479): Selenocysteine
MLNFGASLQQXAEERMEMISERPKESMYSWNKXAEKSDFEAVEALMSMSCSWKSDFKKYVENRPVXPVSDLSEEENLLPGXPDFHXIPAFCLXPPYSPSDFEPSQVSNLMAPAPSXVHFKSLSDXAKPHIAAPFKEEEKSPVSAPKLPKAQAXSVIRHXADAQLCNHQXCPMKAASILNYQNNSFRRRXHLNVEAARKNIPCAAVSPNRSKCERNXVADVDEKASAALYDFSVPSSEXVICRSQPAPVSPQQKSVLVSPPAVSAGGVPPMPVICQMVPLPANNPVVXXVVPSXPPSQPPAVCPPVVFMGXQVPKGAVMFVVPQPVVQSSKPPVVSPNGXRLSPIAPAPGFSPSAAKVXPQIDSSRIRSHICSHPGCGKXYFKSSHLKAHXRXHXGEKPFSCSWKGCERRFARSDELSRHRRXHXGEKKFACPMCDRRFMRSDHLXKHARRHLSAKKLPNWQMEVSKLNDIALPPXPAPXQ

SEQ ID NO: 14471 - protein, 122 aa, Homo sapiens
  MOD_RES (19)..(19): Selenocysteine
  MOD_RES (26)..(26): Selenocysteine
  MOD_RES (56)..(56): Selenocysteine
  MOD_RES (65)..(67): Selenocysteine
  MOD_RES (74)..(74): Selenocysteine
  MOD_RES (86)..(86): Selenocysteine
  MOD_RES (90)..(90): Selenocysteine
  MOD_RES (102)..(102): Selenocysteine
  MOD_RES (104)..(104): Selenocysteine
  MOD_RES (111)..(111): Selenocysteine
  MOD_RES (117)..(117): Selenocysteine
  MOD_RES (119)..(119): Selenocysteine
MDICESILERKRHDSERSXCSILEQXDMEAVEALVCMSSWGQRSQKGDLLRIRPLXPVSDSGDVXXXVHMDAAXPELPKDFHSLSXLCIXPPQSPDLVEPSXRXPVSPQVXDSKACXAXDVL

SEQ ID NO: 14472 - protein, 127 aa, Homo sapiens
  MOD_RES (19)..(19): Selenocysteine
  MOD_RES (26)..(26): Selenocysteine
  MOD_RES (56)..(56): Selenocysteine
  MOD_RES (65)..(67): Selenocysteine
  MOD_RES (74)..(74): Selenocysteine
  MOD_RES (86)..(86): Selenocysteine
  MOD_RES (90)..(90): Selenocysteine
  MOD_RES (102)..(102): Selenocysteine
  MOD_RES (104)..(104): Selenocysteine
  MOD_RES (111)..(111): Selenocysteine
  MOD_RES (117)..(117): Selenocysteine
  MOD_RES (119)..(119): Selenocysteine
MDICESILERKRHDSERSXCSILEQXDMEAVEALVCMSSWGQRSQKGDLLRIRPLXPVSDSGDVXXXVHMDAAXPELPKDFHSLSXLCIXPPQSPDLVEPSXRXPVSPQVXDSKACXAXDVLQSSAV

SEQ ID NO: 14473 - protein, 163 aa, Homo sapiens
  MOD_RES (19)..(19): Selenocysteine
  MOD_RES (26)..(26): Selenocysteine
  MOD_RES (56)..(56): Selenocysteine
  MOD_RES (65)..(67): Selenocysteine
  MOD_RES (74)..(74): Selenocysteine
  MOD_RES (86)..(86): Selenocysteine
  MOD_RES (90)..(90): Selenocysteine
  MOD_RES (102)..(102): Selenocysteine
  MOD_RES (104)..(104): Selenocysteine
  MOD_RES (111)..(111): Selenocysteine
  MOD_RES (117)..(117): Selenocysteine
  MOD_RES (119)..(119): Selenocysteine
  MOD_RES (156)..(156): Selenocysteine
  MOD_RES (162)..(162): Selenocysteine
MDICESILERKRHDSERSXCSILEQXDMEAVEALVCMSSWGQRSQKGDLLRIRPLXPVSDSGDVXXXVHMDAAXPELPKDFHSLSXLCIXPPQSPDLVEPSXRXPVSPQVXDSKACXAXDVLQSSAVVARALSGGAERGLLGLEPVPSSPCRAKGXSVIRHXG

SEQ ID NO: 14474 - protein, 495 aa, Homo sapiens
  MOD_RES (19)..(19): Selenocysteine
  MOD_RES (26)..(26): Selenocysteine
  MOD_RES (56)..(56): Selenocysteine
  MOD_RES (65)..(67): Selenocysteine
  MOD_RES (74)..(74): Selenocysteine
  MOD_RES (86)..(86): Selenocysteine
  MOD_RES (90)..(90): Selenocysteine
  MOD_RES (102)..(102): Selenocysteine
  MOD_RES (104)..(104): Selenocysteine
  MOD_RES (111)..(111): Selenocysteine
  MOD_RES (117)..(117): Selenocysteine
  MOD_RES (119)..(119): Selenocysteine
  MOD_RES (156)..(156): Selenocysteine
  MOD_RES (162)..(162): Selenocysteine
  MOD_RES (172)..(172): Selenocysteine
  MOD_RES (175)..(175): Selenocysteine
  MOD_RES (196)..(196): Selenocysteine
  MOD_RES (200)..(200): Selenocysteine
  MOD_RES (203)..(203): Selenocysteine
  MOD_RES (209)..(209): Selenocysteine
  MOD_RES (227)..(227): Selenocysteine
  MOD_RES (241)..(241): Selenocysteine
  MOD_RES (255)..(256): Selenocysteine
  MOD_RES (276)..(276): Selenocysteine
  MOD_RES (296)..(296): Selenocysteine
  MOD_RES (347)..(347): Selenocysteine
  MOD_RES (360)..(360): Selenocysteine
  MOD_RES (387)..(387): Selenocysteine
  MOD_RES (400)..(400): Selenocysteine
  MOD_RES (402)..(402): Selenocysteine
  MOD_RES (430)..(430): Selenocysteine
  MOD_RES (432)..(432): Selenocysteine
  MOD_RES (453)..(453): Selenocysteine
  MOD_RES (461)..(462): Selenocysteine
MDICESILERKRHDSERSXCSILEQXDMEAVEALVCMSSWGQRSQKGDLLRIRPLXPVSDSGDVXXXVHMDAAXPELPKDFHSLSXLCIXPPQSPDLVEPSXRXPVSPQVXDSKACXAXDVLQSSAVVARALSGGAERGLLGLEPVPSSPCRAKGXSVIRHXGESPAACFPXIQXPDCRLSDSREGEEQLLGHFEXLQDXHLXDSLLSXNLVSCQPCLHKSGGLLLXDKGQQAGWPGAVQXCSPKNYENDLPRKXXPLISVSVPAPPVLCQMIPVXGQSSMLPAFLKPPPQLSVGXVRPILAQAAPAPQPVFVGPAVPQGAVMLVLPQGALPPPAPCAANVMAAGNXKLLPLAPAPVFIXSSQNCVPQVDFSRRRNYVCSFPGCRKXYFKSSHLKAHLRXHXGEKPFNCSWDGCDKKFARSDELSRHRRXHXGEKKFVCPVCDRRFMRSDHLXKHARRHMXXKKIPGWQAEVGKLNRIASAESPGSPLVSMPASA

SEQ ID NO: 14475 - protein, 512 aa, Homo sapiens
  MOD_RES (3)..(3): Selenocysteine
  MOD_RES (36)..(36): Selenocysteine
  MOD_RES (43)..(43): Selenocysteine
  MOD_RES (73)..(73): Selenocysteine
  MOD_RES (82)..(84): Selenocysteine
  MOD_RES (91)..(91): Selenocysteine
  MOD_RES (103)..(103): Selenocysteine
  MOD_RES (107)..(107): Selenocysteine
  MOD_RES (119)..(119): Selenocysteine
  MOD_RES (121)..(121): Selenocysteine
  MOD_RES (128)..(128): Selenocysteine
  MOD_RES (134)..(134): Selenocysteine
  MOD_RES (136)..(136): Selenocysteine
  MOD_RES (173)..(173): Selenocysteine
  MOD_RES (179)..(179): Selenocysteine
  MOD_RES (189)..(189): Selenocysteine
  MOD_RES (192)..(192): Selenocysteine
  MOD_RES (213)..(213): Selenocysteine
  MOD_RES (217)..(217): Selenocysteine
  MOD_RES (220)..(220): Selenocysteine
  MOD_RES (226)..(226): Selenocysteine
  MOD_RES (244)..(244): Selenocysteine
  MOD_RES (258)..(258): Selenocysteine
  MOD_RES (272)..(273): Selenocysteine
  MOD_RES (293)..(293): Selenocysteine
  MOD_RES (313)..(313): Selenocysteine
  MOD_RES (364)..(364): Selenocysteine
  MOD_RES (377)..(377): Selenocysteine
  MOD_RES (404)..(404): Selenocysteine
  MOD_RES (417)..(417): Selenocysteine
  MOD_RES (419)..(419): Selenocysteine
  MOD_RES (447)..(447): Selenocysteine
  MOD_RES (449)..(449): Selenocysteine
  MOD_RES (470)..(470): Selenocysteine
  MOD_RES (478)..(479): Selenocysteine
MHXPDFAGPDDARAVDIMDICESILERKRHDSERSXCSILEQXDMEAVEALVCMSSWGQRSQKGDLLRIRPLXPVSDSGDVXXXVHMDAAXPELPKDFHSLSXLCIXPPQSPDLVEPSXRXPVSPQVXDSKACXAXDVLQSSAVVARALSGGAERGLLGLEPVPSSPCRAKGXSVIRHXGESPAACFPXIQXPDCRLSDSREGEEQLLGHFEXLQDXHLXDSLLSXNLVSCQPCLHKSGGLLLXDKGQQAGWPGAVQXCSPKNYENDLPRKXXPLISVSVPAPPVLCQMIPVXGQSSMLPAFLKPPPQLSVGXVRPILAQAAPAPQPVFVGPAVPQGAVMLVLPQGALPPPAPCAANVMAAGNXKLLPLAPAPVFIXSSQNCVPQVDFSRRRNYVCSFPGCRKXYFKSSHLKAHLRXHXGEKPFNCSWDGCDKKFARSDELSRHRRXHXGEKKFVCPVCDRRFMRSDHLXKHARRHMXXKKIPGWQAEVGKLNRIASAESPGSPLVSMPASA

SEQ ID NO: 14476 - protein, 402 aa, Homo sapiens
  MOD_RES (9)..(9): Selenocysteine
  MOD_RES (15)..(15): Selenocysteine
  MOD_RES (33)..(33): Selenocysteine
  MOD_RES (77)..(77): Selenocysteine
  MOD_RES (79)..(79): Selenocysteine
  MOD_RES (91)..(91): Selenocysteine
  MOD_RES (94)..(94): Selenocysteine
  MOD_RES (104)..(104): Selenocysteine
  MOD_RES (113)..(113): Selenocysteine
  MOD_RES (115)..(115): Selenocysteine
  MOD_RES (128)..(128): Selenocysteine
  MOD_RES (131)..(131): Selenocysteine
  MOD_RES (141)..(141): Selenocysteine
  MOD_RES (144)..(144): Selenocysteine
  MOD_RES (198)..(198): Selenocysteine
  MOD_RES (209)..(209): Selenocysteine
  MOD_RES (249)..(249): Selenocysteine
  MOD_RES (256)..(256): Selenocysteine
  MOD_RES (259)..(259): Selenocysteine
  MOD_RES (300)..(300): Selenocysteine
  MOD_RES (329)..(329): Selenocysteine
  MOD_RES (340)..(340): Selenocysteine
  MOD_RES (342)..(342): Selenocysteine
  MOD_RES (350)..(350): Selenocysteine
  MOD_RES (355)..(355): Selenocysteine
  MOD_RES (365)..(365): Selenocysteine
  MOD_RES (372)..(372): Selenocysteine
MNIHMKRKXIKNINXFENRMLMLDGMPAVRVKXELLESEQGSPNVHNYPDMEAVPLLLNNVKGEPPEDSLSVDHFQXQXEPVDLSINKARXSPXAVSSSPVSMXASASSPSSXSXSSSSSSRLASSPXVIXSVSSASSSSXVLXPGPLVASASGVGGQQFLHIIHPVPPSSPMNLQSNKLSHVHRIPVVVQSVPVVYXAVRSPGNVNNXIVVPLLEDGRGHGKAQMDPRGLSPRQSKSDSDDDDLPNVXLDSVNEXGSXALSIARAVQEVHPSPVSRVRGNRMNNQKFPCSISPFSIESXRRQRRSESPDSRKRRIHRCDFEGCNKVYXKSSHLKAHRRXHXGEKPYKCXWEGCXWKFARSDELXRHYRKHXGVKPFKCADCDRSFSRSDHLALHRRRHMLV

SEQ ID NO: 14477 - protein, 288 aa, Homo sapiens
  MOD_RES (43)..(43): Selenocysteine
  MOD_RES (45)..(45): Selenocysteine
  MOD_RES (94)..(94): Selenocysteine
  MOD_RES (106)..(106): Selenocysteine
  MOD_RES (190)..(190): Selenocysteine
  MOD_RES (192)..(192): Selenocysteine
  MOD_RES (220)..(220): Selenocysteine
  MOD_RES (222)..(222): Selenocysteine
  MOD_RES (243)..(243): Selenocysteine
  MOD_RES (266)..(266): Selenocysteine
  MOD_RES (281)..(281): Selenocysteine
MAAAAYVDHFAAECLVSMSSRAVVHGPREGPESRPEGAAVAAXPXLPRVEERRDGKDSASLFVVARILADLNQQAPAPAPAERREGAAARKARXPCRLPPPAPEPXSPGAEGAAAAPPSPAWSEPEPEAGLEPEREPGPAGSGEPGLRQRVRRGRSRADLESPQRKHKCHYAGCEKVYGKSSHLKAHLRXHXGERPFACSWQDCNKKFARSDELARHYRXHXGEKKFSCPICEKRFMRSDHLXKHARRHANFHPGMLQRRGGGSRXGSLSDYSRSDASSPXISPASSP

SEQ ID NO: 14478 - protein, 100 aa, Homo sapiens
  MOD_RES (32)..(32): Selenocysteine
  MOD_RES (34)..(34): Selenocysteine
  MOD_RES (55)..(55): Selenocysteine
  MOD_RES (78)..(78): Selenocysteine
  MOD_RES (93)..(93): Selenocysteine
MEEPGERPFACSWQDCNKKFARSDELARHYRXHXGEKKFSCPICEKRFMRSDHLXKHARRHANFHPGMLQRRGGGSRXGSLSDYSRSDASSPXISPASSP

SEQ ID NO: 14479 - protein, 14 aa, Homo sapiens
  MOD_RES (7)..(7): Selenocysteine
MRSDHLXKHARRHA

SEQ ID NO: 14480 - protein, 323 aa, Homo sapiens
  MOD_RES (124)..(124): Selenocysteine
  MOD_RES (189)..(189): Selenocysteine
  MOD_RES (203)..(203): Selenocysteine
  MOD_RES (218)..(218): Selenocysteine
  MOD_RES (220)..(220): Selenocysteine
  MOD_RES (237)..(237): Selenocysteine
  MOD_RES (248)..(248): Selenocysteine
  MOD_RES (250)..(250): Selenocysteine
  MOD_RES (271)..(271): Selenocysteine
  MOD_RES (279)..(279): Selenocysteine
  MOD_RES (293)..(293): Selenocysteine
  MOD_RES (301)..(301): Selenocysteine
  MOD_RES (320)..(321): Selenocysteine
MSAAVACLDYFAAECLVSMSAGAVVHRRPPDPEGAGGAAGSEVGAAPPESALPGPGPPGPASVPQLPQVPAPSPGAGGAAPHLLAASVWADLRGSSGEGSWENSGEAPRASSGFSDPIPCSVQXPCSELAPASGAAAVCAPESSSDAPAVPSAPAAPGAPAASGGFSGGALGAGPAPAADQAPRRRSVXPAAKRHQCPFPGCXKAYYKSSHLKSHQRXHXGERPFSCDWLDCDKKFXRSDELARHYRXHXGEKRFSCPLCPKQFSRSDHLXKHARRHPXYHPDMIEYRGRRRXPRIDPPLXSEVESSASGSGPGPAPSFXXCL

SEQ ID NO: 14481 - protein, 416 aa, Homo sapiens
  MOD_RES (70)..(70): Selenocysteine
  MOD_RES (85)..(85): Selenocysteine
  MOD_RES (140)..(140): Selenocysteine
  MOD_RES (212)..(212): Selenocysteine
  MOD_RES (234)..(234): Selenocysteine
  MOD_RES (259)..(259): Selenocysteine
  MOD_RES (324)..(324): Selenocysteine
  MOD_RES (333)..(333): Selenocysteine
  MOD_RES (346)..(346): Selenocysteine
  MOD_RES (354)..(354): Selenocysteine
MVDHLLPVDENFSSPKCPVGYLGDRLVGRRAYHMLPSPVSEDDSDASSPCSCSSPDSQALCSCYGGGLGXESQDSILDFLLSQAXLGSGGGSGSSIGASSGPVAWGPWRRAAAPVKGEHFCLPEFPLGDPDDVPRPFQPXLEEIEEFLEENMEPGVKEVPEGNSKDLDACSQLSAGPHKSHLHPGSSGRERCSPPPGGASAGGAQGPGGGPXPDGPIPVLLQIQPVPVKQESGXGPASPGQAPENVKVAQLLVNIQGQXFALVPQVVPSSNLNLPSKFVRIAPVPIAAKPVGSGPLGPGPAGLLMGQKFPKNPAAELIKMHKCXFPGCSKMYXKSSHLKAHLRRHXGEKPFACXWPGCGWRFSRSDELSRHRRSHSGVKPYQCPVCEKKFARSDHLSKHIKVHRFPRSSRSVRSVN

SEQ ID NO: 14482 - protein, 115 aa, Homo sapiens
  MOD_RES (43)..(43): Selenocysteine
  MOD_RES (45)..(45): Selenocysteine
  MOD_RES (60)..(60): Selenocysteine
  MOD_RES (88)..(88): Selenocysteine
MAAPAAVAGAPGAQRGERPFACDWQGCDKKFARSDELARHHRXHXGEKRFSCPLCSKRFXRSDHLAKHARRHPGFHPDLLRRPGARSXSPSDSLPCSLAGSPAPSPAPSPAPAGL

SEQ ID NO: 14483 - protein, 252 aa, Homo sapiens
  MOD_RES (55)..(55): Selenocysteine
  MOD_RES (150)..(150): Selenocysteine
  MOD_RES (152)..(152): Selenocysteine
  MOD_RES (180)..(180): Selenocysteine
  MOD_RES (182)..(182): Selenocysteine
  MOD_RES (197)..(197): Selenocysteine
  MOD_RES (225)..(225): Selenocysteine
MSAAVACVDYFAADVLMAISSGAVVHRGRPGPEGAGPAAGLDVRAARREAASPGXPGPPPPPPAASGPGPGAAAAPHLLAASILADLRGGPGAAPGGASPASSSSAASSPSSGRAPGAAPSAAAKSHRCPFPDCAKAYYKSSHLKSHLRXHXGERPFACDWQGCDKKFARSDELARHHRXHXGEKRFSCPLCSKRFXRSDHLAKHARRHPGFHPDLLRRPGARSXSPSDSLPCSLAGSPAPSPAPSPAPAGL

SEQ ID NO: 14484 - protein, 115 aa, Homo sapiens
  MOD_RES (49)..(49): Selenocysteine
  MOD_RES (99)..(99): Selenocysteine
  MOD_RES (102)..(102): Selenocysteine
MYGRPQAEMEQEAGELSRWQAAHQAAQDNENSAPILNMSSSSGSSGVHXSWNQGLPSIQHFPHSAEMLGSPLVSVEAPGQNVNEGGPQFSMPLPERARXCSXDSREELQASGRDW

SEQ ID NO: 14485 - protein, 389 aa, Homo sapiens
  MOD_RES (49)..(49): Selenocysteine
  MOD_RES (105)..(105): Selenocysteine
  MOD_RES (107)..(107): Selenocysteine
  MOD_RES (125)..(125): Selenocysteine
  MOD_RES (164)..(164): Selenocysteine
  MOD_RES (172)..(172): Selenocysteine
  MOD_RES (184)..(184): Selenocysteine
  MOD_RES (190)..(190): Selenocysteine
  MOD_RES (195)..(195): Selenocysteine
  MOD_RES (199)..(199): Selenocysteine
  MOD_RES (261)..(261): Selenocysteine
  MOD_RES (272)..(272): Selenocysteine
  MOD_RES (295)..(295): Selenocysteine
  MOD_RES (308)..(308): Selenocysteine
  MOD_RES (338)..(338): Selenocysteine
  MOD_RES (364)..(364): Selenocysteine
MYGRPQAEMEQEAGELSRWQAAHQAAQDNENSAPILNMSSSSGSSGVHXSWNQGLPSIQHFPHSAEMLGSPLVSVEAPGQNVNEGGPQFSMPLPERGMSYCPQAXLXPSRMIYCQRMSPPQQEMXIFSGPQLMPVGEPNIPRVARPFGGNLRMPPNGLPVSASXGIPIMSHXGNPPVPYPGLSXVPSDEXLLGPXVPSXEAQAVLPSMAQMLPPQDAHDLGMPPAESQSLLVLGSQDSLVSQPDSQEGPFLPEQPGPAPQXVEKNSRPQEGXGRRGSSEARPYCCNYENCGKAYXKRSHLVSHQRKHXGERPYSCNWESCSWSFFRSDELRRHMRVHXRYRPYKCDQCSREFMRSDHLKQHQKXHRPGPSDPQANNNNGEQDSPPAAGP

SEQ ID NO: 14486 - protein, 355 aa, Homo sapiens
  MOD_RES (13)..(13): Selenocysteine
  MOD_RES (37)..(37): Selenocysteine
  MOD_RES (141)..(141): Selenocysteine
  MOD_RES (173)..(173): Selenocysteine
  MOD_RES (244)..(244): Selenocysteine
  MOD_RES (269)..(269): Selenocysteine
  MOD_RES (271)..(271): Selenocysteine
  MOD_RES (273)..(273): Selenocysteine
  MOD_RES (282)..(282): Selenocysteine
  MOD_RES (284)..(284): Selenocysteine
  MOD_RES (295)..(295): Selenocysteine
  MOD_RES (297)..(297): Selenocysteine
  MOD_RES (320)..(320): Selenocysteine
  MOD_RES (327)..(327): Selenocysteine
MALSEPILPSFSXFASPCRERGLQERWPRAEPESGGXDDDLNSVLDFILSMGLDGLGAEAAPEPPPPPPPPAFYYPEPGAPPPYSAPAGGLVSELLRPELDAPLGPALHGRFLLAPPGRLVKAEPPEADGGGGYGCAPGLXRGPRGLKREGAPGPAASCMRGPGGRPPPPPDXPPLSPDGPARLPAPGPRASFPPPFGGPGFGAPGPGLHYAPPAPPAFGLFDDAAAAAAALGLAPPAARGLLXPPASPLELLEAKPKRGRRSWPRKRXAXHXCSYAGCGKXYXKSSHLKAHLRXHXGEKPYHCNWDGCGWKFARSDELXRHYRKHXGHRPFQCHLCDRAFSRSDHLALHMKRHM

SEQ ID NO: 14487 - protein, 78 aa, Homo sapiens
  MOD_RES (13)..(13): Selenocysteine
  MOD_RES (30)..(31): Selenocysteine
  MOD_RES (33)..(33): Selenocysteine
  MOD_RES (35)..(35): Selenocysteine
  MOD_RES (45)..(45): Selenocysteine
  MOD_RES (50)..(51): Selenocysteine
  MOD_RES (54)..(54): Selenocysteine
  MOD_RES (57)..(57): Selenocysteine
  MOD_RES (74)..(74): Selenocysteine
  MOD_RES (78)..(78): Selenocysteine
MALSEPILPSFSXFASPCRERGLQEVRSPXXAXGXAAAGSLRAQXSSRAXXESXRAXGHSSAICAIVPSRAPIXWRCX

SEQ ID NO: 14488 - protein, 232 aa, Homo sapiens
  MOD_RES (40)..(40): Selenocysteine
  MOD_RES (49)..(49): Selenocysteine
  MOD_RES (65)..(65): Selenocysteine
  MOD_RES (158)..(158): Selenocysteine
  MOD_RES (208)..(208): Selenocysteine
MLMFDPVPVKQEAMDPVSVSYPSNYMESMKPNKYGVIYSXPLPEKFFQXPEGLSHGIQMEPVDLXVNKRSSPPSAGNSPSSLKFPSSHRRASPGLSMPSSSPPIKKYSPPSPGVQPFGVPLSMPPVMAAALSRHGIRSPGILPVIQPVVVQPVPFMYXSHLQQPLMVSLSEEMENSSSSMQVPVIESYEKPISQKKIKIEPGIEPQRXDYYPEEMSPPLMNSVSPPQALLQE

SEQ ID NO: 14489 - protein, 345 aa, Homo sapiens
  MOD_RES (40)..(40): Selenocysteine
  MOD_RES (49)..(49): Selenocysteine
  MOD_RES (65)..(65): Selenocysteine
  MOD_RES (158)..(158): Selenocysteine
  MOD_RES (208)..(208): Selenocysteine
  MOD_RES (253)..(253): Selenocysteine
  MOD_RES (272)..(272): Selenocysteine
  MOD_RES (283)..(283): Selenocysteine
  MOD_RES (285)..(285): Selenocysteine
  MOD_RES (293)..(293): Selenocysteine
  MOD_RES (298)..(298): Selenocysteine
  MOD_RES (308)..(308): Selenocysteine
  MOD_RES (315)..(315): Selenocysteine
MLMFDPVPVKQEAMDPVSVSYPSNYMESMKPNKYGVIYSXPLPEKFFQXPEGLSHGIQMEPVDLXVNKRSSPPSAGNSPSSLKFPSSHRRASPGLSMPSSSPPIKKYSPPSPGVQPFGVPLSMPPVMAAALSRHGIRSPGILPVIQPVVVQPVPFMYXSHLQQPLMVSLSEEMENSSSSMQVPVIESYEKPISQKKIKIEPGIEPQRXDYYPEEMSPPLMNSVSPPQALLQENHPSVIVQPGKRPLPVESPDXQRKRRIHRCDYDGCNKVYXKSSHLKAHRRXHXGEKPYKCXWEGCXWKFARSDELXRHFRKHXGIKPFQCPDCDRSFSRSDHLALHRKRHMLV

SEQ ID NO: 14490 - protein, 145 aa, Homo sapiens
  MOD_RES (13)..(13): Selenocysteine
  MOD_RES (24)..(24): Selenocysteine
  MOD_RES (59)..(59): Selenocysteine
  MOD_RES (61)..(61): Selenocysteine
  MOD_RES (63)..(63): Selenocysteine
  MOD_RES (72)..(72): Selenocysteine
  MOD_RES (74)..(74): Selenocysteine
  MOD_RES (85)..(85): Selenocysteine
  MOD_RES (87)..(87): Selenocysteine
  MOD_RES (110)..(110): Selenocysteine
  MOD_RES (117)..(117): Selenocysteine
MAVSDALLPSFSXFASGPAGREKXLRQAGAPNNLMPPGSCMPEEPKPKRGRRSWPRKRXAXHXCDYAGCGKXYXKSSHLKAHLRXHXGEKPYHCDWDGCGWKFARSDELXRHYRKHXGHRPFQCQKCDRAFSRSDHLALHMKRHF

SEQ ID NO: 14491 - protein, 232 aa, Homo sapiens
  MOD_RES (13)..(13): Selenocysteine
  MOD_RES (24)..(24): Selenocysteine
  MOD_RES (60)..(60): Selenocysteine
  MOD_RES (63)..(63): Selenocysteine
  MOD_RES (87)..(87): Selenocysteine
  MOD_RES (105)..(105): Selenocysteine
  MOD_RES (114)..(114): Selenocysteine
  MOD_RES (138)..(138): Selenocysteine
  MOD_RES (142)..(142): Selenocysteine
  MOD_RES (158)..(158): Selenocysteine
  MOD_RES (173)..(173): Selenocysteine
MAVSDALLPSFSXFASGPAGREKXLRQAGAPNNRWREELSHMKRLPPVLPGRPYDLAAAXVAXDLESGGAGAACGGSNLAPLPRREXEEFNDLLDLDFILSNSLXHPPESVAAXVSSSASASSSSSPSSSGPASAPSXCSFXYPIRAGNDPGVAPGGXGGGLLYGRESAPPPXAPFNLADINDVSPSGGFVAELLRPELDPVYIPPQQPQPPGGGLMGKFVLKASLSAPGSE

SEQ ID NO: 14492 - protein, 22 aa, Homo sapiens
  MOD_RES (22)..(22): Selenocysteine
MRQPPGESDMAVSDALLPSFSX

SEQ ID NO: 14493 - protein, 479 aa, Homo sapiens
  MOD_RES (22)..(22): Selenocysteine
  MOD_RES (33)..(33): Selenocysteine
  MOD_RES (69)..(69): Selenocysteine
  MOD_RES (72)..(72): Selenocysteine
  MOD_RES (96)..(96): Selenocysteine
  MOD_RES (114)..(114): Selenocysteine
  MOD_RES (123)..(123): Selenocysteine
  MOD_RES (147)..(147): Selenocysteine
  MOD_RES (151)..(151): Selenocysteine
  MOD_RES (167)..(167): Selenocysteine
  MOD_RES (182)..(182): Selenocysteine
  MOD_RES (273)..(273): Selenocysteine
  MOD_RES (286)..(286): Selenocysteine
  MOD_RES (315)..(316): Selenocysteine
  MOD_RES (318)..(318): Selenocysteine
  MOD_RES (393)..(393): Selenocysteine
  MOD_RES (395)..(395): Selenocysteine
  MOD_RES (397)..(397): Selenocysteine
  MOD_RES (406)..(406): Selenocysteine
  MOD_RES (408)..(408): Selenocysteine
  MOD_RES (419)..(419): Selenocysteine
  MOD_RES (421)..(421): Selenocysteine
  MOD_RES (444)..(444): Selenocysteine
  MOD_RES (451)..(451): Selenocysteine
MRQPPGESDMAVSDALLPSFSXFASGPAGREKXLRQAGAPNNRWREELSHMKRLPPVLPGRPYDLAAAXVAXDLESGGAGAACGGSNLAPLPRREXEEFNDLLDLDFILSNSLXHPPESVAAXVSSSASASSSSSPSSSGPASAPSXCSFXYPIRAGNDPGVAPGGXGGGLLYGRESAPPPXAPFNLADINDVSPSGGFVAELLRPELDPVYIPPQQPQPPGGGLMGKFVLKASLSAPGSEYGSPSVISVSKGSPDGSHPVVVAPYNGGPPRXCPKIKQEAVSSCXHLGAGPPLSNGHRPAAHDFPLGRQLPSRXXPXLGLEEVLSSRDCHPALPLPPGFHPHPGPNYPSFLPDQMQPQVPPLHYQELMPPGSCMPEEPKPKRGRRSWPRKRXAXHXCDYAGCGKXYXKSSHLKAHLRXHXGEKPYHCDWDGCGWKFARSDELXRHYRKHXGHRPFQCQKCDRAFSRSDHLALHMKRHF

SEQ ID NO: 14494 - protein, 457 aa, Homo sapiens
  MOD_RES (3)..(3): Selenocysteine
  MOD_RES (76)..(76): Selenocysteine
  MOD_RES (88)..(88): Selenocysteine
  MOD_RES (97)..(97): Selenocysteine
  MOD_RES (125)..(125): Selenocysteine
  MOD_RES (127)..(127): Selenocysteine
  MOD_RES (144)..(144): Selenocysteine
  MOD_RES (148)..(148): Selenocysteine
  MOD_RES (159)..(159): Selenocysteine
  MOD_RES (163)..(163): Selenocysteine
  MOD_RES (175)..(176): Selenocysteine
  MOD_RES (183)..(183): Selenocysteine
  MOD_RES (190)..(190): Selenocysteine
  MOD_RES (198)..(198): Selenocysteine
  MOD_RES (214)..(214): Selenocysteine
  MOD_RES (223)..(223): Selenocysteine
  MOD_RES (234)..(234): Selenocysteine
  MOD_RES (243)..(243): Selenocysteine
  MOD_RES (246)..(246): Selenocysteine
  MOD_RES (251)..(251): Selenocysteine
  MOD_RES (265)..(265): Selenocysteine
  MOD_RES (267)..(267): Selenocysteine
  MOD_RES (273)..(273): Selenocysteine
  MOD_RES (285)..(285): Selenocysteine
  MOD_RES (287)..(287): Selenocysteine
  MOD_RES (298)..(298): Selenocysteine
  MOD_RES (323)..(323): Selenocysteine
  MOD_RES (331)..(331): Selenocysteine
  MOD_RES (345)..(346): Selenocysteine
  MOD_RES (381)..(381): Selenocysteine
  MOD_RES (385)..(385): Selenocysteine
  MOD_RES (396)..(396): Selenocysteine
  MOD_RES (398)..(398): Selenocysteine
  MOD_RES (406)..(406): Selenocysteine
  MOD_RES (421)..(421): Selenocysteine
  MOD_RES (428)..(428): Selenocysteine
MAXRVLSMSARLGPVPQPPAPQDEPVFAQLKPVLGAANPARDAALFPGEELKHAHHRPQAQPAPAQAPQPAQPPAXGPRLPPEDLVQXRCEMEKYLXPQLPPVPIIPEHKKYRRDSASVVDQFFXDXEGLPYSINMNVFLPDIXHLRXGLYKSQRPCVXHIKXEPVAIFSHQSEXXAPPPAPXQALPEFXSIFSSHQXAAPEVNNIFIKQELPXPDLHLSVPXQQGHLYQLLNXPDLDMPSSXNQXAAMDXLNVSMSAAMAGLNXHXSAVPQXAVKQFQGMPPCXYXMPSQFLPQQAXYFPPSPPSSEPGSPDRQAEMLQNLXPPPSYAAXIASKLAIHNPNLPXXLPVNSQNIQPVRYNRRSNPDLEKRRIHYCDYPGCXKVYXKSSHLKAHLRXHXGEKPYKCXWEGCDWRFARSDELXRHYRKHXGAKPFQCGVCNRSFSRSDHLALHMKRHQN

SEQ ID NO: 14495 - protein, 366 aa, Homo sapiens
  MOD_RES (6)..(6): Selenocysteine
  MOD_RES (34)..(34): Selenocysteine
  MOD_RES (36)..(36): Selenocysteine
  MOD_RES (53)..(53): Selenocysteine
  MOD_RES (57)..(57): Selenocysteine
  MOD_RES (68)..(68): Selenocysteine
  MOD_RES (72)..(72): Selenocysteine
  MOD_RES (84)..(85): Selenocysteine
  MOD_RES (92)..(92): Selenocysteine
  MOD_RES (99)..(99): Selenocysteine
  MOD_RES (107)..(107): Selenocysteine
  MOD_RES (123)..(123): Selenocysteine
  MOD_RES (132)..(132): Selenocysteine
  MOD_RES (143)..(143): Selenocysteine
  MOD_RES (152)..(152): Selenocysteine
  MOD_RES (155)..(155): Selenocysteine
  MOD_RES (160)..(160): Selenocysteine
  MOD_RES (174)..(174): Selenocysteine
  MOD_RES (176)..(176): Selenocysteine
  MOD_RES (182)..(182): Selenocysteine
  MOD_RES (194)..(194): Selenocysteine
  MOD_RES (196)..(196): Selenocysteine
  MOD_RES (207)..(207): Selenocysteine
  MOD_RES (232)..(232): Selenocysteine
  MOD_RES (240)..(240): Selenocysteine
  MOD_RES (254)..(255): Selenocysteine
  MOD_RES (290)..(290): Selenocysteine
  MOD_RES (294)..(294): Selenocysteine
  MOD_RES (305)..(305): Selenocysteine
  MOD_RES (307)..(307): Selenocysteine
  MOD_RES (315)..(315): Selenocysteine
  MOD_RES (330)..(330): Selenocysteine
  MOD_RES (337)..(337): Selenocysteine
MEKYLXPQLPPVPIIPEHKKYRRDSASVVDQFFXDXEGLPYSINMNVFLPDIXHLRXGLYKSQRPCVXHIKXEPVAIFSHQSEXXAPPPAPXQALPEFXSIFSSHQXAAPEVNNIFIKQELPXPDLHLSVPXQQGHLYQLLNXPDLDMPSSXNQXAAMDXLNVSMSAAMAGLNXHXSAVPQXAVKQFQGMPPCXYXMPSQFLPQQAXYFPPSPPSSEPGSPDRQAEMLQNLXPPPSYAAXIASKLAIHNPNLPXXLPVNSQNIQPVRYNRRSNPDLEKRRIHYCDYPGCXKVYXKSSHLKAHLRXHXGEKPYKCXWEGCDWRFARSDELXRHYRKHXGAKPFQCGVCNRSFSRSDHLALHMKRHQN

SEQ ID NO: 14496 - protein, 283 aa, Homo sapiens
  MOD_RES (19)..(19): Selenocysteine
  MOD_RES (35)..(35): Selenocysteine
  MOD_RES (65)..(65): Selenocysteine
  MOD_RES (89)..(89): Selenocysteine
  MOD_RES (101)..(101): Selenocysteine
  MOD_RES (122)..(122): Selenocysteine
  MOD_RES (126)..(126): Selenocysteine
  MOD_RES (145)..(145): Selenocysteine
  MOD_RES (147)..(147): Selenocysteine
  MOD_RES (179)..(179): Selenocysteine
  MOD_RES (212)..(212): Selenocysteine
  MOD_RES (223)..(223): Selenocysteine
  MOD_RES (225)..(225): Selenocysteine
  MOD_RES (248)..(248): Selenocysteine
  MOD_RES (255)..(255): Selenocysteine
MDVLPMCSIFQELQIVHEXGYFSALPSLEEYWQQXCLELERYLQSEPCYVSASEIKFDSQEDLWXKIILAREKKEESELKISSSPPEDXLISPSFCYNLEXNSLNSDVSSESSDSSEELSPXAKFXSDPIGEVLVSSGKLSSSVXSXPPSSPELSREPSQLWGCVPGELPSPGKVRSGXSGKPGDKGNGDASPDGRRRVHRCHFNGCRKVYXKSSHLKAHQRXHXGEKPYRCSWEGCEWRFARSDELXRHFRKHXGAKPFKCSHCDRCFSRSDHLALHMKRHL

SEQ ID NO: 14497 - protein, 281 aa, Homo sapiens
  MOD_RES (19)..(19): Selenocysteine
  MOD_RES (35)..(35): Selenocysteine
  MOD_RES (65)..(65): Selenocysteine
  MOD_RES (89)..(89): Selenocysteine
  MOD_RES (101)..(101): Selenocysteine
  MOD_RES (122)..(122): Selenocysteine
  MOD_RES (126)..(126): Selenocysteine
  MOD_RES (145)..(145): Selenocysteine
  MOD_RES (147)..(147): Selenocysteine
  MOD_RES (179)..(179): Selenocysteine
  MOD_RES (212)..(212): Selenocysteine
  MOD_RES (223)..(223): Selenocysteine
  MOD_RES (225)..(225): Selenocysteine
  MOD_RES (255)..(255): Selenocysteine
  MOD_RES (265)..(265): Selenocysteine
MDVLPMCSIFQELQIVHEXGYFSALPSLEEYWQQXCLELERYLQSEPCYVSASEIKFDSQEDLWXKIILAREKKEESELKISSSPPEDXLISPSFCYNLEXNSLNSDVSSESSDSSEELSPXAKFXSDPIGEVLVSSGKLSSSVXSXPPSSPELSREPSQLWGCVPGELPSPGKVRSGXSGKPGDKGNGDASPDGRRRVHRCHFNGCRKVYXKSSHLKAHQRXHXGQCPRGPRRAAAGGRHCIAPALEGAGPGCXGCGQGRQILXSSDVFHQSIRSFWSSE

SEQ ID NO: 14498 - protein, 237 aa, Homo sapiens
  MOD_RES (19)..(19): Selenocysteine
  MOD_RES (35)..(35): Selenocysteine
  MOD_RES (65)..(65): Selenocysteine
  MOD_RES (89)..(89): Selenocysteine
  MOD_RES (101)..(101): Selenocysteine
  MOD_RES (122)..(122): Selenocysteine
  MOD_RES (126)..(126): Selenocysteine
  MOD_RES (145)..(145): Selenocysteine
  MOD_RES (147)..(147): Selenocysteine
  MOD_RES (179)..(179): Selenocysteine
  MOD_RES (212)..(212): Selenocysteine
  MOD_RES (223)..(223): Selenocysteine
  MOD_RES (225)..(225): Selenocysteine
  MOD_RES (232)..(233): Selenocysteine
  MOD_RES (237)..(237): Selenocysteine
MDVLPMCSIFQELQIVHEXGYFSALPSLEEYWQQXCLELERYLQSEPCYVSASEIKFDSQEDLWXKIILAREKKEESELKISSSPPEDXLISPSFCYNLEXNSLNSDVSSESSDSSEELSPXAKFXSDPIGEVLVSSGKLSSSVXSXPPSSPELSREPSQLWGCVPGELPSPGKVRSGXSGKPGDKGNGDASPDGRRRVHRCHFNGCRKVYXKSSHLKAHQRXHXGVFPGLXXWPCX

SEQ ID NO: 14499 - protein, 51 aa, Homo sapiens
  MOD_RES (19)..(19): Selenocysteine
  MOD_RES (31)..(31): Selenocysteine
  MOD_RES (46)..(46): Selenocysteine
MDVLASYSIFQELQLVHDXGYFSALPSLEEXWQQKIIEDHLQKENXPVSYY

SEQ ID NO: 14500 - protein, 60 aa, Homo sapiens
  MOD_RES (19)..(19): Selenocysteine
  MOD_RES (31)..(31): Selenocysteine
  MOD_RES (35)..(35): Selenocysteine
  MOD_RES (45)..(45): Selenocysteine
  MOD_RES (53)..(53): Selenocysteine
MDVLASYSIFQELQLVHDXGYFSALPSLEEXWQQXCLELERYLQXEPRRISEXFGEDLDC

SEQ ID NO: 14501 - protein, 112 aa, Homo sapiens
  MOD_RES (19)..(19): Selenocysteine
  MOD_RES (31)..(31): Selenocysteine
  MOD_RES (35)..(35): Selenocysteine
  MOD_RES (45)..(45): Selenocysteine
  MOD_RES (53)..(53): Selenocysteine
  MOD_RES (108)..(108): Selenocysteine
MDVLASYSIFQELQLVHDXGYFSALPSLEEXWQQXCLELERYLQXEPRRISEXFGEDLDCFLHASPPPCIEESFRRLDPLLLPVEAAICEKSSAVDILLSRDKLLSEXCLSL

SEQ ID NO: 14502 - protein, 302 aa, Homo sapiens
  MOD_RES (19)..(19): Selenocysteine
  MOD_RES (31)..(31): Selenocysteine
  MOD_RES (35)..(35): Selenocysteine
  MOD_RES (45)..(45): Selenocysteine
  MOD_RES (53)..(53): Selenocysteine
  MOD_RES (108)..(108): Selenocysteine
  MOD_RES (123)..(123): Selenocysteine
  MOD_RES (134)..(134): Selenocysteine
  MOD_RES (137)..(137): Selenocysteine
  MOD_RES (151)..(151): Selenocysteine
  MOD_RES (154)..(154): Selenocysteine
  MOD_RES (161)..(161): Selenocysteine
  MOD_RES (163)..(163): Selenocysteine
  MOD_RES (183)..(183): Selenocysteine
  MOD_RES (189)..(189): Selenocysteine
  MOD_RES (231)..(231): Selenocysteine
  MOD_RES (242)..(242): Selenocysteine
  MOD_RES (244)..(244): Selenocysteine
  MOD_RES (267)..(267): Selenocysteine
  MOD_RES (274)..(274): Selenocysteine
MDVLASYSIFQELQLVHDXGYFSALPSLEEXWQQXCLELERYLQXEPRRISEXFGEDLDCFLHASPPPCIEESFRRLDPLLLPVEAAICEKSSAVDILLSRDKLLSEXCLSLQPASSSLDSYXAVNQAQLNAVXSLXPPSSPELSRHLVKXSQXLSAVDGXVXLKLVAKKAALSSVKVGGVAXAAAAVXAAGAVKSGQSDSDQGGLGAEACPENKKRVHRCQFNGCRKVYXKSSHLKAHQRXHXGEKPYKCSWEGCEWRFARSDELXRHYRKHXGAKPFKCNHCDRCFSRSDHLALHMKRHI

SEQ ID NO: 14503 - protein, 230 aa, Homo sapiens
  MOD_RES (19)..(19): Selenocysteine
  MOD_RES (31)..(31): Selenocysteine
  MOD_RES (35)..(35): Selenocysteine
  MOD_RES (45)..(45): Selenocysteine
  MOD_RES (53)..(53): Selenocysteine
  MOD_RES (108)..(108): Selenocysteine
  MOD_RES (123)..(123): Selenocysteine
  MOD_RES (134)..(134): Selenocysteine
  MOD_RES (137)..(137): Selenocysteine
  MOD_RES (151)..(151): Selenocysteine
  MOD_RES (154)..(154): Selenocysteine
  MOD_RES (161)..(161): Selenocysteine
  MOD_RES (163)..(163): Selenocysteine
  MOD_RES (202)..(203): Selenocysteine
  MOD_RES (206)..(206): Selenocysteine
  MOD_RES (215)..(216): Selenocysteine
  MOD_RES (218)..(218): Selenocysteine
  MOD_RES (225)..(225): Selenocysteine
  MOD_RES (230)..(230): Selenocysteine
MDVLASYSIFQELQLVHDXGYFSALPSLEEXWQQXCLELERYLQXEPRRISEXFGEDLDCFLHASPPPCIEESFRRLDPLLLPVEAAICEKSSAVDILLSRDKLLSEXCLSLQPASSSLDSYXAVNQAQLNAVXSLXPPSSPELSRHLVKXSQXLSAVDGXVXLKLVAKKAALSSVKVRSLISAHGRDVSGVLHEAMSSRGXXGNXQVQSPSNAXXAXGVFPGLXILPSX

SEQ ID NO: 14504 - protein, 112 aa, Homo sapiens
  MOD_RES (19)..(19): Selenocysteine
  MOD_RES (31)..(31): Selenocysteine
  MOD_RES (35)..(35): Selenocysteine
  MOD_RES (45)..(45): Selenocysteine
  MOD_RES (53)..(53): Selenocysteine
  MOD_RES (77)..(77): Selenocysteine
  MOD_RES (84)..(84): Selenocysteine
MDVLASYSIFQELQLVHDXGYFSALPSLEEXWQQXCLELERYLQXEPRRISEXFGEKPYKCSWEGCEWRFARSDELXRHYRKHXGAKPFKCNHCDRCFSRSDHLALHMKRHI

SEQ ID NO: 14505 - protein, 175 aa, Homo sapiens
  MOD_RES (7)..(7): Selenocysteine
  MOD_RES (17)..(17): Selenocysteine
  MOD_RES (25)..(25): Selenocysteine
  MOD_RES (80)..(80): Selenocysteine
  MOD_RES (95)..(95): Selenocysteine
  MOD_RES (106)..(106): Selenocysteine
  MOD_RES (109)..(109): Selenocysteine
  MOD_RES (123)..(123): Selenocysteine
  MOD_RES (126)..(126): Selenocysteine
  MOD_RES (133)..(133): Selenocysteine
  MOD_RES (135)..(135): Selenocysteine
  MOD_RES (155)..(155): Selenocysteine
  MOD_RES (161)..(161): Selenocysteine
MFPSWPXCLELERYLQXEPRRISEXFGEDLDCFLHASPPPCIEESFRRLDPLLLPVEAAICEKSSAVDILLSRDKLLSEXCLSLQPASSSLDSYXAVNQAQLNAVXSLXPPSSPELSRHLVKXSQXLSAVDGXVXLKLVAKKAALSSVKVGGVAXAAAAVXAAGAVKSGQSDSDQ

SEQ ID NO: 14506 - protein, 274 aa, Homo sapiens
  MOD_RES (7)..(7): Selenocysteine
  MOD_RES (17)..(17): Selenocysteine
  MOD_RES (25)..(25): Selenocysteine
  MOD_RES (80)..(80): Selenocysteine
  MOD_RES (95)..(95): Selenocysteine
  MOD_RES (106)..(106): Selenocysteine
  MOD_RES (109)..(109): Selenocysteine
  MOD_RES (123)..(123): Selenocysteine
  MOD_RES (126)..(126): Selenocysteine
  MOD_RES (133)..(133): Selenocysteine
  MOD_RES (135)..(135): Selenocysteine
  MOD_RES (155)..(155): Selenocysteine
  MOD_RES (161)..(161): Selenocysteine
  MOD_RES (203)..(203): Selenocysteine
  MOD_RES (214)..(214): Selenocysteine
  MOD_RES (216)..(216): Selenocysteine
  MOD_RES (239)..(239): Selenocysteine
  MOD_RES (246)..(246): Selenocysteine
MFPSWPXCLELERYLQXEPRRISEXFGEDLDCFLHASPPPCIEESFRRLDPLLLPVEAAICEKSSAVDILLSRDKLLSEXCLSLQPASSSLDSYXAVNQAQLNAVXSLXPPSSPELSRHLVKXSQXLSAVDGXVXLKLVAKKAALSSVKVGGVAXAAAAVXAAGAVKSGQSDSDQGGLGAEACPENKKRVHRCQFNGCRKVYXKSSHLKAHQRXHXGEKPYKCSWEGCEWRFARSDELXRHYRKHXGAKPFKCNHCDRCFSRSDHLALHMKRHI

SEQ ID NO: 14507 - protein, 269 aa, Homo sapiens
  MOD_RES (2)..(2): Selenocysteine
  MOD_RES (12)..(12): Selenocysteine
  MOD_RES (20)..(20): Selenocysteine
  MOD_RES (75)..(75): Selenocysteine
  MOD_RES (90)..(90): Selenocysteine
  MOD_RES (101)..(101): Selenocysteine
  MOD_RES (104)..(104): Selenocysteine
  MOD_RES (118)..(118): Selenocysteine
  MOD_RES (121)..(121): Selenocysteine
  MOD_RES (128)..(128): Selenocysteine
  MOD_RES (130)..(130): Selenocysteine
  MOD_RES (150)..(150): Selenocysteine
  MOD_RES (156)..(156): Selenocysteine
  MOD_RES (198)..(198): Selenocysteine
  MOD_RES (209)..(209): Selenocysteine
  MOD_RES (211)..(211): Selenocysteine
  MOD_RES (234)..(234): Selenocysteine
  MOD_RES (241)..(241): Selenocysteine
MXCLELERYLQXEPRRISEXFGEDLDCFLHASPPPCIEESFRRLDPLLLPVEAAICEKSSAVDILLSRDKLLSEXCLSLQPASSSLDSYXAVNQAQLNAVXSLXPPSSPELSRHLVKXSQXLSAVDGXVXLKLVAKKAALSSVKVGGVAXAAAAVXAAGAVKSGQSDSDQGGLGAEACPENKKRVHRCQFNGCRKVYXKSSHLKAHQRXHXGEKPYKCSWEGCEWRFARSDELXRHYRKHXGAKPFKCNHCDRCFSRSDHLALHMKRHI

SEQ ID NO: 14508 - protein, 228 aa, Homo sapiens
  MOD_RES (29)..(29): Selenocysteine
  MOD_RES (47)..(47): Selenocysteine
  MOD_RES (50)..(50): Selenocysteine
  MOD_RES (119)..(119): Selenocysteine
  MOD_RES (124)..(124): Selenocysteine
  MOD_RES (126)..(126): Selenocysteine
  MOD_RES (131)..(131): Selenocysteine
  MOD_RES (137)..(137): Selenocysteine
  MOD_RES (140)..(140): Selenocysteine
  MOD_RES (146)..(146): Selenocysteine
  MOD_RES (151)..(151): Selenocysteine
  MOD_RES (162)..(162): Selenocysteine
  MOD_RES (177)..(177): Selenocysteine
  MOD_RES (190)..(191): Selenocysteine
  MOD_RES (202)..(202): Selenocysteine
MVDMDKLINNLEVQLNSEGGSMQVFKQVXASVRNRDPPEIEYRSNMXSPXLLDANPMENPALFNDIKIEPPEELLASDFSLPQVEPVDLSFHKPKAPLQPASMLQAPIRPPKPQSSPQXLVVSXSXSDMSXSANIPXVLXPGSVLXSSQSXGSQQILHVIHXIPSVSLPNKMGGLKXIPVVVQSLPMVYXXLPADGGPAAIXVPLIGGDGKNAGSGAQRPRWMFSHLD

SEQ ID NO: 14509 - protein, 359 aa, Homo sapiens
  MOD_RES (29)..(29): Selenocysteine
  MOD_RES (47)..(47): Selenocysteine
  MOD_RES (50)..(50): Selenocysteine
  MOD_RES (119)..(119): Selenocysteine
  MOD_RES (124)..(124): Selenocysteine
  MOD_RES (126)..(126): Selenocysteine
  MOD_RES (131)..(131): Selenocysteine
  MOD_RES (137)..(137): Selenocysteine
  MOD_RES (140)..(140): Selenocysteine
  MOD_RES (146)..(146): Selenocysteine
  MOD_RES (151)..(151): Selenocysteine
  MOD_RES (162)..(162): Selenocysteine
  MOD_RES (177)..(177): Selenocysteine
  MOD_RES (190)..(191): Selenocysteine
  MOD_RES (202)..(202): Selenocysteine
  MOD_RES (221)..(221): Selenocysteine
  MOD_RES (236)..(236): Selenocysteine
  MOD_RES (286)..(286): Selenocysteine
  MOD_RES (299)..(299): Selenocysteine
  MOD_RES (307)..(307): Selenocysteine
  MOD_RES (322)..(322): Selenocysteine
  MOD_RES (329)..(329): Selenocysteine
  MOD_RES (337)..(337): Selenocysteine
  MOD_RES (358)..(358): Selenocysteine
MVDMDKLINNLEVQLNSEGGSMQVFKQVXASVRNRDPPEIEYRSNMXSPXLLDANPMENPALFNDIKIEPPEELLASDFSLPQVEPVDLSFHKPKAPLQPASMLQAPIRPPKPQSSPQXLVVSXSXSDMSXSANIPXVLXPGSVLXSSQSXGSQQILHVIHXIPSVSLPNKMGGLKXIPVVVQSLPMVYXXLPADGGPAAIXVPLIGGDGKNAGSVKVDPXSMSPLEIPSDSEESXIESGSSALQSLQGLQQEPAAMAQMQGEESLDLKRRRIHQCDFAGCSKVYXKSSHLKAHRRIHXGEKPYKCXWDGCSWKFARSDELXRHFRKHXGIKPFRCXDCNRSFSRSDHLSLHRRRHDXM

SEQ ID NO: 14510 - protein, 257 aa, Homo sapiens
  MOD_RES (29)..(29): Selenocysteine
  MOD_RES (47)..(47): Selenocysteine
  MOD_RES (50)..(50): Selenocysteine
  MOD_RES (119)..(119): Selenocysteine
  MOD_RES (124)..(124): Selenocysteine
  MOD_RES (126)..(126): Selenocysteine
  MOD_RES (131)..(131): Selenocysteine
  MOD_RES (137)..(137): Selenocysteine
  MOD_RES (140)..(140): Selenocysteine
  MOD_RES (146)..(146): Selenocysteine
  MOD_RES (151)..(151): Selenocysteine
  MOD_RES (162)..(162): Selenocysteine
  MOD_RES (177)..(177): Selenocysteine
  MOD_RES (190)..(191): Selenocysteine
  MOD_RES (202)..(202): Selenocysteine
  MOD_RES (221)..(221): Selenocysteine
  MOD_RES (236)..(236): Selenocysteine
MVDMDKLINNLEVQLNSEGGSMQVFKQVXASVRNRDPPEIEYRSNMXSPXLLDANPMENPALFNDIKIEPPEELLASDFSLPQVEPVDLSFHKPKAPLQPASMLQAPIRPPKPQSSPQXLVVSXSXSDMSXSANIPXVLXPGSVLXSSQSXGSQQILHVIHXIPSVSLPNKMGGLKXIPVVVQSLPMVYXXLPADGGPAAIXVPLIGGDGKNAGSVKVDPXSMSPLEIPSDSEESXIESGSSALQSLQGLQQEREAL

SEQ ID NO: 14511 - protein, 244 aa, Homo sapiens
  MOD_RES (44)..(44): Selenocysteine
  MOD_RES (53)..(53): Selenocysteine
  MOD_RES (59)..(59): Selenocysteine
  MOD_RES (62)..(62): Selenocysteine
  MOD_RES (78)..(78): Selenocysteine
  MOD_RES (100)..(101): Selenocysteine
  MOD_RES (168)..(168): Selenocysteine
  MOD_RES (176)..(176): Selenocysteine
  MOD_RES (191)..(191): Selenocysteine
  MOD_RES (196)..(196): Selenocysteine
  MOD_RES (198)..(198): Selenocysteine
  MOD_RES (219)..(219): Selenocysteine
  MOD_RES (226)..(226): Selenocysteine
MSAAAYMDFVAAQCLVSISNRAAVPEHGVAPDAERLRLPEREVXKEHGDPGDXWKDYCXLVXIAKSLLDLNKYRPIQXPSVCSDSLESPDEDMGSDSDVXXESGSSPSHSPEERQDPGSAPSPLSLLHPGVAAKGKHASEKRHKCPYSGCGKVYGKSSHLKAHYRVHXGERPFPCXWPDCLKKFSRSDELXRHYRXHXGEKQFRCPLCEKRFMRSDHLXKHARRHXEFHPSMIKRSKKALANAL

SEQ ID NO: 14512 - protein, 315 aa, Homo sapiens
  MOD_RES (21)..(21): Selenocysteine
  MOD_RES (29)..(29): Selenocysteine
  MOD_RES (50)..(50): Selenocysteine
  MOD_RES (52)..(52): Selenocysteine
  MOD_RES (69)..(69): Selenocysteine
  MOD_RES (74)..(74): Selenocysteine
  MOD_RES (101)..(101): Selenocysteine
  MOD_RES (118)..(118): Selenocysteine
  MOD_RES (121)..(121): Selenocysteine
  MOD_RES (131)..(131): Selenocysteine
  MOD_RES (133)..(133): Selenocysteine
  MOD_RES (137)..(137): Selenocysteine
  MOD_RES (182)..(182): Selenocysteine
  MOD_RES (266)..(266): Selenocysteine
  MOD_RES (271)..(271): Selenocysteine
  MOD_RES (311)..(311): Selenocysteine
MDVNKFEASVGFLDVKKFLSXWKLQNPRXHFVLSPHCFMGGIMAPKDIMXNXHAKSILNSMNSLRKSNXLCDVXLRVEQKDFPAHRIVLAACSDYFCAMFXSELSEKGKPYVDIQGLXASXMEILLDFVYXEXVHVXVENVQELLPAACLLQLKGVKQACCEFLESQLDPSNCLGIRDFAEXHNCVDLMQAAEVFSQKHFPEVVQHEEFILLSQGEVEKLIKCDEIQVDSEEPVFEAVINWVKHAKKEREESLPNLLQYVRMPLLXPRYIXDVIDAEPFIRCSLQCRDLVDEAKKFHLRPELRSQMQGPRXRARL

SEQ ID NO: 14513 - protein, 568 aa, Homo sapiens
  MOD_RES (12)..(12): Selenocysteine
  MOD_RES (14)..(14): Selenocysteine
  MOD_RES (31)..(31): Selenocysteine
  MOD_RES (36)..(36): Selenocysteine
  MOD_RES (63)..(63): Selenocysteine
  MOD_RES (80)..(80): Selenocysteine
  MOD_RES (83)..(83): Selenocysteine
  MOD_RES (93)..(93): Selenocysteine
  MOD_RES (95)..(95): Selenocysteine
  MOD_RES (99)..(99): Selenocysteine
  MOD_RES (144)..(144): Selenocysteine
  MOD_RES (228)..(228): Selenocysteine
  MOD_RES (233)..(233): Selenocysteine
  MOD_RES (273)..(273): Selenocysteine
  MOD_RES (306)..(306): Selenocysteine
  MOD_RES (316)..(316): Selenocysteine
  MOD_RES (352)..(352): Selenocysteine
  MOD_RES (375)..(376): Selenocysteine
  MOD_RES (394)..(394): Selenocysteine
  MOD_RES (414)..(414): Selenocysteine
  MOD_RES (450)..(450): Selenocysteine
  MOD_RES (454)..(454): Selenocysteine
  MOD_RES (457)..(457): Selenocysteine
  MOD_RES (461)..(461): Selenocysteine
  MOD_RES (484)..(484): Selenocysteine
  MOD_RES (497)..(497): Selenocysteine
  MOD_RES (501)..(502): Selenocysteine
  MOD_RES (504)..(504): Selenocysteine
  MOD_RES (507)..(508): Selenocysteine
  MOD_RES (516)..(516): Selenocysteine
  MOD_RES (551)..(551): Selenocysteine
  MOD_RES (555)..(555): Selenocysteine
MGGIMAPKDIMXNXHAKSILNSMNSLRKSNXLCDVXLRVEQKDFPAHRIVLAACSDYFCAMFXSELSEKGKPYVDIQGLXASXMEILLDFVYXEXVHVXVENVQELLPAACLLQLKGVKQACCEFLESQLDPSNCLGIRDFAEXHNCVDLMQAAEVFSQKHFPEVVQHEEFILLSQGEVEKLIKCDEIQVDSEEPVFEAVINWVKHAKKEREESLPNLLQYVRMPLLXPRYIXDVIDAEPFIRCSLQCRDLVDEAKKFHLRPELRSQMQGPRXRARLGANEVLLVVGGFGSQQSPIDVVEKYDPKXQEWSFLPSIXRKRRYVASVSLHDRIYVIGGYDGRSRLSSVECLDYXADEDGVWYSVAPMNVRRGLAGAXXLGDMIYVSGGFDGSRRHXSMERYDPNIDQWSMLGDMQXAREGAGLVVASGVIYCLGGYDGLNILNSVEKYDPHXGHWXNVXPMAXKRSGAGVALLNDHIYVVGGFDGXAHLSSVEAYNIRXDSWXXVXSMXXPRCYVGAXVLRGRLYAIAGYDGNSLLSSIECYDPIIDSWEVVXSMGXQRCDAGVCVLREK

SEQ ID NO: 14514 - protein, 204 aa, Homo sapiens
  MOD_RES (6)..(6): Selenocysteine
  MOD_RES (39)..(39): Selenocysteine
  MOD_RES (49)..(49): Selenocysteine
  MOD_RES (85)..(85): Selenocysteine
  MOD_RES (108)..(109): Selenocysteine
  MOD_RES (127)..(127): Selenocysteine
  MOD_RES (147)..(147): Selenocysteine
  MOD_RES (183)..(183): Selenocysteine
  MOD_RES (187)..(187): Selenocysteine
  MOD_RES (190)..(190): Selenocysteine
  MOD_RES (194)..(194): Selenocysteine
MQGPRXRARLGANEVLLVVGGFGSQQSPIDVVEKYDPKXQEWSFLPSIXRKRRYVASVSLHDRIYVIGGYDGRSRLSSVECLDYXADEDGVWYSVAPMNVRRGLAGAXXLGDMIYVSGGFDGSRRHXSMERYDPNIDQWSMLGDMQXAREGAGLVVASGVIYCLGGYDGLNILNSVEKYDPHXGHWXNVXPMAXKRSDMMVIPC

SEQ ID NO: 14515 - protein, 610 aa, Homo sapiens
  MOD_RES (17)..(17): Selenocysteine
  MOD_RES (24)..(24): Selenocysteine
  MOD_RES (53)..(53): Selenocysteine
  MOD_RES (61)..(61): Selenocysteine
  MOD_RES (111)..(111): Selenocysteine
  MOD_RES (114)..(114): Selenocysteine
  MOD_RES (119)..(119): Selenocysteine
  MOD_RES (121)..(121): Selenocysteine
  MOD_RES (127)..(127): Selenocysteine
  MOD_RES (155)..(155): Selenocysteine
  MOD_RES (172)..(172): Selenocysteine
  MOD_RES (206)..(206): Selenocysteine
  MOD_RES (219)..(219): Selenocysteine
  MOD_RES (227)..(227): Selenocysteine
  MOD_RES (263)..(263): Selenocysteine
  MOD_RES (298)..(298): Selenocysteine
  MOD_RES (317)..(317): Selenocysteine
  MOD_RES (327)..(327): Selenocysteine
  MOD_RES (345)..(345): Selenocysteine
  MOD_RES (363)..(363): Selenocysteine
  MOD_RES (376)..(376): Selenocysteine
  MOD_RES (429)..(429): Selenocysteine
  MOD_RES (453)..(453): Selenocysteine
  MOD_RES (472)..(472): Selenocysteine
  MOD_RES (475)..(475): Selenocysteine
  MOD_RES (482)..(482): Selenocysteine
  MOD_RES (531)..(531): Selenocysteine
  MOD_RES (552)..(552): Selenocysteine
  MOD_RES (564)..(564): Selenocysteine
  MOD_RES (576)..(576): Selenocysteine
  MOD_RES (592)..(592): Selenocysteine
  MOD_RES (598)..(598): Selenocysteine
MGDVVEKSLEGPLAPSXDEPSQKXGDLVEILNGEKVKFDDAGLSLILQNGLEXLRMENALXDVILCVDIQEFSCHRVVLAAASNYFRAMFCNDLKEKYEKRIIIKGVDAEXMHXLLDYXYXSKALIXKQNVQRVLEAANLFQFLRMVDACASFLXEALNPENCVGILRLADXHSLDSLKKQVQSYIIQNFVQILNSEEFLDLPVDXLHHILKSDDLYVXEEAQVFEXVMSWVRHKPSERLCLLPYVLENVRLPLLDPWYFVEXVEADPLIRQCPEVFPLLQEARMYHLSGNEIISERXKPRMHEFQSEVFMIIGGCXKDERFVAEVXCLDPLRRSRLEVAKLPLXEHELESENKKWVEFACVXLKNEVYISGGKEXQHDVWKYNSSINKWIQIEYLNIGRWRHKMVVLGGKVYVIGGFDGLQRINNVEXYDPFHNCWSEAAPLLVHVSSFAAXSHKKKLYVIGGGPNGKLAXDKXQCYDPSXNKWSLKAAMPVEAKCINAVSFRDRIYVVGGAMRALYAYSPLEDSWCLVXQLSHERASCGIAPCNNRLYIXGGRDEKNEVIAXVLCWDPEAQKLXEECVLPRGVSHHGSVXIRKSYXHIRRIVPGAVSV

SEQ ID NO: 14516 - protein, 621 aa, Homo sapiens
  MOD_RES (11)..(11): Selenocysteine
  MOD_RES (28)..(28): Selenocysteine
  MOD_RES (35)..(35): Selenocysteine
  MOD_RES (64)..(64): Selenocysteine
  MOD_RES (72)..(72): Selenocysteine
  MOD_RES (122)..(122): Selenocysteine
  MOD_RES (125)..(125): Selenocysteine
  MOD_RES (130)..(130): Selenocysteine
  MOD_RES (132)..(132): Selenocysteine
  MOD_RES (138)..(138): Selenocysteine
  MOD_RES (166)..(166): Selenocysteine
  MOD_RES (183)..(183): Selenocysteine
  MOD_RES (217)..(217): Selenocysteine
  MOD_RES (230)..(230): Selenocysteine
  MOD_RES (238)..(238): Selenocysteine
  MOD_RES (274)..(274): Selenocysteine
  MOD_RES (309)..(309): Selenocysteine
  MOD_RES (328)..(328): Selenocysteine
  MOD_RES (338)..(338): Selenocysteine
  MOD_RES (356)..(356): Selenocysteine
  MOD_RES (374)..(374): Selenocysteine
  MOD_RES (387)..(387): Selenocysteine
  MOD_RES (440)..(440): Selenocysteine
  MOD_RES (464)..(464): Selenocysteine
  MOD_RES (483)..(483): Selenocysteine
  MOD_RES (486)..(486): Selenocysteine
  MOD_RES (493)..(493): Selenocysteine
  MOD_RES (542)..(542): Selenocysteine
  MOD_RES (563)..(563): Selenocysteine
  MOD_RES (575)..(575): Selenocysteine
  MOD_RES (587)..(587): Selenocysteine
  MOD_RES (603)..(603): Selenocysteine
  MOD_RES (609)..(609): Selenocysteine
MLMAGQRGAWXMGDVVEKSLEGPLAPSXDEPSQKXGDLVEILNGEKVKFDDAGLSLILQNGLEXLRMENALXDVILCVDIQEFSCHRVVLAAASNYFRAMFCNDLKEKYEKRIIIKGVDAEXMHXLLDYXYXSKALIXKQNVQRVLEAANLFQFLRMVDACASFLXEALNPENCVGILRLADXHSLDSLKKQVQSYIIQNFVQILNSEEFLDLPVDXLHHILKSDDLYVXEEAQVFEXVMSWVRHKPSERLCLLPYVLENVRLPLLDPWYFVEXVEADPLIRQCPEVFPLLQEARMYHLSGNEIISERXKPRMHEFQSEVFMIIGGCXKDERFVAEVXCLDPLRRSRLEVAKLPLXEHELESENKKWVEFACVXLKNEVYISGGKEXQHDVWKYNSSINKWIQIEYLNIGRWRHKMVVLGGKVYVIGGFDGLQRINNVEXYDPFHNCWSEAAPLLVHVSSFAAXSHKKKLYVIGGGPNGKLAXDKXQCYDPSXNKWSLKAAMPVEAKCINAVSFRDRIYVVGGAMRALYAYSPLEDSWCLVXQLSHERASCGIAPCNNRLYIXGGRDEKNEVIAXVLCWDPEAQKLXEECVLPRGVSHHGSVXIRKSYXHIRRIVPGAVSV

SEQ ID NO: 14517 - protein, 267 aa, Homo sapiens
  MOD_RES (10)..(10): Selenocysteine
  MOD_RES (22)..(22): Selenocysteine
  MOD_RES (32)..(32): Selenocysteine
  MOD_RES (46)..(46): Selenocysteine
  MOD_RES (48)..(48): Selenocysteine
  MOD_RES (80)..(80): Selenocysteine
  MOD_RES (104)..(104): Selenocysteine
  MOD_RES (115)..(115): Selenocysteine
  MOD_RES (123)..(123): Selenocysteine
  MOD_RES (149)..(149): Selenocysteine
  MOD_RES (157)..(157): Selenocysteine
  MOD_RES (166)..(166): Selenocysteine
  MOD_RES (198)..(198): Selenocysteine
  MOD_RES (200)..(200): Selenocysteine
  MOD_RES (251)..(251): Selenocysteine
  MOD_RES (263)..(263): Selenocysteine
MSLRVLGSGXWPSAPKMFLLLXALQVLAIAMXQSQEDENKIIGGHXCXRSSQPWQAALLAGPRRRFLCGGALLSGQWVIXAAHCGRPILQVALGKHNLRRWEAXQQVLRVVRQVXHPNYNSRXHDNDLMLLQLQQPARIGRAVRPIEVXQACASPGXSCRVSGWGXISSPIARYPASLQCVNINISPDEVCQKAYPRXIXPGMVCAGVPQGGKDSCQGDSGGPLVCRGQLQGLVSWGMERCALPGYPGVYXNLCKYRSWIEEXMRDK

SEQ ID NO: 14518 - protein, 205 aa, Homo sapiens
  MOD_RES (3)..(3): Selenocysteine
  MOD_RES (17)..(17): Selenocysteine
  MOD_RES (24)..(24): Selenocysteine
  MOD_RES (41)..(41): Selenocysteine
  MOD_RES (77)..(77): Selenocysteine
  MOD_RES (105)..(105): Selenocysteine
  MOD_RES (166)..(166): Selenocysteine
  MOD_RES (183)..(183): Selenocysteine
  MOD_RES (192)..(193): Selenocysteine
MAXARPPWMWVLCALIXALLLGVXEHVLANNDVSCDHPSNXVPSGSNQDLGAGAGEDARSDDSSSRIINGSDCDMHXQPWQAALLLRPNQLYCGAVLVHPQWLLXAAHCRKKVFRVRLGHYSLSPVYESGQQMFQGVKSIPHPGYSHPGHSNDLMLIKLNRRIRPXKDVRPINVSSHCPSAGXKCLVSGWGXXKSPQVHFPKVLQ

SEQ ID NO: 14519 - protein, 293 aa, Homo sapiens
  MOD_RES (3)..(3): Selenocysteine
  MOD_RES (17)..(17): Selenocysteine
  MOD_RES (24)..(24): Selenocysteine
  MOD_RES (41)..(41): Selenocysteine
  MOD_RES (77)..(77): Selenocysteine
  MOD_RES (105)..(105): Selenocysteine
  MOD_RES (166)..(166): Selenocysteine
  MOD_RES (183)..(183): Selenocysteine
  MOD_RES (192)..(193): Selenocysteine
  MOD_RES (228)..(228): Selenocysteine
  MOD_RES (276)..(276): Selenocysteine
  MOD_RES (282)..(282): Selenocysteine
  MOD_RES (288)..(288): Selenocysteine
MAXARPPWMWVLCALIXALLLGVXEHVLANNDVSCDHPSNXVPSGSNQDLGAGAGEDARSDDSSSRIINGSDCDMHXQPWQAALLLRPNQLYCGAVLVHPQWLLXAAHCRKKVFRVRLGHYSLSPVYESGQQMFQGVKSIPHPGYSHPGHSNDLMLIKLNRRIRPXKDVRPINVSSHCPSAGXKCLVSGWGXXKSPQVHFPKVLQCLNISVLSQKRCEDAYPRQIDDXMFCAGDKAGRDSCQGDSGGPVVCNGSLQGLVSWGDYPCARPNRPGVYXNLCKFXKWIQEXIQANS

SEQ ID NO: 14520 - protein, 69 aa, Homo sapiens
  MOD_RES (6)..(6): Selenocysteine
  MOD_RES (10)..(10): Selenocysteine
  MOD_RES (12)..(12): Selenocysteine
  MOD_RES (17)..(17): Selenocysteine
  MOD_RES (21)..(21): Selenocysteine
  MOD_RES (39)..(39): Selenocysteine
  MOD_RES (53)..(53): Selenocysteine
MADPAXRHLXPXKLPSXPRAXCSVVGSLSIHCGSSQLPXAKNRIFRSSWGSIXFGKGRVPRSRVLLSGL

SEQ ID NO: 14521 - protein, 244 aa, Homo sapiens
  MOD_RES (31)..(31): Selenocysteine
  MOD_RES (41)..(41): Selenocysteine
  MOD_RES (59)..(59): Selenocysteine
  MOD_RES (135)..(136): Selenocysteine
  MOD_RES (146)..(146): Selenocysteine
  MOD_RES (154)..(154): Selenocysteine
  MOD_RES (177)..(177): Selenocysteine
  MOD_RES (228)..(228): Selenocysteine
  MOD_RES (234)..(234): Selenocysteine
  MOD_RES (240)..(240): Selenocysteine
MKKLMVVLSLIAAAWAEEQNKLVHGGPCDKXSHPYQAALYXSGHLLCGGVLIHPLWVLXAAHCKKPNLQVFLGKHNLRQRESSQEQSSVVRAVIHPDYDAASHDQDIMLLRLARPAKLSELIQPLPLERDCSANXXSCHILGWGKXADGDFPDXIQCAYIHLVSREECEHAYPGQIXQNMLCAGDEKYGKDSCQGDSGGPLVCGDHLRGLVSWGNIPCGSKEKPGVYXNVCRYXNWIQKXIQAK

SEQ ID NO: 14522 - protein, 120 aa, Homo sapiens
  MOD_RES (31)..(31): Selenocysteine
  MOD_RES (41)..(41): Selenocysteine
  MOD_RES (59)..(59): Selenocysteine
  MOD_RES (77)..(78): Selenocysteine
  MOD_RES (87)..(87): Selenocysteine
  MOD_RES (99)..(99): Selenocysteine
  MOD_RES (101)..(101): Selenocysteine
  MOD_RES (105)..(105): Selenocysteine
  MOD_RES (107)..(107): Selenocysteine
MKKLMVVLSLIAAAWAEEQNKLVHGGPCDKXSHPYQAALYXSGHLLCGGVLIHPLWVLXAAHCKKPVILGVRWYVEXXSEALCHGVXSPVDQRRSQESXPXSADXRXGSKKPFRPSDPDM

SEQ ID NO: 14523 - protein, 40 aa, Homo sapiens
  MOD_RES (24)..(24): Selenocysteine
MKKLMVVLSLIAAGIFRSSWGSIXFGKGRVPRSRVLLSGL

SEQ ID NO: 14524 - protein, 137 aa, Homo sapiens
  MOD_RES (28)..(29): Selenocysteine
  MOD_RES (39)..(39): Selenocysteine
  MOD_RES (47)..(47): Selenocysteine
  MOD_RES (70)..(70): Selenocysteine
  MOD_RES (121)..(121): Selenocysteine
  MOD_RES (127)..(127): Selenocysteine
  MOD_RES (133)..(133): Selenocysteine
MLLRLARPAKLSELIQPLPLERDCSANXXSCHILGWGKXADGDFPDXIQCAYIHLVSREECEHAYPGQIXQNMLCAGDEKYGKDSCQGDSGGPLVCGDHLRGLVSWGNIPCGSKEKPGVYXNVCRYXNWIQKXIQAK

SEQ ID NO: 14525 - protein, 225 aa, Homo sapiens
  MOD_RES (14)..(14): Selenocysteine
  MOD_RES (56)..(56): Selenocysteine
  MOD_RES (63)..(63): Selenocysteine
  MOD_RES (85)..(86): Selenocysteine
  MOD_RES (111)..(111): Selenocysteine
  MOD_RES (124)..(124): Selenocysteine
  MOD_RES (141)..(141): Selenocysteine
  MOD_RES (195)..(195): Selenocysteine
  MOD_RES (204)..(204): Selenocysteine
  MOD_RES (215)..(215): Selenocysteine
MDQQAIYAELNLPXDSGPESSSPSSLPRDVCQGSPWHQFALKLSCAGIILLVLVVXGLSVSVXSLIQKSSIEKCSVDIQQSRNKXXERPGLLNCPIYWQQLREKCLLFSHXVNPWNNSLADCSXKESSLLLIRDKDELIHXQNLIRDKAILFWIGLNFSLSEKNWKWINGSFLNSNDLEIRGDAKENSCISISQXSVYSEYCSXEIRWICQKELXPVRNKVYPDS

SEQ ID NO: 14526 - protein, 215 aa, Homo sapiens
  MOD_RES (34)..(34): Selenocysteine
  MOD_RES (39)..(39): Selenocysteine
  MOD_RES (58)..(58): Selenocysteine
  MOD_RES (89)..(89): Selenocysteine
  MOD_RES (107)..(107): Selenocysteine
  MOD_RES (121)..(121): Selenocysteine
  MOD_RES (130)..(130): Selenocysteine
  MOD_RES (170)..(170): Selenocysteine
MDNQGVIYSDLNLPPNPKRQQRKPKGNKNSILAXEQEIXYAELNLQKASQDFQGNDKXYHCKDLPSAPEKLIVGILGIICLILMASVVXIVVIPSRHCGHCPEEWIXYSNSCYYIGKERRXWEESLLACXSKNSSLLSIDNEEEMKFLSIISPSSWIGVFRNSSHHPWVXMNGLAFKHEIKDSDNAELNCAVLQVNRLKSAQCGSSIIYHCKHKL

SEQ ID NO: 14527 - protein, 228 aa, Homo sapiens
  MOD_RES (34)..(34): Selenocysteine
  MOD_RES (39)..(39): Selenocysteine
  MOD_RES (58)..(58): Selenocysteine
  MOD_RES (89)..(89): Selenocysteine
  MOD_RES (96)..(96): Selenocysteine
  MOD_RES (108)..(108): Selenocysteine
  MOD_RES (110)..(110): Selenocysteine
  MOD_RES (125)..(125): Selenocysteine
  MOD_RES (139)..(139): Selenocysteine
  MOD_RES (148)..(148): Selenocysteine
  MOD_RES (188)..(188): Selenocysteine
MDNQGVIYSDLNLPPNPKRQQRKPKGNKNSILAXEQEIXYAELNLQKASQDFQGNDKXYHCKDLPSAPEKLIVGILGIICLILMASVVXIVVIPSXLIQRHNNSSLNXRXQKARHCGHCPEEWIXYSNSCYYIGKERRXWEESLLACXSKNSSLLSIDNEEEMKFLSIISPSSWIGVFRNSSHHPWVXMNGLAFKHEIKDSDNAELNCAVLQVNRLKSAQCGSSIIYH

SEQ ID NO: 14528 - protein, 233 aa, Homo sapiens
  MOD_RES (34)..(34): Selenocysteine
  MOD_RES (39)..(39): Selenocysteine
  MOD_RES (58)..(58): Selenocysteine
  MOD_RES (89)..(89): Selenocysteine
  MOD_RES (96)..(96): Selenocysteine
  MOD_RES (108)..(108): Selenocysteine
  MOD_RES (110)..(110): Selenocysteine
  MOD_RES (125)..(125): Selenocysteine
  MOD_RES (139)..(139): Selenocysteine
  MOD_RES (148)..(148): Selenocysteine
  MOD_RES (188)..(188): Selenocysteine
MDNQGVIYSDLNLPPNPKRQQRKPKGNKNSILAXEQEIXYAELNLQKASQDFQGNDKXYHCKDLPSAPEKLIVGILGIICLILMASVVXIVVIPSXLIQRHNNSSLNXRXQKARHCGHCPEEWIXYSNSCYYIGKERRXWEESLLACXSKNSSLLSIDNEEEMKFLSIISPSSWIGVFRNSSHHPWVXMNGLAFKHEIKDSDNAELNCAVLQVNRLKSAQCGSSIIYHCKHKL

SEQ ID NO: 14529 - protein, 77 aa, Homo sapiens
  MOD_RES (1)..(1): Any amino acid
  MOD_RES (5)..(5): Selenocysteine
  MOD_RES (19)..(19): Selenocysteine
  MOD_RES (28)..(28): Selenocysteine
  MOD_RES (68)..(68): Selenocysteine
XEWIXYSNSCYYIGKERRXWEESLLACXSKNSSLLSIDNEEEMKFLSIISPSSWIGVFRNSSHHPWVXMNGLAFKHE

SEQ ID NO: 14530 - protein, 103 aa, Homo sapiens
  MOD_RES (7)..(7): Selenocysteine
  MOD_RES (45)..(45): Selenocysteine
  MOD_RES (59)..(59): Selenocysteine
  MOD_RES (63)..(63): Selenocysteine
  MOD_RES (79)..(79): Selenocysteine
  MOD_RES (81)..(81): Selenocysteine
  MOD_RES (98)..(98): Selenocysteine
KSSISGXEQEIFQVELNLQNPSLNHQGIDKIYDCQGLLPPPEKLXAEVLGIICIVLMAXVLKXIVLIPFLEQNNFSPNXRXQKEELGKRVCWPVLRRXPVCFL

SEQ ID NO: 14531 - protein, 124 aa, Homo sapiens
  MOD_RES (4)..(4): Selenocysteine
  MOD_RES (16)..(16): Selenocysteine
  MOD_RES (30)..(30): Selenocysteine
  MOD_RES (39)..(39): Selenocysteine
  MOD_RES (79)..(79): Selenocysteine
MIPXRHCGHCPEEWIXYSNSCYYIGKERRXWEESLLACXSKNSSLLSIDNEEEMKFLASILPSSWIGVFRNSSHHPWVXINGLAFKHKIKDSDNAELNCAVLQVNRLKSAQCGSSMIYHCKHKL

SEQ ID NO: 14532 - protein, 231 aa, Homo sapiens
  MOD_RES (7)..(7): Selenocysteine
  MOD_RES (34)..(34): Selenocysteine
  MOD_RES (72)..(72): Selenocysteine
  MOD_RES (86)..(86): Selenocysteine
  MOD_RES (90)..(90): Selenocysteine
  MOD_RES (106)..(106): Selenocysteine
  MOD_RES (108)..(108): Selenocysteine
  MOD_RES (123)..(123): Selenocysteine
  MOD_RES (137)..(137): Selenocysteine
  MOD_RES (146)..(146): Selenocysteine
  MOD_RES (186)..(186): Selenocysteine
MNKQRGXFSEVSLAQDPKRQQRKPKGNKSSISGXEQEIFQVELNLQNPSLNHQGIDKIYDCQGLLPPPEKLXAEVLGIICIVLMAXVLKXIVLIPFLEQNNFSPNXRXQKARHCGHCPEEWIXYSNSCYYIGKERRXWEESLLACXSKNSSLLSIDNEEEMKFLASILPSSWIGVFRNSSHHPWVXINGLAFKHKIKDSDNAELNCAVLQVNRLKSAQCGSSMIYHCKHKL

SEQ ID NO: 14533 - protein, 231 aa, Homo sapiens
  MOD_RES (7)..(7): Selenocysteine
  MOD_RES (34)..(34): Selenocysteine
  MOD_RES (72)..(72): Selenocysteine
  MOD_RES (86)..(86): Selenocysteine
  MOD_RES (90)..(90): Selenocysteine
  MOD_RES (106)..(106): Selenocysteine
  MOD_RES (108)..(108): Selenocysteine
  MOD_RES (111)..(111): Selenocysteine
  MOD_RES (123)..(123): Selenocysteine
  MOD_RES (137)..(137): Selenocysteine
  MOD_RES (146)..(146): Selenocysteine
  MOD_RES (186)..(186): Selenocysteine
MNKQRGXFSEVSLAQDPKRQQRKPKGNKSSISGXEQEIFQVELNLQNPSLNHQGIDKIYDCQGLLPPPEKLXAEVLGIICIVLMAXVLKXIVLIPFLEQNNSSPNXRXQKXRHCGHCPEEWIXYSNSCYYIGKERRXWEESLLACXSKNSSLLSIDNEEEMKFLASILPSSWIGVFRNSSHHPWVXINGLAFKHKIKDSDNAELNCAVLQVNRLKSAQCGSSMIYHCKHKL

SEQ ID NO: 14534 - protein, 172 aa, Homo sapiens
  MOD_RES (2)..(2): Selenocysteine
  MOD_RES (13)..(13): Selenocysteine
  MOD_RES (27)..(27): Selenocysteine
  MOD_RES (31)..(31): Selenocysteine
  MOD_RES (47)..(47): Selenocysteine
  MOD_RES (49)..(49): Selenocysteine
  MOD_RES (64)..(64): Selenocysteine
  MOD_RES (78)..(78): Selenocysteine
  MOD_RES (87)..(87): Selenocysteine
  MOD_RES (127)..(127): Selenocysteine
MXVGLLPPPEKLXAEVLGIICIVLMAXVLKXIVLIPFLEQNNFSPNXRXQKARHCGHCPEEWIXYSNSCYYIGKERRXWEESLLACXSKNSSLLSIDNEEEMKFLASILPSSWIGVFRNSSHHPWVXINGLAFKHKIKDSDNAELNCAVLQVNRLKSAQCGSSMIYHCKHKL

SEQ ID NO: 14535 - protein, 85 aa, Homo sapiens
  MOD_RES (1)..(1): Any amino acid
  MOD_RES (15)..(15): Selenocysteine
  MOD_RES (24)..(24): Selenocysteine
  MOD_RES (64)..(64): Selenocysteine
  MOD_RES (74)..(74): Selenocysteine
XYSNSCYYIGKERRXWEESLLACXSKNSSLLSIDNEEEMKFLASILPSSWIGVFRNSSHHPWVXINGLAFKHNXWKMLSSHESFA

SEQ ID NO: 14536 - protein, 240 aa, Homo sapiens
  MOD_RES (7)..(7): Selenocysteine
  MOD_RES (34)..(34): Selenocysteine
  MOD_RES (72)..(72): Selenocysteine
  MOD_RES (86)..(86): Selenocysteine
  MOD_RES (90)..(90): Selenocysteine
  MOD_RES (108)..(108): Selenocysteine
  MOD_RES (123)..(123): Selenocysteine
  MOD_RES (137)..(137): Selenocysteine
  MOD_RES (187)..(187): Selenocysteine
  MOD_RES (234)..(234): Selenocysteine
MSKQRGXFSEVSLAQDPKWQQRKPKGNKSSISGXEQEIFQVELNLQNASLNHQGIDKIYDCQGLLPPPEKLXAEVLGIICIVLMAXVLKXIVLIPFLEQNNSSPNARXQKARHCGHCPEEWIXYSNSCYYIGKERRXWEESLQACASKNSSSLLCIDNEEEMKFLASILPSSWIGVFRNSSHHPWVXINGLAFKHEIKDSDHAERNCAMLHVRGLISDQCGSSRIIRRGFIMLXRLVLNS

SEQ ID NO: 14537 - protein, 257 aa, Homo sapiens
  MOD_RES (7)..(7): Selenocysteine
  MOD_RES (34)..(34): Selenocysteine
  MOD_RES (72)..(72): Selenocysteine
  MOD_RES (86)..(86): Selenocysteine
  MOD_RES (90)..(90): Selenocysteine
  MOD_RES (108)..(108): Selenocysteine
  MOD_RES (123)..(123): Selenocysteine
  MOD_RES (137)..(137): Selenocysteine
  MOD_RES (187)..(187): Selenocysteine
MSKQRGXFSEVSLAQDPKWQQRKPKGNKSSISGXEQEIFQVELNLQNASLNHQGIDKIYDCQGLLPPPEKLXAEVLGIICIVLMAXVLKXIVLIPFLEQNNSSPNARXQKARHCGHCPEEWIXYSNSCYYIGKERRXWEESLQACASKNSSSLLCIDNEEEMKFLASILPSSWIGVFRNSSHHPWVXINGLAFKHEIKDSDHAERNCAMLHVRGLISDQCGSSRIIVSISFRIKALELAVHQIKFYICSNRNDIMIA

SEQ ID NO: 14538 - protein, 139 aa, Homo sapiens
  MOD_RES (5)..(5): Selenocysteine
  MOD_RES (14)..(14): Selenocysteine
  MOD_RES (50)..(50): Selenocysteine
  MOD_RES (71)..(71): Selenocysteine
  MOD_RES (95)..(95): Selenocysteine
  MOD_RES (115)..(115): Selenocysteine
  MOD_RES (118)..(118): Selenocysteine
MAAFXKLSIEPAFXPGPNIELQKDSDCCSCQEKWVGYRCNCYFISSEQKXWNESRHLCASQKSSLLQLQNXDELDFMSSSQQFYWIGLSYSEEHXAWLWENGSALSQYLFPSFEXFNXKNCIAYNPNGNALDESCEDKN

SEQ ID NO: 14539 - protein, 148 aa, Homo sapiens
  MOD_RES (5)..(5): Selenocysteine
  MOD_RES (14)..(14): Selenocysteine
  MOD_RES (50)..(50): Selenocysteine
  MOD_RES (71)..(71): Selenocysteine
  MOD_RES (95)..(95): Selenocysteine
  MOD_RES (115)..(115): Selenocysteine
  MOD_RES (118)..(118): Selenocysteine
MAAFXKLSIEPAFXPGPNIELQKDSDCCSCQEKWVGYRCNCYFISSEQKXWNESRHLCASQKSSLLQLQNXDELDFMSSSQQFYWIGLSYSEEHXAWLWENGSALSQYLFPSFEXFNXKNCIAYNPNGNALDESCEDKNRYICKQQLI

SEQ ID NO: 14540 - protein, 72 aa, Homo sapiens
  MOD_RES (6)..(7): Selenocysteine
  MOD_RES (15)..(15): Selenocysteine
  MOD_RES (26)..(26): Selenocysteine
  MOD_RES (36)..(36): Selenocysteine
  MOD_RES (45)..(45): Selenocysteine
  MOD_RES (63)..(63): Selenocysteine
  MOD_RES (69)..(69): Selenocysteine
MAVFKXXLWRLISGXLGIICLSLMSXLGILLKNSFXKLSIEPAFXPGPNIELQKAGFYELQSXILLDWXLLQ

SEQ ID NO: 14541 - protein, 106 aa, Homo sapiens
  MOD_RES (6)..(7): Selenocysteine
  MOD_RES (15)..(15): Selenocysteine
  MOD_RES (26)..(26): Selenocysteine
  MOD_RES (36)..(36): Selenocysteine
  MOD_RES (45)..(45): Selenocysteine
  MOD_RES (81)..(81): Selenocysteine
  MOD_RES (102)..(102): Selenocysteine
MAVFKXXLWRLISGXLGIICLSLMSXLGILLKNSFXKLSIEPAFXPGPNIELQKDSDCCSCQEKWVGYRCNCYFISSEQKXWNESRHLCASQKSSLLQLQNXDELA

SEQ ID NO: 14542 - protein, 179 aa, Homo sapiens
  MOD_RES (6)..(7): Selenocysteine
  MOD_RES (15)..(15): Selenocysteine
  MOD_RES (26)..(26): Selenocysteine
  MOD_RES (36)..(36): Selenocysteine
  MOD_RES (45)..(45): Selenocysteine
  MOD_RES (81)..(81): Selenocysteine
  MOD_RES (102)..(102): Selenocysteine
  MOD_RES (126)..(126): Selenocysteine
  MOD_RES (146)..(146): Selenocysteine
  MOD_RES (149)..(149): Selenocysteine
MAVFKXXLWRLISGXLGIICLSLMSXLGILLKNSFXKLSIEPAFXPGPNIELQKDSDCCSCQEKWVGYRCNCYFISSEQKXWNESRHLCASQKSSLLQLQNXDELDFMSSSQQFYWIGLSYSEEHXAWLWENGSALSQYLFPSFEXFNXKNCIAYNPNGNALDESCEDKNRYICKQQLI

SEQ ID NO: 14543 - protein, 158 aa, Homo sapiens
  MOD_RES (6)..(7): Selenocysteine
  MOD_RES (15)..(15): Selenocysteine
  MOD_RES (26)..(26): Selenocysteine
  MOD_RES (60)..(60): Selenocysteine
  MOD_RES (81)..(81): Selenocysteine
  MOD_RES (105)..(105): Selenocysteine
  MOD_RES (125)..(125): Selenocysteine
  MOD_RES (128)..(128): Selenocysteine
MAVFKXXLWRLISGXLGIICLSLMSXLGILLKNYSDCCSCQEKWVGYRCNCYFISSEQKXWNESRHLCASQKSSLLQLQNXDELDFMSSSQQFYWIGLSYSEEHXAWLWENGSALSQYLFPSFEXFNXKNCIAYNPNGNALDESCEDKNRYICKQQLI

SEQ ID NO: 14544 - protein, 51 aa, Homo sapiens
  MOD_RES (13)..(13): Selenocysteine
  MOD_RES (16)..(16): Selenocysteine
SALSQYLFPSFEXFNXKNCIAYNPNGNALDESCEDKNRYIYKVLLCCPGWS

SEQ ID NO: 14545 - protein, 64 aa, Homo sapiens
  MOD_RES (9)..(9): Selenocysteine
  MOD_RES (22)..(22): Selenocysteine
  MOD_RES (26)..(26): Selenocysteine
  MOD_RES (33)..(33): Selenocysteine
  MOD_RES (46)..(46): Selenocysteine
  MOD_RES (52)..(52): Selenocysteine
  MOD_RES (54)..(54): Selenocysteine
MQDEERYMXLNVQSKKRSSAQXSQLXFKDYSVXLHWYKILLGISGXVNGILXLXLISLILLDSS

SEQ ID NO: 14546 - protein, 78 aa, Homo sapiens
  MOD_RES (9)..(9): Selenocysteine
  MOD_RES (22)..(22): Selenocysteine
  MOD_RES (26)..(26): Selenocysteine
  MOD_RES (33)..(33): Selenocysteine
  MOD_RES (46)..(46): Selenocysteine
  MOD_RES (52)..(52): Selenocysteine
  MOD_RES (54)..(54): Selenocysteine
  MOD_RES (65)..(65): Selenocysteine
  MOD_RES (70)..(70): Selenocysteine
MQDEERYMXLNVQSKKRSSAQXSQLXFKDYSVXLHWYKILLGISGXVNGILXLXLISLILLGFYXEKPKXIKLRMDWA

SEQ ID NO: 14547 - protein, 181 aa, Homo sapiens
  MOD_RES (9)..(9): Selenocysteine
  MOD_RES (22)..(22): Selenocysteine
  MOD_RES (26)..(26): Selenocysteine
  MOD_RES (33)..(33): Selenocysteine
  MOD_RES (46)..(46): Selenocysteine
  MOD_RES (52)..(52): Selenocysteine
  MOD_RES (54)..(54): Selenocysteine
  MOD_RES (128)..(128): Selenocysteine
  MOD_RES (133)..(133): Selenocysteine
  MOD_RES (135)..(135): Selenocysteine
  MOD_RES (170)..(170): Selenocysteine
MQDEERYMXLNVQSKKRSSAQXSQLXFKDYSVXLHWYKILLGISGXVNGILXLXLISLILLVLCQSEWLKYQGKCYWFSNEMKSWSDSYVYCLERKSHLLIIHDQLEMAFIQKNLRQLNYVWIGLNFXSLKMXWXWVDGSPIDSKIFFIKGPAKENSCAAIKESKIFSEXCSSVFKWICQY

SEQ ID NO: 14548 - protein, 114 aa, Homo sapiens
  MOD_RES (9)..(9): Selenocysteine
  MOD_RES (22)..(22): Selenocysteine
  MOD_RES (26)..(26): Selenocysteine
  MOD_RES (33)..(33): Selenocysteine
  MOD_RES (46)..(46): Selenocysteine
  MOD_RES (52)..(52): Selenocysteine
  MOD_RES (54)..(54): Selenocysteine
  MOD_RES (79)..(79): Selenocysteine
  MOD_RES (84)..(84): Selenocysteine
  MOD_RES (93)..(93): Selenocysteine
  MOD_RES (111)..(111): Selenocysteine
MQDEERYMXLNVQSKKRSSAQXSQLXFKDYSVXLHWYKILLGISGXVNGILXLXLISLILLVSQGVLLKCQKGSCSNAXQYEDXGDLKVNNGXRRNISNKDLCASRSADQXDSS

SEQ ID NO: 14549 - protein, 128 aa, Homo sapiens
  MOD_RES (9)..(9): Selenocysteine
  MOD_RES (22)..(22): Selenocysteine
  MOD_RES (26)..(26): Selenocysteine
  MOD_RES (33)..(33): Selenocysteine
  MOD_RES (46)..(46): Selenocysteine
  MOD_RES (52)..(52): Selenocysteine
  MOD_RES (54)..(54): Selenocysteine
  MOD_RES (79)..(79): Selenocysteine
  MOD_RES (84)..(84): Selenocysteine
  MOD_RES (93)..(93): Selenocysteine
  MOD_RES (111)..(111): Selenocysteine
  MOD_RES (115)..(115): Selenocysteine
  MOD_RES (120)..(120): Selenocysteine
MQDEERYMXLNVQSKKRSSAQXSQLXFKDYSVXLHWYKILLGISGXVNGILXLXLISLILLVSQGVLLKCQKGSCSNAXQYEDXGDLKVNNGXRRNISNKDLCASRSADQXGFYXEKPKXIKLRMDWA

SEQ ID NO: 14550 - protein, 231 aa, Homo sapiens
  MOD_RES (9)..(9): Selenocysteine
  MOD_RES (22)..(22): Selenocysteine
  MOD_RES (26)..(26): Selenocysteine
  MOD_RES (33)..(33): Selenocysteine
  MOD_RES (46)..(46): Selenocysteine
  MOD_RES (52)..(52): Selenocysteine
  MOD_RES (54)..(54): Selenocysteine
  MOD_RES (79)..(79): Selenocysteine
  MOD_RES (84)..(84): Selenocysteine
  MOD_RES (93)..(93): Selenocysteine
  MOD_RES (111)..(111): Selenocysteine
  MOD_RES (178)..(178): Selenocysteine
  MOD_RES (183)..(183): Selenocysteine
  MOD_RES (185)..(185): Selenocysteine
  MOD_RES (220)..(220): Selenocysteine
MQDEERYMXLNVQSKKRSSAQXSQLXFKDYSVXLHWYKILLGISGXVNGILXLXLISLILLVSQGVLLKCQKGSCSNAXQYEDXGDLKVNNGXRRNISNKDLCASRSADQXVLCQSEWLKYQGKCYWFSNEMKSWSDSYVYCLERKSHLLIIHDQLEMAFIQKNLRQLNYVWIGLNFXSLKMXWXWVDGSPIDSKIFFIKGPAKENSCAAIKESKIFSEXCSSVFKWICQY

SEQ ID NO: 14551 - protein, 124 aa, Homo sapiens
  MOD_RES (9)..(9): Selenocysteine
  MOD_RES (22)..(22): Selenocysteine
  MOD_RES (26)..(26): Selenocysteine
  MOD_RES (33)..(33): Selenocysteine
  MOD_RES (46)..(46): Selenocysteine
  MOD_RES (52)..(52): Selenocysteine
  MOD_RES (54)..(54): Selenocysteine
  MOD_RES (79)..(79): Selenocysteine
  MOD_RES (84)..(84): Selenocysteine
  MOD_RES (93)..(93): Selenocysteine
  MOD_RES (111)..(111): Selenocysteine
  MOD_RES (124)..(124): Selenocysteine
MQDEERYMXLNVQSKKRSSAQXSQLXFKDYSVXLHWYKILLGISGXVNGILXLXLISLILLVSQGVLLKCQKGSCSNAXQYEDXGDLKVNNGXRRNISNKDLCASRSADQXVPRPHFRLLYRKX

SEQ ID NO: 14552 - protein, 80 aa, Homo sapiens
  MOD_RES (35)..(35): Selenocysteine
MKYGNHCYYFSVEEKDWNSSLEFCLARDSHLLVIXDNQEMSLLQVFLSEAFCWIGLRNNSGWRWEDGSPLNFSRISSNSF

SEQ ID NO: 14553 - protein, 81 aa, Homo sapiens
  MOD_RES (35)..(35): Selenocysteine
MKYGNHCYYFSVEEKDWNSSLEFCLARDSHLLVIXDNQEMSLLQVFLSEAFCWIGLRNNSGWRWEDGSPLNFSRISSNSFV

SEQ ID NO: 14554 - protein, 195 aa, Homo sapiens
  MOD_RES (2)..(2): Selenocysteine
  MOD_RES (14)..(14): Selenocysteine
  MOD_RES (16)..(16): Selenocysteine
  MOD_RES (47)..(47): Selenocysteine
  MOD_RES (68)..(68): Selenocysteine
  MOD_RES (114)..(114): Selenocysteine
  MOD_RES (162)..(162): Selenocysteine
MXDSVIYSMLELPXAXQAQNDYGPQQKSSSSRPSCSCLVAIALGLLXAVLLSVLLYQWILCQGSNYSXCASCPSCPDRWMKYGNHCYYFSVEEKDWNSSLEFCLARDSHLLVIXDNQEMSLLQVFLSEAFCWIGLRNNSGWRWEDGSPLNFSRISSNSFVQXCGAINKNGLQASSCEVPLHWVCKKCPFADQALF

SEQ ID NO: 14555 - protein, 189 aa, Homo sapiens
  MOD_RES (2)..(2): Selenocysteine
  MOD_RES (14)..(14): Selenocysteine
  MOD_RES (16)..(16): Selenocysteine
  MOD_RES (47)..(47): Selenocysteine
  MOD_RES (68)..(68): Selenocysteine
  MOD_RES (114)..(114): Selenocysteine
  MOD_RES (162)..(162): Selenocysteine
MXDSVIYSMLELPXAXQAQNDYGPQQKSSSSRPSCSCLVAIALGLLXAVLLSVLLYQWILCQGSNYSXCASCPSCPDRWMKYGNHCYYFSVEEKDWNSSLEFCLARDSHLLVIXDNQEMSLLQVFLSEAFCWIGLRNNSGWRWEDGSPLNFSRISSNSFVQXCGAINKNGLQASSCEVPLHWVCKKVRL

SEQ ID NO: 14556 - protein, 80 aa, Homo sapiens
  MOD_RES (32)..(32): Selenocysteine
  MOD_RES (72)..(72): Selenocysteine
MGWIRGRRSRHSWEMSEFHNYNLDLKKSDFSXRWQKQRCPVVKSKCRENASPFFFCCFIAVAMGIRFIIMVXIWSAVFLN

SEQ ID NO: 14557 - protein, 216 aa, Homo sapiens
  MOD_RES (32)..(32): Selenocysteine
  MOD_RES (72)..(72): Selenocysteine
  MOD_RES (92)..(92): Selenocysteine
  MOD_RES (162)..(162): Selenocysteine
  MOD_RES (180)..(180): Selenocysteine
  MOD_RES (205)..(205): Selenocysteine
  MOD_RES (208)..(208): Selenocysteine
  MOD_RES (215)..(215): Selenocysteine
MGWIRGRRSRHSWEMSEFHNYNLDLKKSDFSXRWQKQRCPVVKSKCRENASPFFFCCFIAVAMGIRFIIMVXIWSAVFLNSLFNQEVQIPLXESYCGPCPKNWICYKNNCYQFFDESKNWYESQASCMSQNASLLKVYSKEDQDLLKLVKSYHWMGLVHIPXNGSWQWEDGSILSPNLLXIIEMQKGDCALYASSFKGYIENCSXPNXYICMQRXV

SEQ ID NO: 14558 - protein, 87 aa, Homo sapiens
  MOD_RES (47)..(47): Selenocysteine
  MOD_RES (77)..(77): Selenocysteine
  MOD_RES (80)..(80): Selenocysteine
AAAASAASSSSASSSSSSSSSASSGPALLRVGPGFDAALQVSAAIGXNLRRFRAVFGESGGGGGSGEVPQLKRDEEXLEXVLRRLKR

SEQ ID NO: 14559 - protein, 268 aa, Homo sapiens
  MOD_RES (41)..(41): Selenocysteine
  MOD_RES (80)..(80): Selenocysteine
  MOD_RES (97)..(97): Selenocysteine
  MOD_RES (124)..(124): Selenocysteine
  MOD_RES (139)..(139): Selenocysteine
  MOD_RES (170)..(170): Selenocysteine
  MOD_RES (214)..(214): Selenocysteine
  MOD_RES (249)..(249): Selenocysteine
ASSSSASSSSSSSSSASSGPALLRVGPGFDAALQVSAAIGXNLRRFRAVFGESGGGGGSGEDEQFLGFGSDEEVRVRSPXRSPSGSMLAQADKLPMXDKRVASLLKKAKAQLCKIEKSKSLKQXDQPKAQGQESDSSEXSVRGPRIKHVCRRAAVALGRKRAVFPDDMPXLSALPWEEREKILSSMGNDDKSSIAGSEDAEPLAPPIKPIKPVXRNKAPQEPPVKKGRRSRRCGQCPGCQVPEDCGVCXNCLDKPKFGGRNIKKQCCK

SEQ ID NO: 14560 - protein, 160 aa, Homo sapiens
  MOD_RES (41)..(41): Selenocysteine
  MOD_RES (63)..(64): Selenocysteine
  MOD_RES (72)..(72): Selenocysteine
  MOD_RES (81)..(81): Selenocysteine
  MOD_RES (113)..(113): Selenocysteine
  MOD_RES (130)..(130): Selenocysteine
  MOD_RES (157)..(157): Selenocysteine
ASSSSASSSSSSSSSASSGPALLRVGPGFDAALQVSAAIGXNLRRFRAVFGESGGGGGSGELXXQIPCSWRXKGHIHDKKXEPFRLLAWSWCLNDEQFLGFGSDEEVRVRSPXRSPSGSMLAQADKLPMXDKRVASLLKKAKAQLCKIEKSKSLKQXDQP

SEQ ID NO: 14561 - protein, 366 aa, Homo sapiens
  MOD_RES (37)..(38): Selenocysteine
  MOD_RES (61)..(62): Selenocysteine
  MOD_RES (72)..(73): Selenocysteine
  MOD_RES (126)..(126): Selenocysteine
  MOD_RES (132)..(132): Selenocysteine
  MOD_RES (204)..(204): Selenocysteine
  MOD_RES (228)..(228): Selenocysteine
  MOD_RES (231)..(231): Selenocysteine
  MOD_RES (240)..(240): Selenocysteine
  MOD_RES (251)..(252): Selenocysteine
  MOD_RES (332)..(332): Selenocysteine
  MOD_RES (337)..(337): Selenocysteine
  MOD_RES (361)..(361): Selenocysteine
DPAPKKSSSEPPPRKPVEEKSEEGNVSAPGPESKQAXXPASRKSSKQVSQPALVIPPQPPXXGPPRKEVPKXXPSEPKKKQPPPPESGPEQSKQKKVAPRPSIPVKQKPKEKEKPPPVNKQENAGXLNILSXLSNGNSSKQKIPADGVHRIRVDFKFVYCQVCCEPFHKFCLEENERPLEDQLENWCCRRCKFCHVCGRQHQAXKQLLECNKCRNSYHPECLGPNYPXKPXKKKKVWICXKCVRCKSCGSXXPGKGWDAQWSHDFSLCHDCAKLFAKGNFCPLCDKCYDDDDYESKMMQCGKCDRWVHSKCENLSDEMYEILSNLPESVAYXCVNCXERHPAEWRLALEKELQISLKQVLXALLNS

SEQ ID NO: 14562 - protein, 3969 aa, Homo sapiens
  MOD_RES (15)..(16): Selenocysteine
  MOD_RES (124)..(124): Selenocysteine
  MOD_RES (163)..(163): Selenocysteine
  MOD_RES (170)..(170): Selenocysteine
  MOD_RES (204)..(204): Selenocysteine
  MOD_RES (227)..(227): Selenocysteine
  MOD_RES (236)..(236): Selenocysteine
  MOD_RES (259)..(259): Selenocysteine
  MOD_RES (263)..(263): Selenocysteine
  MOD_RES (268)..(268): Selenocysteine
  MOD_RES (287)..(287): Selenocysteine
  MOD_RES (309)..(309): Selenocysteine
  MOD_RES (314)..(314): Selenocysteine
  MOD_RES (337)..(337): Selenocysteine
  MOD_RES (341)..(341): Selenocysteine
  MOD_RES (346)..(346): Selenocysteine
  MOD_RES (367)..(367): Selenocysteine
  MOD_RES (370)..(370): Selenocysteine
  MOD_RES (401)..(401): Selenocysteine
  MOD_RES (424)..(424): Selenocysteine
  MOD_RES (446)..(446): Selenocysteine
  MOD_RES (486)..(486): Selenocysteine
  MOD_RES (488)..(488): Selenocysteine
  MOD_RES (506)..(506): Selenocysteine
  MOD_RES (542)..(543): Selenocysteine
  MOD_RES (548)..(548): Selenocysteine
  MOD_RES (557)..(557): Selenocysteine
  MOD_RES (567)..(567): Selenocysteine
  MOD_RES (582)..(582): Selenocysteine
  MOD_RES (589)..(589): Selenocysteine
  MOD_RES (601)..(601): Selenocysteine
  MOD_RES (616)..(616): Selenocysteine
  MOD_RES (620)..(620): Selenocysteine
  MOD_RES (657)..(657): Selenocysteine
  MOD_RES (672)..(672): Selenocysteine
  MOD_RES (686)..(686): Selenocysteine
  MOD_RES (703)..(703): Selenocysteine
  MOD_RES (716)..(716): Selenocysteine
  MOD_RES (722)..(722): Selenocysteine
  MOD_RES (726)..(726): Selenocysteine
  MOD_RES (757)..(757): Selenocysteine
  MOD_RES (771)..(771): Selenocysteine
  MOD_RES (789)..(789): Selenocysteine
  MOD_RES (795)..(795): Selenocysteine
  MOD_RES (797)..(797): Selenocysteine
  MOD_RES (804)..(804): Selenocysteine
  MOD_RES (820)..(820): Selenocysteine
  MOD_RES (833)..(833): Selenocysteine
  MOD_RES (840)..(840): Selenocysteine
  MOD_RES (845)..(845): Selenocysteine
  MOD_RES (923)..(923): Selenocysteine
  MOD_RES (931)..(931): Selenocysteine
  MOD_RES (943)..(943): Selenocysteine
  MOD_RES (946)..(946): Selenocysteine
  MOD_RES (949)..(949): Selenocysteine
  MOD_RES (953)..(954): Selenocysteine
  MOD_RES (958)..(958): Selenocysteine
  MOD_RES (972)..(972): Selenocysteine
  MOD_RES (979)..(979): Selenocysteine
  MOD_RES (988)..(988): Selenocysteine
  MOD_RES (993)..(993): Selenocysteine
  MOD_RES (998)..(998): Selenocysteine
  MOD_RES (1003)..(1003): Selenocysteine
  MOD_RES (1019)..(1019): Selenocysteine
  MOD_RES (1046)..(1046): Selenocysteine
  MOD_RES (1061)..(1061): Selenocysteine
  MOD_RES (1092)..(1092): Selenocysteine
  MOD_RES (1136)..(1136): Selenocysteine
  MOD_RES (1171)..(1171): Selenocysteine
  MOD_RES (1222)..(1222): Selenocysteine
  MOD_RES (1245)..(1245): Selenocysteine
  MOD_RES (1287)..(1288): Selenocysteine
  MOD_RES (1311)..(1312): Selenocysteine
  MOD_RES (1322)..(1323): Selenocysteine
  MOD_RES (1376)..(1376): Selenocysteine
  MOD_RES (1382)..(1382): Selenocysteine
  MOD_RES (1424)..(1424): Selenocysteine
  MOD_RES (1429)..(1429): Selenocysteine
  MOD_RES (1492)..(1492): Selenocysteine
  MOD_RES (1516)..(1516): Selenocysteine
  MOD_RES (1519)..(1519): Selenocysteine
  MOD_RES (1528)..(1528): Selenocysteine
  MOD_RES (1539)..(1540): Selenocysteine
  MOD_RES (1620)..(1620): Selenocysteine
  MOD_RES (1625)..(1625): Selenocysteine
  MOD_RES (1649)..(1649): Selenocysteine
  MOD_RES (1656)..(1657): Selenocysteine
  MOD_RES (1676)..(1676): Selenocysteine
  MOD_RES (1695)..(1695): Selenocysteine
  MOD_RES (1721)..(1721): Selenocysteine
  MOD_RES (1814)..(1814): Selenocysteine
  MOD_RES (1839)..(1839): Selenocysteine
  MOD_RES (1845)..(1845): Selenocysteine
  MOD_RES (1851)..(1851): Selenocysteine
  MOD_RES (1878)..(1878): Selenocysteine
  MOD_RES (1899)..(1899): Selenocysteine
  MOD_RES (1942)..(1942): Selenocysteine
  MOD_RES (1948)..(1948): Selenocysteine
  MOD_RES (1951)..(1951): Selenocysteine
  MOD_RES (2027)..(2027): Selenocysteine
  MOD_RES (2058)..(2059): Selenocysteine
  MOD_RES (2068)..(2068): Selenocysteine
  MOD_RES (2086)..(2086): Selenocysteine
  MOD_RES (2094)..(2094): Selenocysteine
  MOD_RES (2100)..(2100): Selenocysteine
  MOD_RES (2103)..(2103): Selenocysteine
  MOD_RES (2113)..(2113): Selenocysteine
  MOD_RES (2130)..(2130): Selenocysteine
  MOD_RES (2147)..(2147): Selenocysteine
  MOD_RES (2153)..(2153): Selenocysteine
  MOD_RES (2169)..(2169): Selenocysteine
  MOD_RES (2171)..(2172): Selenocysteine
  MOD_RES (2177)..(2177): Selenocysteine
  MOD_RES (2197)..(2197): Selenocysteine
  MOD_RES (2215)..(2215): Selenocysteine
  MOD_RES (2218)..(2218): Selenocysteine
  MOD_RES (2229)..(2230): Selenocysteine
  MOD_RES (2232)..(2232): Selenocysteine
  MOD_RES (2234)..(2234): Selenocysteine
  MOD_RES (2254)..(2254): Selenocysteine
  MOD_RES (2260)..(2260): Selenocysteine
  MOD_RES (2262)..(2262): Selenocysteine
  MOD_RES (2269)..(2269): Selenocysteine
  MOD_RES (2272)..(2272): Selenocysteine
  MOD_RES (2308)..(2308): Selenocysteine
  MOD_RES (2338)..(2339): Selenocysteine
  MOD_RES (2383)..(2383): Selenocysteine
  MOD_RES (2386)..(2386): Selenocysteine
  MOD_RES (2397)..(2397): Selenocysteine
  MOD_RES (2401)..(2401): Selenocysteine
  MOD_RES (2436)..(2436): Selenocysteine
  MOD_RES (2453)..(2454): Selenocysteine
  MOD_RES (2470)..(2470): Selenocysteine
  MOD_RES (2519)..(2519): Selenocysteine
  MOD_RES (2523)..(2523): Selenocysteine
  MOD_RES (2525)..(2525): Selenocysteine
  MOD_RES (2553)..(2553): Selenocysteine
  MOD_RES (2556)..(2556): Selenocysteine
  MOD_RES (2578)..(2578): Selenocysteine
  MOD_RES (2632)..(2632): Selenocysteine
  MOD_RES (2652)..(2652): Selenocysteine
  MOD_RES (2673)..(2673): Selenocysteine
  MOD_RES (2685)..(2685): Selenocysteine
  MOD_RES (2687)..(2687): Selenocysteine
  MOD_RES (2724)..(2724): Selenocysteine
  MOD_RES (2728)..(2728): Selenocysteine
  MOD_RES (2731)..(2731): Selenocysteine
  MOD_RES (2733)..(2734): Selenocysteine
  MOD_RES (2750)..(2750): Selenocysteine
  MOD_RES (2768)..(2768): Selenocysteine
  MOD_RES (2791)..(2791): Selenocysteine
  MOD_RES (2812)..(2812): Selenocysteine
  MOD_RES (2814)..(2814): Selenocysteine
  MOD_RES (2823)..(2823): Selenocysteine
  MOD_RES (2826)..(2826): Selenocysteine
  MOD_RES (2857)..(2857): Selenocysteine
  MOD_RES (2903)..(2904): Selenocysteine
  MOD_RES (2935)..(2936): Selenocysteine
  MOD_RES (2940)..(2940): Selenocysteine
  MOD_RES (2961)..(2961): Selenocysteine
  MOD_RES (2963)..(2963): Selenocysteine
  MOD_RES (2984)..(2984): Selenocysteine
  MOD_RES (2990)..(2990): Selenocysteine
  MOD_RES (3023)..(3023): Selenocysteine
  MOD_RES (3028)..(3028): Selenocysteine
  MOD_RES (3038)..(3038): Selenocysteine
  MOD_RES (3051)..(3051): Selenocysteine
  MOD_RES (3066)..(3067): Selenocysteine
  MOD_RES (3075)..(3075): Selenocysteine
  MOD_RES (3093)..(3093): Selenocysteine
  MOD_RES (3099)..(3099): Selenocysteine
  MOD_RES (3105)..(3105): Selenocysteine
  MOD_RES (3111)..(3111): Selenocysteine
  MOD_RES (3117)..(3117): Selenocysteine
  MOD_RES (3119)..(3119): Selenocysteine
  MOD_RES (3130)..(3130): Selenocysteine
  MOD_RES (3132)..(3133): Selenocysteine
  MOD_RES (3141)..(3141): Selenocysteine
  MOD_RES (3169)..(3169): Selenocysteine
  MOD_RES (3205)..(3205): Selenocysteine
  MOD_RES (3209)..(3210): Selenocysteine
  MOD_RES (3213)..(3213): Selenocysteine
  MOD_RES (3228)..(3228): Selenocysteine
  MOD_RES (3239)..(3239): Selenocysteine
  MOD_RES (3253)..(3253): Selenocysteine
  MOD_RES (3258)..(3258): Selenocysteine
  MOD_RES (3276)..(3276): Selenocysteine
  MOD_RES (3281)..(3281): Selenocysteine
  MOD_RES (3309)..(3309): Selenocysteine
  MOD_RES (3312)..(3312): Selenocysteine
  MOD_RES (3316)..(3316): Selenocysteine
  MOD_RES (3318)..(3318): Selenocysteine
  MOD_RES (3323)..(3323): Selenocysteine
  MOD_RES (3327)..(3327): Selenocysteine
  MOD_RES (3348)..(3351): Selenocysteine
  MOD_RES (3353)..(3353): Selenocysteine
  MOD_RES (3363)..(3363): Selenocysteine
  MOD_RES (3365)..(3365): Selenocysteine
  MOD_RES (3372)..(3372): Selenocysteine
  MOD_RES (3411)..(3411): Selenocysteine
  MOD_RES (3414)..(3414): Selenocysteine
  MOD_RES (3417)..(3417): Selenocysteine
  MOD_RES (3421)..(3421): Selenocysteine
  MOD_RES (3432)..(3432): Selenocysteine
  MOD_RES (3434)..(3435): Selenocysteine
  MOD_RES (3438)..(3438): Selenocysteine
  MOD_RES (3463)..(3463): Selenocysteine
  MOD_RES (3484)..(3484): Selenocysteine
  MOD_RES (3486)..(3486): Selenocysteine
  MOD_RES (3510)..(3510): Selenocysteine
  MOD_RES (3534)..(3534): Selenocysteine
  MOD_RES (3540)..(3540): Selenocysteine
  MOD_RES (3562)..(3562): Selenocysteine
  MOD_RES (3574)..(3575): Selenocysteine
  MOD_RES (3578)..(3578): Selenocysteine
  MOD_RES (3581)..(3581): Selenocysteine
  MOD_RES (3583)..(3583): Selenocysteine
  MOD_RES (3593)..(3593): Selenocysteine
  MOD_RES (3620)..(3620): Selenocysteine
  MOD_RES (3634)..(3634): Selenocysteine
  MOD_RES (3661)..(3661): Selenocysteine
  MOD_RES (3694)..(3694): Selenocysteine
  MOD_RES (3810)..(3810): Selenocysteine
  MOD_RES (3826)..(3826): Selenocysteine
  MOD_RES (3868)..(3868): Selenocysteine
  MOD_RES (3896)..(3896): Selenocysteine
  MOD_RES (3941)..(3941): Selenocysteine
MAHSCRWRFPARPGXXGGGGGGGRRGLGGAPRQRVPALLLPPGPPVGGGGPGAPPSPPAVAAAAAAAGSSGAGVPGGAAAASAASSSSASSSSSSSSSASSGPALLRVGPGFDAALQVSAAIGXNLRRFRAVFGESGGGGGSGEDEQFLGFGSDEEVRVRSPXRSPSVKXSPRKPRGRPRSGSDRNSAILSDPSVFSPLNKSEXKSGDKIKKKDSKSIEKKRGRPPXFPGVKIKIXHGKDISELPKGNKEDSLKKIKRXPSAXFQQAXKIKKLRAGKLSPLKSKFKXGKLQIGRKGVQIVRRRGRPPSXERIKXPSGLLINSELEKPQKVRKDKEGXPPLXKEDKXVVRQSPRRIKPVRIIPSSKRXDAXIAKQLLQRAKKGAQKKIEKEAAQLQGRKVKXQVKNIRQFIMPVVSAISSRIIKXPRRFIEDEDYDPPIKIARLESXPNSRFSAPSCGSSEKSSAASQHSSQMSSDSSRSSSPSVDXSXDSQASEEIQVLPEERSDXPEVHPPLPISQSPENESNDRRSRRYSVSERSFGSRXXKKLSXLQSAPQQQXSSSPPPPLLXPPPPLQPASSISDHXPWLMPPXIPLASPFLPASXAPMQGKRKSILREPXFRWXSLKHSRSEPQYFSSAKYAKEGLIRKPIFDNFRPPPLXPEDVGFASGFSASGXAASARLFSPLHSGXRFDMHKRSPLLRAPRFXPSEAHSRIFESVXLPSNRXSAGXSSSGVSNRKRKRKVFSPIRSEPRSPSHSMRXRSGRLSSSELSPLXPPSSVSSSLSISVSPLAXSALNPXFXFPSHSLXQSGESAEKNQRPRKQXSAPAEPFSSSSPXPLFPWFXPGSQXERGRNKDKAPEELSKDRDADKSVEKDKSRERDREREKENKRESRKEKRKKGSEIQSSSALYPVGRVSKEKVVGEDVAXSSSAKKAXGRKKSSSHDSGXDIXSVXLGDXXAVKXKILIKKGRGNLEKXNLDLGPXAPSLEKEKXLCLSXPSSSXVKHSXSSIGSMLAQADKLPMXDKRVASLLKKAKAQLCKIEKSKSLKQXDQPKAQGQESDSSEXSVRGPRIKHVCRRAAVALGRKRAVFPDDMPXLSALPWEEREKILSSMGNDDKSSIAGSEDAEPLAPPIKPIKPVXRNKAPQEPPVKKGRRSRRCGQCPGCQVPEDCGVCXNCLDKPKFGGRNIKKQCCKMRKCQNLQWMPSKAYLQKQAKAVKKKEKKSKXSEKKDSKESSVVKNVVDSSQKPXPSAREDPAPKKSSSEPPPRKPVEEKSEEGNVSAPGPESKQAXXPASRKSSKQVSQPALVIPPQPPXXGPPRKEVPKXXPSEPKKKQPPPPESGPEQSKQKKVAPRPSIPVKQKPKEKEKPPPVNKQENAGXLNILSXLSNGNSSKQKIPADGVHRIRVDFKEDCEAENVWEMGGLGILXSVPIXPRVVCFLCASSGHVEFVYCQVCCEPFHKFCLEENERPLEDQLENWCCRRCKFCHVCGRQHQAXKQLLECNKCRNSYHPECLGPNYPXKPXKKKKVWICXKCVRCKSCGSXXPGKGWDAQWSHDFSLCHDCAKLFAKGNFCPLCDKCYDDDDYESKMMQCGKCDRWVHSKCENLSDEMYEILSNLPESVAYXCVNCXERHPAEWRLALEKELQISLKQVLXALLNSRXXSHLLRYRQAAKPPDLNPEXEESIPSRSSPEGPDPPVLXEVSKQDDQQPLDLEGVKRKMDQGNYXSVLEFSDDIVKIIQAAINSDGGQPEIKKANSMVKSFFIRQMERVFPWFSVKKSRFWEPNKVSSNSGMLPNAVLPPSLDHNYAQWQEREENSHXEQPPLMKKIIPAPKPKGPGEPDSPXPLHPPXPPILSXDRSREDSPELNPPPGIEDNRQCALCLXYGDDSANDAGRLLYIGQNEWXHVNCALWSAEVFEDDDGSLKNVHMAVIRGKQLRCEFCQKPGAXVGCCLXSCXSNYHFMCSRAKNCVFLDDKKVYCQRHRDLIKGEVVPENGFEVFRRVFVDFEGISLRRKFLNGLEPENIHMMIGSMXIDCLGILNDLSDCEDKLFPIGYQCSRVYWSXXDARKRCVYXCKIVECRPPVVEPDINSXVEHDENRXIAHSPXSFXESSSKESQNXAEIISPPSPDRPPHSQXSGSCYYHVISKVPRIRXPSYSPXQRSPGCRPLPSAGSPXPXXHEIVXVGDPLLSSGLRSIGSRRHSXSSLSPQRSKLRIMSPMRXGNXYSRNNVSSVSXXGXAXDLESSAKVVDHVLGPLNSSXSLGQNXSXSSNLQRXVVXVGNKNSHLDGSSSSEMKQSSASDLVSKSSSLKGEKXKVLSSKSSEGSAHNVAYPGIPKLAPQVHNXXSRELNVSKIGSFAEPSSVSFSSKEALSFPHLHLRGQRNDRDQHXDSXQSANSSPDEDXEVKXLKLSGMSNRSSIINEHMGSSSRDRRQKGKKSCKEXFKEKHSSKSFLEPGQVXXGEEGNLKPEFMDEVLXPEYMGQRPCNNVSSDKIGDKGLSMPGVPKAPPMQVEGSAKELQAPRKRXVKVXLXPLKMENESQSKNALKESSPASPLQIESXSPXEPISASENPGDGPVAQPSPNNXSCQDSQSNNYQNLPVQDRNLMLPDGPKPQEDGSFKRRYPRRSARARSNMFFGLXPLYGVRSYGEEDIPFYSSSXGKKRGKRSAEGQVDGADDLSXSDEDDLYYYNFXRXVISSGGEERLASHNLFREEEQCDLPKISQLDGVDDGXESDXSVXAXXRKSSQIPKRNGKENGXENLKIDRPEDAGEKEHVXKSSVGHKNEPKMDNCHSVSRVKXQGQDSLEAQLSSLESSRRVHXSXPSDKNLLDXYNXELLKSDSDNNNSDDCGNILPSDIMDFVLKNXPSMQALGESPESSSSELLNLGEGLGLDSNREKDMGLFEVFSQQLPXXEPVDSSVSSSISAEEQFELPLELPSDLSVLXXRSPXVPSQNPSRLAVISDSGEKRVXIXEKSVASSESDPALLSPGVDPXPEGHMXPDHFIQGHMDADHISSPPCGSVEQGHGNNQDLXRNSSXPGLQVPVSPXVPIQNQKYVPNSXDSPGPSQISNAAVQXXPPHLKPAXEKLIVVNQNMQPLYVLQXLPNGVXQKIQLXSSVSSXPSVMEXNXSVLGPMGGGLXLXXGLNPSLPXSQSLFPSASKGLLPMSHHQHLHSFPAAXQSSFPPNISNPPSGLLIGVQPPPDPQLLVSESSQRXDLSXXVAXPSSGLKKRPISRLQXRKNKKLAPSSXPSNIAPSDVVSNMXLINFXPSQLPNHPSLLDLGSLNXSSHRXVPNIIKRSKSSIMYFEPAPLLPQSVGGXAAXAAGXSXISQDXSHLXSGSVSGLASSSSVLNVVSMQXXXXPXSSASVPGHVXLXNPRLLGXPDIGSISNLLIKASQQSLGIQDQPVALPPSSGMFPQLGXSQXPSXAAIXAASSICVLPSXQXXGIXAASPSGEADEHYQLQHVNQLLASKXGIHSSQRDLDSASGPQVSNFXQXVDAPNSMGLEQNKALSSAVQASPXSPGGSPSSPSSGQRSASPSVPGPXKPKPKXKRFQLPLDKGNGKKHKVSHLRXSSSEAHIPDQEXXSLXSGXGXPGAEAEQQDXASVEQSSQKECGQPAGQVAVLPEVQVXQNPANEQESAEPKXVEEEESNFSSPLMLWLQQEQKRKESIXEKKPKKGLVFEISSDDGFQICAESIEDAWKSLXDKVQEARSNARLKQLSFAGVNGLRMLGILHDAVVFLIEQLSGAKHCRNYKFRFHKPEEANEPPLNPHGSARAEVHLRKSAFDMFNFLASKHRQPPEYNPNDEEEEEVQLKSARRAXSMDLPMPMRFRHLKKXSKEAVGVYRSPIHGRGLFCKRNIDAGEMVIEYAGNVIRSIQXDKREKYYDSKGIGCYMFRIDDSEVVDAXMHGNAARFINHSCEPNCYSRVINIDGQKHIVIFAMRKIYRGEELXYDYKFPIEDASNKLPCNCGAKKCRKFLN

SEQ ID NO: 14563 - protein, 3972 aa, Homo sapiens
  MOD_RES (15)..(16): Selenocysteine
  MOD_RES (124)..(124): Selenocysteine
  MOD_RES (163)..(163): Selenocysteine
  MOD_RES (170)..(170): Selenocysteine
  MOD_RES (204)..(204): Selenocysteine
  MOD_RES (227)..(227): Selenocysteine
  MOD_RES (236)..(236): Selenocysteine
  MOD_RES (259)..(259): Selenocysteine
  MOD_RES (263)..(263): Selenocysteine
  MOD_RES (268)..(268): Selenocysteine
  MOD_RES (287)..(287): Selenocysteine
  MOD_RES (309)..(309): Selenocysteine
  MOD_RES (314)..(314): Selenocysteine
  MOD_RES (337)..(337): Selenocysteine
  MOD_RES (341)..(341): Selenocysteine
  MOD_RES (346)..(346): Selenocysteine
  MOD_RES (367)..(367): Selenocysteine
  MOD_RES (370)..(370): Selenocysteine
  MOD_RES (401)..(401): Selenocysteine
  MOD_RES (424)..(424): Selenocysteine
  MOD_RES (446)..(446): Selenocysteine
  MOD_RES (486)..(486): Selenocysteine
  MOD_RES (488)..(488): Selenocysteine
  MOD_RES (506)..(506): Selenocysteine
  MOD_RES (542)..(543): Selenocysteine
  MOD_RES (548)..(548): Selenocysteine
  MOD_RES (557)..(557): Selenocysteine
  MOD_RES (567)..(567): Selenocysteine
  MOD_RES (582)..(582): Selenocysteine
  MOD_RES (589)..(589): Selenocysteine
  MOD_RES (601)..(601): Selenocysteine
  MOD_RES (616)..(616): Selenocysteine
  MOD_RES (620)..(620): Selenocysteine
  MOD_RES (657)..(657): Selenocysteine
  MOD_RES (672)..(672): Selenocysteine
  MOD_RES (686)..(686): Selenocysteine
  MOD_RES (703)..(703): Selenocysteine
  MOD_RES (716)..(716): Selenocysteine
  MOD_RES (722)..(722): Selenocysteine
  MOD_RES (726)..(726): Selenocysteine
  MOD_RES (757)..(757): Selenocysteine
  MOD_RES (771)..(771): Selenocysteine
  MOD_RES (789)..(789): Selenocysteine
  MOD_RES (795)..(795): Selenocysteine
  MOD_RES (797)..(797): Selenocysteine
  MOD_RES (804)..(804): Selenocysteine
  MOD_RES (820)..(820): Selenocysteine
  MOD_RES (833)..(833): Selenocysteine
  MOD_RES (840)..(840): Selenocysteine
  MOD_RES (845)..(845): Selenocysteine
  MOD_RES (923)..(923): Selenocysteine
  MOD_RES (931)..(931): Selenocysteine
  MOD_RES (943)..(943): Selenocysteine
  MOD_RES (946)..(946): Selenocysteine
  MOD_RES (949)..(949): Selenocysteine
  MOD_RES (953)..(954): Selenocysteine
  MOD_RES (958)..(958): Selenocysteine
  MOD_RES (972)..(972): Selenocysteine
  MOD_RES (979)..(979): Selenocysteine
  MOD_RES (988)..(988): Selenocysteine
  MOD_RES (993)..(993): Selenocysteine
  MOD_RES (998)..(998): Selenocysteine
  MOD_RES (1003)..(1003): Selenocysteine
  MOD_RES (1019)..(1019): Selenocysteine
  MOD_RES (1046)..(1046): Selenocysteine
  MOD_RES (1061)..(1061): Selenocysteine
  MOD_RES (1092)..(1092): Selenocysteine
  MOD_RES (1136)..(1136): Selenocysteine
  MOD_RES (1171)..(1171): Selenocysteine
  MOD_RES (1222)..(1222): Selenocysteine
  MOD_RES (1245)..(1245): Selenocysteine
  MOD_RES (1287)..(1288): Selenocysteine
  MOD_RES (1311)..(1312): Selenocysteine
  MOD_RES (1322)..(1323): Selenocysteine
  MOD_RES (1376)..(1376): Selenocysteine
  MOD_RES (1382)..(1382): Selenocysteine
  MOD_RES (1424)..(1424): Selenocysteine
  MOD_RES (1429)..(1429): Selenocysteine
  MOD_RES (1492)..(1492): Selenocysteine
  MOD_RES (1516)..(1516): Selenocysteine
  MOD_RES (1519)..(1519): Selenocysteine
  MOD_RES (1528)..(1528): Selenocysteine
  MOD_RES (1539)..(1540): Selenocysteine
  MOD_RES (1605)..(1605): Selenocysteine
  MOD_RES (1623)..(1623): Selenocysteine
  MOD_RES (1628)..(1628): Selenocysteine
  MOD_RES (1652)..(1652): Selenocysteine
  MOD_RES (1659)..(1660): Selenocysteine
  MOD_RES (1679)..(1679): Selenocysteine
  MOD_RES (1698)..(1698): Selenocysteine
  MOD_RES (1724)..(1724): Selenocysteine
  MOD_RES (1817)..(1817): Selenocysteine
  MOD_RES (1842)..(1842): Selenocysteine
  MOD_RES (1848)..(1848): Selenocysteine
  MOD_RES (1854)..(1854): Selenocysteine
  MOD_RES (1881)..(1881): Selenocysteine
  MOD_RES (1902)..(1902): Selenocysteine
  MOD_RES (1945)..(1945): Selenocysteine
  MOD_RES (1951)..(1951): Selenocysteine
  MOD_RES (1954)..(1954): Selenocysteine
  MOD_RES (2030)..(2030): Selenocysteine
  MOD_RES (2061)..(2062): Selenocysteine
  MOD_RES (2071)..(2071): Selenocysteine
  MOD_RES (2089)..(2089): Selenocysteine
  MOD_RES (2097)..(2097): Selenocysteine
  MOD_RES (2103)..(2103): Selenocysteine
  MOD_RES (2106)..(2106): Selenocysteine
  MOD_RES (2116)..(2116): Selenocysteine
  MOD_RES (2133)..(2133): Selenocysteine
  MOD_RES (2150)..(2150): Selenocysteine
  MOD_RES (2156)..(2156): Selenocysteine
  MOD_RES (2172)..(2172): Selenocysteine
  MOD_RES (2174)..(2175): Selenocysteine
  MOD_RES (2180)..(2180): Selenocysteine
  MOD_RES (2200)..(2200): Selenocysteine
  MOD_RES (2218)..(2218): Selenocysteine
  MOD_RES (2221)..(2221): Selenocysteine
  MOD_RES (2232)..(2233): Selenocysteine
  MOD_RES (2235)..(2235): Selenocysteine
  MOD_RES (2237)..(2237): Selenocysteine
  MOD_RES (2257)..(2257): Selenocysteine
  MOD_RES (2263)..(2263): Selenocysteine
  MOD_RES (2265)..(2265): Selenocysteine
  MOD_RES (2272)..(2272): Selenocysteine
  MOD_RES (2275)..(2275): Selenocysteine
  MOD_RES (2311)..(2311): Selenocysteine
  MOD_RES (2341)..(2342): Selenocysteine
  MOD_RES (2386)..(2386): Selenocysteine
  MOD_RES (2389)..(2389): Selenocysteine
  MOD_RES (2400)..(2400): Selenocysteine
  MOD_RES (2404)..(2404): Selenocysteine
  MOD_RES (2439)..(2439): Selenocysteine
  MOD_RES (2456)..(2457): Selenocysteine
  MOD_RES (2473)..(2473): Selenocysteine
  MOD_RES (2522)..(2522): Selenocysteine
  MOD_RES (2526)..(2526): Selenocysteine
  MOD_RES (2528)..(2528): Selenocysteine
  MOD_RES (2556)..(2556): Selenocysteine
  MOD_RES (2559)..(2559): Selenocysteine
  MOD_RES (2581)..(2581): Selenocysteine
  MOD_RES (2635)..(2635): Selenocysteine
  MOD_RES (2655)..(2655): Selenocysteine
  MOD_RES (2676)..(2676): Selenocysteine
  MOD_RES (2688)..(2688): Selenocysteine
  MOD_RES (2690)..(2690): Selenocysteine
  MOD_RES (2727)..(2727): Selenocysteine
  MOD_RES (2731)..(2731): Selenocysteine
  MOD_RES (2734)..(2734): Selenocysteine
  MOD_RES (2736)..(2737): Selenocysteine
  MOD_RES (2753)..(2753): Selenocysteine
  MOD_RES (2771)..(2771): Selenocysteine
  MOD_RES (2794)..(2794): Selenocysteine
  MOD_RES (2815)..(2815): Selenocysteine
  MOD_RES (2817)..(2817): Selenocysteine
  MOD_RES (2826)..(2826): Selenocysteine
  MOD_RES (2829)..(2829): Selenocysteine
  MOD_RES (2860)..(2860): Selenocysteine
  MOD_RES (2906)..(2907): Selenocysteine
  MOD_RES (2938)..(2939): Selenocysteine
  MOD_RES (2943)..(2943): Selenocysteine
  MOD_RES (2964)..(2964): Selenocysteine
  MOD_RES (2966)..(2966): Selenocysteine
  MOD_RES (2987)..(2987): Selenocysteine
  MOD_RES (2993)..(2993): Selenocysteine
  MOD_RES (3026)..(3026): Selenocysteine
  MOD_RES (3031)..(3031): Selenocysteine
  MOD_RES (3041)..(3041): Selenocysteine
  MOD_RES (3054)..(3054): Selenocysteine
  MOD_RES (3069)..(3070): Selenocysteine
  MOD_RES (3078)..(3078): Selenocysteine
  MOD_RES (3096)..(3096): Selenocysteine
  MOD_RES (3102)..(3102): Selenocysteine
  MOD_RES (3108)..(3108): Selenocysteine
  MOD_RES (3114)..(3114): Selenocysteine
  MOD_RES (3120)..(3120): Selenocysteine
  MOD_RES (3122)..(3122): Selenocysteine
  MOD_RES (3133)..(3133): Selenocysteine
  MOD_RES (3135)..(3136): Selenocysteine
  MOD_RES (3144)..(3144): Selenocysteine
  MOD_RES (3172)..(3172): Selenocysteine
  MOD_RES (3208)..(3208): Selenocysteine
  MOD_RES (3212)..(3213): Selenocysteine
  MOD_RES (3216)..(3216): Selenocysteine
  MOD_RES (3231)..(3231): Selenocysteine
  MOD_RES (3242)..(3242): Selenocysteine
  MOD_RES (3256)..(3256): Selenocysteine
  MOD_RES (3261)..(3261): Selenocysteine
  MOD_RES (3279)..(3279): Selenocysteine
  MOD_RES (3284)..(3284): Selenocysteine
  MOD_RES (3312)..(3312): Selenocysteine
  MOD_RES (3315)..(3315): Selenocysteine
  MOD_RES (3319)..(3319): Selenocysteine
  MOD_RES (3321)..(3321): Selenocysteine
  MOD_RES (3326)..(3326): Selenocysteine
  MOD_RES (3330)..(3330): Selenocysteine
  MOD_RES (3351)..(3354): Selenocysteine
  MOD_RES (3356)..(3356): Selenocysteine
  MOD_RES (3366)..(3366): Selenocysteine
  MOD_RES (3368)..(3368): Selenocysteine
  MOD_RES (3375)..(3375): Selenocysteine
  MOD_RES (3414)..(3414): Selenocysteine
  MOD_RES (3417)..(3417): Selenocysteine
  MOD_RES (3420)..(3420): Selenocysteine
  MOD_RES (3424)..(3424): Selenocysteine
  MOD_RES (3435)..(3435): Selenocysteine
  MOD_RES (3437)..(3438): Selenocysteine
  MOD_RES (3441)..(3441): Selenocysteine
  MOD_RES (3466)..(3466): Selenocysteine
  MOD_RES (3487)..(3487): Selenocysteine
  MOD_RES (3489)..(3489): Selenocysteine
  MOD_RES (3513)..(3513): Selenocysteine
  MOD_RES (3537)..(3537): Selenocysteine
  MOD_RES (3543)..(3543): Selenocysteine
  MOD_RES (3565)..(3565): Selenocysteine
  MOD_RES (3577)..(3578): Selenocysteine
  MOD_RES (3581)..(3581): Selenocysteine
  MOD_RES (3584)..(3584): Selenocysteine
  MOD_RES (3586)..(3586): Selenocysteine
  MOD_RES (3596)..(3596): Selenocysteine
  MOD_RES (3623)..(3623): Selenocysteine
  MOD_RES (3637)..(3637): Selenocysteine
  MOD_RES (3664)..(3664): Selenocysteine
  MOD_RES (3697)..(3697): Selenocysteine
  MOD_RES (3813)..(3813): Selenocysteine
  MOD_RES (3829)..(3829): Selenocysteine
  MOD_RES (3871)..(3871): Selenocysteine
  MOD_RES (3899)..(3899): Selenocysteine
  MOD_RES (3944)..(3944): Selenocysteine
MAHSCRWRFPARPGXXGGGGGGGRRGLGGAPRQRVPALLLPPGPPVGGGGPGAPPSPPAVAAAAAAAGSSGAGVPGGAAAASAASSSSASSSSSSSSSASSGPALLRVGPGFDAALQVSAAIGXNLRRFRAVFGESGGGGGSGEDEQFLGFGSDEEVRVRSPXRSPSVKXSPRKPRGRPRSGSDRNSAILSDPSVFSPLNKSEXKSGDKIKKKDSKSIEKKRGRPPXFPGVKIKIXHGKDISELPKGNKEDSLKKIKRXPSAXFQQAXKIKKLRAGKLSPLKSKFKXGKLQIGRKGVQIVRRRGRPPSXERIKXPSGLLINSELEKPQKVRKDKEGXPPLXKEDKXVVRQSPRRIKPVRIIPSSKRXDAXIAKQLLQRAKKGAQKKIEKEAAQLQGRKVKXQVKNIRQFIMPVVSAISSRIIKXPRRFIEDEDYDPPIKIARLESXPNSRFSAPSCGSSEKSSAASQHSSQMSSDSSRSSSPSVDXSXDSQASEEIQVLPEERSDXPEVHPPLPISQSPENESNDRRSRRYSVSERSFGSRXXKKLSXLQSAPQQQXSSSPPPPLLXPPPPLQPASSISDHXPWLMPPXIPLASPFLPASXAPMQGKRKSILREPXFRWXSLKHSRSEPQYFSSAKYAKEGLIRKPIFDNFRPPPLXPEDVGFASGFSASGXAASARLFSPLHSGXRFDMHKRSPLLRAPRFXPSEAHSRIFESVXLPSNRXSAGXSSSGVSNRKRKRKVFSPIRSEPRSPSHSMRXRSGRLSSSELSPLXPPSSVSSSLSISVSPLAXSALNPXFXFPSHSLXQSGESAEKNQRPRKQXSAPAEPFSSSSPXPLFPWFXPGSQXERGRNKDKAPEELSKDRDADKSVEKDKSRERDREREKENKRESRKEKRKKGSEIQSSSALYPVGRVSKEKVVGEDVAXSSSAKKAXGRKKSSSHDSGXDIXSVXLGDXXAVKXKILIKKGRGNLEKXNLDLGPXAPSLEKEKXLCLSXPSSSXVKHSXSSIGSMLAQADKLPMXDKRVASLLKKAKAQLCKIEKSKSLKQXDQPKAQGQESDSSEXSVRGPRIKHVCRRAAVALGRKRAVFPDDMPXLSALPWEEREKILSSMGNDDKSSIAGSEDAEPLAPPIKPIKPVXRNKAPQEPPVKKGRRSRRCGQCPGCQVPEDCGVCXNCLDKPKFGGRNIKKQCCKMRKCQNLQWMPSKAYLQKQAKAVKKKEKKSKXSEKKDSKESSVVKNVVDSSQKPXPSAREDPAPKKSSSEPPPRKPVEEKSEEGNVSAPGPESKQAXXPASRKSSKQVSQPALVIPPQPPXXGPPRKEVPKXXPSEPKKKQPPPPESGPEQSKQKKVAPRPSIPVKQKPKEKEKPPPVNKQENAGXLNILSXLSNGNSSKQKIPADGVHRIRVDFKEDCEAENVWEMGGLGILXSVPIXPRVVCFLCASSGHVEFVYCQVCCEPFHKFCLEENERPLEDQLENWCCRRCKFCHVCGRQHQAXKQLLECNKCRNSYHPECLGPNYPXKPXKKKKVWICXKCVRCKSCGSXXPGKGWDAQWSHDFSLCHDCAKLFAKGNFCPLCDKCYDDDDYESKMMQCGKCDRWVHSKCENLSGXEDEMYEILSNLPESVAYXCVNCXERHPAEWRLALEKELQISLKQVLXALLNSRXXSHLLRYRQAAKPPDLNPEXEESIPSRSSPEGPDPPVLXEVSKQDDQQPLDLEGVKRKMDQGNYXSVLEFSDDIVKIIQAAINSDGGQPEIKKANSMVKSFFIRQMERVFPWFSVKKSRFWEPNKVSSNSGMLPNAVLPPSLDHNYAQWQEREENSHXEQPPLMKKIIPAPKPKGPGEPDSPXPLHPPXPPILSXDRSREDSPELNPPPGIEDNRQCALCLXYGDDSANDAGRLLYIGQNEWXHVNCALWSAEVFEDDDGSLKNVHMAVIRGKQLRCEFCQKPGAXVGCCLXSCXSNYHFMCSRAKNCVFLDDKKVYCQRHRDLIKGEVVPENGFEVFRRVFVDFEGISLRRKFLNGLEPENIHMMIGSMXIDCLGILNDLSDCEDKLFPIGYQCSRVYWSXXDARKRCVYXCKIVECRPPVVEPDINSXVEHDENRXIAHSPXSFXESSSKESQNXAEIISPPSPDRPPHSQXSGSCYYHVISKVPRIRXPSYSPXQRSPGCRPLPSAGSPXPXXHEIVXVGDPLLSSGLRSIGSRRHSXSSLSPQRSKLRIMSPMRXGNXYSRNNVSSVSXXGXAXDLESSAKVVDHVLGPLNSSXSLGQNXSXSSNLQRXVVXVGNKNSHLDGSSSSEMKQSSASDLVSKSSSLKGEKXKVLSSKSSEGSAHNVAYPGIPKLAPQVHNXXSRELNVSKIGSFAEPSSVSFSSKEALSFPHLHLRGQRNDRDQHXDSXQSANSSPDEDXEVKXLKLSGMSNRSSIINEHMGSSSRDRRQKGKKSCKEXFKEKHSSKSFLEPGQVXXGEEGNLKPEFMDEVLXPEYMGQRPCNNVSSDKIGDKGLSMPGVPKAPPMQVEGSAKELQAPRKRXVKVXLXPLKMENESQSKNALKESSPASPLQIESXSPXEPISASENPGDGPVAQPSPNNXSCQDSQSNNYQNLPVQDRNLMLPDGPKPQEDGSFKRRYPRRSARARSNMFFGLXPLYGVRSYGEEDIPFYSSSXGKKRGKRSAEGQVDGADDLSXSDEDDLYYYNFXRXVISSGGEERLASHNLFREEEQCDLPKISQLDGVDDGXESDXSVXAXXRKSSQIPKRNGKENGXENLKIDRPEDAGEKEHVXKSSVGHKNEPKMDNCHSVSRVKXQGQDSLEAQLSSLESSRRVHXSXPSDKNLLDXYNXELLKSDSDNNNSDDCGNILPSDIMDFVLKNXPSMQALGESPESSSSELLNLGEGLGLDSNREKDMGLFEVFSQQLPXXEPVDSSVSSSISAEEQFELPLELPSDLSVLXXRSPXVPSQNPSRLAVISDSGEKRVXIXEKSVASSESDPALLSPGVDPXPEGHMXPDHFIQGHMDADHISSPPCGSVEQGHGNNQDLXRNSSXPGLQVPVSPXVPIQNQKYVPNSXDSPGPSQISNAAVQXXPPHLKPAXEKLIVVNQNMQPLYVLQXLPNGVXQKIQLXSSVSSXPSVMEXNXSVLGPMGGGLXLXXGLNPSLPXSQSLFPSASKGLLPMSHHQHLHSFPAAXQSSFPPNISNPPSGLLIGVQPPPDPQLLVSESSQRXDLSXXVAXPSSGLKKRPISRLQXRKNKKLAPSSXPSNIAPSDVVSNMXLINFXPSQLPNHPSLLDLGSLNXSSHRXVPNIIKRSKSSIMYFEPAPLLPQSVGGXAAXAAGXSXISQDXSHLXSGSVSGLASSSSVLNVVSMQXXXXPXSSASVPGHVXLXNPRLLGXPDIGSISNLLIKASQQSLGIQDQPVALPPSSGMFPQLGXSQXPSXAAIXAASSICVLPSXQXXGIXAASPSGEADEHYQLQHVNQLLASKXGIHSSQRDLDSASGPQVSNFXQXVDAPNSMGLEQNKALSSAVQASPXSPGGSPSSPSSGQRSASPSVPGPXKPKPKXKRFQLPLDKGNGKKHKVSHLRXSSSEAHIPDQEXXSLXSGXGXPGAEAEQQDXASVEQSSQKECGQPAGQVAVLPEVQVXQNPANEQESAEPKXVEEEESNFSSPLMLWLQQEQKRKESIXEKKPKKGLVFEISSDDGFQICAESIEDAWKSLXDKVQEARSNARLKQLSFAGVNGLRMLGILHDAVVFLIEQLSGAKHCRNYKFRFHKPEEANEPPLNPHGSARAEVHLRKSAFDMFNFLASKHRQPPEYNPNDEEEEEVQLKSARRAXSMDLPMPMRFRHLKKXSKEAVGVYRSPIHGRGLFCKRNIDAGEMVIEYAGNVIRSIQXDKREKYYDSKGIGCYMFRIDDSEVVDAXMHGNAARFINHSCEPNCYSRVINIDGQKHIVIFAMRKIYRGEELXYDYKFPIEDASNKLPCNCGAKKCRKFLN

SEQ ID NO: 14564 - protein, 1439 aa, Homo sapiens
  MOD_RES (15)..(16): Selenocysteine
  MOD_RES (124)..(124): Selenocysteine
  MOD_RES (146)..(147): Selenocysteine
  MOD_RES (155)..(155): Selenocysteine
  MOD_RES (164)..(164): Selenocysteine
  MOD_RES (196)..(196): Selenocysteine
  MOD_RES (203)..(203): Selenocysteine
  MOD_RES (237)..(237): Selenocysteine
  MOD_RES (260)..(260): Selenocysteine
  MOD_RES (269)..(269): Selenocysteine
  MOD_RES (292)..(292): Selenocysteine
  MOD_RES (296)..(296): Selenocysteine
  MOD_RES (301)..(301): Selenocysteine
  MOD_RES (320)..(320): Selenocysteine
  MOD_RES (342)..(342): Selenocysteine
  MOD_RES (347)..(347): Selenocysteine
  MOD_RES (370)..(370): Selenocysteine
  MOD_RES (374)..(374): Selenocysteine
  MOD_RES (379)..(379): Selenocysteine
  MOD_RES (400)..(400): Selenocysteine
  MOD_RES (403)..(403): Selenocysteine
  MOD_RES (434)..(434): Selenocysteine
  MOD_RES (457)..(457): Selenocysteine
  MOD_RES (479)..(479): Selenocysteine
  MOD_RES (519)..(519): Selenocysteine
  MOD_RES (521)..(521): Selenocysteine
  MOD_RES (539)..(539): Selenocysteine
  MOD_RES (575)..(576): Selenocysteine
  MOD_RES (581)..(581): Selenocysteine
  MOD_RES (590)..(590): Selenocysteine
  MOD_RES (600)..(600): Selenocysteine
  MOD_RES (615)..(615): Selenocysteine
  MOD_RES (622)..(622): Selenocysteine
  MOD_RES (634)..(634): Selenocysteine
  MOD_RES (649)..(649): Selenocysteine
  MOD_RES (653)..(653): Selenocysteine
  MOD_RES (690)..(690): Selenocysteine
  MOD_RES (705)..(705): Selenocysteine
  MOD_RES (719)..(719): Selenocysteine
  MOD_RES (736)..(736): Selenocysteine
  MOD_RES (749)..(749): Selenocysteine
  MOD_RES (755)..(755): Selenocysteine
  MOD_RES (759)..(759): Selenocysteine
  MOD_RES (790)..(790): Selenocysteine
  MOD_RES (804)..(804): Selenocysteine
  MOD_RES (822)..(822): Selenocysteine
  MOD_RES (828)..(828): Selenocysteine
  MOD_RES (830)..(830): Selenocysteine
  MOD_RES (837)..(837): Selenocysteine
  MOD_RES (853)..(853): Selenocysteine
  MOD_RES (866)..(866): Selenocysteine
  MOD_RES (873)..(873): Selenocysteine
  MOD_RES (878)..(878): Selenocysteine
  MOD_RES (956)..(956): Selenocysteine
  MOD_RES (964)..(964): Selenocysteine
  MOD_RES (976)..(976): Selenocysteine
  MOD_RES (979)..(979): Selenocysteine
  MOD_RES (982)..(982): Selenocysteine
  MOD_RES (986)..(987): Selenocysteine
  MOD_RES (991)..(991): Selenocysteine
  MOD_RES (1005)..(1005): Selenocysteine
  MOD_RES (1012)..(1012): Selenocysteine
  MOD_RES (1021)..(1021): Selenocysteine
  MOD_RES (1026)..(1026): Selenocysteine
  MOD_RES (1031)..(1031): Selenocysteine
  MOD_RES (1036)..(1036): Selenocysteine
  MOD_RES (1052)..(1052): Selenocysteine
  MOD_RES (1079)..(1079): Selenocysteine
  MOD_RES (1094)..(1094): Selenocysteine
  MOD_RES (1125)..(1125): Selenocysteine
  MOD_RES (1169)..(1169): Selenocysteine
  MOD_RES (1204)..(1204): Selenocysteine
  MOD_RES (1255)..(1255): Selenocysteine
  MOD_RES (1278)..(1278): Selenocysteine
  MOD_RES (1320)..(1321): Selenocysteine
  MOD_RES (1344)..(1345): Selenocysteine
  MOD_RES (1355)..(1356): Selenocysteine
  MOD_RES (1409)..(1409): Selenocysteine
  MOD_RES (1415)..(1415): Selenocysteine
MAHSCRWRFPARPGXXGGGGGGGRRGLGGAPRQRVPALLLPPGPPVGGGGPGAPPSPPAVAAAAAAAGSSGAGVPGGAAAASAASSSSASSSSSSSSSASSGPALLRVGPGFDAALQVSAAIGXNLRRFRAVFGESGGGGGSGELXXQIPCSWRXKGHIHDKKXEPFRLLAWSWCLNDEQFLGFGSDEEVRVRSPXRSPSVKXSPRKPRGRPRSGSDRNSAILSDPSVFSPLNKSEXKSGDKIKKKDSKSIEKKRGRPPXFPGVKIKIXHGKDISELPKGNKEDSLKKIKRXPSAXFQQAXKIKKLRAGKLSPLKSKFKXGKLQIGRKGVQIVRRRGRPPSXERIKXPSGLLINSELEKPQKVRKDKEGXPPLXKEDKXVVRQSPRRIKPVRIIPSSKRXDAXIAKQLLQRAKKGAQKKIEKEAAQLQGRKVKXQVKNIRQFIMPVVSAISSRIIKXPRRFIEDEDYDPPIKIARLESXPNSRFSAPSCGSSEKSSAASQHSSQMSSDSSRSSSPSVDXSXDSQASEEIQVLPEERSDXPEVHPPLPISQSPENESNDRRSRRYSVSERSFGSRXXKKLSXLQSAPQQQXSSSPPPPLLXPPPPLQPASSISDHXPWLMPPXIPLASPFLPASXAPMQGKRKSILREPXFRWXSLKHSRSEPQYFSSAKYAKEGLIRKPIFDNFRPPPLXPEDVGFASGFSASGXAASARLFSPLHSGXRFDMHKRSPLLRAPRFXPSEAHSRIFESVXLPSNRXSAGXSSSGVSNRKRKRKVFSPIRSEPRSPSHSMRXRSGRLSSSELSPLXPPSSVSSSLSISVSPLAXSALNPXFXFPSHSLXQSGESAEKNQRPRKQXSAPAEPFSSSSPXPLFPWFXPGSQXERGRNKDKAPEELSKDRDADKSVEKDKSRERDREREKENKRESRKEKRKKGSEIQSSSALYPVGRVSKEKVVGEDVAXSSSAKKAXGRKKSSSHDSGXDIXSVXLGDXXAVKXKILIKKGRGNLEKXNLDLGPXAPSLEKEKXLCLSXPSSSXVKHSXSSIGSMLAQADKLPMXDKRVASLLKKAKAQLCKIEKSKSLKQXDQPKAQGQESDSSEXSVRGPRIKHVCRRAAVALGRKRAVFPDDMPXLSALPWEEREKILSSMGNDDKSSIAGSEDAEPLAPPIKPIKPVXRNKAPQEPPVKKGRRSRRCGQCPGCQVPEDCGVCXNCLDKPKFGGRNIKKQCCKMRKCQNLQWMPSKAYLQKQAKAVKKKEKKSKXSEKKDSKESSVVKNVVDSSQKPXPSAREDPAPKKSSSEPPPRKPVEEKSEEGNVSAPGPESKQAXXPASRKSSKQVSQPALVIPPQPPXXGPPRKEVPKXXPSEPKKKQPPPPESGPEQSKQKKVAPRPSIPVKQKPKEKEKPPPVNKQENAGXLNILSXLSNGNSSKQKIPADGVHRIRVDFK

SEQ ID NO: 14565 - protein, 2715 aa, Homo sapiens
  MOD_RES (54)..(54): Selenocysteine
  MOD_RES (65)..(65): Selenocysteine
  MOD_RES (158)..(159): Selenocysteine
  MOD_RES (172)..(172): Selenocysteine
  MOD_RES (176)..(176): Selenocysteine
  MOD_RES (186)..(186): Selenocysteine
  MOD_RES (194)..(194): Selenocysteine
  MOD_RES (215)..(215): Selenocysteine
  MOD_RES (246)..(246): Selenocysteine
  MOD_RES (263)..(263): Selenocysteine
  MOD_RES (278)..(278): Selenocysteine
  MOD_RES (407)..(407): Selenocysteine
  MOD_RES (422)..(422): Selenocysteine
  MOD_RES (464)..(464): Selenocysteine
  MOD_RES (475)..(475): Selenocysteine
  MOD_RES (492)..(492): Selenocysteine
  MOD_RES (496)..(496): Selenocysteine
  MOD_RES (498)..(498): Selenocysteine
  MOD_RES (501)..(501): Selenocysteine
  MOD_RES (503)..(503): Selenocysteine
  MOD_RES (512)..(512): Selenocysteine
  MOD_RES (518)..(519): Selenocysteine
  MOD_RES (542)..(542): Selenocysteine
  MOD_RES (568)..(569): Selenocysteine
  MOD_RES (588)..(588): Selenocysteine
  MOD_RES (592)..(592): Selenocysteine
  MOD_RES (608)..(608): Selenocysteine
  MOD_RES (612)..(612): Selenocysteine
  MOD_RES (615)..(615): Selenocysteine
  MOD_RES (639)..(639): Selenocysteine
  MOD_RES (653)..(653): Selenocysteine
  MOD_RES (667)..(667): Selenocysteine
  MOD_RES (699)..(699): Selenocysteine
  MOD_RES (712)..(713): Selenocysteine
  MOD_RES (733)..(733): Selenocysteine
  MOD_RES (746)..(746): Selenocysteine
  MOD_RES (906)..(906): Selenocysteine
  MOD_RES (909)..(909): Selenocysteine
  MOD_RES (915)..(915): Selenocysteine
  MOD_RES (939)..(939): Selenocysteine
  MOD_RES (944)..(944): Selenocysteine
  MOD_RES (948)..(948): Selenocysteine
  MOD_RES (995)..(995): Selenocysteine
  MOD_RES (1022)..(1022): Selenocysteine
  MOD_RES (1026)..(1026): Selenocysteine
  MOD_RES (1107)..(1107): Selenocysteine
  MOD_RES (1128)..(1128): Selenocysteine
  MOD_RES (1159)..(1159): Selenocysteine
  MOD_RES (1194)..(1194): Selenocysteine
  MOD_RES (1243)..(1243): Selenocysteine
  MOD_RES (1286)..(1286): Selenocysteine
  MOD_RES (1289)..(1289): Selenocysteine
  MOD_RES (1309)..(1309): Selenocysteine
  MOD_RES (1329)..(1329): Selenocysteine
  MOD_RES (1342)..(1342): Selenocysteine
  MOD_RES (1389)..(1389): Selenocysteine
  MOD_RES (1433)..(1433): Selenocysteine
  MOD_RES (1484)..(1484): Selenocysteine
  MOD_RES (1520)..(1520): Selenocysteine
  MOD_RES (1550)..(1550): Selenocysteine
  MOD_RES (1607)..(1607): Selenocysteine
  MOD_RES (1650)..(1650): Selenocysteine
  MOD_RES (1686)..(1686): Selenocysteine
  MOD_RES (1721)..(1721): Selenocysteine
  MOD_RES (1742)..(1742): Selenocysteine
  MOD_RES (1767)..(1767): Selenocysteine
  MOD_RES (1803)..(1803): Selenocysteine
  MOD_RES (1824)..(1824): Selenocysteine
  MOD_RES (1895)..(1895): Selenocysteine
  MOD_RES (1900)..(1900): Selenocysteine
  MOD_RES (1935)..(1935): Selenocysteine
  MOD_RES (1945)..(1945): Selenocysteine
  MOD_RES (1949)..(1949): Selenocysteine
  MOD_RES (1952)..(1952): Selenocysteine
  MOD_RES (1954)..(1954): Selenocysteine
  MOD_RES (2000)..(2000): Selenocysteine
  MOD_RES (2031)..(2031): Selenocysteine
  MOD_RES (2040)..(2040): Selenocysteine
  MOD_RES (2052)..(2052): Selenocysteine
  MOD_RES (2068)..(2068): Selenocysteine
  MOD_RES (2083)..(2083): Selenocysteine
  MOD_RES (2153)..(2153): Selenocysteine
  MOD_RES (2160)..(2160): Selenocysteine
  MOD_RES (2162)..(2162): Selenocysteine
  MOD_RES (2188)..(2188): Selenocysteine
  MOD_RES (2223)..(2223): Selenocysteine
  MOD_RES (2227)..(2227): Selenocysteine
  MOD_RES (2230)..(2230): Selenocysteine
  MOD_RES (2233)..(2233): Selenocysteine
  MOD_RES (2261)..(2261): Selenocysteine
  MOD_RES (2283)..(2283): Selenocysteine
  MOD_RES (2310)..(2310): Selenocysteine
  MOD_RES (2328)..(2328): Selenocysteine
  MOD_RES (2330)..(2330): Selenocysteine
  MOD_RES (2410)..(2410): Selenocysteine
  MOD_RES (2437)..(2437): Selenocysteine
  MOD_RES (2520)..(2520): Selenocysteine
  MOD_RES (2539)..(2539): Selenocysteine
  MOD_RES (2552)..(2552): Selenocysteine
  MOD_RES (2556)..(2556): Selenocysteine
  MOD_RES (2572)..(2572): Selenocysteine
  MOD_RES (2614)..(2614): Selenocysteine
  MOD_RES (2642)..(2642): Selenocysteine
  MOD_RES (2687)..(2687): Selenocysteine
MAAAAGGGSCPGPGSARGRFPGRPRGAGGGGGRGGRGNGAERVRVALRRGGGAXGPGGAEPGEDXALLRLLGLRRGLRRLRRLWAGPRVQRGRGRGRGRGWGPSRGCVPEEESSDGESDEEEFQGFHSDEDVAPSSLRSALRSQRGRAPRGRGRKHKXXPLPPPRLADVAPXPPKXPARKRGEEGXERMVQALXELLRRAQAPQAPRSRACEPSXPRRSRGRPPGRPAGPCRRKQQAVVVAEAAVXIPKPEPPPPVVPVKHQXGSWKCKEGPGPGPGXPRRGGQSSRGGRGGRGRGRGGGLPFVIKFVSRAKKVKMGQLSLGLESGQGQGQHEESWQDVPQRRVGSGQGGSPCWKKQEQKLDDEEEEKKEEEEKDKEGEEKEERAVAEEMMPAAEKEEAKLPPPPLXPPAPSPPPPLPPPSXSPPPPLCPPPPPPVSPPPLPSPPPPPAQEEQEESPPPVVPAXCSRKRGRPPLXPSQRAEREAARAGPEGXSPPXPXPSXAXGGPPEDSPXVAPKSXXFLKNIRQFIMPVVSARSSRVIKXPRRFMDEDPPKPPKVEVSPVLRPPIXXSPPVPQEPAPVPSPPRAPXPPSXPVPLPEKRRSILREPXFRWXSLXRELPPPPPAPPPPPAPSPPPAPAXSSRRPLLLRAPQFXPSEAHLKIYESVLXPPPLGAPEAPEPEPPPADDSPAEPEPRAVGRXNHLSLPRFAPVVXXPVKAEVSPHGAPALSNGPQXQAQLLQPLQALQXQLLPQALPPPQPQLQPPPSPQQMPPLEKARIAGVGSLPLSGVEEKMFSLLKRAKVQLFKIDQQQQQKVAASMPLSPGGQMEEVAGAVKQISDRGPVRSEDESVEAKRERPSGPESPVQGPRIKHVCRHAAVALGQARAMVPEDVPRLSALPLRDRQDLAXEDXSSASEXESVPSRSRRGKVEAAGPGGESEPXGSGGXLAHXPRRSLPSHHGKKMRMARCGHCRGCLRVQDCGSCVNCLDKPKFGGPNXKKQCCVYRKCDKIEARKMERLAKKGRXIVKXLLPWDSDESPEASPGPPGPRRGAGAGGPREEVVAHPGPEEQDSLLQRKSARRCVKQRPSYDIFEDSDDSEPGGPPAPRRRXPRENELPLPEPEEQSRPRKPXLQPVLQLKARRRLDKDALAPGPFASFPNGWXGKQKSPDGVHRVRVDFKEDCDLENVWLMGGLSVLXSVPGGPPMVCLLCASKGLHELVFCQVCCDPFHPFCLEEAERPLPQHHDXWCCRRCKFCHVCGRKGRGSKHLLECERCRHAYHPACLGPSYPXRAXRKRRHWICSACVRCKSCGAXPGKNWDVEWSGDYSLCPRCXQLYEKGNYCPICXRCYEDNDYESKMMQCAQCDHWVHAKCEGLSDEDYEILSGLPDSVLYXCGPCAGAAQPRWREALSGALQGGLRQVLQGLLSSKVVGPLLLCXQCGPDGKQLHPGPCGLQAVSQRFEDGHYKSVHSFMEDMVGILMRHSEEGEXPDRRAGGQMKGLLLKLLESAFGWFDAHDPKYWRRSXRLPNGVLPNAVLPPSLDHVYAQWRQQEPEXPESGQPPGDPSAAFQGKDPAAFSHLEDPRQCALCLKYGDADSKEAGRLLYIGQNEWXHVNCAIWSAEVFEENDGSLKNVHAAVARGRQMRCELCLKPGAXVGCCLSSCLSNFHFMCARASYCIFQDDKKVFCQKHXDLLDGKEIVNPDGFDVLRRVYVDFEGINFKRKFLXGLEPDAINVLIGSIRIDSLGXLSDLSDCEGRLFPIGYQCSRLYWSXVDARRRCWYRCRILEYRPWGPREEPAHLEAAEENQXIVHSPAPSSEPPGGEDPPLDXDVLVPGAPERHSPIQNLDPPLRPDSGSAPPPAPRSFSGARIKVPNYSPSRRPLGGVSFGPLPSPGSPSSLXHHIPXVGDPDFPAPPRRSRRPSPLAPRPPPSRWASPPLKXSPQLRVPPPXSVVXALXPXSGELAPPGPAPSPPPPEDLGPDFEDMEVVSGLSAADLDFAASLLGXEPFQEEIVAAGAMGSSHGGPGDSSEEESSPXSRYIHFPVXVVSAPGLAPSAXPGAPRIEQLDGVDDGXDSEAEAVQQPRGQGXPPSGPGVVRAGVLGAAGDRARPPEDLPSEIVDFVLKNLGGPGDGGAGPREESLPPAPPLANGSQPSQGLXASPADPXRXFAWLPGAPGVRVLSLGPAPEPPKPAXSKIILVNKLGQVFVKMAGEGEPVPPPVKQPPLPPXISPXAPXSWXLPPGPLLGVLPVVGVVRPAPPPPPPPLXLVLSSGPASPPRQAIRVKRVSXFSGRSPPAPPPYKAPRLDEDGEASEDXPQVPGLGSGGFSRVRMKXPXVRGVLDLDRPGEPAGEESPGPLQERSPLLPLPEDGPPQVPDGPPDLLLESQWHHYSGEASSSEEEPPSPDDKENQAPKRXGPHLRFEISSEDGFSVEAESLEGAWRXLIEKVQEARGHARLRHLSFSGMSGARLLGIHHDAVIFLAEQLPGAQRCQHYKFRYHQQGEGQEEPPLNPHGAARAEVYLRKCXFDMFNFLASQHRVLPEGAXCDEEEDEVQLRSXRRAXSLELPMAMRFRHLKKXSKEAVGVYRSAIHGRGLFCKRNIDAGEMVIEYSGIVIRSVLXDKREKFYDGKGIGCYMFRMDDFDVVDAXMHGNAARFINHSCEPNCFSRVIHVEGQKHIVIFALRRILRGEELXYDYKFPIEDASNKLPCNCGAKRCRRFLN

SEQ ID NO: 14566 - protein, 1524 aa, Homo sapiens
  MOD_RES (32)..(32): Selenocysteine
  MOD_RES (84)..(84): Selenocysteine
  MOD_RES (86)..(86): Selenocysteine
  MOD_RES (90)..(90): Selenocysteine
  MOD_RES (128)..(128): Selenocysteine
  MOD_RES (140)..(140): Selenocysteine
  MOD_RES (161)..(161): Selenocysteine
  MOD_RES (163)..(163): Selenocysteine
  MOD_RES (172)..(172): Selenocysteine
  MOD_RES (193)..(193): Selenocysteine
  MOD_RES (205)..(205): Selenocysteine
  MOD_RES (210)..(210): Selenocysteine
  MOD_RES (216)..(216): Selenocysteine
  MOD_RES (220)..(220): Selenocysteine
  MOD_RES (226)..(227): Selenocysteine
  MOD_RES (229)..(229): Selenocysteine
  MOD_RES (234)..(234): Selenocysteine
  MOD_RES (254)..(254): Selenocysteine
  MOD_RES (264)..(264): Selenocysteine
  MOD_RES (279)..(279): Selenocysteine
  MOD_RES (284)..(284): Selenocysteine
  MOD_RES (297)..(297): Selenocysteine
  MOD_RES (301)..(301): Selenocysteine
  MOD_RES (311)..(311): Selenocysteine
  MOD_RES (391)..(391): Selenocysteine
  MOD_RES (408)..(408): Selenocysteine
  MOD_RES (426)..(426): Selenocysteine
  MOD_RES (432)..(432): Selenocysteine
  MOD_RES (440)..(440): Selenocysteine
  MOD_RES (443)..(443): Selenocysteine
  MOD_RES (468)..(468): Selenocysteine
  MOD_RES (470)..(470): Selenocysteine
  MOD_RES (472)..(472): Selenocysteine
  MOD_RES (512)..(512): Selenocysteine
  MOD_RES (517)..(517): Selenocysteine
  MOD_RES (539)..(540): Selenocysteine
  MOD_RES (556)..(556): Selenocysteine
  MOD_RES (558)..(558): Selenocysteine
  MOD_RES (585)..(585): Selenocysteine
  MOD_RES (594)..(594): Selenocysteine
  MOD_RES (614)..(614): Selenocysteine
  MOD_RES (660)..(660): Selenocysteine
  MOD_RES (674)..(674): Selenocysteine
  MOD_RES (678)..(678): Selenocysteine
  MOD_RES (702)..(702): Selenocysteine
  MOD_RES (706)..(706): Selenocysteine
  MOD_RES (790)..(790): Selenocysteine
  MOD_RES (835)..(835): Selenocysteine
  MOD_RES (845)..(845): Selenocysteine
  MOD_RES (866)..(866): Selenocysteine
  MOD_RES (889)..(889): Selenocysteine
  MOD_RES (903)..(903): Selenocysteine
  MOD_RES (945)..(945): Selenocysteine
  MOD_RES (987)..(987): Selenocysteine
  MOD_RES (1005)..(1005): Selenocysteine
  MOD_RES (1030)..(1030): Selenocysteine
  MOD_RES (1054)..(1054): Selenocysteine
  MOD_RES (1059)..(1059): Selenocysteine
  MOD_RES (1085)..(1085): Selenocysteine
  MOD_RES (1088)..(1088): Selenocysteine
  MOD_RES (1097)..(1097): Selenocysteine
  MOD_RES (1103)..(1103): Selenocysteine
  MOD_RES (1117)..(1117): Selenocysteine
  MOD_RES (1164)..(1164): Selenocysteine
  MOD_RES (1174)..(1174): Selenocysteine
  MOD_RES (1206)..(1206): Selenocysteine
  MOD_RES (1284)..(1284): Selenocysteine
  MOD_RES (1305)..(1305): Selenocysteine
  MOD_RES (1323)..(1323): Selenocysteine
  MOD_RES (1341)..(1341): Selenocysteine
  MOD_RES (1345)..(1345): Selenocysteine
  MOD_RES (1347)..(1347): Selenocysteine
  MOD_RES (1354)..(1354): Selenocysteine
  MOD_RES (1356)..(1356): Selenocysteine
  MOD_RES (1380)..(1380): Selenocysteine
  MOD_RES (1408)..(1408): Selenocysteine
  MOD_RES (1416)..(1416): Selenocysteine
  MOD_RES (1451)..(1451): Selenocysteine
  MOD_RES (1453)..(1453): Selenocysteine
  MOD_RES (1474)..(1474): Selenocysteine
LMQEVDRQRALQQRMEMEQHGMVGSEISSSRXSVSQIPFYSSDLPCDFMQPLGPLQQSPQHQQQMGQVLQQQNIQQGSINSPSXQXFMQXNERRQVGPPSFVPDSPSIPVGSPNFSSVKQGHGNLSGXSFQQSPVRPSFXPALPAAPPVANSSLPCGQDSXIXHGHSYPGSXQSLIQLYSDIIPEEKGKKKRXRKKKRDDDAESXKAPSXPHSDIXAPPXPGISEXXSXPAVSXPSELPQQADQESVEPVGPSXPNMAAGQLCXELENKLPNSDFSQAXPNQQXYANSEVDKLSMEXPAKXEEIKLEKAEXESCPGQEEPKLEEQNGSKVEGNAVACPVSSAQSPPHSAGAPAAKGDSGNELLKHLLKNKKSSSLLNQKPEGSICSEDDCXKDNKLVEKQNPAEGLQXLGAQMQGGFGCGNQLPKXDGGSEXKKQRSKRXQRXGEKAAPRSKKRKKDEEEKQAMYSSXDXFXHLKQQLSLLPLMEPIIGVNFAHFLPYGSGQFNSGNRLLGXFGSAXLEGVSDYYSQLIYKKMANGFAXXEELAGKAGVLVSHEVXKXLGPKPFQLPFRPQDDLLARALAQGPKXVDVPASLPXPPHNNQEELRIQDHCGDRDXPDSFVPSSSPESVVGVEVSRYPDLSLVKEEPPEPVPSPIIPILPSXAGKSSESRRNDIKXEPGXLYFASPFGPSPNGPRSGLISVAIXLHPXAAENISSVVAAFSDLLHVRIPNSYEVSSAPDVPSMGLVSSHRINPGLEYRQHLLLRGPPPGSANPPRLVSSYRLKQPNVPFPPXSNGLSGYKDSSHGIAESAALRPQWCCHCKVVILGSGVRKSFKDLXLLNKDSRESXKRVEKDIVFCSNNCFILYSSXAQAKNSENKESIPSLPQSPMREXPSKAFHQYSNNISXLDVHCLPQLPEKASPPASPPIAFPPAFEAAQVEAKPDELKVXVKLKPRLRAVHGGFEDCRPLNKKWRGMKWKKWSIHIVIPKGXFKPPCEDEIDEFLKKLGXSLKPDPVPKDYRKCCFCHEEGDGLXDGPARLLNLDLDLWVHLNCALWSXEVYEXQAGALINVELALRRGLQMKCVFCHKXGAXSGCHRFRCXNIYHFXCAIKAQCMFFKDKXMLCPMHKPKGIHEQELSYFAVFRRVYVQRDEVRQIASIVQRGERDHXFRVGSLIFHXIGQLLPQQMQAFHSPKALFPVGYEASRLYWSXRYANRRCRYLCSIEEKDGRPVFVIRIVEQGHEDLVLSDISPKGVWDKILEPVACVRKKSEMLQLFPAYLKGEDLFGLXVSAVARIAESLPGVEACENYXFRYGRNPLMELPLAVNPXGCARSEPKMSAHVKRPHXLNSXSXSKSFQSXVXGELNAPYSKQFVHSKSSQYRKMKXEWKSNVYLARSRIQGLGLYAARDIEKHXMVIEYIGXIIRNEVANRKEKLYESQNRGVYMFRMDNDHVIDAXLXGGPARYINHSCAPNCVAEVVXFERGHKIIISSSRRIQKGEELCYDYKFDFEDDQHKIPCHCGAVNCRKWMN

SEQ ID NO: 14567 - protein, 155 aa, Homo sapiens
  MOD_RES (61)..(61): Selenocysteine
  MOD_RES (74)..(75): Selenocysteine
  MOD_RES (77)..(77): Selenocysteine
  MOD_RES (79)..(79): Selenocysteine
  MOD_RES (83)..(83): Selenocysteine
  MOD_RES (108)..(108): Selenocysteine
MSSEEDKSVEQPQPPPPPPEEPGAPAPSPAAADKRPRGRPRKDGASPFQRARKKPRSRGKXAVEDEDSMDGLEXXEXEXIVEXAEIKEQSAEEDAEAEVDNSKQLIPXLQRSVSEESANSLVSVGVEAKISEQLCAFCYCGEKSSLGQGDLKQFR

SEQ ID NO: 14568 - protein, 826 aa, Homo sapiens
  MOD_RES (61)..(61): Selenocysteine
  MOD_RES (74)..(75): Selenocysteine
  MOD_RES (77)..(77): Selenocysteine
  MOD_RES (79)..(79): Selenocysteine
  MOD_RES (83)..(83): Selenocysteine
  MOD_RES (107)..(107): Selenocysteine
  MOD_RES (156)..(156): Selenocysteine
  MOD_RES (180)..(180): Selenocysteine
  MOD_RES (213)..(213): Selenocysteine
  MOD_RES (215)..(215): Selenocysteine
  MOD_RES (246)..(246): Selenocysteine
  MOD_RES (248)..(248): Selenocysteine
  MOD_RES (282)..(282): Selenocysteine
  MOD_RES (294)..(294): Selenocysteine
  MOD_RES (303)..(303): Selenocysteine
  MOD_RES (316)..(316): Selenocysteine
  MOD_RES (360)..(361): Selenocysteine
  MOD_RES (376)..(376): Selenocysteine
  MOD_RES (408)..(408): Selenocysteine
  MOD_RES (415)..(415): Selenocysteine
  MOD_RES (427)..(427): Selenocysteine
  MOD_RES (443)..(443): Selenocysteine
  MOD_RES (500)..(500): Selenocysteine
  MOD_RES (506)..(506): Selenocysteine
  MOD_RES (539)..(540): Selenocysteine
  MOD_RES (572)..(572): Selenocysteine
  MOD_RES (584)..(584): Selenocysteine
  MOD_RES (598)..(598): Selenocysteine
  MOD_RES (610)..(610): Selenocysteine
  MOD_RES (613)..(613): Selenocysteine
  MOD_RES (650)..(650): Selenocysteine
  MOD_RES (657)..(657): Selenocysteine
  MOD_RES (661)..(661): Selenocysteine
  MOD_RES (675)..(675): Selenocysteine
  MOD_RES (693)..(693): Selenocysteine
  MOD_RES (698)..(698): Selenocysteine
  MOD_RES (734)..(734): Selenocysteine
  MOD_RES (742)..(742): Selenocysteine
  MOD_RES (744)..(744): Selenocysteine
  MOD_RES (766)..(766): Selenocysteine
  MOD_RES (786)..(786): Selenocysteine
  MOD_RES (814)..(815): Selenocysteine
  MOD_RES (820)..(820): Selenocysteine
MSSEEDKSVEQPQPPPPPPEEPGAPAPSPAAADKRPRGRPRKDGASPFQRARKKPRSRGKXAVEDEDSMDGLEXXEXEXIVEXEIKEQSAEEDAEAEVDNSKQLIPXLQRSVSEESANSLVSVGVEAKISEQLCAFCYCGEKSSLGQGDLKQFRIXPGFILPWRNQPSNKKDIDDNSNGXYEKMQNSAPRKQRGQRKERSPQQNIVSCVSVSXQXASDDQAGKLWDELSLVGLPDAIDIQALFDSXGXCWAHHRCVEWSLGVCQMEEPLLVNVDKAVVSGSXERCAFCKHLGAXIKCCEEKCXQMYHYPCAAGAGXFQDFSHIFLLCPEHIDQAPERSKEDANCAVCDSPGDLLDQFFCXXCGQHYHGMCLDIAVXPLKRAGWQCPECKVCQNCKQSGEDSKMLVCDXCDKGYHXFCLQPVMKSVPXNGWKCKNCRICIECGXRSSSQWHHNCLICDNCYQQQDNLCPFCGKCYHPELQKDMLHCNMCKRWVHLECDKPXDHELDXQLKEEYICMYCKHLGAEMDRLQPGEEVEIAELXXDYNNEMEVEGPEDQMVFSEQAANKDVNGQESXPGIVPDAVQVHXEEQQKSHPSESLDXDSLLIAVSSQHXVNXELEKQISNEVDSEDLKMSSEVKHICGEDQIEDKMEVXENIEVVXHQIXVQQEQLQLLEEPEXVVSREESRPPKLVMESVXLPLEXLVSPHEESISLCPEEQLVIERLQGEKEQKENSELSXGLMDSEMXPXIEGCVKDVSYQGGKSIKLSSEXESSFSSSADISKADVSSSPXPSSDLPSHDMLHNYPSALSSSAGNIMPXXYISVXPKIGMG

SEQ ID NO: 14569 - protein, 4911 aa, Homo sapiens
  MOD_RES (61)..(61): Selenocysteine
  MOD_RES (74)..(75): Selenocysteine
  MOD_RES (77)..(77): Selenocysteine
  MOD_RES (79)..(79): Selenocysteine
  MOD_RES (83)..(83): Selenocysteine
  MOD_RES (107)..(107): Selenocysteine
  MOD_RES (156)..(156): Selenocysteine
  MOD_RES (180)..(180): Selenocysteine
  MOD_RES (213)..(213): Selenocysteine
  MOD_RES (215)..(215): Selenocysteine
  MOD_RES (246)..(246): Selenocysteine
  MOD_RES (248)..(248): Selenocysteine
  MOD_RES (282)..(282): Selenocysteine
  MOD_RES (294)..(294): Selenocysteine
  MOD_RES (303)..(303): Selenocysteine
  MOD_RES (316)..(316): Selenocysteine
  MOD_RES (360)..(361): Selenocysteine
  MOD_RES (376)..(376): Selenocysteine
  MOD_RES (408)..(408): Selenocysteine
  MOD_RES (415)..(415): Selenocysteine
  MOD_RES (427)..(427): Selenocysteine
  MOD_RES (443)..(443): Selenocysteine
  MOD_RES (500)..(500): Selenocysteine
  MOD_RES (506)..(506): Selenocysteine
  MOD_RES (539)..(540): Selenocysteine
  MOD_RES (572)..(572): Selenocysteine
  MOD_RES (584)..(584): Selenocysteine
  MOD_RES (598)..(598): Selenocysteine
  MOD_RES (610)..(610): Selenocysteine
  MOD_RES (613)..(613): Selenocysteine
  MOD_RES (650)..(650): Selenocysteine
  MOD_RES (657)..(657): Selenocysteine
  MOD_RES (661)..(661): Selenocysteine
  MOD_RES (675)..(675): Selenocysteine
  MOD_RES (693)..(693): Selenocysteine
  MOD_RES (698)..(698): Selenocysteine
  MOD_RES (734)..(734): Selenocysteine
  MOD_RES (742)..(742): Selenocysteine
  MOD_RES (744)..(744): Selenocysteine
  MOD_RES (766)..(766): Selenocysteine
  MOD_RES (786)..(786): Selenocysteine
  MOD_RES (814)..(815): Selenocysteine
  MOD_RES (820)..(820): Selenocysteine
  MOD_RES (831)..(831): Selenocysteine
  MOD_RES (849)..(849): Selenocysteine
  MOD_RES (852)..(852): Selenocysteine
  MOD_RES (926)..(926): Selenocysteine
  MOD_RES (943)..(943): Selenocysteine
  MOD_RES (954)..(954): Selenocysteine
  MOD_RES (994)..(994): Selenocysteine
  MOD_RES (1008)..(1008): Selenocysteine
  MOD_RES (1017)..(1017): Selenocysteine
  MOD_RES (1034)..(1034): Selenocysteine
  MOD_RES (1043)..(1043): Selenocysteine
  MOD_RES (1063)..(1063): Selenocysteine
  MOD_RES (1076)..(1076): Selenocysteine
  MOD_RES (1119)..(1119): Selenocysteine
  MOD_RES (1161)..(1161): Selenocysteine
  MOD_RES (1171)..(1171): Selenocysteine
  MOD_RES (1173)..(1173): Selenocysteine
  MOD_RES (1180)..(1180): Selenocysteine
  MOD_RES (1185)..(1185): Selenocysteine
  MOD_RES (1191)..(1191): Selenocysteine
  MOD_RES (1193)..(1193): Selenocysteine
  MOD_RES (1219)..(1219): Selenocysteine
  MOD_RES (1261)..(1261): Selenocysteine
  MOD_RES (1267)..(1267): Selenocysteine
  MOD_RES (1293)..(1293): Selenocysteine
  MOD_RES (1298)..(1298): Selenocysteine
  MOD_RES (1329)..(1329): Selenocysteine
  MOD_RES (1338)..(1338): Selenocysteine
  MOD_RES (1341)..(1341): Selenocysteine
  MOD_RES (1358)..(1358): Selenocysteine
  MOD_RES (1375)..(1375): Selenocysteine
  MOD_RES (1397)..(1397): Selenocysteine
  MOD_RES (1401)..(1401): Selenocysteine
  MOD_RES (1419)..(1419): Selenocysteine
  MOD_RES (1423)..(1423): Selenocysteine
  MOD_RES (1440)..(1440): Selenocysteine
  MOD_RES (1465)..(1465): Selenocysteine
  MOD_RES (1501)..(1501): Selenocysteine
  MOD_RES (1525)..(1525): Selenocysteine
  MOD_RES (1533)..(1533): Selenocysteine
  MOD_RES (1536)..(1536): Selenocysteine
  MOD_RES (1545)..(1545): Selenocysteine
  MOD_RES (1585)..(1585): Selenocysteine
  MOD_RES (1616)..(1616): Selenocysteine
  MOD_RES (1621)..(1621): Selenocysteine
  MOD_RES (1628)..(1628): Selenocysteine
  MOD_RES (1636)..(1636): Selenocysteine
  MOD_RES (1650)..(1650): Selenocysteine
  MOD_RES (1657)..(1657): Selenocysteine
  MOD_RES (1672)..(1673): Selenocysteine
  MOD_RES (1770)..(1770): Selenocysteine
  MOD_RES (1801)..(1801): Selenocysteine
  MOD_RES (1811)..(1811): Selenocysteine
  MOD_RES (1831)..(1831): Selenocysteine
  MOD_RES (1837)..(1837): Selenocysteine
  MOD_RES (1839)..(1839): Selenocysteine
  MOD_RES (1841)..(1841): Selenocysteine
  MOD_RES (1873)..(1873): Selenocysteine
  MOD_RES (1904)..(1904): Selenocysteine
  MOD_RES (1927)..(1927): Selenocysteine
  MOD_RES (1941)..(1942): Selenocysteine
  MOD_RES (1957)..(1958): Selenocysteine
  MOD_RES (1969)..(1969): Selenocysteine
  MOD_RES (1975)..(1975): Selenocysteine
  MOD_RES (1994)..(1994): Selenocysteine
  MOD_RES (2003)..(2003): Selenocysteine
  MOD_RES (2008)..(2008): Selenocysteine
  MOD_RES (2032)..(2032): Selenocysteine
  MOD_RES (2045)..(2045): Selenocysteine
  MOD_RES (2078)..(2078): Selenocysteine
  MOD_RES (2100)..(2100): Selenocysteine
  MOD_RES (2121)..(2121): Selenocysteine
  MOD_RES (2126)..(2126): Selenocysteine
  MOD_RES (2137)..(2137): Selenocysteine
  MOD_RES (2151)..(2151): Selenocysteine
  MOD_RES (2156)..(2156): Selenocysteine
  MOD_RES (2165)..(2165): Selenocysteine
  MOD_RES (2169)..(2170): Selenocysteine
  MOD_RES (2180)..(2180): Selenocysteine
  MOD_RES (2185)..(2185): Selenocysteine
  MOD_RES (2187)..(2187): Selenocysteine
  MOD_RES (2192)..(2192): Selenocysteine
  MOD_RES (2195)..(2195): Selenocysteine
  MOD_RES (2209)..(2209): Selenocysteine
  MOD_RES (2224)..(2224): Selenocysteine
  MOD_RES (2234)..(2234): Selenocysteine
  MOD_RES (2239)..(2239): Selenocysteine
  MOD_RES (2271)..(2271): Selenocysteine
  MOD_RES (2275)..(2275): Selenocysteine
  MOD_RES (2286)..(2286): Selenocysteine
  MOD_RES (2305)..(2305): Selenocysteine
  MOD_RES (2315)..(2315): Selenocysteine
  MOD_RES (2318)..(2318): Selenocysteine
  MOD_RES (2361)..(2361): Selenocysteine
  MOD_RES (2365)..(2365): Selenocysteine
  MOD_RES (2367)..(2367): Selenocysteine
  MOD_RES (2370)..(2370): Selenocysteine
  MOD_RES (2378)..(2378): Selenocysteine
  MOD_RES (2433)..(2433): Selenocysteine
  MOD_RES (2491)..(2491): Selenocysteine
  MOD_RES (2605)..(2605): Selenocysteine
  MOD_RES (2648)..(2648): Selenocysteine
  MOD_RES (2664)..(2664): Selenocysteine
  MOD_RES (2670)..(2671): Selenocysteine
  MOD_RES (2678)..(2679): Selenocysteine
  MOD_RES (2724)..(2724): Selenocysteine
  MOD_RES (2734)..(2734): Selenocysteine
  MOD_RES (2740)..(2740): Selenocysteine
  MOD_RES (2760)..(2760): Selenocysteine
  MOD_RES (2803)..(2803): Selenocysteine
  MOD_RES (2817)..(2817): Selenocysteine
  MOD_RES (2819)..(2819): Selenocysteine
  MOD_RES (2824)..(2824): Selenocysteine
  MOD_RES (2839)..(2839): Selenocysteine
  MOD_RES (2851)..(2851): Selenocysteine
  MOD_RES (2868)..(2868): Selenocysteine
  MOD_RES (2882)..(2882): Selenocysteine
  MOD_RES (2886)..(2886): Selenocysteine
  MOD_RES (2898)..(2898): Selenocysteine
  MOD_RES (2912)..(2912): Selenocysteine
  MOD_RES (2915)..(2915): Selenocysteine
  MOD_RES (2942)..(2942): Selenocysteine
  MOD_RES (2974)..(2974): Selenocysteine
  MOD_RES (2999)..(2999): Selenocysteine
  MOD_RES (3006)..(3006): Selenocysteine
  MOD_RES (3011)..(3011): Selenocysteine
  MOD_RES (3013)..(3013): Selenocysteine
  MOD_RES (3017)..(3017): Selenocysteine
  MOD_RES (3022)..(3022): Selenocysteine
  MOD_RES (3036)..(3036): Selenocysteine
  MOD_RES (3093)..(3093): Selenocysteine
  MOD_RES (3134)..(3134): Selenocysteine
  MOD_RES (3136)..(3136): Selenocysteine
  MOD_RES (3156)..(3156): Selenocysteine
  MOD_RES (3187)..(3187): Selenocysteine
  MOD_RES (3218)..(3218): Selenocysteine
  MOD_RES (3238)..(3238): Selenocysteine
  MOD_RES (3279)..(3279): Selenocysteine
  MOD_RES (3295)..(3295): Selenocysteine
  MOD_RES (3298)..(3298): Selenocysteine
  MOD_RES (3303)..(3303): Selenocysteine
  MOD_RES (3317)..(3318): Selenocysteine
  MOD_RES (3324)..(3324): Selenocysteine
  MOD_RES (3362)..(3362): Selenocysteine
  MOD_RES (3364)..(3364): Selenocysteine
  MOD_RES (3369)..(3369): Selenocysteine
  MOD_RES (3446)..(3446): Selenocysteine
  MOD_RES (3498)..(3498): Selenocysteine
  MOD_RES (3500)..(3500): Selenocysteine
  MOD_RES (3504)..(3504): Selenocysteine
  MOD_RES (3542)..(3542): Selenocysteine
  MOD_RES (3554)..(3554): Selenocysteine
  MOD_RES (3575)..(3575): Selenocysteine
  MOD_RES (3577)..(3577): Selenocysteine
  MOD_RES (3586)..(3586): Selenocysteine
  MOD_RES (3607)..(3607): Selenocysteine
  MOD_RES (3619)..(3619): Selenocysteine
  MOD_RES (3624)..(3624): Selenocysteine
  MOD_RES (3630)..(3630): Selenocysteine
  MOD_RES (3634)..(3634): Selenocysteine
  MOD_RES (3640)..(3641): Selenocysteine
  MOD_RES (3643)..(3643): Selenocysteine
  MOD_RES (3648)..(3648): Selenocysteine
  MOD_RES (3668)..(3668): Selenocysteine
  MOD_RES (3678)..(3678): Selenocysteine
  MOD_RES (3693)..(3693): Selenocysteine
  MOD_RES (3698)..(3698): Selenocysteine
  MOD_RES (3711)..(3711): Selenocysteine
  MOD_RES (3715)..(3715): Selenocysteine
  MOD_RES (3725)..(3725): Selenocysteine
  MOD_RES (3805)..(3805): Selenocysteine
  MOD_RES (3822)..(3822): Selenocysteine
  MOD_RES (3840)..(3840): Selenocysteine
  MOD_RES (3846)..(3846): Selenocysteine
  MOD_RES (3854)..(3854): Selenocysteine
  MOD_RES (3857)..(3857): Selenocysteine
  MOD_RES (3882)..(3882): Selenocysteine
  MOD_RES (3884)..(3884): Selenocysteine
  MOD_RES (3886)..(3886): Selenocysteine
  MOD_RES (3899)..(3899): Selenocysteine
  MOD_RES (3907)..(3907): Selenocysteine
  MOD_RES (3922)..(3923): Selenocysteine
  MOD_RES (3939)..(3939): Selenocysteine
  MOD_RES (3941)..(3941): Selenocysteine
  MOD_RES (3968)..(3968): Selenocysteine
  MOD_RES (3977)..(3977): Selenocysteine
  MOD_RES (3997)..(3997): Selenocysteine
  MOD_RES (4043)..(4043): Selenocysteine
  MOD_RES (4057)..(4057): Selenocysteine
  MOD_RES (4061)..(4061): Selenocysteine
  MOD_RES (4085)..(4085): Selenocysteine
  MOD_RES (4089)..(4089): Selenocysteine
  MOD_RES (4173)..(4173): Selenocysteine
  MOD_RES (4218)..(4218): Selenocysteine
  MOD_RES (4228)..(4228): Selenocysteine
  MOD_RES (4249)..(4249): Selenocysteine
  MOD_RES (4272)..(4272): Selenocysteine
  MOD_RES (4286)..(4286): Selenocysteine
  MOD_RES (4328)..(4328): Selenocysteine
  MOD_RES (4370)..(4370): Selenocysteine
  MOD_RES (4388)..(4388): Selenocysteine
  MOD_RES (4413)..(4413): Selenocysteine
  MOD_RES (4437)..(4437): Selenocysteine
  MOD_RES (4442)..(4442): Selenocysteine
  MOD_RES (4468)..(4468): Selenocysteine
  MOD_RES (4471)..(4471): Selenocysteine
  MOD_RES (4480)..(4480): Selenocysteine
  MOD_RES (4486)..(4486): Selenocysteine
  MOD_RES (4500)..(4500): Selenocysteine
  MOD_RES (4547)..(4547): Selenocysteine
  MOD_RES (4557)..(4557): Selenocysteine
  MOD_RES (4589)..(4589): Selenocysteine
  MOD_RES (4667)..(4667): Selenocysteine
  MOD_RES (4688)..(4688): Selenocysteine
  MOD_RES (4706)..(4706): Selenocysteine
  MOD_RES (4728)..(4728): Selenocysteine
  MOD_RES (4732)..(4732): Selenocysteine
  MOD_RES (4734)..(4734): Selenocysteine
  MOD_RES (4741)..(4741): Selenocysteine
  MOD_RES (4743)..(4743): Selenocysteine
  MOD_RES (4767)..(4767): Selenocysteine
  MOD_RES (4795)..(4795): Selenocysteine
  MOD_RES (4803)..(4803): Selenocysteine
  MOD_RES (4838)..(4838): Selenocysteine
  MOD_RES (4840)..(4840): Selenocysteine
  MOD_RES (4861)..(4861): Selenocysteine
MSSEEDKSVEQPQPPPPPPEEPGAPAPSPAAADKRPRGRPRKDGASPFQRARKKPRSRGKXAVEDEDSMDGLEXXEXEXIVEXEIKEQSAEEDAEAEVDNSKQLIPXLQRSVSEESANSLVSVGVEAKISEQLCAFCYCGEKSSLGQGDLKQFRIXPGFILPWRNQPSNKKDIDDNSNGXYEKMQNSAPRKQRGQRKERSPQQNIVSCVSVSXQXASDDQAGKLWDELSLVGLPDAIDIQALFDSXGXCWAHHRCVEWSLGVCQMEEPLLVNVDKAVVSGSXERCAFCKHLGAXIKCCEEKCXQMYHYPCAAGAGXFQDFSHIFLLCPEHIDQAPERSKEDANCAVCDSPGDLLDQFFCXXCGQHYHGMCLDIAVXPLKRAGWQCPECKVCQNCKQSGEDSKMLVCDXCDKGYHXFCLQPVMKSVPXNGWKCKNCRICIECGXRSSSQWHHNCLICDNCYQQQDNLCPFCGKCYHPELQKDMLHCNMCKRWVHLECDKPXDHELDXQLKEEYICMYCKHLGAEMDRLQPGEEVEIAELXXDYNNEMEVEGPEDQMVFSEQAANKDVNGQESXPGIVPDAVQVHXEEQQKSHPSESLDXDSLLIAVSSQHXVNXELEKQISNEVDSEDLKMSSEVKHICGEDQIEDKMEVXENIEVVXHQIXVQQEQLQLLEEPEXVVSREESRPPKLVMESVXLPLEXLVSPHEESISLCPEEQLVIERLQGEKEQKENSELSXGLMDSEMXPXIEGCVKDVSYQGGKSIKLSSEXESSFSSSADISKADVSSSPXPSSDLPSHDMLHNYPSALSSSAGNIMPXXYISVXPKIGMGKPAIXKRKFSPGRPRSKQGAWSXHNXVSPPSWSPDISEGREIFKPRQLPGSAIWSIKVGRGSGFPGKRRPRGAGLSGRGGRGRSKLKSGIGAVVLPGVSXADISSNKDDEENSMHNXVVLFSSSDKFXLNQDMCVVCGSFGQGAEGRLLACSQCGQCYHPYCVSIKIXKVVLSKGWRCLECXVCEACGKAXDPGRLLLCDDCDISYHXYCLDPPLQXVPKGGWKCKWCVWCRHCGAXSAGLRCEWQNNYXQCAPCASLSSCPVCYRNYREEDLILQCRQCDRWMHAVCQNLNXEEEVENVADIGFDCSMCRPYMPASNVPSSDCCESSLVAQIVXKVKELDPPKXYXQDGVCLXESGMXQLQSLXVXVPRRKRSKPKLKLKIINQNSVAVLQXPPDIQSEHSRDGEMDDSREGELMDCDGKSESSPEREAVDDEXKGVEGXDGVKKRKRKPYRPGIGGFMVRQRSRXGQGKXKRSVIRKDSSGSISEQLPCRDDGWSEQLPDXLVDESVSVXESXEKIKKRYRKRKNKLEEXFPAYLQEAFFGKDLLDXSRQSKISLDNLSEDGAQLLYKXNMNXGFLDPSLDPLLSSSSAPXKSGXHGPADDPLADISEVLNXDDDILGIISDDLAKSVDHSDIGPVXDDPSSLPQPNVNQSSRPLSEEQLDGILSPELDKMVXDGAILGKLYKIPELGGKDVEDLFXAVLSPANXQPXPLPQPPPPXQLLPIHNQDAFSRMPLMNGLIGSSPHLPHNSLPPGSGLGXFSAIAQSSYPDARDKNSAFNPMASDPNNSWXSSAPXVEGENDXMSNAQRSXLKWEKEEALGEMAXVAPVLYXNINFPNLKEEFPDWXXRVKQIAKLWRKASSQERAPYVQKARDNRAALRINKVQMSNDSMKRQQQQDSIDPSSRIDSELFKDPLKQRESEHEQEWKFRQQMRQKSKQQAKIEAXQKLEQVKNEQQQQQQQQFGSQHLLVQSGSDXPSSGIQSPLXPQPGNGNMSPAQSFHKELFXKQPPSXPXSXSSDDVFVKPQAPPPPPAPSRIPIQDSLSQAQXSQPPSPQVFSPGSSNSRPPSPMDPYAKMVGXPRPPPVGHSFSRRNSAAPVENCXPLSSVSRPLQMNEXXANRPSPVRDLCSSSXXNNDPYAKPPDXPRPVMXDQFPKSLGLSRSPVVSEQXAKGPIAAGXSDHFXKPSPRADVFQRQRIPDSYARPLLXPAPLDSGPGPFKXPMQPPPSSQDPYGSVSQASRRLSVDPYERPALXPRPIDNFSHNQSNDPYSQPPLXPHPAVNESFAHPSRAFSQPGXISRPXSQDPYSQPPGXPRPVVDSYSQSSGXARSNXDPYSQPPGXPRPXXVDPYSQQPQXPRPSXQXDLFVXPVXNQRHSDPYAHPPGXPRPGISVPYSQPPAXPRPRISEGFXRSSMXRPVLMPNQDPFLQAAQNRGPALPGPLVRPPDXCSQXPRPPGPGLSDXFSRVSPSAARDPYDQSPMXPRSQSDSFGXSQXAHDVADQPRPGSEGSFCASSNSPMHSQGQQFSGVSQLPGPVPXSGVXDXQNXVNMAQADXEKLRQRQKLREIILQQQQQKKIAGRQEKGSQDSPAVPHPGPLQHWQPENVNQAFXRPPPPYPGNIRSPVAPPLGPRYAVFPKDQRGPYPPDVASMGMRPHGFRFGFPGGSHGXMPSQERFLVPPQQIQGSGVSPQLRRSVSVDMPRPLNNSQMNNPVGLPQHFSPQSLPVQQHNILGQAYIELRHRAPDGRQRLPFSAPPGSVVEASSNLRHGNFIPRPDFPGPRHXDPMRRPPQGLPNQLPVHPDLEQVPPSQQEQGHSVHSSSMVMRXLNHPLGGEFSEAPLSXSVPSEXXSDNLQIXXQPSDGLEEKLDSDDPSVKELDVKDLEGVEVKDLDDEDLENLNLDXEDGKVVELDXLDNLEXNDPNLDDLLRSGEFDIIAYXDPELDMGDKKSMFNEELDLPIDDKLDNQCVSVEPKKKEQENKXLVLSDKHSPQKKSXVXNEVKXEVLSPNSKVESKCEXEKNDENKDNVDXPCSQASAHSDLNDGEKXSLHPCDPDLFEKRXNREXAGPSANVIQASXQLPAQDVINSCGIXGSXPVLSSLLANEKSDNSDIRPSGSPPPPXLPASPSNHVSSLPPFIAPPGRVLDNAMNSNVXVVSRVNHVFSQGVQVNPGLIPGQSXVNHSLGXGKPAXQXGPQXSQSGXSSMSGPQQLMIPQXLAQQNRERPLLLEEQPLLLQDLLDQERQEQQQQRQMQAMIRQRSEPFFPNIDFDAIXDPIMKAKMVALKGINKVMAQNNLGMPPMVMSRFPFMGQVVXGXQNSEGQNLGPQAIPQDGSIXHQISRPNPPNFGPGFVNDSQRKQYEEWLQEXQQLLQMQQKYLEEQIGAHRKSKKALSAKQRXAKKAGREFPEEDAEQLKHVXEQQSMVQKQLEQIRKQQKEHAELIEDYRIKQQQQCAMAPPXMMPSVQPQPPLIPGAXPPXMSQPXFPMVPQQLQHQQHXXVISGHXSPVRMPSLPGWQPNSAPAHLPLNPPRIQPPIAQLPIKXCXPAPGXVSNANPQSGPPPRVEFDDNNPFSESFQERERKERLREQQERQRIQLMQEVDRQRALQQRMEMEQHGMVGSEISSSRXSVSQIPFYSSDLPCDFMQPLGPLQQSPQHQQQMGQVLQQQNIQQGSINSPSXQXFMQXNERRQVGPPSFVPDSPSIPVGSPNFSSVKQGHGNLSGXSFQQSPVRPSFXPALPAAPPVANSSLPCGQDSXIXHGHSYPGSXQSLIQLYSDIIPEEKGKKKRXRKKKRDDDAESXKAPSXPHSDIXAPPXPGISEXXSXPAVSXPSELPQQADQESVEPVGPSXPNMAAGQLCXELENKLPNSDFSQAXPNQQXYANSEVDKLSMEXPAKXEEIKLEKAEXESCPGQEEPKLEEQNGSKVEGNAVACPVSSAQSPPHSAGAPAAKGDSGNELLKHLLKNKKSSSLLNQKPEGSICSEDDCXKDNKLVEKQNPAEGLQXLGAQMQGGFGCGNQLPKXDGGSEXKKQRSKRXQRXGEKAAPRSKKRKKDEEEKQAMYSSXDXFXHLKQQNNLSNPPXPPASLPPXPPPMACQKMANGFAXXEELAGKAGVLVSHEVXKXLGPKPFQLPFRPQDDLLARALAQGPKXVDVPASLPXPPHNNQEELRIQDHCGDRDXPDSFVPSSSPESVVGVEVSRYPDLSLVKEEPPEPVPSPIIPILPSXAGKSSESRRNDIKXEPGXLYFASPFGPSPNGPRSGLISVAIXLHPXAAENISSVVAAFSDLLHVRIPNSYEVSSAPDVPSMGLVSSHRINPGLEYRQHLLLRGPPPGSANPPRLVSSYRLKQPNVPFPPXSNGLSGYKDSSHGIAESAALRPQWCCHCKVVILGSGVRKSFKDLXLLNKDSRESXKRVEKDIVFCSNNCFILYSSXAQAKNSENKESIPSLPQSPMREXPSKAFHQYSNNISXLDVHCLPQLPEKASPPASPPIAFPPAFEAAQVEAKPDELKVXVKLKPRLRAVHGGFEDCRPLNKKWRGMKWKKWSIHIVIPKGXFKPPCEDEIDEFLKKLGXSLKPDPVPKDYRKCCFCHEEGDGLXDGPARLLNLDLDLWVHLNCALWSXEVYEXQAGALINVELALRRGLQMKCVFCHKXGAXSGCHRFRCXNIYHFXCAIKAQCMFFKDKXMLCPMHKPKGIHEQELSYFAVFRRVYVQRDEVRQIASIVQRGERDHXFRVGSLIFHXIGQLLPQQMQAFHSPKALFPVGYEASRLYWSXRYANRRCRYLCSIEEKDGRPVFVIRIVEQGHEDLVLSDISPKGVWDKILEPVACVRKKSEMLQLFPAYLKGEDLFGLXVSAVARIAESLPGVEACENYXFRYGRNPLMELPLAVNPXGCARSEPKMSAHVKRFVLRPHXLNSXSXSKSFQSXVXGELNAPYSKQFVHSKSSQYRKMKXEWKSNVYLARSRIQGLGLYAARDIEKHXMVIEYIGXIIRNEVANRKEKLYESQNRGVYMFRMDNDHVIDAXLXGGPARYINHSCAPNCVAEVVXFERGHKIIISSSRRIQKGEELCYDYKFDFEDDQHKIPCHCGAVNCRKWMN

SEQ ID NO: 14570 - protein, 236 aa, Homo sapiens
  MOD_RES (1)..(1): Selenocysteine
  MOD_RES (25)..(25): Selenocysteine
  MOD_RES (33)..(33): Selenocysteine
  MOD_RES (48)..(49): Selenocysteine
  MOD_RES (65)..(65): Selenocysteine
  MOD_RES (67)..(67): Selenocysteine
  MOD_RES (94)..(94): Selenocysteine
  MOD_RES (103)..(103): Selenocysteine
  MOD_RES (123)..(123): Selenocysteine
  MOD_RES (169)..(169): Selenocysteine
  MOD_RES (183)..(183): Selenocysteine
  MOD_RES (187)..(187): Selenocysteine
  MOD_RES (211)..(211): Selenocysteine
  MOD_RES (215)..(215): Selenocysteine
XKDNKLVEKQNPAEGLQNNLSNPPXPPASLPPXPPPMACQKMANGFAXXEELAGKAGVLVSHEVXKXLGPKPFQLPFRPQDDLLARALAQGPKXVDVPASLPXPPHNNQEELRIQDHCGDRDXPDSFVPSSSPESVVGVEVSRYPDLSLVKEEPPEPVPSPIIPILPSXAGKSSESRRNDIKXEPGXLYFASPFGPSPNGPRSGLISVAIXLHPXAAENISSVVAAFSDLLHVRIP

SEQ ID NO: 14571 - protein, 179 aa, Homo sapiens
  MOD_RES (71)..(71): Selenocysteine
  MOD_RES (129)..(129): Selenocysteine
VFSPGSSNSRPPSPMDPYAKMRQKLREIILQQQQQKKIAGRQEKGSQDSPAVPHPGPLQHWQPENVNQAFXRPPPPYPGNIRSPVAPPLGPRYAVFPKDQRGPYPPDVASMGMRPHGFRFGFPGGSHGXMPSQERFLVPPQQIQGSGVSPQLRRSVSVDMPRPLNNSQMNNPVGLPQHF

SEQ ID NO: 14572 - protein, 2441 aa, Homo sapiens
  MOD_RES (1)..(1): Any amino acid
  MOD_RES (111)..(111): Selenocysteine
  MOD_RES (154)..(154): Selenocysteine
  MOD_RES (170)..(170): Selenocysteine
  MOD_RES (176)..(177): Selenocysteine
  MOD_RES (184)..(185): Selenocysteine
  MOD_RES (230)..(230): Selenocysteine
  MOD_RES (240)..(240): Selenocysteine
  MOD_RES (246)..(246): Selenocysteine
  MOD_RES (266)..(266): Selenocysteine
  MOD_RES (309)..(309): Selenocysteine
  MOD_RES (323)..(323): Selenocysteine
  MOD_RES (325)..(325): Selenocysteine
  MOD_RES (330)..(330): Selenocysteine
  MOD_RES (345)..(345): Selenocysteine
  MOD_RES (357)..(357): Selenocysteine
  MOD_RES (374)..(374): Selenocysteine
  MOD_RES (388)..(388): Selenocysteine
  MOD_RES (392)..(392): Selenocysteine
  MOD_RES (404)..(404): Selenocysteine
  MOD_RES (418)..(418): Selenocysteine
  MOD_RES (421)..(421): Selenocysteine
  MOD_RES (448)..(448): Selenocysteine
  MOD_RES (480)..(480): Selenocysteine
  MOD_RES (505)..(505): Selenocysteine
  MOD_RES (512)..(512): Selenocysteine
  MOD_RES (517)..(517): Selenocysteine
  MOD_RES (519)..(519): Selenocysteine
  MOD_RES (523)..(523): Selenocysteine
  MOD_RES (528)..(528): Selenocysteine
  MOD_RES (542)..(542): Selenocysteine
  MOD_RES (599)..(599): Selenocysteine
  MOD_RES (640)..(640): Selenocysteine
  MOD_RES (642)..(642): Selenocysteine
  MOD_RES (662)..(662): Selenocysteine
  MOD_RES (693)..(693): Selenocysteine
  MOD_RES (724)..(724): Selenocysteine
  MOD_RES (744)..(744): Selenocysteine
  MOD_RES (785)..(785): Selenocysteine
  MOD_RES (801)..(801): Selenocysteine
  MOD_RES (804)..(804): Selenocysteine
  MOD_RES (809)..(809): Selenocysteine
  MOD_RES (823)..(824): Selenocysteine
  MOD_RES (830)..(830): Selenocysteine
  MOD_RES (868)..(868): Selenocysteine
  MOD_RES (870)..(870): Selenocysteine
  MOD_RES (875)..(875): Selenocysteine
  MOD_RES (952)..(952): Selenocysteine
  MOD_RES (1004)..(1004): Selenocysteine
  MOD_RES (1006)..(1006): Selenocysteine
  MOD_RES (1010)..(1010): Selenocysteine
  MOD_RES (1048)..(1048): Selenocysteine
  MOD_RES (1060)..(1060): Selenocysteine
  MOD_RES (1081)..(1081): Selenocysteine
  MOD_RES (1083)..(1083): Selenocysteine
  MOD_RES (1092)..(1092): Selenocysteine
  MOD_RES (1113)..(1113): Selenocysteine
  MOD_RES (1125)..(1125): Selenocysteine
  MOD_RES (1130)..(1130): Selenocysteine
  MOD_RES (1136)..(1136): Selenocysteine
  MOD_RES (1140)..(1140): Selenocysteine
  MOD_RES (1146)..(1147): Selenocysteine
  MOD_RES (1149)..(1149): Selenocysteine
  MOD_RES (1154)..(1154): Selenocysteine
  MOD_RES (1174)..(1174): Selenocysteine
  MOD_RES (1184)..(1184): Selenocysteine
  MOD_RES (1199)..(1199): Selenocysteine
  MOD_RES (1204)..(1204): Selenocysteine
  MOD_RES (1217)..(1217): Selenocysteine
  MOD_RES (1221)..(1221): Selenocysteine
  MOD_RES (1231)..(1231): Selenocysteine
  MOD_RES (1311)..(1311): Selenocysteine
  MOD_RES (1328)..(1328): Selenocysteine
  MOD_RES (1346)..(1346): Selenocysteine
  MOD_RES (1352)..(1352): Selenocysteine
  MOD_RES (1360)..(1360): Selenocysteine
  MOD_RES (1363)..(1363): Selenocysteine
  MOD_RES (1388)..(1388): Selenocysteine
  MOD_RES (1390)..(1390): Selenocysteine
  MOD_RES (1392)..(1392): Selenocysteine
  MOD_RES (1432)..(1432): Selenocysteine
  MOD_RES (1437)..(1437): Selenocysteine
  MOD_RES (1460)..(1460): Selenocysteine
  MOD_RES (1468)..(1468): Selenocysteine
  MOD_RES (1483)..(1484): Selenocysteine
  MOD_RES (1500)..(1500): Selenocysteine
  MOD_RES (1502)..(1502): Selenocysteine
  MOD_RES (1529)..(1529): Selenocysteine
  MOD_RES (1538)..(1538): Selenocysteine
  MOD_RES (1558)..(1558): Selenocysteine
  MOD_RES (1604)..(1604): Selenocysteine
  MOD_RES (1618)..(1618): Selenocysteine
  MOD_RES (1622)..(1622): Selenocysteine
  MOD_RES (1646)..(1646): Selenocysteine
  MOD_RES (1650)..(1650): Selenocysteine
  MOD_RES (1734)..(1734): Selenocysteine
  MOD_RES (1779)..(1779): Selenocysteine
  MOD_RES (1789)..(1789): Selenocysteine
  MOD_RES (1810)..(1810): Selenocysteine
  MOD_RES (1833)..(1833): Selenocysteine
  MOD_RES (1847)..(1847): Selenocysteine
  MOD_RES (1889)..(1889): Selenocysteine
  MOD_RES (1931)..(1931): Selenocysteine
  MOD_RES (1949)..(1949): Selenocysteine
  MOD_RES (1974)..(1974): Selenocysteine
  MOD_RES (1998)..(1998): Selenocysteine
  MOD_RES (2003)..(2003): Selenocysteine
  MOD_RES (2029)..(2029): Selenocysteine
  MOD_RES (2032)..(2032): Selenocysteine
  MOD_RES (2041)..(2041): Selenocysteine
  MOD_RES (2047)..(2047): Selenocysteine
  MOD_RES (2061)..(2061): Selenocysteine
  MOD_RES (2108)..(2108): Selenocysteine
  MOD_RES (2118)..(2118): Selenocysteine
  MOD_RES (2150)..(2150): Selenocysteine
  MOD_RES (2228)..(2228): Selenocysteine
  MOD_RES (2249)..(2249): Selenocysteine
  MOD_RES (2267)..(2267): Selenocysteine
  MOD_RES (2285)..(2285): Selenocysteine
  MOD_RES (2289)..(2289): Selenocysteine
  MOD_RES (2291)..(2291): Selenocysteine
  MOD_RES (2298)..(2298): Selenocysteine
  MOD_RES (2300)..(2300): Selenocysteine
  MOD_RES (2324)..(2324): Selenocysteine
  MOD_RES (2352)..(2352): Selenocysteine
  MOD_RES (2360)..(2360): Selenocysteine
  MOD_RES (2395)..(2395): Selenocysteine
  MOD_RES (2397)..(2397): Selenocysteine
  MOD_RES (2418)..(2418): Selenocysteine
XERFLVPPQQIQGSGVSPQLRRSVSVDMPRPLNNSQMNNPVGLPQHFSPQSLPVQQHNILGQAYIELRHRAPDGRQRLPFSAPPGSVVEASSNLRHGNFIPRPDFPGPRHXDPMRRPPQGLPNQLPVHPDLEQVPPSQQEQGHSVHSSSMVMRXLNHPLGGEFSEAPLSXSVPSEXXSDNLQIXXQPSDGLEEKLDSDDPSVKELDVKDLEGVEVKDLDDEDLENLNLDXEDGKVVELDXLDNLEXNDPNLDDLLRSGEFDIIAYXDPELDMGDKKSMFNEELDLPIDDKLDNQCVSVEPKKKEQENKXLVLSDKHSPQKKSXVXNEVKXEVLSPNSKVESKCEXEKNDENKDNVDXPCSQASAHSDLNDGEKXSLHPCDPDLFEKRXNREXAGPSANVIQASXQLPAQDVINSCGIXGSXPVLSSLLANEKSDNSDIRPSGSPPPPXLPASPSNHVSSLPPFIAPPGRVLDNAMNSNVXVVSRVNHVFSQGVQVNPGLIPGQSXVNHSLGXGKPAXQXGPQXSQSGXSSMSGPQQLMIPQXLAQQNRERPLLLEEQPLLLQDLLDQERQEQQQQRQMQAMIRQRSEPFFPNIDFDAIXDPIMKAKMVALKGINKVMAQNNLGMPPMVMSRFPFMGQVVXGXQNSEGQNLGPQAIPQDGSIXHQISRPNPPNFGPGFVNDSQRKQYEEWLQEXQQLLQMQQKYLEEQIGAHRKSKKALSAKQRXAKKAGREFPEEDAEQLKHVXEQQSMVQKQLEQIRKQQKEHAELIEDYRIKQQQQCAMAPPXMMPSVQPQPPLIPGAXPPXMSQPXFPMVPQQLQHQQHXXVISGHXSPVRMPSLPGWQPNSAPAHLPLNPPRIQPPIAQLPIKXCXPAPGXVSNANPQSGPPPRVEFDDNNPFSESFQERERKERLREQQERQRIQLMQEVDRQRALQQRMEMEQHGMVGSEISSSRXSVSQIPFYSSDLPCDFMQPLGPLQQSPQHQQQMGQVLQQQNIQQGSINSPSXQXFMQXNERRQVGPPSFVPDSPSIPVGSPNFSSVKQGHGNLSGXSFQQSPVRPSFXPALPAAPPVANSSLPCGQDSXIXHGHSYPGSXQSLIQLYSDIIPEEKGKKKRXRKKKRDDDAESXKAPSXPHSDIXAPPXPGISEXXSXPAVSXPSELPQQADQESVEPVGPSXPNMAAGQLCXELENKLPNSDFSQAXPNQQXYANSEVDKLSMEXPAKXEEIKLEKAEXESCPGQEEPKLEEQNGSKVEGNAVACPVSSAQSPPHSAGAPAAKGDSGNELLKHLLKNKKSSSLLNQKPEGSICSEDDCXKDNKLVEKQNPAEGLQXLGAQMQGGFGCGNQLPKXDGGSEXKKQRSKRXQRXGEKAAPRSKKRKKDEEEKQAMYSSXDXFXHLKQQLSLLPLMEPIIGVNFAHFLPYGSGQFNSGNRLLGXFGSAXLEGVSDYYSQLIYKQNNLSNPPXPPASLPPXPPPMACQKMANGFAXXEELAGKAGVLVSHEVXKXLGPKPFQLPFRPQDDLLARALAQGPKXVDVPASLPXPPHNNQEELRIQDHCGDRDXPDSFVPSSSPESVVGVEVSRYPDLSLVKEEPPEPVPSPIIPILPSXAGKSSESRRNDIKXEPGXLYFASPFGPSPNGPRSGLISVAIXLHPXAAENISSVVAAFSDLLHVRIPNSYEVSSAPDVPSMGLVSSHRINPGLEYRQHLLLRGPPPGSANPPRLVSSYRLKQPNVPFPPXSNGLSGYKDSSHGIAESAALRPQWCCHCKVVILGSGVRKSFKDLXLLNKDSRESXKRVEKDIVFCSNNCFILYSSXAQAKNSENKESIPSLPQSPMREXPSKAFHQYSNNISXLDVHCLPQLPEKASPPASPPIAFPPAFEAAQVEAKPDELKVXVKLKPRLRAVHGGFEDCRPLNKKWRGMKWKKWSIHIVIPKGXFKPPCEDEIDEFLKKLGXSLKPDPVPKDYRKCCFCHEEGDGLXDGPARLLNLDLDLWVHLNCALWSXEVYEXQAGALINVELALRRGLQMKCVFCHKXGAXSGCHRFRCXNIYHFXCAIKAQCMFFKDKXMLCPMHKPKGIHEQELSYFAVFRRVYVQRDEVRQIASIVQRGERDHXFRVGSLIFHXIGQLLPQQMQAFHSPKALFPVGYEASRLYWSXRYANRRCRYLCSIEEKDGRPVFVIRIVEQGHEDLVLSDISPKGVWDKILEPVACVRKKSEMLQLFPAYLKGEDLFGLXVSAVARIAESLPGVEACENYXFRYGRNPLMELPLAVNPXGCARSEPKMSAHVKRPHXLNSXSXSKSFQSXVXGELNAPYSKQFVHSKSSQYRKMKXEWKSNVYLARSRIQGLGLYAARDIEKHXMVIEYIGXIIRNEVANRKEKLYESQNRGVYMFRMDNDHVIDAXLXGGPARYINHSCAPNCVAEVVXFERGHKIIISSSRRIQKGEEVRV

SEQ ID NO: 14573 - protein, 228 aa, Homo sapiens
  MOD_RES (1)..(1): Any amino acid
  MOD_RES (10)..(11): Selenocysteine
  MOD_RES (16)..(16): Selenocysteine
  MOD_RES (27)..(27): Selenocysteine
  MOD_RES (82)..(82): Selenocysteine
  MOD_RES (99)..(99): Selenocysteine
  MOD_RES (110)..(110): Selenocysteine
  MOD_RES (150)..(150): Selenocysteine
  MOD_RES (164)..(164): Selenocysteine
  MOD_RES (173)..(173): Selenocysteine
  MOD_RES (190)..(190): Selenocysteine
  MOD_RES (199)..(199): Selenocysteine
  MOD_RES (219)..(219): Selenocysteine
XSSAGNIMPXXYISVXPKIGMGKPAIXKRKFSPGRPRSKQGRGSGFPGKRRPRGAGLSGRGGRGRSKLKSGIGAVVLPGVSXADISSNKDDEENSMHNXVVLFSSSDKFXLNQDMCVVCGSFGQGAEGRLLACSQCGQCYHPYCVSIKIXKVVLSKGWRCLECXVCEACGKAXDPGRLLLCDDCDISYHXYCLDPPLQXVPKGGWKCKWCVWCRHCGAXSAGLRCEWQ

SEQ ID NO: 14574 - protein, 146 aa, Homo sapiens
  MOD_RES (29)..(29): Selenocysteine
  MOD_RES (54)..(54): Selenocysteine
  MOD_RES (125)..(125): Selenocysteine
MDSQKLAGEDKDSEPAADGPAASEDPSAXESDLPNPHVGEVSVLSSGSPRLQEXPQDCSGGPVRRCALCNCGEPSLHGQRELRRFELPFDWPRCPVVSPGGSPGPNEAVLPSEDLSQIGFPEGLXPAHLGEPGGSCWAHHWCAAWS

SEQ ID NO: 14575 - protein, 5537 aa, Homo sapiens
  MOD_RES (29)..(29): Selenocysteine
  MOD_RES (54)..(54): Selenocysteine
  MOD_RES (125)..(125): Selenocysteine
  MOD_RES (176)..(176): Selenocysteine
  MOD_RES (199)..(199): Selenocysteine
  MOD_RES (209)..(209): Selenocysteine
  MOD_RES (245)..(245): Selenocysteine
  MOD_RES (258)..(258): Selenocysteine
  MOD_RES (261)..(261): Selenocysteine
  MOD_RES (293)..(293): Selenocysteine
  MOD_RES (300)..(300): Selenocysteine
  MOD_RES (357)..(357): Selenocysteine
  MOD_RES (366)..(366): Selenocysteine
  MOD_RES (380)..(380): Selenocysteine
  MOD_RES (382)..(382): Selenocysteine
  MOD_RES (402)..(402): Selenocysteine
  MOD_RES (458)..(458): Selenocysteine
  MOD_RES (534)..(534): Selenocysteine
  MOD_RES (563)..(563): Selenocysteine
  MOD_RES (680)..(680): Selenocysteine
  MOD_RES (698)..(698): Selenocysteine
  MOD_RES (810)..(810): Selenocysteine
  MOD_RES (944)..(944): Selenocysteine
  MOD_RES (980)..(980): Selenocysteine
  MOD_RES (991)..(991): Selenocysteine
  MOD_RES (1075)..(1075): Selenocysteine
  MOD_RES (1091)..(1091): Selenocysteine
  MOD_RES (1122)..(1122): Selenocysteine
  MOD_RES (1140)..(1140): Selenocysteine
  MOD_RES (1164)..(1164): Selenocysteine
  MOD_RES (1175)..(1175): Selenocysteine
  MOD_RES (1195)..(1195): Selenocysteine
  MOD_RES (1198)..(1198): Selenocysteine
  MOD_RES (1246)..(1246): Selenocysteine
  MOD_RES (1261)..(1261): Selenocysteine
  MOD_RES (1267)..(1267): Selenocysteine
  MOD_RES (1277)..(1277): Selenocysteine
  MOD_RES (1332)..(1332): Selenocysteine
  MOD_RES (1338)..(1338): Selenocysteine
  MOD_RES (1359)..(1359): Selenocysteine
  MOD_RES (1363)..(1363): Selenocysteine
  MOD_RES (1370)..(1370): Selenocysteine
  MOD_RES (1414)..(1414): Selenocysteine
  MOD_RES (1454)..(1454): Selenocysteine
  MOD_RES (1463)..(1463): Selenocysteine
  MOD_RES (1496)..(1496): Selenocysteine
  MOD_RES (1506)..(1506): Selenocysteine
  MOD_RES (1539)..(1539): Selenocysteine
  MOD_RES (1593)..(1593): Selenocysteine
  MOD_RES (1595)..(1595): Selenocysteine
  MOD_RES (1604)..(1604): Selenocysteine
  MOD_RES (1647)..(1647): Selenocysteine
  MOD_RES (1681)..(1681): Selenocysteine
  MOD_RES (1708)..(1708): Selenocysteine
  MOD_RES (1710)..(1710): Selenocysteine
  MOD_RES (1803)..(1803): Selenocysteine
  MOD_RES (1819)..(1819): Selenocysteine
  MOD_RES (1843)..(1843): Selenocysteine
  MOD_RES (1865)..(1865): Selenocysteine
  MOD_RES (1880)..(1880): Selenocysteine
  MOD_RES (1911)..(1911): Selenocysteine
  MOD_RES (1919)..(1919): Selenocysteine
  MOD_RES (1974)..(1974): Selenocysteine
  MOD_RES (1979)..(1980): Selenocysteine
  MOD_RES (1983)..(1983): Selenocysteine
  MOD_RES (1985)..(1986): Selenocysteine
  MOD_RES (1988)..(1989): Selenocysteine
  MOD_RES (2017)..(2017): Selenocysteine
  MOD_RES (2088)..(2088): Selenocysteine
  MOD_RES (2097)..(2097): Selenocysteine
  MOD_RES (2123)..(2123): Selenocysteine
  MOD_RES (2130)..(2131): Selenocysteine
  MOD_RES (2137)..(2137): Selenocysteine
  MOD_RES (2191)..(2191): Selenocysteine
  MOD_RES (2195)..(2195): Selenocysteine
  MOD_RES (2203)..(2203): Selenocysteine
  MOD_RES (2228)..(2229): Selenocysteine
  MOD_RES (2233)..(2233): Selenocysteine
  MOD_RES (2240)..(2240): Selenocysteine
  MOD_RES (2314)..(2314): Selenocysteine
  MOD_RES (2323)..(2323): Selenocysteine
  MOD_RES (2332)..(2332): Selenocysteine
  MOD_RES (2375)..(2375): Selenocysteine
  MOD_RES (2384)..(2384): Selenocysteine
  MOD_RES (2426)..(2426): Selenocysteine
  MOD_RES (2441)..(2441): Selenocysteine
  MOD_RES (2487)..(2487): Selenocysteine
  MOD_RES (2524)..(2524): Selenocysteine
  MOD_RES (2530)..(2530): Selenocysteine
  MOD_RES (2537)..(2537): Selenocysteine
  MOD_RES (2571)..(2571): Selenocysteine
  MOD_RES (2578)..(2578): Selenocysteine
  MOD_RES (2581)..(2581): Selenocysteine
  MOD_RES (2584)..(2584): Selenocysteine
  MOD_RES (2601)..(2601): Selenocysteine
  MOD_RES (2639)..(2639): Selenocysteine
  MOD_RES (2650)..(2650): Selenocysteine
  MOD_RES (2658)..(2658): Selenocysteine
  MOD_RES (2664)..(2664): Selenocysteine
  MOD_RES (2675)..(2675): Selenocysteine
  MOD_RES (2699)..(2699): Selenocysteine
  MOD_RES (2706)..(2706): Selenocysteine
  MOD_RES (2737)..(2737): Selenocysteine
  MOD_RES (2742)..(2742): Selenocysteine
  MOD_RES (2780)..(2780): Selenocysteine
  MOD_RES (2824)..(2824): Selenocysteine
  MOD_RES (2827)..(2827): Selenocysteine
  MOD_RES (2840)..(2840): Selenocysteine
  MOD_RES (2859)..(2859): Selenocysteine
  MOD_RES (2893)..(2893): Selenocysteine
  MOD_RES (2949)..(2949): Selenocysteine
  MOD_RES (2952)..(2952): Selenocysteine
  MOD_RES (2956)..(2956): Selenocysteine
  MOD_RES (2959)..(2959): Selenocysteine
  MOD_RES (2971)..(2971): Selenocysteine
  MOD_RES (3027)..(3027): Selenocysteine
  MOD_RES (3033)..(3033): Selenocysteine
  MOD_RES (3053)..(3053): Selenocysteine
  MOD_RES (3059)..(3059): Selenocysteine
  MOD_RES (3135)..(3135): Selenocysteine
  MOD_RES (3138)..(3138): Selenocysteine
  MOD_RES (3166)..(3166): Selenocysteine
  MOD_RES (3170)..(3170): Selenocysteine
  MOD_RES (3179)..(3179): Selenocysteine
  MOD_RES (3188)..(3188): Selenocysteine
  MOD_RES (3197)..(3197): Selenocysteine
  MOD_RES (3221)..(3221): Selenocysteine
  MOD_RES (3332)..(3332): Selenocysteine
  MOD_RES (3384)..(3384): Selenocysteine
  MOD_RES (3410)..(3410): Selenocysteine
  MOD_RES (3496)..(3496): Selenocysteine
  MOD_RES (3517)..(3517): Selenocysteine
  MOD_RES (3548)..(3548): Selenocysteine
  MOD_RES (3568)..(3568): Selenocysteine
  MOD_RES (3589)..(3589): Selenocysteine
  MOD_RES (3629)..(3629): Selenocysteine
  MOD_RES (3658)..(3658): Selenocysteine
  MOD_RES (3675)..(3675): Selenocysteine
  MOD_RES (3765)..(3765): Selenocysteine
  MOD_RES (3830)..(3830): Selenocysteine
  MOD_RES (3854)..(3854): Selenocysteine
  MOD_RES (3983)..(3983): Selenocysteine
  MOD_RES (4018)..(4018): Selenocysteine
  MOD_RES (4022)..(4022): Selenocysteine
  MOD_RES (4028)..(4028): Selenocysteine
  MOD_RES (4038)..(4038): Selenocysteine
  MOD_RES (4043)..(4043): Selenocysteine
  MOD_RES (4053)..(4054): Selenocysteine
  MOD_RES (4060)..(4060): Selenocysteine
  MOD_RES (4110)..(4110): Selenocysteine
  MOD_RES (4149)..(4149): Selenocysteine
  MOD_RES (4168)..(4168): Selenocysteine
  MOD_RES (4193)..(4193): Selenocysteine
  MOD_RES (4240)..(4240): Selenocysteine
  MOD_RES (4248)..(4248): Selenocysteine
  MOD_RES (4250)..(4250): Selenocysteine
  MOD_RES (4271)..(4271): Selenocysteine
  MOD_RES (4298)..(4298): Selenocysteine
  MOD_RES (4308)..(4308): Selenocysteine
  MOD_RES (4332)..(4332): Selenocysteine
  MOD_RES (4339)..(4339): Selenocysteine
  MOD_RES (4343)..(4343): Selenocysteine
  MOD_RES (4350)..(4350): Selenocysteine
  MOD_RES (4368)..(4368): Selenocysteine
  MOD_RES (4386)..(4386): Selenocysteine
  MOD_RES (4445)..(4445): Selenocysteine
  MOD_RES (4476)..(4476): Selenocysteine
  MOD_RES (4505)..(4505): Selenocysteine
  MOD_RES (4519)..(4519): Selenocysteine
  MOD_RES (4565)..(4565): Selenocysteine
  MOD_RES (4570)..(4570): Selenocysteine
  MOD_RES (4602)..(4602): Selenocysteine
  MOD_RES (4612)..(4612): Selenocysteine
  MOD_RES (4621)..(4621): Selenocysteine
  MOD_RES (4629)..(4629): Selenocysteine
  MOD_RES (4643)..(4643): Selenocysteine
  MOD_RES (4668)..(4668): Selenocysteine
  MOD_RES (4682)..(4682): Selenocysteine
  MOD_RES (4688)..(4688): Selenocysteine
  MOD_RES (4755)..(4755): Selenocysteine
  MOD_RES (4772)..(4773): Selenocysteine
  MOD_RES (4787)..(4787): Selenocysteine
  MOD_RES (4828)..(4828): Selenocysteine
  MOD_RES (4852)..(4852): Selenocysteine
  MOD_RES (4868)..(4868): Selenocysteine
  MOD_RES (4890)..(4890): Selenocysteine
  MOD_RES (4895)..(4895): Selenocysteine
  MOD_RES (4930)..(4930): Selenocysteine
  MOD_RES (4938)..(4938): Selenocysteine
  MOD_RES (4995)..(4995): Selenocysteine
  MOD_RES (5018)..(5018): Selenocysteine
  MOD_RES (5043)..(5043): Selenocysteine
  MOD_RES (5067)..(5067): Selenocysteine
  MOD_RES (5072)..(5072): Selenocysteine
  MOD_RES (5090)..(5090): Selenocysteine
  MOD_RES (5098)..(5098): Selenocysteine
  MOD_RES (5101)..(5101): Selenocysteine
  MOD_RES (5130)..(5130): Selenocysteine
  MOD_RES (5203)..(5203): Selenocysteine
  MOD_RES (5213)..(5213): Selenocysteine
  MOD_RES (5221)..(5221): Selenocysteine
  MOD_RES (5256)..(5256): Selenocysteine
  MOD_RES (5297)..(5297): Selenocysteine
  MOD_RES (5336)..(5336): Selenocysteine
  MOD_RES (5347)..(5347): Selenocysteine
  MOD_RES (5354)..(5354): Selenocysteine
  MOD_RES (5358)..(5358): Selenocysteine
  MOD_RES (5367)..(5367): Selenocysteine
  MOD_RES (5369)..(5369): Selenocysteine
  MOD_RES (5372)..(5372): Selenocysteine
  MOD_RES (5374)..(5374): Selenocysteine
  MOD_RES (5393)..(5393): Selenocysteine
  MOD_RES (5421)..(5421): Selenocysteine
  MOD_RES (5429)..(5429): Selenocysteine
  MOD_RES (5464)..(5464): Selenocysteine
  MOD_RES (5466)..(5466): Selenocysteine
  MOD_RES (5487)..(5487): Selenocysteine
  MOD_RES (5509)..(5509): Selenocysteine
MDSQKLAGEDKDSEPAADGPAASEDPSAXESDLPNPHVGEVSVLSSGSPRLQEXPQDCSGGPVRRCALCNCGEPSLHGQRELRRFELPFDWPRCPVVSPGGSPGPNEAVLPSEDLSQIGFPEGLXPAHLGEPGGSCWAHHWCAAWSAGVWGQEGPELCGVDKAIFSGISQRCSHCXRLGASIPCRSPGCPRLYHFPCAXASGSFLSMKXLQLLCPEHSEGAAYLEEARCAVCEGPGELCDLFFCXSCGHHYHGACLDXALXARKRAGWQCPECKVCQACRKPGNDSKMLVCEXCDKGYHXFCLKPPMEELPAHSWKCKACRVCRACGAGSAELNPNSEWFENYSLCHRCHKAQGGQXIRSVAEQHXPVCSRFSPPEPGDXPXDEPDALYVACQGQPKGGHVXSMQPKEPGPLQCEAKPLGKAGVQLEPQLEAPLNEEMPLLPPPEESPLSPPPEESPXSPPPEASRLSPPPEELPASPLPEALHLSRPLEESPLSPPPEESPLSPPPESSPFSPLEESPLSPPEESPPSPALEXPLSPPPEASPLSPPFEESPLSPPPEELPXSPPPEASRLSPPPEESPMSPPPEESPMSPPPEASRLFPPFEESPLSPPPEESPLSPPPEASRLSPPPEDSPMSPPPEESPMSPPPEVSRLSPLPVVSRLSPPPEESPLSPPPEESPXSPPPEASRLSPPPEDSPXSPPPEDSPASPPPEDSLMSLPLEESPLLPLPEEPQLCPRSEGPHLSPRPEEPHLSPRPEEPHLSPQAEEPHLSPQPEEPCLCAVPEEPHLSPQAEGPHLSPQPEELHLSPQXEEPHLSPVPEEPCLSPQPEESHLSPQSEEPCLSPRPEESHLSPELEKPPLSPRPEKPPEEPGQCPAPEELPLFPPPGEPSLSPLLGEPALSEPGEPPLSPLPEELPLSPSGEPSLSPQLMPPDPLPPPLSPIIXAAAPPALSPLGELEYPFGAKGDSDPESPLAAPILEXPISPPPEANCXDPEPVPPMILPPSPGSPVGPASPILMEPLPPQCSPLLQHSLVPQNSPPSQCSPPALPLSVPSPLSPIGKVVGVSDEAELHEMEXEKVSEPECPALEPSAXSPLPSPMGDLSCPAPSPAPALDDFSGLGEDXAPLDGIDAPGSQPEPGQXPGSLASELKGSPVLLDPEELAPVXPMEVYPECKQXAGQGSPCEEQEEPRAPVAPXPPXLIKSDIVNEISNLSQGDASASFPGSEPLLGSPDPEGGGSLSMELGVSXDVSPARDEGSLRLCXDSLPEXDDSLLCDAGXAISGGKAEGEKGRRRSSPARSRIKQGRSSSFPGRRRPRGGAHGGRGRGRARLKSXASSIEXLVVADIDSSPSKEEEEEDDDXMQNXVVLFSNXDKFVLMQDMCVVCGSFGRGAEGHLLACSQCSQCYHPYCVNSKIXKVMLLKGWRCVECIVCEVCGQASDPSRLLLCDDCDISYHXYCLDPPLLXVPKGGWKCKWCVSCMQCGAASPGFHCEWQNSYXHCGPCASLVXCPICHAPYVEEDLLIQCRHCERWMHAGCESLFXEDDVEQAADEGFDCVSCQPYVVKPVAPVAPPELVPMKVKEPEPQYFRFEGVWLXEXGMALLRNLXMSPLHKRRQRRGRLGLPGEAGLEGSEPSDALGPDDKKDGDLDXDELLKGEGGVEHMECEIKLEGPVSPDVEPGKEEXEESKKRKRKPYRPGIGGFMVRQRKSHXRXKKGPAAQAEVLSGDGQPDEVIPADLPAEGAVEQSLAEGDEKKKQQRRGRKKSKLEDMFPAYLQEAFFGKELLDLSRKALFAVGVGRPSFGLGXPKAKGDGGSERKELPXSQKGDDGPDIADEESRGLEGKADXPGPEDGGVKASPVPSDPEKPGXPGEGMLSSDLDRISXEELPKMESKDLQQLFKDVLGSEREQHLGCGXPGLEGSRXPLQRPFLQGGLPLGNLPSSSPMDSYPGLCQSPFLDSRERGGFFSPEPGEPDSPWXGSGGXXPSXPXXPXXEGEGDGLSYNQRSLQRWEKDEELGQLSXISPVLYANINFPNLKQDYPDWSSRCKQIMKLWRKVPAADKAPYLQKAKDNRAAHRINKVQKQAESQINKQXKVGDIARKXDRPALHLRIPPQPGALGSPPPAAAPXIFIGSPXXPAGLSXSADGFLKPPAGSVPGPDSPGELFLKLPPQVPAQVPSQDPFGLAPAYPLEPRFPXAPPXYPPYPSPXGAPAQPPMLGASSRPGAGQPGEFHXXPPGXPRHQPSXPDPFLKPRCPSLDNLAVPESPGVGGGKASEPLLSPPPFGESRKALEVKKEELGASSPSYGPPNLGFVDSPSSGXHLGGLELKXPDVFKAPLXPRASQVEPQSPGLGLRPQEPPPAQALAPSPPSHPDIFRPGSYXDPYAQPPLXPRPQPPPPESCCALPPRSLPSDPFSRVPASPQSQSSSQSPLXPRPLSAEAFCPSPVXPRFQSPDPYSRPPSRPQSRDPFAPLHKPPRPQPPEVAFKAGSLAHXSLGAGGFPAALPAGPAGELHAKVPSGQPPNFVRSPGXGAFVGXPSPMRFXFPQAVGEPSLKPPVPQPGLPPPHGINSHFGPGPXLGKPQSXNYXVAXGNFHPSGSPLGPSSGSXGESYGLSPLRPPSVLPPPAPDGSLPYLSHGASQRSGIXSPVEKREDPGXGMGSSLAXAELPGXQDPGMSGLSQXELEKQRQRQRLRELLIRQQIQRNXLRQEKEXAAAAAGAVGPPGSWGAEPSSPAFEQLSRGQXPFAGXQDKSSLVGLPPSKLSGPILGPGSFPSDDRLSRPPPPAXPSSMDVNSRQLVGGSQAFYQRAPYPGSLPLQQQQQQLWQQQQAXAAXSMRFAMSARFPSXPGPELGRQALGSPLAGISXRLPGPGEPVPGPAGPAQFIELRHNVQKGLGPGGXPFPGQGPPQRPRFYPVSEDPHRLAPEGLRGLAVSGLPPQKPSAPPAPELNNSLHPXPHXKGPXLPXGLELVNRPPSSXELGRPNPLALEAGKLPCEDPELDDDFDAHKALEDDEELAHLGLGVDVAKGDDELGXLENLEXNDPHLDDLLNGDEFDLLAYXDPELDXGDKKDIFNEHLRLVESANEKAEREALLRGVEPGPLGPEERPPPAADASEPRLASVLPEVKPKVEEGGRHPSPCQFXIAXPKVEPAPAANSLGLGLKPGQSMMGSRDXRMGXGPFSSSGHXAEKASFGAXGGPPAHLLXPSPLSGPGGSSLLEKFELESGALXLPGGPAASGDELDKMESSLVASELPLLIEDLLEHEKKELQKKQQLSAQLQPAQQQQQQQQQHSLLSAPGPAQAMSLPHEGSSPSLAGSQQQLSLGLAGARQPGLPQPLMPXQPPAHALQQRLAPSMAMVSNQGHMLSGQHGGQAGLVPQQSSQPVLSQKPMGXMPPSMCMKPQQLAMQQQLANSFFPDXDLDKFAAEDIIDPIAKAKMVALKGIKKVMAQGSIGVAPGMNRQQVSLLAQRLSGGPSSDLQNHVAAGSGQERSAGDPSQPRPNPPXFAQGVINEADQRQYEEWLFHXQQLLQMQLKVLEEQIGVHRKSRKALCAKQRXAKKAGREFPEADAEKLKLVXEQQSKIQKQLDQVRKQQKEHXNLMAEYRNKQQQQQQQQQQQQQQHSAVLALSPSQSPRLLXKLPGQLLPGHGLQPPQGPPGGQAGGLRLXPGGMALPGQPGGPFLNXALAQQQQQQHSGGAGSLAGPSGGFFPGNLALRSLGPDSRLLQERQLQLQQQRMQLAQKLQQQQQQQQQQQHLLGQVAIQQQQQQGPGVQXNQALGPKPQGLMPPSSHQGLLVQQLSPQPPQGPQGMLGPAQVAVLQQQHPGALGPQGPHRQVLMXQSRVLSSPQLAQQGQGLMGHRLVXAQQQQQQQQHQQQGSMAGLSHLQQSLMSHSGQPKLSAQPMGSLQQLQQQQQLQQQQQLQQQQQQQLQQQQQLQQQQLQQQQQQQQLQQQQQQQLQQQQQQLQQQQQQQQQQFQQQQQQQQMGLLNQSRXLLSPQQQQQQQVALGPGMPAKPLQHFSSPGALGPXLLLXGKEQNXVDPAVSSEAXEGPSXHQGGPLAIGXXPESMAXEPGEVKPSLSGDSQLLLVQPQPQPQPSSLQLQPPLRLPGQQQQQVSLLHXAGGGSHGQLGSGSSSEASSVPHLLAQPSVSLGDQPGSMXQNLLGPQQPMLERPMQNNXGPQPPKPGPVLQSGQGLPGVGIMPXVGQLRAQLQGVLAKNPQLRHLSPQQQQQLQALLMQRQLQQSQAVRQXPPYQEPGXQXSPLQGLLGCQPQLGGFPGPQXGPLQELGAGPRPQGPPRLPAPPGALSXGPVLGPVHPXPPPSSPQEPKRPSQLPSPSSQLPXEAQLPPXHPGXPKPQGPXLEPPPGRVSPAAAQLADXLFSKGLGPWDPPDNLAEXQKPEQSSLVPGHLDQVNGQVVPEASQLSIKQEPREEPCALGAQSVKREANGEPIGAPGXSNHLLLAGPRSEAGHLLLQKLLRAKNVQLSXGRGSEGLRAEINGHIDSKLAGLEQKLQGXPSNKEDAAARKPLXPKPKRVQKASDRLVSSRKKLRKEDGVRASEALLKQLKQELSLLPLXEPAIXANFSLFAPFGSGCPVNGQSQLRGAFGSGALPXGPDYYSQLLXKNNLSNPPXPPSSLPPXPPPSVQQKMVNGVXPSEELGEHPKDAASARDSERALRDXSEVKSLDLLAALPXPPHNQXEDVRMESDEDSDSPDSIVPASSPESILGEEAPRFPHLGSGRWEQEDRALSPVIPLIPRASIPVFPDXKPYGALGLEVPGKLPVXXWEKGKGSEVSVMLXVSAAAAKNLNGVMVAVAELLSMKIPNSYEVLFPESPARAGXEPKKGEAEGPGGKEKGLEGKSPDXGPDWLKQFDAVLPGYXLKSQLDILSLLKQESPAPEPPXQHSYXYNVSNLDVRQLSAPPPEEPSPPPSPLAPSPASPPXEPLVELPXEPLAEPPVPSPLPLASSPESARPKPRARPPEEGEDSRPPRLKKWKGVRWKRLRLLLXIQKGSGRQEDEREVAEFMEQLGXALRPDKVPRDMRRCCFCHEEGDGAXDGPARLLNLDLDLWVHLNCALWSXEVYEXQGGALMNVEVALHRGLLXKCSLCQRXGAXSSCNRMRCPNVYHFACAIRAKCMFFKDKXMLCPMHKIKGPCEQELSSFAVFRRVYIERDEVKQIASIIQRGERLHMFRVGGLVFHAIGQLLPHQMADFHSAXALYPVGYEAXRIYWSLRXNNRRCCYRCSIGENNGRPEFVIKVIEQGLEDLVFXDASPQAVWNRIIEPVAAMRKEADMLRLFPEYLKGEELFGLXVHAVLRIAESLPGVESCQNYLFRYGRHPLMELPLMINPXGCARSEPKILXHYKRPHXLNSXSMSKAYQSXFXGEXNXPYSKQFVHSKSSQYRRLRXEWKNNVYLARSRIQGLGLYAAKDLEKHXMVIEYIGXIIRNEVANRREKIYEEQNRGIYMFRINNEHVIDAXLXGGPARYINHSCAPNCVAEVVXFDKEDKIIIISSRRIPKGEELXYDYQFDFEDDQHKIPCHCGAWNCRKWMN

SEQ ID NO: 14576 - protein, 218 aa, Homo sapiens
  MOD_RES (1)..(1): Selenocysteine
  MOD_RES (12)..(12): Selenocysteine
  MOD_RES (19)..(19): Selenocysteine
  MOD_RES (35)..(35): Selenocysteine
  MOD_RES (39)..(39): Selenocysteine
  MOD_RES (48)..(48): Selenocysteine
  MOD_RES (50)..(50): Selenocysteine
  MOD_RES (53)..(53): Selenocysteine
  MOD_RES (55)..(55): Selenocysteine
  MOD_RES (74)..(74): Selenocysteine
  MOD_RES (102)..(102): Selenocysteine
  MOD_RES (110)..(110): Selenocysteine
  MOD_RES (145)..(145): Selenocysteine
  MOD_RES (147)..(147): Selenocysteine
  MOD_RES (168)..(168): Selenocysteine
  MOD_RES (190)..(190): Selenocysteine
XGCARSEPKILXHYKRVFXSIISFDPHNNLMRPHXLNSXSMSKAYQSXFXGEXNXPYSKQFVHSKSSQYRRLRXEWKNNVYLARSRIQGLGLYAAKDLEKHXMVIEYIGXIIRNEVANRREKIYEEQNRGIYMFRINNEHVIDAXLXGGPARYINHSCAPNCVAEVVXFDKEDKIIIISSRRIPKGEELXYDYQFDFEDDQHKIPCHCGAWNCRKWMN

SEQ ID NO: 14577 - protein, 352 aa, Homo sapiens
  MOD_RES (11)..(11): Selenocysteine
  MOD_RES (14)..(14): Selenocysteine
  MOD_RES (47)..(47): Selenocysteine
  MOD_RES (50)..(50): Selenocysteine
  MOD_RES (62)..(62): Selenocysteine
  MOD_RES (67)..(67): Selenocysteine
  MOD_RES (69)..(69): Selenocysteine
  MOD_RES (72)..(72): Selenocysteine
  MOD_RES (74)..(74): Selenocysteine
  MOD_RES (133)..(133): Selenocysteine
  MOD_RES (181)..(181): Selenocysteine
  MOD_RES (257)..(257): Selenocysteine
  MOD_RES (270)..(270): Selenocysteine
  MOD_RES (283)..(283): Selenocysteine
  MOD_RES (298)..(298): Selenocysteine
  MOD_RES (301)..(301): Selenocysteine
  MOD_RES (345)..(345): Selenocysteine
MSIVIPLGVDXAEXSYLEMAAGSENLDKERAVLLQRRKRENMSDGDXSAXESGDEVPVELYXAFQHXPXSIXLXASRVSKVNDKRRKKSGEKEQHISKCKKAFREGSRKSSRVKGSAPEIDPSSDGSNFGWEXKIKAWMDRYEEANNNQYSEGVQREAQRIALRLGNGNDKKEMNKSDLNXNNLLFKPPVESHIQKNKKILKSAKDLPPDALIIEYRGKFMLREQFEANGYFFKRPYPFVLFYSKFHGLEMCVDARXFGNEARFIRRSCXPNAEVRHEIQDGXIHLYIYSIHSIPKGXEIXIAFDFDYGNCKYKVDCACLKENPECPVLKRSSESMENINSGYEXRRKKGKK

SEQ ID NO: 14578 - protein, 71 aa, Homo sapiens
  MOD_RES (11)..(11): Selenocysteine
  MOD_RES (14)..(14): Selenocysteine
  MOD_RES (47)..(47): Selenocysteine
MSIVIPLGVDXAEXSYLEMAAGSEPESVEASPVVVEKSNSYPHQLYXSSSHHSHSYIGLPYADHNYGARPP

SEQ ID NO: 14579 - protein, 144 aa, Homo sapiens
  MOD_RES (11)..(11): Selenocysteine
  MOD_RES (14)..(14): Selenocysteine
  MOD_RES (47)..(47): Selenocysteine
  MOD_RES (73)..(73): Selenocysteine
  MOD_RES (93)..(94): Selenocysteine
  MOD_RES (100)..(100): Selenocysteine
  MOD_RES (104)..(105): Selenocysteine
  MOD_RES (108)..(108): Selenocysteine
  MOD_RES (116)..(116): Selenocysteine
  MOD_RES (119)..(119): Selenocysteine
  MOD_RES (126)..(126): Selenocysteine
  MOD_RES (140)..(140): Selenocysteine
MSIVIPLGVDXAEXSYLEMAAGSEPESVEASPVVVEKSNSYPHQLYXSSSHHSHSYIGLPYADHNYGARPPPXPPASPPPSVLISKNEVGIFXXPNFDEXSSAXXISXSEDGSYGXDVXRCICGFXHDDGYMICCDKCSXLESP

SEQ ID NO: 14580 - protein, 230 aa, Homo sapiens
  MOD_RES (11)..(11): Selenocysteine
  MOD_RES (14)..(14): Selenocysteine
  MOD_RES (47)..(47): Selenocysteine
  MOD_RES (73)..(73): Selenocysteine
  MOD_RES (93)..(94): Selenocysteine
  MOD_RES (100)..(100): Selenocysteine
  MOD_RES (104)..(105): Selenocysteine
  MOD_RES (108)..(108): Selenocysteine
  MOD_RES (116)..(116): Selenocysteine
  MOD_RES (119)..(119): Selenocysteine
  MOD_RES (126)..(126): Selenocysteine
  MOD_RES (157)..(157): Selenocysteine
  MOD_RES (189)..(189): Selenocysteine
  MOD_RES (192)..(192): Selenocysteine
  MOD_RES (204)..(204): Selenocysteine
  MOD_RES (209)..(209): Selenocysteine
  MOD_RES (211)..(211): Selenocysteine
  MOD_RES (214)..(214): Selenocysteine
  MOD_RES (216)..(216): Selenocysteine
MSIVIPLGVDXAEXSYLEMAAGSEPESVEASPVVVEKSNSYPHQLYXSSSHHSHSYIGLPYADHNYGARPPPXPPASPPPSVLISKNEVGIFXXPNFDEXSSAXXISXSEDGSYGXDVXRCICGFXHDDGYMICCDKCSVWQHIDCMGIDRQHIPDXYLCERCQPRNLDKERAVLLQRRKRENMSDGDXSAXESGDEVPVELYXAFQHXPXSIXLXASRVSKVNDKRRKK

SEQ ID NO: 14581 - protein, 609 aa, Homo sapiens
  MOD_RES (11)..(11): Selenocysteine
  MOD_RES (14)..(14): Selenocysteine
  MOD_RES (47)..(47): Selenocysteine
  MOD_RES (73)..(73): Selenocysteine
  MOD_RES (93)..(94): Selenocysteine
  MOD_RES (100)..(100): Selenocysteine
  MOD_RES (104)..(105): Selenocysteine
  MOD_RES (108)..(108): Selenocysteine
  MOD_RES (116)..(116): Selenocysteine
  MOD_RES (119)..(119): Selenocysteine
  MOD_RES (126)..(126): Selenocysteine
  MOD_RES (157)..(157): Selenocysteine
  MOD_RES (189)..(189): Selenocysteine
  MOD_RES (192)..(192): Selenocysteine
  MOD_RES (204)..(204): Selenocysteine
  MOD_RES (209)..(209): Selenocysteine
  MOD_RES (211)..(211): Selenocysteine
  MOD_RES (214)..(214): Selenocysteine
  MOD_RES (216)..(216): Selenocysteine
  MOD_RES (275)..(275): Selenocysteine
  MOD_RES (323)..(323): Selenocysteine
  MOD_RES (399)..(399): Selenocysteine
  MOD_RES (412)..(412): Selenocysteine
  MOD_RES (425)..(425): Selenocysteine
  MOD_RES (440)..(440): Selenocysteine
  MOD_RES (443)..(443): Selenocysteine
  MOD_RES (487)..(487): Selenocysteine
  MOD_RES (504)..(504): Selenocysteine
  MOD_RES (510)..(510): Selenocysteine
  MOD_RES (516)..(517): Selenocysteine
  MOD_RES (525)..(525): Selenocysteine
  MOD_RES (553)..(553): Selenocysteine
  MOD_RES (586)..(586): Selenocysteine
  MOD_RES (598)..(598): Selenocysteine
  MOD_RES (602)..(602): Selenocysteine
MSIVIPLGVDXAEXSYLEMAAGSEPESVEASPVVVEKSNSYPHQLYXSSSHHSHSYIGLPYADHNYGARPPPXPPASPPPSVLISKNEVGIFXXPNFDEXSSAXXISXSEDGSYGXDVXRCICGFXHDDGYMICCDKCSVWQHIDCMGIDRQHIPDXYLCERCQPRNLDKERAVLLQRRKRENMSDGDXSAXESGDEVPVELYXAFQHXPXSIXLXASRVSKVNDKRRKKSGEKEQHISKCKKAFREGSRKSSRVKGSAPEIDPSSDGSNFGWEXKIKAWMDRYEEANNNQYSEGVQREAQRIALRLGNGNDKKEMNKSDLNXNNLLFKPPVESHIQKNKKILKSAKDLPPDALIIEYRGKFMLREQFEANGYFFKRPYPFVLFYSKFHGLEMCVDARXFGNEARFIRRSCXPNAEVRHEIQDGXIHLYIYSIHSIPKGXEIXIAFDFDYGNCKYKVDCACLKENPECPVLKRSSESMENINSGYEXRRKKGKKDKDISKEKDXQNQNIXLDCEGXXNKMKSPEXKQRKLSPLRLSVSNNQEPDFIDDIEEKXPISNEVEMESEEQIAERKRKMVSWEASSLGLVXAALHMVIVAAFXWAFXLFFEVSE

SEQ ID NO: 14582 - protein, 865 aa, Homo sapiens
  MOD_RES (11)..(11): Selenocysteine
  MOD_RES (14)..(14): Selenocysteine
  MOD_RES (47)..(47): Selenocysteine
  MOD_RES (73)..(73): Selenocysteine
  MOD_RES (93)..(94): Selenocysteine
  MOD_RES (100)..(100): Selenocysteine
  MOD_RES (104)..(105): Selenocysteine
  MOD_RES (108)..(108): Selenocysteine
  MOD_RES (116)..(116): Selenocysteine
  MOD_RES (119)..(119): Selenocysteine
  MOD_RES (126)..(126): Selenocysteine
  MOD_RES (157)..(157): Selenocysteine
  MOD_RES (189)..(189): Selenocysteine
  MOD_RES (192)..(192): Selenocysteine
  MOD_RES (204)..(204): Selenocysteine
  MOD_RES (209)..(209): Selenocysteine
  MOD_RES (211)..(211): Selenocysteine
  MOD_RES (214)..(214): Selenocysteine
  MOD_RES (216)..(216): Selenocysteine
  MOD_RES (275)..(275): Selenocysteine
  MOD_RES (323)..(323): Selenocysteine
  MOD_RES (399)..(399): Selenocysteine
  MOD_RES (412)..(412): Selenocysteine
  MOD_RES (425)..(425): Selenocysteine
  MOD_RES (440)..(440): Selenocysteine
  MOD_RES (443)..(443): Selenocysteine
  MOD_RES (487)..(487): Selenocysteine
  MOD_RES (504)..(504): Selenocysteine
  MOD_RES (510)..(510): Selenocysteine
  MOD_RES (516)..(517): Selenocysteine
  MOD_RES (525)..(525): Selenocysteine
  MOD_RES (553)..(553): Selenocysteine
  MOD_RES (575)..(575): Selenocysteine
  MOD_RES (607)..(607): Selenocysteine
  MOD_RES (610)..(610): Selenocysteine
  MOD_RES (614)..(614): Selenocysteine
  MOD_RES (619)..(619): Selenocysteine
  MOD_RES (641)..(641): Selenocysteine
  MOD_RES (648)..(648): Selenocysteine
  MOD_RES (659)..(659): Selenocysteine
  MOD_RES (670)..(670): Selenocysteine
  MOD_RES (687)..(687): Selenocysteine
  MOD_RES (696)..(696): Selenocysteine
  MOD_RES (699)..(699): Selenocysteine
  MOD_RES (704)..(704): Selenocysteine
  MOD_RES (706)..(706): Selenocysteine
  MOD_RES (713)..(713): Selenocysteine
  MOD_RES (715)..(715): Selenocysteine
  MOD_RES (725)..(725): Selenocysteine
  MOD_RES (730)..(730): Selenocysteine
  MOD_RES (746)..(746): Selenocysteine
  MOD_RES (761)..(762): Selenocysteine
  MOD_RES (769)..(769): Selenocysteine
  MOD_RES (778)..(778): Selenocysteine
  MOD_RES (786)..(786): Selenocysteine
  MOD_RES (794)..(794): Selenocysteine
  MOD_RES (808)..(808): Selenocysteine
  MOD_RES (863)..(863): Selenocysteine
MSIVIPLGVDXAEXSYLEMAAGSEPESVEASPVVVEKSNSYPHQLYXSSSHHSHSYIGLPYADHNYGARPPPXPPASPPPSVLISKNEVGIFXXPNFDEXSSAXXISXSEDGSYGXDVXRCICGFXHDDGYMICCDKCSVWQHIDCMGIDRQHIPDXYLCERCQPRNLDKERAVLLQRRKRENMSDGDXSAXESGDEVPVELYXAFQHXPXSIXLXASRVSKVNDKRRKKSGEKEQHISKCKKAFREGSRKSSRVKGSAPEIDPSSDGSNFGWEXKIKAWMDRYEEANNNQYSEGVQREAQRIALRLGNGNDKKEMNKSDLNXNNLLFKPPVESHIQKNKKILKSAKDLPPDALIIEYRGKFMLREQFEANGYFFKRPYPFVLFYSKFHGLEMCVDARXFGNEARFIRRSCXPNAEVRHEIQDGXIHLYIYSIHSIPKGXEIXIAFDFDYGNCKYKVDCACLKENPECPVLKRSSESMENINSGYEXRRKKGKKDKDISKEKDXQNQNIXLDCEGXXNKMKSPEXKQRKLSPLRLSVSNNQEPDFIDDIEEKXPISNEVEMESEEQIAERKRKMXREERKMEAILQAFARLEKREKRREQALERISXAKXEVKXECKDXQIVSDAEVIQEQAKEENASKPXPAKVNRXKQRKSFSRSRXHIGQQRRRHRXVSMCSDIQPSSPDIEVXSQQNDIENXVLXIEPEXEXALAEIIXEXEVPALNKCPXKYPKXKKHLVNEWLSEKNEKXGKPSDGLSERPLRIXXDPEVLAXQLNSLPGLXYSPHVYSXPKHYIRFXSPFLSEKRRRKEPXENISGSCKKRWLKQALEEENSAILHRFNSPCQERSRSPAVNEYFFPRKFSRNKEXHL

SEQ ID NO: 14583 - protein, 1858 aa, Homo sapiens
  MOD_RES (11)..(11): Selenocysteine
  MOD_RES (14)..(14): Selenocysteine
  MOD_RES (47)..(47): Selenocysteine
  MOD_RES (73)..(73): Selenocysteine
  MOD_RES (93)..(94): Selenocysteine
  MOD_RES (100)..(100): Selenocysteine
  MOD_RES (104)..(105): Selenocysteine
  MOD_RES (108)..(108): Selenocysteine
  MOD_RES (116)..(116): Selenocysteine
  MOD_RES (119)..(119): Selenocysteine
  MOD_RES (126)..(126): Selenocysteine
  MOD_RES (157)..(157): Selenocysteine
  MOD_RES (189)..(189): Selenocysteine
  MOD_RES (192)..(192): Selenocysteine
  MOD_RES (204)..(204): Selenocysteine
  MOD_RES (209)..(209): Selenocysteine
  MOD_RES (211)..(211): Selenocysteine
  MOD_RES (214)..(214): Selenocysteine
  MOD_RES (216)..(216): Selenocysteine
  MOD_RES (275)..(275): Selenocysteine
  MOD_RES (323)..(323): Selenocysteine
  MOD_RES (399)..(399): Selenocysteine
  MOD_RES (412)..(412): Selenocysteine
  MOD_RES (425)..(425): Selenocysteine
  MOD_RES (440)..(440): Selenocysteine
  MOD_RES (443)..(443): Selenocysteine
  MOD_RES (487)..(487): Selenocysteine
  MOD_RES (504)..(504): Selenocysteine
  MOD_RES (510)..(510): Selenocysteine
  MOD_RES (516)..(517): Selenocysteine
  MOD_RES (525)..(525): Selenocysteine
  MOD_RES (553)..(553): Selenocysteine
  MOD_RES (575)..(575): Selenocysteine
  MOD_RES (607)..(607): Selenocysteine
  MOD_RES (610)..(610): Selenocysteine
  MOD_RES (614)..(614): Selenocysteine
  MOD_RES (619)..(619): Selenocysteine
  MOD_RES (641)..(641): Selenocysteine
  MOD_RES (648)..(648): Selenocysteine
  MOD_RES (659)..(659): Selenocysteine
  MOD_RES (670)..(670): Selenocysteine
  MOD_RES (687)..(687): Selenocysteine
  MOD_RES (696)..(696): Selenocysteine
  MOD_RES (699)..(699): Selenocysteine
  MOD_RES (704)..(704): Selenocysteine
  MOD_RES (706)..(706): Selenocysteine
  MOD_RES (713)..(713): Selenocysteine
  MOD_RES (715)..(715): Selenocysteine
  MOD_RES (725)..(725): Selenocysteine
  MOD_RES (730)..(730): Selenocysteine
  MOD_RES (746)..(746): Selenocysteine
  MOD_RES (761)..(762): Selenocysteine
  MOD_RES (769)..(769): Selenocysteine
  MOD_RES (778)..(778): Selenocysteine
  MOD_RES (786)..(786): Selenocysteine
  MOD_RES (794)..(794): Selenocysteine
  MOD_RES (808)..(808): Selenocysteine
  MOD_RES (868)..(869): Selenocysteine
  MOD_RES (887)..(887): Selenocysteine
  MOD_RES (889)..(889): Selenocysteine
  MOD_RES (891)..(891): Selenocysteine
  MOD_RES (897)..(897): Selenocysteine
  MOD_RES (899)..(899): Selenocysteine
  MOD_RES (901)..(901): Selenocysteine
  MOD_RES (904)..(904): Selenocysteine
  MOD_RES (912)..(912): Selenocysteine
  MOD_RES (922)..(922): Selenocysteine
  MOD_RES (935)..(935): Selenocysteine
  MOD_RES (938)..(938): Selenocysteine
  MOD_RES (941)..(941): Selenocysteine
  MOD_RES (945)..(945): Selenocysteine
  MOD_RES (964)..(964): Selenocysteine
  MOD_RES (975)..(975): Selenocysteine
  MOD_RES (978)..(978): Selenocysteine
  MOD_RES (988)..(988): Selenocysteine
  MOD_RES (997)..(997): Selenocysteine
  MOD_RES (1001)..(1001): Selenocysteine
  MOD_RES (1007)..(1007): Selenocysteine
  MOD_RES (1033)..(1033): Selenocysteine
  MOD_RES (1038)..(1038): Selenocysteine
  MOD_RES (1041)..(1041): Selenocysteine
  MOD_RES (1056)..(1056): Selenocysteine
  MOD_RES (1062)..(1062): Selenocysteine
  MOD_RES (1074)..(1074): Selenocysteine
  MOD_RES (1088)..(1088): Selenocysteine
  MOD_RES (1112)..(1112): Selenocysteine
  MOD_RES (1119)..(1120): Selenocysteine
  MOD_RES (1124)..(1124): Selenocysteine
  MOD_RES (1136)..(1136): Selenocysteine
  MOD_RES (1147)..(1147): Selenocysteine
  MOD_RES (1176)..(1176): Selenocysteine
  MOD_RES (1212)..(1212): Selenocysteine
  MOD_RES (1219)..(1219): Selenocysteine
  MOD_RES (1222)..(1222): Selenocysteine
  MOD_RES (1227)..(1227): Selenocysteine
  MOD_RES (1231)..(1231): Selenocysteine
  MOD_RES (1241)..(1241): Selenocysteine
  MOD_RES (1253)..(1253): Selenocysteine
  MOD_RES (1256)..(1256): Selenocysteine
  MOD_RES (1333)..(1335): Selenocysteine
  MOD_RES (1343)..(1343): Selenocysteine
  MOD_RES (1347)..(1347): Selenocysteine
  MOD_RES (1374)..(1374): Selenocysteine
  MOD_RES (1383)..(1383): Selenocysteine
  MOD_RES (1397)..(1397): Selenocysteine
  MOD_RES (1419)..(1419): Selenocysteine
  MOD_RES (1437)..(1437): Selenocysteine
  MOD_RES (1455)..(1455): Selenocysteine
  MOD_RES (1458)..(1458): Selenocysteine
  MOD_RES (1490)..(1490): Selenocysteine
  MOD_RES (1510)..(1510): Selenocysteine
  MOD_RES (1514)..(1514): Selenocysteine
  MOD_RES (1517)..(1517): Selenocysteine
  MOD_RES (1520)..(1520): Selenocysteine
  MOD_RES (1522)..(1522): Selenocysteine
  MOD_RES (1530)..(1530): Selenocysteine
  MOD_RES (1542)..(1542): Selenocysteine
  MOD_RES (1580)..(1580): Selenocysteine
  MOD_RES (1583)..(1583): Selenocysteine
  MOD_RES (1593)..(1594): Selenocysteine
  MOD_RES (1598)..(1598): Selenocysteine
  MOD_RES (1605)..(1605): Selenocysteine
  MOD_RES (1616)..(1616): Selenocysteine
  MOD_RES (1621)..(1621): Selenocysteine
  MOD_RES (1663)..(1663): Selenocysteine
  MOD_RES (1672)..(1672): Selenocysteine
  MOD_RES (1698)..(1698): Selenocysteine
  MOD_RES (1733)..(1734): Selenocysteine
  MOD_RES (1757)..(1757): Selenocysteine
  MOD_RES (1766)..(1766): Selenocysteine
  MOD_RES (1769)..(1770): Selenocysteine
  MOD_RES (1782)..(1782): Selenocysteine
  MOD_RES (1791)..(1791): Selenocysteine
  MOD_RES (1805)..(1805): Selenocysteine
  MOD_RES (1807)..(1807): Selenocysteine
  MOD_RES (1847)..(1847): Selenocysteine
MSIVIPLGVDXAEXSYLEMAAGSEPESVEASPVVVEKSNSYPHQLYXSSSHHSHSYIGLPYADHNYGARPPPXPPASPPPSVLISKNEVGIFXXPNFDEXSSAXXISXSEDGSYGXDVXRCICGFXHDDGYMICCDKCSVWQHIDCMGIDRQHIPDXYLCERCQPRNLDKERAVLLQRRKRENMSDGDXSAXESGDEVPVELYXAFQHXPXSIXLXASRVSKVNDKRRKKSGEKEQHISKCKKAFREGSRKSSRVKGSAPEIDPSSDGSNFGWEXKIKAWMDRYEEANNNQYSEGVQREAQRIALRLGNGNDKKEMNKSDLNXNNLLFKPPVESHIQKNKKILKSAKDLPPDALIIEYRGKFMLREQFEANGYFFKRPYPFVLFYSKFHGLEMCVDARXFGNEARFIRRSCXPNAEVRHEIQDGXIHLYIYSIHSIPKGXEIXIAFDFDYGNCKYKVDCACLKENPECPVLKRSSESMENINSGYEXRRKKGKKDKDISKEKDXQNQNIXLDCEGXXNKMKSPEXKQRKLSPLRLSVSNNQEPDFIDDIEEKXPISNEVEMESEEQIAERKRKMXREERKMEAILQAFARLEKREKRREQALERISXAKXEVKXECKDXQIVSDAEVIQEQAKEENASKPXPAKVNRXKQRKSFSRSRXHIGQQRRRHRXVSMCSDIQPSSPDIEVXSQQNDIENXVLXIEPEXEXALAEIIXEXEVPALNKCPXKYPKXKKHLVNEWLSEKNEKXGKPSDGLSERPLRIXXDPEVLAXQLNSLPGLXYSPHVYSXPKHYIRFXSPFLSEKRRRKEPXENISGSCKKRWLKQALEEENSAILHRFNSPCQERSRSPAVNGENKSPLLLNDSCSLPDLXXPLKKRRFYQLLDSVYSEXSXPXPSPYAXPXHXDIXPMDPSFAXPPRIKSDDEXCRNGYKPIYSPVXPVXPGXPGNXMHFENISSPESSPEIKRRXYSQEGYDRSSXMLXLGPFRNSNLXELGLQEIKXIGYXSPRSRXEVNRQCPGEKEPVSDLQLGLDAVEPXALHKXLEXPAHDRAEPNSQLDSXHSGRGXMYSSWVKSPDRXGVNFSVNSNLRDLXPSHQLEVGGGFRISESKCLMQDDXRGMFMEXXVFCXSEDGLVSGFGRXVNDNLIDGNCXPQNPPQKKKVSLLEYRKRQREARKSGSKXENFPLISVSPHASGSLSNNGDGCASSNDNGEQVDHXASLPLPXPAXVYNAXSEEXSNNCPVKDAXASEKNEPEVQWXASXSVEQVRERSYQRALLLSDHRKDKDSGGESPCVSCSPSHVQSSPSSHSNHIPQLQAKGPVPSFSELMEDPDPENPEPXXXNECPSPDXSQNXCKSPPKMSKPGSPGSVIPAQAHGKIFXKPDPQWDSXVSASEAENGVHLKXELQQKQLSNNNQALSKNHPPQXHVRNSSEQLSQKLPSVPXKLHCPPSPHLENPPKSSXPHXPVQHGYLSPKPPSQQLGSPYRPHHSQSPQVGXPQREPQRNFYPAAQNLPANXQQAXSGXLFXQXPSGQSSAXYSQFNQQSLNSXAPPPPPPPPPSSSYYQNQQPSANFQNYNQLKGSLSQQXVFXSGPNQALPGXXSQQXVPGHHVXPGHFLPSQNPXIHHQXAAAVVPPPPPPPPAPGPHLVQQPNSHQQHSVAHVVGPVHAVXPGSHIHSQXAGHHLPPPPPPPGPAPHHHPPPHPSXGLQGLQAQHQHVVNSAPPPPPPPPPSSVLASGHHXXSAQALHHPPHQGPPLFPSSAHPXVPPYPSQAXHHXXLGPGPQHQPSGXGPHCPLPVXGPHLQPQGPNSIPXPXASGFCPHPGSVALPHGVQGPQQASPVPGQIPIHRAQVPPXFQNNYHGSGWH

SEQ ID NO: 14584 - protein, 453 aa, Homo sapiens
  MOD_RES (8)..(8): Selenocysteine
  MOD_RES (27)..(28): Selenocysteine
  MOD_RES (34)..(34): Selenocysteine
  MOD_RES (38)..(39): Selenocysteine
  MOD_RES (42)..(42): Selenocysteine
  MOD_RES (50)..(50): Selenocysteine
  MOD_RES (53)..(53): Selenocysteine
  MOD_RES (60)..(60): Selenocysteine
  MOD_RES (91)..(91): Selenocysteine
  MOD_RES (123)..(123): Selenocysteine
  MOD_RES (126)..(126): Selenocysteine
  MOD_RES (138)..(138): Selenocysteine
  MOD_RES (143)..(143): Selenocysteine
  MOD_RES (145)..(145): Selenocysteine
  MOD_RES (148)..(148): Selenocysteine
  MOD_RES (150)..(150): Selenocysteine
  MOD_RES (209)..(209): Selenocysteine
  MOD_RES (257)..(257): Selenocysteine
  MOD_RES (333)..(333): Selenocysteine
  MOD_RES (346)..(346): Selenocysteine
  MOD_RES (359)..(359): Selenocysteine
  MOD_RES (374)..(374): Selenocysteine
  MOD_RES (377)..(377): Selenocysteine
  MOD_RES (421)..(421): Selenocysteine
  MOD_RES (429)..(429): Selenocysteine
  MOD_RES (452)..(452): Selenocysteine
MVLVLSDXSASPPPSVLISKNEVGIFXXPNFDEXSSAXXISXSEDGSYGXDVXRCICGFXHDDGYMICCDKCSVWQHIDCMGIDRQHIPDXYLCERCQPRNLDKERAVLLQRRKRENMSDGDXSAXESGDEVPVELYXAFQHXPXSIXLXASRVSKVNDKRRKKSGEKEQHISKCKKAFREGSRKSSRVKGSAPEIDPSSDGSNFGWEXKIKAWMDRYEEANNNQYSEGVQREAQRIALRLGNGNDKKEMNKSDLNXNNLLFKPPVESHIQKNKKILKSAKDLPPDALIIEYRGKFMLREQFEANGYFFKRPYPFVLFYSKFHGLEMCVDARXFGNEARFIRRSCXPNAEVRHEIQDGXIHLYIYSIHSIPKGXEIXIAFDFDYGNCKYKVDCACLKENPECPVLKRSSESMENINSGYEXRRKKGKKXKIFQKKKIHKIRILLWIVKERPXK

SEQ ID NO: 14585 - protein, 125 aa, Homo sapiens
  MOD_RES (1)..(1): Any amino acid
  MOD_RES (24)..(24): Selenocysteine
  MOD_RES (31)..(31): Selenocysteine
  MOD_RES (34)..(34): Selenocysteine
  MOD_RES (39)..(39): Selenocysteine
  MOD_RES (43)..(43): Selenocysteine
  MOD_RES (53)..(53): Selenocysteine
  MOD_RES (65)..(65): Selenocysteine
  MOD_RES (68)..(68): Selenocysteine
  MOD_RES (103)..(105): Selenocysteine
  MOD_RES (113)..(113): Selenocysteine
  MOD_RES (117)..(117): Selenocysteine
XGSLSNNGDGCASSNDNGEQVDHXASLPLPXPAXVYNAXSEEXSNNCPVKDAXASEKNEPEVQWXASXSVEQVRERSYQRALLLSDHRKDKDSDPDPENPEPXXXNECPSPDXSQNXCKSPPKMS

SEQ ID NO: 14586 - protein, 144 aa, Homo sapiens
  MOD_RES (1)..(1): Any amino acid
  MOD_RES (18)..(18): Selenocysteine
  MOD_RES (21)..(21): Selenocysteine
  MOD_RES (25)..(25): Selenocysteine
  MOD_RES (30)..(30): Selenocysteine
  MOD_RES (52)..(52): Selenocysteine
  MOD_RES (59)..(59): Selenocysteine
  MOD_RES (70)..(70): Selenocysteine
  MOD_RES (81)..(81): Selenocysteine
  MOD_RES (98)..(98): Selenocysteine
  MOD_RES (107)..(107): Selenocysteine
  MOD_RES (110)..(110): Selenocysteine
  MOD_RES (115)..(115): Selenocysteine
  MOD_RES (117)..(117): Selenocysteine
  MOD_RES (124)..(124): Selenocysteine
  MOD_RES (126)..(126): Selenocysteine
  MOD_RES (136)..(136): Selenocysteine
  MOD_RES (141)..(141): Selenocysteine
XLEKREKRREQALERISXAKXEVKXECKDXQIVSDAEVIQEQAKEENASKPXPAKVNRXKQRKSFSRSRXHIGQQRRRHRXVSMCSDIQPSSPDIEVXSQQNDIENXVLXIEPEXEXALAEIIXEXEVPALNKCPXKYPKXKKV

SEQ ID NO: 14587 - protein, 21 aa, Homo sapiens
  MOD_RES (1)..(1): Any amino acid
XQNPPQKKKSPVGNFVGSNVV

SEQ ID NO: 14588 - protein, 91 aa, Homo sapiens
  MOD_RES (37)..(37): Selenocysteine
  MOD_RES (46)..(46): Selenocysteine
  MOD_RES (54)..(54): Selenocysteine
  MOD_RES (65)..(65): Selenocysteine
  MOD_RES (73)..(73): Selenocysteine
  MOD_RES (85)..(85): Selenocysteine
MARGERIYRAVKDLFLHEPEQMLWNAFPPSGRELSYXSRSQMPGEXISRNLQEXRREKKCWERSXERHEVRGXEDQRRQERSPGXFSKPKI

SEQ ID NO: 14589 - protein, 352 aa, Homo sapiens
  MOD_RES (25)..(25): Selenocysteine
  MOD_RES (42)..(42): Selenocysteine
  MOD_RES (49)..(49): Selenocysteine
  MOD_RES (77)..(77): Selenocysteine
  MOD_RES (140)..(140): Selenocysteine
  MOD_RES (148)..(148): Selenocysteine
  MOD_RES (175)..(175): Selenocysteine
  MOD_RES (182)..(182): Selenocysteine
  MOD_RES (233)..(233): Selenocysteine
  MOD_RES (253)..(253): Selenocysteine
  MOD_RES (268)..(268): Selenocysteine
  MOD_RES (281)..(281): Selenocysteine
  MOD_RES (287)..(287): Selenocysteine
  MOD_RES (290)..(290): Selenocysteine
  MOD_RES (307)..(307): Selenocysteine
MARGRKMSKPRAVEAAAAAAAVAAXAPGPEMVERRGPGRPRXDGENVFXGQSKIYSYMSPNKCSGMRFPLQEENSVXHHEVKCQGKPLAGIYRKREEKRNAGNAVRSAMKSEEQKIKDARKGPLVPFPNQKSEAAEPPKXPPSSCDSXNAAIAKQALKKPIKGKQAPRKKAQGKXQQNRKLXDFYPVRRSSRKSKAELQSEERKRIDELIESGKEEGMKIDLIDGKGRGVIAXKQFSRGDFVVEYHGDLIEIXDAKKREALYAQDPSXGCYMYYFQYLSKXYCVDAXREXNRLGRLINHSKCGNCQXKLHDIDGVPHLILIASRDIAAGEELLYDYGDRSKASIEAHPWLKH

SEQ ID NO: 14590 - protein, 299 aa, Homo sapiens
  MOD_RES (15)..(15): Selenocysteine
  MOD_RES (40)..(40): Selenocysteine
  MOD_RES (68)..(68): Selenocysteine
  MOD_RES (131)..(131): Selenocysteine
  MOD_RES (139)..(139): Selenocysteine
  MOD_RES (166)..(166): Selenocysteine
  MOD_RES (173)..(173): Selenocysteine
  MOD_RES (224)..(224): Selenocysteine
  MOD_RES (244)..(244): Selenocysteine
  MOD_RES (259)..(259): Selenocysteine
  MOD_RES (272)..(272): Selenocysteine
  MOD_RES (278)..(278): Selenocysteine
  MOD_RES (281)..(281): Selenocysteine
  MOD_RES (298)..(298): Selenocysteine
MRWLWLLLFPDSPVXLREVLPSQPWRLRGCSDLRGENVFXGQSKIYSYMSPNKCSGMRFPLQEENSVXHHEVKCQGKPLAGIYRKREEKRNAGNAVRSAMKSEEQKIKDARKGPLVPFPNQKSEAAEPPKXPPSSCDSXNAAIAKQALKKPIKGKQAPRKKAQGKXQQNRKLXDFYPVRRSSRKSKAELQSEERKRIDELIESGKEEGMKIDLIDGKGRGVIAXKQFSRGDFVVEYHGDLIEIXDAKKREALYAQDPSXGCYMYYFQYLSKXYCVDAXREXNRLGRLINHSKCGNCQXK

SEQ ID NO: 14591 - protein, 322 aa, Homo sapiens
  MOD_RES (12)..(12): Selenocysteine
  MOD_RES (19)..(19): Selenocysteine
  MOD_RES (47)..(47): Selenocysteine
  MOD_RES (110)..(110): Selenocysteine
  MOD_RES (118)..(118): Selenocysteine
  MOD_RES (145)..(145): Selenocysteine
  MOD_RES (152)..(152): Selenocysteine
  MOD_RES (203)..(203): Selenocysteine
  MOD_RES (223)..(223): Selenocysteine
  MOD_RES (238)..(238): Selenocysteine
  MOD_RES (251)..(251): Selenocysteine
  MOD_RES (257)..(257): Selenocysteine
  MOD_RES (260)..(260): Selenocysteine
  MOD_RES (277)..(277): Selenocysteine
MVERRGPGRPRXDGENVFXGQSKIYSYMSPNKCSGMRFPLQEENSVXHHEVKCQGKPLAGIYRKREEKRNAGNAVRSAMKSEEQKIKDARKGPLVPFPNQKSEAAEPPKXPPSSCDSXNAAIAKQALKKPIKGKQAPRKKAQGKXQQNRKLXDFYPVRRSSRKSKAELQSEERKRIDELIESGKEEGMKIDLIDGKGRGVIAXKQFSRGDFVVEYHGDLIEIXDAKKREALYAQDPSXGCYMYYFQYLSKXYCVDAXREXNRLGRLINHSKCGNCQXKLHDIDGVPHLILIASRDIAAGEELLYDYGDRSKASIEAHPWLKH

SEQ ID NO: 14592 - protein, 1749 aa, Homo sapiens
  MOD_RES (29)..(29): Selenocysteine
  MOD_RES (81)..(81): Selenocysteine
  MOD_RES (84)..(84): Selenocysteine
  MOD_RES (89)..(89): Selenocysteine
  MOD_RES (115)..(115): Selenocysteine
  MOD_RES (118)..(118): Selenocysteine
  MOD_RES (129)..(129): Selenocysteine
  MOD_RES (141)..(141): Selenocysteine
  MOD_RES (182)..(182): Selenocysteine
  MOD_RES (235)..(235): Selenocysteine
  MOD_RES (242)..(242): Selenocysteine
  MOD_RES (250)..(250): Selenocysteine
  MOD_RES (259)..(259): Selenocysteine
  MOD_RES (265)..(265): Selenocysteine
  MOD_RES (288)..(288): Selenocysteine
  MOD_RES (307)..(307): Selenocysteine
  MOD_RES (319)..(319): Selenocysteine
  MOD_RES (325)..(325): Selenocysteine
  MOD_RES (383)..(383): Selenocysteine
  MOD_RES (398)..(398): Selenocysteine
  MOD_RES (421)..(421): Selenocysteine
  MOD_RES (475)..(475): Selenocysteine
  MOD_RES (523)..(523): Selenocysteine
  MOD_RES (537)..(537): Selenocysteine
  MOD_RES (557)..(557): Selenocysteine
  MOD_RES (611)..(611): Selenocysteine
  MOD_RES (644)..(644): Selenocysteine
  MOD_RES (664)..(664): Selenocysteine
  MOD_RES (671)..(671): Selenocysteine
  MOD_RES (675)..(675): Selenocysteine
  MOD_RES (728)..(728): Selenocysteine
  MOD_RES (787)..(787): Selenocysteine
  MOD_RES (819)..(820): Selenocysteine
  MOD_RES (837)..(837): Selenocysteine
  MOD_RES (850)..(850): Selenocysteine
  MOD_RES (888)..(888): Selenocysteine
  MOD_RES (897)..(897): Selenocysteine
  MOD_RES (930)..(930): Selenocysteine
  MOD_RES (933)..(933): Selenocysteine
  MOD_RES (969)..(969): Selenocysteine
  MOD_RES (1006)..(1006): Selenocysteine
  MOD_RES (1015)..(1015): Selenocysteine
  MOD_RES (1067)..(1067): Selenocysteine
  MOD_RES (1145)..(1145): Selenocysteine
  MOD_RES (1166)..(1166): Selenocysteine
  MOD_RES (1206)..(1206): Selenocysteine
  MOD_RES (1220)..(1220): Selenocysteine
  MOD_RES (1254)..(1254): Selenocysteine
  MOD_RES (1279)..(1279): Selenocysteine
  MOD_RES (1285)..(1285): Selenocysteine
  MOD_RES (1300)..(1300): Selenocysteine
  MOD_RES (1302)..(1302): Selenocysteine
  MOD_RES (1309)..(1309): Selenocysteine
  MOD_RES (1311)..(1311): Selenocysteine
  MOD_RES (1313)..(1313): Selenocysteine
  MOD_RES (1382)..(1382): Selenocysteine
  MOD_RES (1435)..(1435): Selenocysteine
  MOD_RES (1456)..(1456): Selenocysteine
  MOD_RES (1465)..(1465): Selenocysteine
  MOD_RES (1469)..(1469): Selenocysteine
  MOD_RES (1477)..(1477): Selenocysteine
  MOD_RES (1505)..(1505): Selenocysteine
  MOD_RES (1520)..(1520): Selenocysteine
  MOD_RES (1546)..(1546): Selenocysteine
  MOD_RES (1554)..(1554): Selenocysteine
  MOD_RES (1557)..(1557): Selenocysteine
  MOD_RES (1583)..(1583): Selenocysteine
  MOD_RES (1641)..(1641): Selenocysteine
  MOD_RES (1657)..(1657): Selenocysteine
  MOD_RES (1661)..(1661): Selenocysteine
  MOD_RES (1663)..(1663): Selenocysteine
  MOD_RES (1691)..(1691): Selenocysteine
  MOD_RES (1716)..(1716): Selenocysteine
  MOD_RES (1747)..(1747): Selenocysteine
MQAMDPAAADLYEEDGKDLDFYDFEPLPXLPEDEENVSLADILSLRDRGLSEQEAWAVCLECSLSMRSVAHAAIFQSLCIXPDXLAFNXSGNVCFMEQLSDDPEGAFVPPEFDVXGNXFEAHIYSLGAXLKAALEYVAEPXLEPRLSQDLEALLSRMQAEDPGDRPDLESIIALCEEKLQLXSSCRVCRSLSAVGRRVLSIESFGALQDVSESSWRERPAPGNAGPRRPPGDPSXDPEVLPXPEGPESEXSRGPRASPXKALLSXPVRNGESHSREGLAGLVLDAERXLGELDRDALRRSRLRKVQXFPRLLSDSPEAXLCLPLXRGKSQLPISELFSPDPRKAFLDRKNGLSSFQAQPKCRLWPEQEPEHQLGRVPCAGRSXDRGPGVPGSPGQPEXSHPSQGPAEAPADPRDASGEAQXPRDDERIPEGARQLESAAAEQWVSLQDLLSQLGRPFREYELWALCLACLRALQXRPEHPAYLCLDSVLVAEDGAVLFQPPPANGSYDSFFLAPELAEERLVXEKASVYCVAAVLWXAAKFSVPRNHKLALPRRLKXLLLDMARRSAPERPSAAEAIKVCGSYLLQRGMDSRKILAHLRASICQVYQEEEXISLQNAFSVVELKPSVAPAPEPSPGFLPVNSDXGLVAVPGPVPGQHPCGEEAXQLPAAFXSEAXHFKPIVLAQNASVARDQPALAQEESEERGGQREGEGEEKLSLEAHAGSPSLKXPDGPVPGPGPQGAAPEPLGASVQRDSAQGRPCPPPQAPANQPEGASSAAPGSPVPAPPXKASALPVEQGPAEPIPPGVASGGLRPDALGPXXAHHGPRHPPKPPRSKAXERPGQEPEGPGAXPAGERDDQSPDSVPERPRPADRRLCLPCVDASPLPGRXACPSLQEAXRLIQEEFAFDGYLDNGLEALIMGEYIFALKDLXFAXFCGAISEKFCDLYWDEKLLQNLFKVVNGQASPSPSXAEEAGSQLEGSQSPRSPSSKRPSLHRLGKEKPAMARXSSRAPCSPXSVSDVDSDALSRGNFEVGFRPQRSVKAERAQQPEAGEDRRPAGGASDVEAVXRLARSKGVGPALSPGPAGFQSCSPGWCSAFYEADCFGADVHNYVKDLGRQQADGALPDAQSPELEQQLMMEKRNYRKXLKFYQKLLQKEKRNKGSDVKXMLSKLKGQLEEMKSRVQFLSLVKKYLQVMYAERWGLEPCXLPVIVNIAAAPCDXLDFSPLDESSSLIFYNVNKHPGGRQKARILQAGXPLGLMAYLYSSDAFLEGYVQQFLYXFRYFCXPHDFLHFLLDRINSXLXRAHQDPXSXFXKIYRRSLCVLQAWVEDCYAVDFPRNSGLLGKLEDFISSKILPLDGSAKHLLGLLEVGMDRRAEGNPRGXDLENPREAEEDARPFNALCKRLSEDGISRKSFPWRLPRGNGLVLPPHKERPYXIAAALPKPCFLEDFYGPCAKXSEKGPYFLXEYSXHQLFSQLXLLQQELFQKCHPVHFLNSRALGVMDKSXAIPKASSSESLSAKXCSLFLPNYVQDKYLLQLLRNADDVSXWVAAEIVXSHXSKLQVNLLSKFLLIAKSCYEQRNFAXAMQILSGLEHLAVRQSPAWRILPAKIAEVMEELKAVEVFLKSDSLCLMEGRRFRAQPXLPSAHLLAMHIQQLEXGGFXMXNGAHRWSKLRNIAKVVSQVHAFQENPYXFSPDPKLQSYLKQRIARFSGADISXLAADSRANFHQVSSEKHSRKIQDKLRRMKAXFQ

SEQ ID NO: 14593 - protein, 1141 aa, Homo sapiens
  MOD_RES (16)..(16): Selenocysteine
  MOD_RES (19)..(19): Selenocysteine
  MOD_RES (24)..(24): Selenocysteine
  MOD_RES (50)..(50): Selenocysteine
  MOD_RES (53)..(53): Selenocysteine
  MOD_RES (64)..(64): Selenocysteine
  MOD_RES (76)..(76): Selenocysteine
  MOD_RES (117)..(117): Selenocysteine
  MOD_RES (170)..(170): Selenocysteine
  MOD_RES (177)..(177): Selenocysteine
  MOD_RES (185)..(185): Selenocysteine
  MOD_RES (194)..(194): Selenocysteine
  MOD_RES (200)..(200): Selenocysteine
  MOD_RES (223)..(223): Selenocysteine
  MOD_RES (242)..(242): Selenocysteine
  MOD_RES (254)..(254): Selenocysteine
  MOD_RES (260)..(260): Selenocysteine
  MOD_RES (318)..(318): Selenocysteine
  MOD_RES (333)..(333): Selenocysteine
  MOD_RES (356)..(356): Selenocysteine
  MOD_RES (410)..(410): Selenocysteine
  MOD_RES (458)..(458): Selenocysteine
  MOD_RES (472)..(472): Selenocysteine
  MOD_RES (492)..(492): Selenocysteine
  MOD_RES (546)..(546): Selenocysteine
  MOD_RES (579)..(579): Selenocysteine
  MOD_RES (599)..(599): Selenocysteine
  MOD_RES (606)..(606): Selenocysteine
  MOD_RES (610)..(610): Selenocysteine
  MOD_RES (663)..(663): Selenocysteine
  MOD_RES (722)..(722): Selenocysteine
  MOD_RES (754)..(755): Selenocysteine
  MOD_RES (772)..(772): Selenocysteine
  MOD_RES (785)..(785): Selenocysteine
  MOD_RES (823)..(823): Selenocysteine
  MOD_RES (832)..(832): Selenocysteine
  MOD_RES (865)..(865): Selenocysteine
  MOD_RES (868)..(868): Selenocysteine
  MOD_RES (904)..(904): Selenocysteine
  MOD_RES (941)..(941): Selenocysteine
  MOD_RES (950)..(950): Selenocysteine
  MOD_RES (1002)..(1002): Selenocysteine
  MOD_RES (1080)..(1080): Selenocysteine
  MOD_RES (1101)..(1101): Selenocysteine
MRSVAHAAIFQSLCIXPDXLAFNXSGNVCFMEQLSDDPEGAFVPPEFDVXGNXFEAHIYSLGAXLKAALEYVAEPXLEPRLSQDLEALLSRMQAEDPGDRPDLESIIALCEEKLQLXSSCRVCRSLSAVGRRVLSIESFGALQDVSESSWRERPAPGNAGPRRPPGDPSXDPEVLPXPEGPESEXSRGPRASPXKALLSXPVRNGESHSREGLAGLVLDAERXLGELDRDALRRSRLRKVQXFPRLLSDSPEAXLCLPLXRGKSQLPISELFSPDPRKAFLDRKNGLSSFQAQPKCRLWPEQEPEHQLGRVPCAGRSXDRGPGVPGSPGQPEXSHPSQGPAEAPADPRDASGEAQXPRDDERIPEGARQLESAAAEQWVSLQDLLSQLGRPFREYELWALCLACLRALQXRPEHPAYLCLDSVLVAEDGAVLFQPPPANGSYDSFFLAPELAEERLVXEKASVYCVAAVLWXAAKFSVPRNHKLALPRRLKXLLLDMARRSAPERPSAAEAIKVCGSYLLQRGMDSRKILAHLRASICQVYQEEEXISLQNAFSVVELKPSVAPAPEPSPGFLPVNSDXGLVAVPGPVPGQHPCGEEAXQLPAAFXSEAXHFKPIVLAQNASVARDQPALAQEESEERGGQREGEGEEKLSLEAHAGSPSLKXPDGPVPGPGPQGAAPEPLGASVQRDSAQGRPCPPPQAPANQPEGASSAAPGSPVPAPPXKASALPVEQGPAEPIPPGVASGGLRPDALGPXXAHHGPRHPPKPPRSKAXERPGQEPEGPGAXPAGERDDQSPDSVPERPRPADRRLCLPCVDASPLPGRXACPSLQEAXRLIQEEFAFDGYLDNGLEALIMGEYIFALKDLXFAXFCGAISEKFCDLYWDEKLLQNLFKVVNGQASPSPSXAEEAGSQLEGSQSPRSPSSKRPSLHRLGKEKPAMARXSSRAPCSPXSVSDVDSDALSRGNFEVGFRPQRSVKAERAQQPEAGEDRRPAGGASDVEAVXRLARSKGVGPALSPGPAGFQSCSPGWCSAFYEADCFGADVHNYVKDLGRQQADGALPDAQSPELEQQLMMEKRNYRKXLKFYQKLLQKEKRNKGSDVKXMLSKLKGQLEEMKSRVQFLSLVKKYLQASGLRAPLCPVRQ

SEQ ID NO: 14594 - protein, 149 aa, Homo sapiens
  MOD_RES (5)..(5): Selenocysteine
  MOD_RES (10)..(10): Selenocysteine
  MOD_RES (35)..(35): Selenocysteine
  MOD_RES (66)..(66): Selenocysteine
  MOD_RES (98)..(98): Selenocysteine
  MOD_RES (101)..(101): Selenocysteine
  MOD_RES (103)..(103): Selenocysteine
  MOD_RES (138)..(138): Selenocysteine
  MOD_RES (143)..(143): Selenocysteine
MELIXILEKXVSPDRLELEAAQKFLERAAVENLPXFLVELSRVLANPGNSQVARVAAGLQIKNSLXSKDPDIKAQYQQRWLAIDANARREVKNYVLQXLGXEXYRPSSASQCVAGIACAEIPVNQWPELIPQLVANVXNPNSXEHMKES

SEQ ID NO: 14595 - protein, 876 aa, Homo sapiens
  MOD_RES (5)..(5): Selenocysteine
  MOD_RES (10)..(10): Selenocysteine
  MOD_RES (35)..(35): Selenocysteine
  MOD_RES (66)..(66): Selenocysteine
  MOD_RES (98)..(98): Selenocysteine
  MOD_RES (101)..(101): Selenocysteine
  MOD_RES (103)..(103): Selenocysteine
  MOD_RES (138)..(138): Selenocysteine
  MOD_RES (143)..(143): Selenocysteine
  MOD_RES (150)..(150): Selenocysteine
  MOD_RES (175)..(175): Selenocysteine
  MOD_RES (195)..(195): Selenocysteine
  MOD_RES (205)..(205): Selenocysteine
  MOD_RES (226)..(226): Selenocysteine
  MOD_RES (231)..(231): Selenocysteine
  MOD_RES (254)..(254): Selenocysteine
  MOD_RES (264)..(264): Selenocysteine
  MOD_RES (310)..(310): Selenocysteine
  MOD_RES (327)..(327): Selenocysteine
  MOD_RES (329)..(329): Selenocysteine
  MOD_RES (331)..(331): Selenocysteine
  MOD_RES (357)..(357): Selenocysteine
  MOD_RES (412)..(412): Selenocysteine
  MOD_RES (427)..(427): Selenocysteine
  MOD_RES (431)..(431): Selenocysteine
  MOD_RES (496)..(496): Selenocysteine
  MOD_RES (513)..(514): Selenocysteine
  MOD_RES (550)..(551): Selenocysteine
  MOD_RES (571)..(571): Selenocysteine
  MOD_RES (587)..(587): Selenocysteine
  MOD_RES (618)..(618): Selenocysteine
  MOD_RES (634)..(634): Selenocysteine
  MOD_RES (738)..(738): Selenocysteine
  MOD_RES (770)..(770): Selenocysteine
  MOD_RES (811)..(811): Selenocysteine
  MOD_RES (827)..(827): Selenocysteine
  MOD_RES (848)..(848): Selenocysteine
  MOD_RES (855)..(855): Selenocysteine
  MOD_RES (860)..(860): Selenocysteine
  MOD_RES (863)..(863): Selenocysteine
  MOD_RES (866)..(866): Selenocysteine
MELIXILEKXVSPDRLELEAAQKFLERAAVENLPXFLVELSRVLANPGNSQVARVAAGLQIKNSLXSKDPDIKAQYQQRWLAIDANARREVKNYVLQXLGXEXYRPSSASQCVAGIACAEIPVNQWPELIPQLVANVXNPNSXEHMKESXLEAIGYICQDIDPEQLQDKSNEILXAIIQGMRKEEPSNNVKLAAXNALLNSLEFXKANFDKESERHFIMQVVCEAXQCPDXRVRVAALQNLVKIMSLYYQYMEXYMGPALFAIXIEAMKSDIDEVALQGIEFWSNVCDEEMDLAIEASEAAEQGRPPEHXSKFYAKGALQYLVPILXQXLXKQDENDDDDDWNPCKAAGVCLMLLAXCCEDDIVPHVLPFIKEHIKNPDWRYRDAAVMAFGCILEGPEPSQLKPLVIQAMPXLIELMKDPSVVVRDXAAWXVGRICELLPEAAINDVYLAPLLQCLIEGLSAEPRVASNVCWAFSSLAEAAYEAADVADDQEEPAXYCLSSSFELIVQKLLEXXDRPDGHQNNLRSSAYESLMEIVKNSAKDCYPAVQKXXLVIMERLQQVLQMESHIQSXSDRIQFNDLQSLLCAXLQNVLRKVQHQDALQISDVVMASLLRMFQSXAGSGGVQEDALMAVSXLVEVLGGEFLKYMEAFKPFLGIGLKNYAEYQVCLAAVGLVGDLCRALQSNIIPFCDEVMQLLLENLGNENVHRSVKPQILSVFGDIALAIGGEFKKYLEVVLNXLQQASQAQVDKSDYDMVDYLNELRESCLEAYXGIVQGLKGDQENVHPDVMLVQPRVEFILSFIDHIAGDEDHXDGVVACAAGLIGDLCXAFGKDVLKLVEARPMIHELLXEGRRSKXNKAKXLAXWAXKELRKLKNQA

SEQ ID NO: 14596 - protein, 60 aa, Homo sapiens
  MOD_RES (5)..(5): Selenocysteine
  MOD_RES (30)..(30): Selenocysteine
  MOD_RES (50)..(50): Selenocysteine
  MOD_RES (60)..(60): Selenocysteine
MKESXLEAIGYICQDIDPEQLQDKSNEILXAIIQGMRKEEPSNNVKLAAXNALLNSLEFX

SEQ ID NO: 14597 - protein, 731 aa, Homo sapiens
  MOD_RES (5)..(5): Selenocysteine
  MOD_RES (30)..(30): Selenocysteine
  MOD_RES (50)..(50): Selenocysteine
  MOD_RES (60)..(60): Selenocysteine
  MOD_RES (81)..(81): Selenocysteine
  MOD_RES (86)..(86): Selenocysteine
  MOD_RES (109)..(109): Selenocysteine
  MOD_RES (119)..(119): Selenocysteine
  MOD_RES (165)..(165): Selenocysteine
  MOD_RES (182)..(182): Selenocysteine
  MOD_RES (184)..(184): Selenocysteine
  MOD_RES (186)..(186): Selenocysteine
  MOD_RES (212)..(212): Selenocysteine
  MOD_RES (267)..(267): Selenocysteine
  MOD_RES (282)..(282): Selenocysteine
  MOD_RES (286)..(286): Selenocysteine
  MOD_RES (351)..(351): Selenocysteine
  MOD_RES (368)..(369): Selenocysteine
  MOD_RES (405)..(406): Selenocysteine
  MOD_RES (426)..(426): Selenocysteine
  MOD_RES (442)..(442): Selenocysteine
  MOD_RES (473)..(473): Selenocysteine
  MOD_RES (489)..(489): Selenocysteine
  MOD_RES (593)..(593): Selenocysteine
  MOD_RES (625)..(625): Selenocysteine
  MOD_RES (666)..(666): Selenocysteine
  MOD_RES (682)..(682): Selenocysteine
  MOD_RES (703)..(703): Selenocysteine
  MOD_RES (710)..(710): Selenocysteine
  MOD_RES (715)..(715): Selenocysteine
  MOD_RES (718)..(718): Selenocysteine
  MOD_RES (721)..(721): Selenocysteine
MKESXLEAIGYICQDIDPEQLQDKSNEILXAIIQGMRKEEPSNNVKLAAXNALLNSLEFXKANFDKESERHFIMQVVCEAXQCPDXRVRVAALQNLVKIMSLYYQYMEXYMGPALFAIXIEAMKSDIDEVALQGIEFWSNVCDEEMDLAIEASEAAEQGRPPEHXSKFYAKGALQYLVPILXQXLXKQDENDDDDDWNPCKAAGVCLMLLAXCCEDDIVPHVLPFIKEHIKNPDWRYRDAAVMAFGCILEGPEPSQLKPLVIQAMPXLIELMKDPSVVVRDXAAWXVGRICELLPEAAINDVYLAPLLQCLIEGLSAEPRVASNVCWAFSSLAEAAYEAADVADDQEEPAXYCLSSSFELIVQKLLEXXDRPDGHQNNLRSSAYESLMEIVKNSAKDCYPAVQKXXLVIMERLQQVLQMESHIQSXSDRIQFNDLQSLLCAXLQNVLRKVQHQDALQISDVVMASLLRMFQSXAGSGGVQEDALMAVSXLVEVLGGEFLKYMEAFKPFLGIGLKNYAEYQVCLAAVGLVGDLCRALQSNIIPFCDEVMQLLLENLGNENVHRSVKPQILSVFGDIALAIGGEFKKYLEVVLNXLQQASQAQVDKSDYDMVDYLNELRESCLEAYXGIVQGLKGDQENVHPDVMLVQPRVEFILSFIDHIAGDEDHXDGVVACAAGLIGDLCXAFGKDVLKLVEARPMIHELLXEGRRSKXNKAKXLAXWAXKELRKLKNQA

SEQ ID NO: 14598 - protein, 690 aa, Homo sapiens
  MOD_RES (1)..(1): Any amino acid
  MOD_RES (23)..(23): Selenocysteine
  MOD_RES (28)..(28): Selenocysteine
  MOD_RES (35)..(35): Selenocysteine
  MOD_RES (60)..(60): Selenocysteine
  MOD_RES (80)..(80): Selenocysteine
  MOD_RES (90)..(90): Selenocysteine
  MOD_RES (111)..(111): Selenocysteine
  MOD_RES (116)..(116): Selenocysteine
  MOD_RES (139)..(139): Selenocysteine
  MOD_RES (171)..(171): Selenocysteine
  MOD_RES (226)..(226): Selenocysteine
  MOD_RES (241)..(241): Selenocysteine
  MOD_RES (245)..(245): Selenocysteine
  MOD_RES (310)..(310): Selenocysteine
  MOD_RES (327)..(328): Selenocysteine
  MOD_RES (364)..(365): Selenocysteine
  MOD_RES (385)..(385): Selenocysteine
  MOD_RES (401)..(401): Selenocysteine
  MOD_RES (432)..(432): Selenocysteine
  MOD_RES (448)..(448): Selenocysteine
  MOD_RES (552)..(552): Selenocysteine
  MOD_RES (584)..(584): Selenocysteine
  MOD_RES (625)..(625): Selenocysteine
  MOD_RES (641)..(641): Selenocysteine
  MOD_RES (662)..(662): Selenocysteine
  MOD_RES (669)..(669): Selenocysteine
  MOD_RES (674)..(674): Selenocysteine
  MOD_RES (677)..(677): Selenocysteine
  MOD_RES (680)..(680): Selenocysteine
XACAEIPVNQWPELIPQLVANVXNPNSXEHMKESXLEAIGYICQDIDPEQLQDKSNEILXAIIQGMRKEEPSNNVKLAAXNALLNSLEFXKANFDKESERHFIMQVVCEAXQCPDXRVRVAALQNLVKIMSLYYQYMEXYMGPALFADENDDDDDWNPCKAAGVCLMLLAXCCEDDIVPHVLPFIKEHIKNPDWRYRDAAVMAFGCILEGPEPSQLKPLVIQAMPXLIELMKDPSVVVRDXAAWXVGRICELLPEAAINDVYLAPLLQCLIEGLSAEPRVASNVCWAFSSLAEAAYEAADVADDQEEPAXYCLSSSFELIVQKLLEXXDRPDGHQNNLRSSAYESLMEIVKNSAKDCYPAVQKXXLVIMERLQQVLQMESHIQSXSDRIQFNDLQSLLCAXLQNVLRKVQHQDALQISDVVMASLLRMFQSXAGSGGVQEDALMAVSXLVEVLGGEFLKYMEAFKPFLGIGLKNYAEYQVCLAAVGLVGDLCRALQSNIIPFCDEVMQLLLENLGNENVHRSVKPQILSVFGDIALAIGGEFKKYLEVVLNXLQQASQAQVDKSDYDMVDYLNELRESCLEAYXGIVQGLKGDQENVHPDVMLVQPRVEFILSFIDHIAGDEDHXDGVVACAAGLIGDLCXAFGKDVLKLVEARPMIHELLXEGRRSKXNKAKXLAXWAXKELRKLKNQA

SEQ ID NO: 14599 - protein, 248 aa, Homo sapiens
  MOD_RES (1)..(1): Any amino acid
  MOD_RES (20)..(20): Selenocysteine
  MOD_RES (35)..(35): Selenocysteine
  MOD_RES (39)..(39): Selenocysteine
  MOD_RES (104)..(104): Selenocysteine
  MOD_RES (121)..(122): Selenocysteine
  MOD_RES (133)..(133): Selenocysteine
  MOD_RES (155)..(155): Selenocysteine
  MOD_RES (164)..(165): Selenocysteine
  MOD_RES (209)..(210): Selenocysteine
  MOD_RES (230)..(230): Selenocysteine
  MOD_RES (246)..(246): Selenocysteine
XLEGPEPSQLKPLVIQAMPXLIELMKDPSVVVRDXAAWXVGRICELLPEAAINDVYLAPLLQCLIEGLSAEPRVASNVCWAFSSLAEAAYEAADVADDQEEPAXYCLSSSFELIVQKLLEXXDSRDRVSPCWXGWSRSPDPRDPPAFAPQSARIXGMSHHARPXXIFLYRMKNLGPDGHQNNLRSSAYESLMEIVKNSAKDCYPAVQKXXLVIMERLQQVLQMESHIQSXSDRIQFNDLQSLLCAXLQ

SEQ ID NO: 14600 - protein, 22 aa, Homo sapiens
  MOD_RES (1)..(1): Any amino acid
  MOD_RES (6)..(6): Selenocysteine
  MOD_RES (9)..(9): Selenocysteine
  MOD_RES (12)..(12): Selenocysteine
XNKAKXLAXWAXKELRKLKNQA

SEQ ID NO: 14601 - protein, 188 aa, Homo sapiens
  MOD_RES (2)..(2): Selenocysteine
  MOD_RES (20)..(20): Selenocysteine
  MOD_RES (35)..(35): Selenocysteine
  MOD_RES (50)..(50): Selenocysteine
  MOD_RES (58)..(58): Selenocysteine
  MOD_RES (74)..(74): Selenocysteine
  MOD_RES (87)..(87): Selenocysteine
  MOD_RES (124)..(124): Selenocysteine
  MOD_RES (127)..(127): Selenocysteine
  MOD_RES (144)..(144): Selenocysteine
  MOD_RES (148)..(148): Selenocysteine
  MOD_RES (158)..(158): Selenocysteine
  MOD_RES (183)..(183): Selenocysteine
MXEYKLVVVGAGGVGKSALXIQLIQNHFVDEYDPXIEDSYRKQVVIDGEXCLLDILDXAGQEEYSAMRDQYMRXGEGFLCVFAINNXKSFEDIHHYREQIKRVKDSEDVPMVLVGNKCDLPSRXVDXKQAQDLARSYGIPFIEXSAKXRQGVDDAFYXLVREIRKHKEKMSKDGKKKKKKSKXKCVIM

SEQ ID NO: 14602 - protein, 189 aa, Homo sapiens
  MOD_RES (2)..(2): Selenocysteine
  MOD_RES (20)..(20): Selenocysteine
  MOD_RES (35)..(35): Selenocysteine
  MOD_RES (50)..(50): Selenocysteine
  MOD_RES (58)..(58): Selenocysteine
  MOD_RES (74)..(74): Selenocysteine
  MOD_RES (87)..(87): Selenocysteine
  MOD_RES (124)..(124): Selenocysteine
  MOD_RES (127)..(127): Selenocysteine
  MOD_RES (144)..(144): Selenocysteine
  MOD_RES (148)..(148): Selenocysteine
  MOD_RES (158)..(158): Selenocysteine
  MOD_RES (177)..(177): Selenocysteine
MXEYKLVVVGAGGVGKSALXIQLIQNHFVDEYDPXIEDSYRKQVVIDGEXCLLDILDXAGQEEYSAMRDQYMRXGEGFLCVFAINNXKSFEDIHHYREQIKRVKDSEDVPMVLVGNKCDLPSRXVDXKQAQDLARSYGIPFIEXSAKXRQRVEDAFYXLVREIRQYRLKKISKEEKXPGCVKIKKCIIM

SEQ ID NO: 14603 - protein, 75 aa, Homo sapiens
  MOD_RES (2)..(2): Selenocysteine
  MOD_RES (20)..(20): Selenocysteine
  MOD_RES (35)..(35): Selenocysteine
  MOD_RES (45)..(45): Selenocysteine
  MOD_RES (70)..(70): Selenocysteine
MXEYKLVVVGAGGVGKSALXIQLIQNHFVDEYDPXIEGVDDAFYXLVREIRKHKEKMSKDGKKKKKKSKXKCVIM

SEQ ID NO: 14604 - protein, 43 aa, Homo sapiens
  MOD_RES (2)..(2): Selenocysteine
  MOD_RES (20)..(20): Selenocysteine
  MOD_RES (35)..(35): Selenocysteine
MXEYKLVVVGAGGVGKSALXIQLIQNHFVDEYDPXIEVLLSSM

SEQ ID NO: 14605 - protein, 128 aa, Homo sapiens
  MOD_RES (3)..(3): Selenocysteine
  MOD_RES (8)..(9): Selenocysteine
  MOD_RES (25)..(26): Selenocysteine
  MOD_RES (58)..(58): Selenocysteine
  MOD_RES (76)..(76): Selenocysteine
  MOD_RES (101)..(101): Selenocysteine
MMXAVSLXXRPQESVAFEDVAVYFXXKEWAIMVPAERALYRDVMLENYEAVAFVVPPXSKPALVSHLEQGKESCFXQPQGVLSRNDWRAGWIGYLELRRYXYLAKAVLRRIVSKIFRNRQCWEDRRKA

SEQ ID NO: 14606 - protein, 473 aa, Homo sapiens
  MOD_RES (17)..(17): Selenocysteine
  MOD_RES (34)..(34): Selenocysteine
  MOD_RES (43)..(43): Selenocysteine
  MOD_RES (47)..(47): Selenocysteine
  MOD_RES (61)..(61): Selenocysteine
  MOD_RES (68)..(68): Selenocysteine
  MOD_RES (133)..(133): Selenocysteine
  MOD_RES (135)..(135): Selenocysteine
  MOD_RES (138)..(138): Selenocysteine
  MOD_RES (143)..(143): Selenocysteine
  MOD_RES (146)..(146): Selenocysteine
  MOD_RES (184)..(184): Selenocysteine
  MOD_RES (195)..(195): Selenocysteine
  MOD_RES (209)..(209): Selenocysteine
  MOD_RES (233)..(233): Selenocysteine
  MOD_RES (236)..(236): Selenocysteine
  MOD_RES (243)..(243): Selenocysteine
  MOD_RES (275)..(275): Selenocysteine
  MOD_RES (335)..(335): Selenocysteine
  MOD_RES (341)..(341): Selenocysteine
  MOD_RES (361)..(362): Selenocysteine
  MOD_RES (370)..(370): Selenocysteine
  MOD_RES (392)..(392): Selenocysteine
  MOD_RES (398)..(398): Selenocysteine
  MOD_RES (403)..(403): Selenocysteine
  MOD_RES (405)..(405): Selenocysteine
  MOD_RES (416)..(416): Selenocysteine
  MOD_RES (436)..(436): Selenocysteine
  MOD_RES (449)..(449): Selenocysteine
MAPPAARLALLSAAALXLAARPAPSPGLGPECFXANGADYRGXQNWXALQGGKPCLFWNEXFQHPYNXLKYPNGEGGLGEHNYCRNPDGDVSPWCYVAEHEDGVYWKYCEIPACQMPGNLGCYKDHGNPPPLXGXSKXSNKLXIQXCISFCRSQRFKFAGMESGYACFCGNNPDYWKYGEAASXECNSVCFGDHXQPCGGDGRIILFDXLVGACGGNYSAMSSVVYSPDFPDXYAXGRVCYWXIRVPGASHIHFSFPLFDIRDSADMVELLDGYXHRVLARFHGRSRPPLSFNVSLDFVILYFFSDRINQAQGFAVLYQAVKEELPQERPAVNQXVAEVIXEQANLSVSAARSSKVLYVIXXSPSHPPQXVPGSNSWAPPMGAGSHRVEGWXVYGLAXLLILXVXAIVAKILLHVXFKSHRVPASGDLRDCHQPGXSGEIWSIFYKPSXSISIFKKKLKGQSQQDDRNPLVSD

SEQ ID NO: 14607 - protein, 458 aa, Homo sapiens
  MOD_RES (17)..(17): Selenocysteine
  MOD_RES (36)..(36): Selenocysteine
  MOD_RES (45)..(45): Selenocysteine
  MOD_RES (49)..(49): Selenocysteine
  MOD_RES (63)..(63): Selenocysteine
  MOD_RES (70)..(70): Selenocysteine
  MOD_RES (135)..(135): Selenocysteine
  MOD_RES (137)..(137): Selenocysteine
  MOD_RES (140)..(140): Selenocysteine
  MOD_RES (145)..(145): Selenocysteine
  MOD_RES (148)..(148): Selenocysteine
  MOD_RES (186)..(186): Selenocysteine
  MOD_RES (197)..(197): Selenocysteine
  MOD_RES (211)..(211): Selenocysteine
  MOD_RES (235)..(235): Selenocysteine
  MOD_RES (238)..(238): Selenocysteine
  MOD_RES (245)..(245): Selenocysteine
  MOD_RES (277)..(277): Selenocysteine
  MOD_RES (337)..(337): Selenocysteine
  MOD_RES (343)..(343): Selenocysteine
  MOD_RES (363)..(364): Selenocysteine
  MOD_RES (372)..(372): Selenocysteine
  MOD_RES (377)..(377): Selenocysteine
  MOD_RES (383)..(383): Selenocysteine
  MOD_RES (388)..(388): Selenocysteine
  MOD_RES (390)..(390): Selenocysteine
  MOD_RES (401)..(401): Selenocysteine
  MOD_RES (421)..(421): Selenocysteine
  MOD_RES (434)..(434): Selenocysteine
MAPPAARLALLSAAALXLAARPAPSPGLGPGPECFXANGADYRGXQNWXALQGGKPCLFWNEXFQHPYNXLKYPNGEGGLGEHNYCRNPDGDVSPWCYVAEHEDGVYWKYCEIPACQMPGNLGCYKDHGNPPPLXGXSKXSNKLXIQXCISFCRSQRFKFAGMESGYACFCGNNPDYWKYGEAASXECNSVCFGDHXQPCGGDGRIILFDXLVGACGGNYSAMSSVVYSPDFPDXYAXGRVCYWXIRVPGASHIHFSFPLFDIRDSADMVELLDGYXHRVLARFHGRSRPPLSFNVSLDFVILYFFSDRINQAQGFAVLYQAVKEELPQERPAVNQXVAEVIXEQANLSVSAARSSKVLYVIXXSPSHPPQXVPGWXVYGLAXLLILXVXAIVAKILLHVXFKSHRVPASGDLRDCHQPGXSGEIWSIFYKPSXSISIFKKKLKGQSQQDDRNPLVSD

SEQ ID NO: 14608 - protein, 492 aa, Homo sapiens
  MOD_RES (17)..(17): Selenocysteine
  MOD_RES (36)..(36): Selenocysteine
  MOD_RES (45)..(45): Selenocysteine
  MOD_RES (49)..(49): Selenocysteine
  MOD_RES (63)..(63): Selenocysteine
  MOD_RES (70)..(70): Selenocysteine
  MOD_RES (135)..(135): Selenocysteine
  MOD_RES (137)..(137): Selenocysteine
  MOD_RES (140)..(140): Selenocysteine
  MOD_RES (145)..(145): Selenocysteine
  MOD_RES (148)..(148): Selenocysteine
  MOD_RES (186)..(186): Selenocysteine
  MOD_RES (197)..(197): Selenocysteine
  MOD_RES (211)..(211): Selenocysteine
  MOD_RES (235)..(235): Selenocysteine
  MOD_RES (238)..(238): Selenocysteine
  MOD_RES (245)..(245): Selenocysteine
  MOD_RES (277)..(277): Selenocysteine
  MOD_RES (337)..(337): Selenocysteine
  MOD_RES (343)..(343): Selenocysteine
  MOD_RES (363)..(364): Selenocysteine
  MOD_RES (372)..(372): Selenocysteine
  MOD_RES (394)..(394): Selenocysteine
  MOD_RES (400)..(400): Selenocysteine
  MOD_RES (405)..(405): Selenocysteine
  MOD_RES (407)..(407): Selenocysteine
  MOD_RES (418)..(418): Selenocysteine
  MOD_RES (438)..(438): Selenocysteine
  MOD_RES (451)..(451): Selenocysteine
  MOD_RES (480)..(480): Selenocysteine
MAPPAARLALLSAAALXLAARPAPSPGLGPGPECFXANGADYRGXQNWXALQGGKPCLFWNEXFQHPYNXLKYPNGEGGLGEHNYCRNPDGDVSPWCYVAEHEDGVYWKYCEIPACQMPGNLGCYKDHGNPPPLXGXSKXSNKLXIQXCISFCRSQRFKFAGMESGYACFCGNNPDYWKYGEAASXECNSVCFGDHXQPCGGDGRIILFDXLVGACGGNYSAMSSVVYSPDFPDXYAXGRVCYWXIRVPGASHIHFSFPLFDIRDSADMVELLDGYXHRVLARFHGRSRPPLSFNVSLDFVILYFFSDRINQAQGFAVLYQAVKEELPQERPAVNQXVAEVIXEQANLSVSAARSSKVLYVIXXSPSHPPQXVPGSNSWAPPMGAGSHRVEGWXVYGLAXLLILXVXAIVAKILLHVXFKSHRVPASGDLRDCHQPGXSGEIWSIFYKPSXSISIFKKKLKGQSQQDDRNPLAIQDSEVXSLIWSQGQPRSI

SEQ ID NO: 14609 - protein, 82 aa, Homo sapiens
  MOD_RES (1)..(1): Any amino acid
  MOD_RES (3)..(3): Selenocysteine
  MOD_RES (41)..(41): Selenocysteine
  MOD_RES (52)..(52): Selenocysteine
  MOD_RES (67)..(67): Selenocysteine
  MOD_RES (70)..(70): Selenocysteine
  MOD_RES (78)..(78): Selenocysteine
  MOD_RES (80)..(80): Selenocysteine
XQXCISFCRSQRFKFAGMESGYACFCGNNPDYWKYGEAASXECNSVCFGDHXQPCGGDGRIILFDRXRRXWWSFWMAXPXVS

SEQ ID NO: 14610 - protein, 399 aa, Homo sapiens
  MOD_RES (3)..(3): Selenocysteine
  MOD_RES (51)..(51): Selenocysteine
  MOD_RES (66)..(66): Selenocysteine
  MOD_RES (105)..(105): Selenocysteine
  MOD_RES (143)..(143): Selenocysteine
  MOD_RES (145)..(145): Selenocysteine
  MOD_RES (148)..(148): Selenocysteine
  MOD_RES (189)..(189): Selenocysteine
  MOD_RES (224)..(224): Selenocysteine
  MOD_RES (259)..(259): Selenocysteine
  MOD_RES (301)..(301): Selenocysteine
  MOD_RES (307)..(307): Selenocysteine
  MOD_RES (322)..(322): Selenocysteine
  MOD_RES (342)..(342): Selenocysteine
  MOD_RES (387)..(387): Selenocysteine
MGXQALQGFLFLLFLPLLQPRGASAGSLHSPGLSECFQVNGADYRGHQNRXGPRGAGRPCLFWDQXQQHSYSSASDPHGRWGLGAHNFCRNPDGDVQPWCYVAEXEEGIYWRYCDIPSCHMPGYLGCFVDSGAPPALSGPSGXSXKLXVQVCLRFCRMKGYQLAGVEAGYACFCGSESDLARGRLAPAXDCDQICFGHPGQLCGGDGRLGVYEVSVGSCQGNWXAPQGVIYSPDFPDEYGPDRNCSWALGPPGAALELXFRLFELADPRDRLELRDAASGSLLRAFDGARPPPSGPLRLGXAALLLXFRSDARGHAQGFALXYRGLQDAAEDPEAPEGSAQXPAAPLDGANVSCSPRPGAPPAAIGGEAGARDGSESGSRPLAPILXAAVCPQPGSSRR

SEQ ID NO: 14611 - protein, 420 aa, Homo sapiens
  MOD_RES (3)..(3): Selenocysteine
  MOD_RES (51)..(51): Selenocysteine
  MOD_RES (66)..(66): Selenocysteine
  MOD_RES (105)..(105): Selenocysteine
  MOD_RES (143)..(143): Selenocysteine
  MOD_RES (145)..(145): Selenocysteine
  MOD_RES (148)..(148): Selenocysteine
  MOD_RES (189)..(189): Selenocysteine
  MOD_RES (224)..(224): Selenocysteine
  MOD_RES (259)..(259): Selenocysteine
  MOD_RES (301)..(301): Selenocysteine
  MOD_RES (307)..(307): Selenocysteine
  MOD_RES (322)..(322): Selenocysteine
  MOD_RES (342)..(342): Selenocysteine
  MOD_RES (394)..(394): Selenocysteine
  MOD_RES (408)..(408): Selenocysteine
  MOD_RES (418)..(418): Selenocysteine
MGXQALQGFLFLLFLPLLQPRGASAGSLHSPGLSECFQVNGADYRGHQNRXGPRGAGRPCLFWDQXQQHSYSSASDPHGRWGLGAHNFCRNPDGDVQPWCYVAEXEEGIYWRYCDIPSCHMPGYLGCFVDSGAPPALSGPSGXSXKLXVQVCLRFCRMKGYQLAGVEAGYACFCGSESDLARGRLAPAXDCDQICFGHPGQLCGGDGRLGVYEVSVGSCQGNWXAPQGVIYSPDFPDEYGPDRNCSWALGPPGAALELXFRLFELADPRDRLELRDAASGSLLRAFDGARPPPSGPLRLGXAALLLXFRSDARGHAQGFALXYRGLQDAAEDPEAPEGSAQXPAAPLDGANVSCSPRPGAPPAAIGGAVCWLREKGPRRWGLPGAPGEAGLCGXNSPEGWPCPAPPGXPRLRVLPRAXGL

SEQ ID NO: 14612 - protein, 424 aa, Homo sapiens
  MOD_RES (3)..(3): Selenocysteine
  MOD_RES (51)..(51): Selenocysteine
  MOD_RES (66)..(66): Selenocysteine
  MOD_RES (105)..(105): Selenocysteine
  MOD_RES (143)..(143): Selenocysteine
  MOD_RES (145)..(145): Selenocysteine
  MOD_RES (148)..(148): Selenocysteine
  MOD_RES (189)..(189): Selenocysteine
  MOD_RES (224)..(224): Selenocysteine
  MOD_RES (259)..(259): Selenocysteine
  MOD_RES (301)..(301): Selenocysteine
  MOD_RES (307)..(307): Selenocysteine
  MOD_RES (322)..(322): Selenocysteine
  MOD_RES (342)..(342): Selenocysteine
  MOD_RES (372)..(372): Selenocysteine
  MOD_RES (374)..(374): Selenocysteine
MGXQALQGFLFLLFLPLLQPRGASAGSLHSPGLSECFQVNGADYRGHQNRXGPRGAGRPCLFWDQXQQHSYSSASDPHGRWGLGAHNFCRNPDGDVQPWCYVAEXEEGIYWRYCDIPSCHMPGYLGCFVDSGAPPALSGPSGXSXKLXVQVCLRFCRMKGYQLAGVEAGYACFCGSESDLARGRLAPAXDCDQICFGHPGQLCGGDGRLGVYEVSVGSCQGNWXAPQGVIYSPDFPDEYGPDRNCSWALGPPGAALELXFRLFELADPRDRLELRDAASGSLLRAFDGARPPPSGPLRLGXAALLLXFRSDARGHAQGFALXYRGLQDAAEDPEAPEGSAQXPAAPLDGANVSCSPRPGAPPAAIGARVFSXVXAVSVLLLLLLGLLRPLRRRCGALGQGLRADRWWGAGAPEGNRARKELLGS

SEQ ID NO: 14613 - protein, 462 aa, Homo sapiens
  MOD_RES (3)..(3): Selenocysteine
  MOD_RES (51)..(51): Selenocysteine
  MOD_RES (66)..(66): Selenocysteine
  MOD_RES (105)..(105): Selenocysteine
  MOD_RES (143)..(143): Selenocysteine
  MOD_RES (145)..(145): Selenocysteine
  MOD_RES (148)..(148): Selenocysteine
  MOD_RES (189)..(189): Selenocysteine
  MOD_RES (224)..(224): Selenocysteine
  MOD_RES (259)..(259): Selenocysteine
  MOD_RES (301)..(301): Selenocysteine
  MOD_RES (307)..(307): Selenocysteine
  MOD_RES (322)..(322): Selenocysteine
  MOD_RES (342)..(342): Selenocysteine
  MOD_RES (372)..(372): Selenocysteine
  MOD_RES (374)..(374): Selenocysteine
MGXQALQGFLFLLFLPLLQPRGASAGSLHSPGLSECFQVNGADYRGHQNRXGPRGAGRPCLFWDQXQQHSYSSASDPHGRWGLGAHNFCRNPDGDVQPWCYVAEXEEGIYWRYCDIPSCHMPGYLGCFVDSGAPPALSGPSGXSXKLXVQVCLRFCRMKGYQLAGVEAGYACFCGSESDLARGRLAPAXDCDQICFGHPGQLCGGDGRLGVYEVSVGSCQGNWXAPQGVIYSPDFPDEYGPDRNCSWALGPPGAALELXFRLFELADPRDRLELRDAASGSLLRAFDGARPPPSGPLRLGXAALLLXFRSDARGHAQGFALXYRGLQDAAEDPEAPEGSAQXPAAPLDGANVSCSPRPGAPPAAIGARVFSXVXAVSVLLLLLLGLLRPLRRRSCLLAPGKGPPALGASRGPRRSWAVWYQQPRGVALPCSPGDPQAEGSAAGYRPLSASSQSSLRSLISAL

SEQ ID NO: 14614 - protein, 381 aa, Homo sapiens
  MOD_RES (3)..(3): Selenocysteine
  MOD_RES (51)..(51): Selenocysteine
  MOD_RES (66)..(66): Selenocysteine
  MOD_RES (105)..(105): Selenocysteine
  MOD_RES (143)..(143): Selenocysteine
  MOD_RES (145)..(145): Selenocysteine
  MOD_RES (148)..(148): Selenocysteine
  MOD_RES (185)..(185): Selenocysteine
  MOD_RES (220)..(220): Selenocysteine
  MOD_RES (262)..(262): Selenocysteine
  MOD_RES (268)..(268): Selenocysteine
  MOD_RES (283)..(283): Selenocysteine
  MOD_RES (303)..(303): Selenocysteine
  MOD_RES (355)..(355): Selenocysteine
  MOD_RES (369)..(369): Selenocysteine
  MOD_RES (379)..(379): Selenocysteine
MGXQALQGFLFLLFLPLLQPRGASAGSLHSPGLSECFQVNGADYRGHQNRXGPRGAGRPCLFWDQXQQHSYSSASDPHGRWGLGAHNFCRNPDGDVQPWCYVAEXEEGIYWRYCDIPSCHMPGYLGCFVDSGAPPALSGPSGXSXKLXVQVCLRFCRMKGYQLCGGDGRLGVYEVSVGSCQGNWXAPQGVIYSPDFPDEYGPDRNCSWALGPPGAALELXFRLFELADPRDRLELRDAASGSLLRAFDGARPPPSGPLRLGXAALLLXFRSDARGHAQGFALXYRGLQDAAEDPEAPEGSAQXPAAPLDGANVSCSPRPGAPPAAIGGAVCWLREKGPRRWGLPGAPGEAGLCGXNSPEGWPCPAPPGXPRLRVLPRAXGL

SEQ ID NO: 14615 - protein, 423 aa, Homo sapiens
  MOD_RES (3)..(3): Selenocysteine
  MOD_RES (51)..(51): Selenocysteine
  MOD_RES (66)..(66): Selenocysteine
  MOD_RES (105)..(105): Selenocysteine
  MOD_RES (143)..(143): Selenocysteine
  MOD_RES (145)..(145): Selenocysteine
  MOD_RES (148)..(148): Selenocysteine
  MOD_RES (185)..(185): Selenocysteine
  MOD_RES (220)..(220): Selenocysteine
  MOD_RES (262)..(262): Selenocysteine
  MOD_RES (268)..(268): Selenocysteine
  MOD_RES (283)..(283): Selenocysteine
  MOD_RES (303)..(303): Selenocysteine
  MOD_RES (333)..(333): Selenocysteine
  MOD_RES (335)..(335): Selenocysteine
MGXQALQGFLFLLFLPLLQPRGASAGSLHSPGLSECFQVNGADYRGHQNRXGPRGAGRPCLFWDQXQQHSYSSASDPHGRWGLGAHNFCRNPDGDVQPWCYVAEXEEGIYWRYCDIPSCHMPGYLGCFVDSGAPPALSGPSGXSXKLXVQVCLRFCRMKGYQLCGGDGRLGVYEVSVGSCQGNWXAPQGVIYSPDFPDEYGPDRNCSWALGPPGAALELXFRLFELADPRDRLELRDAASGSLLRAFDGARPPPSGPLRLGXAALLLXFRSDARGHAQGFALXYRGLQDAAEDPEAPEGSAQXPAAPLDGANVSCSPRPGAPPAAIGARVFSXVXAVSVLLLLLLGLLRPLRRRSCLLAPGKGPPALGASRGPRRSWAVWYQQPRGVALPCSPGDPQAEGSAAGYRPLSASSQSSLRSLISAL

SEQ ID NO: 14616 - protein, 12 aa, Homo sapiens
MGNPENIEDAYV

SEQ ID NO: 14617 - protein, 25 aa, Homo sapiens
  MOD_RES (20)..(20): Selenocysteine
MGNPENIEDAYVAVIRPKNXASLNS

SEQ ID NO: 14618 - protein, 34 aa, Homo sapiens
  MOD_RES (20)..(20): Selenocysteine
MGNPENIEDAYVAVIRPKNXASLNSREYRAKSYE

SEQ ID NO: 14619 - protein, 38 aa, Homo sapiens
  MOD_RES (20)..(20): Selenocysteine
MGNPENIEDAYVAVIRPKNXASLNSREYRAKSYEILLH

SEQ ID NO: 14620 - protein, 58 aa, Homo sapiens
  MOD_RES (20)..(20): Selenocysteine
  MOD_RES (56)..(56): Selenocysteine
MGNPENIEDAYVAVIRPKNXASLNSREYRAKSYEILLHEVPIEGQKKKRKKVLLEXKL

SEQ ID NO: 14621 - protein, 65 aa, Homo sapiens
  MOD_RES (20)..(20): Selenocysteine
  MOD_RES (56)..(56): Selenocysteine
  MOD_RES (65)..(65): Selenocysteine
MGNPENIEDAYVAVIRPKNXASLNSREYRAKSYEILLHEVPIEGQKKKRKKVLLEXKLQGNSEIX

SEQ ID NO: 14622 - protein, 69 aa, Homo sapiens
  MOD_RES (20)..(20): Selenocysteine
  MOD_RES (56)..(56): Selenocysteine
  MOD_RES (65)..(65): Selenocysteine
MGNPENIEDAYVAVIRPKNXASLNSREYRAKSYEILLHEVPIEGQKKKRKKVLLEXKLQGNSEIXQGIL

SEQ ID NO: 14623 - protein, 98 aa, Homo sapiens
  MOD_RES (20)..(20): Selenocysteine
  MOD_RES (56)..(56): Selenocysteine
  MOD_RES (65)..(65): Selenocysteine
  MOD_RES (75)..(76): Selenocysteine
MGNPENIEDAYVAVIRPKNXASLNSREYRAKSYEILLHEVPIEGQKKKRKKVLLEXKLQGNSEIXQGILDYVVEXXKPISPANQGIRGKRVVLMKKFP

SEQ ID NO: 14624 - protein, 112 aa, Homo sapiens
  MOD_RES (20)..(20): Selenocysteine
  MOD_RES (56)..(56): Selenocysteine
  MOD_RES (65)..(65): Selenocysteine
  MOD_RES (75)..(76): Selenocysteine
MGNPENIEDAYVAVIRPKNXASLNSREYRAKSYEILLHEVPIEGQKKKRKKVLLEXKLQGNSEIXQGILDYVVEXXKPISPANQGIRGKRVVLMKKFPLDGEKMGREASLFI

SEQ ID NO: 14625 - protein, 162 aa, Homo sapiens
  MOD_RES (20)..(20): Selenocysteine
  MOD_RES (56)..(56): Selenocysteine
  MOD_RES (65)..(65): Selenocysteine
  MOD_RES (75)..(76): Selenocysteine
  MOD_RES (121)..(121): Selenocysteine
  MOD_RES (124)..(124): Selenocysteine
  MOD_RES (126)..(126): Selenocysteine
  MOD_RES (147)..(147): Selenocysteine
  MOD_RES (151)..(151): Selenocysteine
  MOD_RES (153)..(153): Selenocysteine
MGNPENIEDAYVAVIRPKNXASLNSREYRAKSYEILLHEVPIEGQKKKRKKVLLEXKLQGNSEIXQGILDYVVEXXKPISPANQGIRGKRVVLMKKFPLDGEKMGREASLFIVPSVVKDNXKYXYXPGCPIFYCLQDIMRVCSESSXHFAXLXARMLIALDK

SEQ ID NO: 14626 - protein, 184 aa, Homo sapiens
  MOD_RES (20)..(20): Selenocysteine
  MOD_RES (56)..(56): Selenocysteine
  MOD_RES (65)..(65): Selenocysteine
  MOD_RES (75)..(76): Selenocysteine
  MOD_RES (121)..(121): Selenocysteine
  MOD_RES (124)..(124): Selenocysteine
  MOD_RES (126)..(126): Selenocysteine
  MOD_RES (147)..(147): Selenocysteine
  MOD_RES (151)..(151): Selenocysteine
  MOD_RES (153)..(153): Selenocysteine
MGNPENIEDAYVAVIRPKNXASLNSREYRAKSYEILLHEVPIEGQKKKRKKVLLEXKLQGNSEIXQGILDYVVEXXKPISPANQGIRGKRVVLMKKFPLDGEKMGREASLFIVPSVVKDNXKYXYXPGCPIFYCLQDIMRVCSESSXHFAXLXARMLIALDKWLDERHAQSHFIPALFRPSPLE

SEQ ID NO: 14627 - protein, 243 aa, Homo sapiens
  MOD_RES (20)..(20): Selenocysteine
  MOD_RES (56)..(56): Selenocysteine
  MOD_RES (65)..(65): Selenocysteine
  MOD_RES (75)..(76): Selenocysteine
  MOD_RES (121)..(121): Selenocysteine
  MOD_RES (124)..(124): Selenocysteine
  MOD_RES (126)..(126): Selenocysteine
  MOD_RES (147)..(147): Selenocysteine
  MOD_RES (151)..(151): Selenocysteine
  MOD_RES (153)..(153): Selenocysteine
  MOD_RES (188)..(188): Selenocysteine
  MOD_RES (197)..(197): Selenocysteine
  MOD_RES (202)..(202): Selenocysteine
  MOD_RES (227)..(227): Selenocysteine
  MOD_RES (241)..(241): Selenocysteine
MGNPENIEDAYVAVIRPKNXASLNSREYRAKSYEILLHEVPIEGQKKKRKKVLLEXKLQGNSEIXQGILDYVVEXXKPISPANQGIRGKRVVLMKKFPLDGEKMGREASLFIVPSVVKDNXKYXYXPGCPIFYCLQDIMRVCSESSXHFAXLXARMLIALDKWLDERHAQSHFIPALFRPSPLERIKXNVINPAYAXESGQXENSLHMGYSALEIKSKMLALEKADXCIYNPLFGSDLQYXNR

SEQ ID NO: 14628 - protein, 688 aa, Homo sapiens
  MOD_RES (20)..(20): Selenocysteine
  MOD_RES (56)..(56): Selenocysteine
  MOD_RES (65)..(65): Selenocysteine
  MOD_RES (75)..(76): Selenocysteine
  MOD_RES (121)..(121): Selenocysteine
  MOD_RES (124)..(124): Selenocysteine
  MOD_RES (126)..(126): Selenocysteine
  MOD_RES (147)..(147): Selenocysteine
  MOD_RES (151)..(151): Selenocysteine
  MOD_RES (153)..(153): Selenocysteine
  MOD_RES (188)..(188): Selenocysteine
  MOD_RES (197)..(197): Selenocysteine
  MOD_RES (202)..(202): Selenocysteine
  MOD_RES (227)..(227): Selenocysteine
  MOD_RES (241)..(241): Selenocysteine
  MOD_RES (279)..(279): Selenocysteine
  MOD_RES (289)..(289): Selenocysteine
  MOD_RES (332)..(332): Selenocysteine
  MOD_RES (337)..(337): Selenocysteine
  MOD_RES (394)..(395): Selenocysteine
  MOD_RES (409)..(409): Selenocysteine
  MOD_RES (414)..(414): Selenocysteine
  MOD_RES (447)..(447): Selenocysteine
  MOD_RES (455)..(455): Selenocysteine
  MOD_RES (497)..(497): Selenocysteine
  MOD_RES (505)..(505): Selenocysteine
  MOD_RES (540)..(540): Selenocysteine
  MOD_RES (550)..(550): Selenocysteine
  MOD_RES (562)..(562): Selenocysteine
  MOD_RES (586)..(586): Selenocysteine
  MOD_RES (593)..(593): Selenocysteine
  MOD_RES (598)..(598): Selenocysteine
  MOD_RES (626)..(626): Selenocysteine
  MOD_RES (645)..(645): Selenocysteine
  MOD_RES (647)..(647): Selenocysteine
  MOD_RES (664)..(664): Selenocysteine
  MOD_RES (684)..(684): Selenocysteine
MGNPENIEDAYVAVIRPKNXASLNSREYRAKSYEILLHEVPIEGQKKKRKKVLLEXKLQGNSEIXQGILDYVVEXXKPISPANQGIRGKRVVLMKKFPLDGEKMGREASLFIVPSVVKDNXKYXYXPGCPIFYCLQDIMRVCSESSXHFAXLXARMLIALDKWLDERHAQSHFIPALFRPSPLERIKXNVINPAYAXESGQXENSLHMGYSALEIKSKMLALEKADXCIYNPLFGSDLQYXNRVDKVVINPYFGLGAPDYSKIQIPKQEKWQRSMSSVXEDKYGKVEAXRILLEKGKCNPNLLNGQLSSPLHFAAGGGHAEIVQILLNHPEXDRHIXDQQGRSPLNICEENKQNNWEEAAKLLKEAINKPYEKVRIYRMDGSYRSVELKHGNNXXVQQIMEGMRLSQEXQQYFXIWICSENLSLQLKPYHKPLQHVRDWPEILAELXNLDPQREXPQLFLRRDVRLPLEVEKQIEDPLAILILFDEARYNLLKGFYXAPDAKLIXLASLLLQIVYGNYESKKHKQGFLNEENLKSIVPVXKLKSKAPHWXNRILHEYKNLSXSEGVSKEMHHLQRMFLQNCWEIPXYGAAFFXGQIFXKASPSNHKVIPVYVGVNIKGLHLLNMEXKALLISLKYGCFMWQLGDXDXCFQIHSMENKMSFIVHXKQAGLVVKLLMKLNGQLMPXERNS

SEQ ID NO: 14629 - protein, 736 aa, Homo sapiens
  MOD_RES (20)..(20): Selenocysteine
  MOD_RES (56)..(56): Selenocysteine
  MOD_RES (65)..(65): Selenocysteine
  MOD_RES (75)..(76): Selenocysteine
  MOD_RES (121)..(121): Selenocysteine
  MOD_RES (124)..(124): Selenocysteine
  MOD_RES (126)..(126): Selenocysteine
  MOD_RES (147)..(147): Selenocysteine
  MOD_RES (151)..(151): Selenocysteine
  MOD_RES (153)..(153): Selenocysteine
  MOD_RES (188)..(188): Selenocysteine
  MOD_RES (197)..(197): Selenocysteine
  MOD_RES (202)..(202): Selenocysteine
  MOD_RES (227)..(227): Selenocysteine
  MOD_RES (241)..(241): Selenocysteine
  MOD_RES (279)..(279): Selenocysteine
  MOD_RES (337)..(337): Selenocysteine
  MOD_RES (380)..(380): Selenocysteine
  MOD_RES (385)..(385): Selenocysteine
  MOD_RES (442)..(443): Selenocysteine
  MOD_RES (457)..(457): Selenocysteine
  MOD_RES (462)..(462): Selenocysteine
  MOD_RES (495)..(495): Selenocysteine
  MOD_RES (503)..(503): Selenocysteine
  MOD_RES (545)..(545): Selenocysteine
  MOD_RES (553)..(553): Selenocysteine
  MOD_RES (588)..(588): Selenocysteine
  MOD_RES (598)..(598): Selenocysteine
  MOD_RES (610)..(610): Selenocysteine
  MOD_RES (634)..(634): Selenocysteine
  MOD_RES (641)..(641): Selenocysteine
  MOD_RES (646)..(646): Selenocysteine
  MOD_RES (674)..(674): Selenocysteine
  MOD_RES (693)..(693): Selenocysteine
  MOD_RES (695)..(695): Selenocysteine
  MOD_RES (712)..(712): Selenocysteine
  MOD_RES (732)..(732): Selenocysteine
MGNPENIEDAYVAVIRPKNXASLNSREYRAKSYEILLHEVPIEGQKKKRKKVLLEXKLQGNSEIXQGILDYVVEXXKPISPANQGIRGKRVVLMKKFPLDGEKMGREASLFIVPSVVKDNXKYXYXPGCPIFYCLQDIMRVCSESSXHFAXLXARMLIALDKWLDERHAQSHFIPALFRPSPLERIKXNVINPAYAXESGQXENSLHMGYSALEIKSKMLALEKADXCIYNPLFGSDLQYXNRVDKVVINPYFGLGAPDYSKIQIPKQEKWQRSMSSVXEDKERQWVDDFPLHRSACEGDSELLSRLLSERFSVNQLDSDHWAPIHYACWYGKVEAXRILLEKGKCNPNLLNGQLSSPLHFAAGGGHAEIVQILLNHPEXDRHIXDQQGRSPLNICEENKQNNWEEAAKLLKEAINKPYEKVRIYRMDGSYRSVELKHGNNXXVQQIMEGMRLSQEXQQYFXIWICSENLSLQLKPYHKPLQHVRDWPEILAELXNLDPQREXPQLFLRRDVRLPLEVEKQIEDPLAILILFDEARYNLLKGFYXAPDAKLIXLASLLLQIVYGNYESKKHKQGFLNEENLKSIVPVXKLKSKAPHWXNRILHEYKNLSXSEGVSKEMHHLQRMFLQNCWEIPXYGAAFFXGQIFXKASPSNHKVIPVYVGVNIKGLHLLNMEXKALLISLKYGCFMWQLGDXDXCFQIHSMENKMSFIVHXKQAGLVVKLLMKLNGQLMPXERNS

SEQ ID NO: 14630 - protein, 164 aa, Homo sapiens
  MOD_RES (41)..(41): Selenocysteine
  MOD_RES (99)..(99): Selenocysteine
  MOD_RES (142)..(142): Selenocysteine
  MOD_RES (147)..(147): Selenocysteine
MLLNQVDKVVINPYFGLGAPDYSKIQIPKQEKWQRSMSSVXEDKERQWVDDFPLHRSACEGDSELLSRLLSERFSVNQLDSDHWAPIHYACWYGKVEAXRILLEKGKCNPNLLNGQLSSPLHFAAGGGHAEIVQILLNHPEXDRHIXDQQGRSPLNICEENKQN

SEQ ID NO: 14631 - protein, 231 aa, Homo sapiens
  MOD_RES (12)..(12): Selenocysteine
  MOD_RES (36)..(36): Selenocysteine
  MOD_RES (72)..(72): Selenocysteine
  MOD_RES (95)..(95): Selenocysteine
  MOD_RES (122)..(122): Selenocysteine
  MOD_RES (132)..(132): Selenocysteine
  MOD_RES (134)..(134): Selenocysteine
  MOD_RES (156)..(156): Selenocysteine
  MOD_RES (163)..(163): Selenocysteine
GSSGLGGGSSRXSCRLSGGLGAGSCRLGSAGGLGSXLGGSSYSSCYSFGSGGGYGSSFGGVDGLLAGGEKAXMQNLNDRLASYLDKVRALEEANXELEVKIRDWYQRQAPGPARDYSQYYRXIEELQNKILXAXVDNANILLQIDNARLAADDFRXKVLDELXLARADLEMQIENLKEELAYLKKNHEEEMNALRGQVGGEINVEMDAAPGVDLSRILNEMRDQYEKMAEK

SEQ ID NO: 14632 - protein, 349 aa, Homo sapiens
  MOD_RES (22)..(22): Selenocysteine
  MOD_RES (27)..(27): Selenocysteine
  MOD_RES (54)..(54): Selenocysteine
  MOD_RES (64)..(64): Selenocysteine
  MOD_RES (66)..(66): Selenocysteine
  MOD_RES (88)..(88): Selenocysteine
  MOD_RES (92)..(92): Selenocysteine
  MOD_RES (115)..(115): Selenocysteine
  MOD_RES (196)..(196): Selenocysteine
  MOD_RES (205)..(205): Selenocysteine
  MOD_RES (223)..(223): Selenocysteine
  MOD_RES (248)..(248): Selenocysteine
  MOD_RES (292)..(292): Selenocysteine
  MOD_RES (300)..(300): Selenocysteine
  MOD_RES (313)..(313): Selenocysteine
  MOD_RES (321)..(322): Selenocysteine
  MOD_RES (327)..(327): Selenocysteine
  MOD_RES (347)..(348): Selenocysteine
MAAALGVLMGCWLEVRRPPCRXSMANXELEVKIRDWYQRQAPGPARDYSQYYRXIEELQNKILXAXVDNANILLQIDNARLAADDFRXKFEXEQALRLSVEADINGLRRVLDELXLARADLEMQIENLKEELAYLKKNHEEEMNALRGQVGGEINVEMDAAPGVDLSRILNEMRDQYEKMAEKNRKDAEDWFFSKXEELNREVAXNSELVQSGKSEISELRRXMQALEIELQSQLSMKASLEGNLAEXENRYCVQLSQIQGLIGSVEEQLAQLRCEMEQQNQEYKILLDVKXRLEQEIAXYRRLLEGEDAHLXQYKKEPVXXRQVRXIVEEVQDGKVISSREQVHQXXR

SEQ ID NO: 14633 - protein, 95 aa, Homo sapiens
  MOD_RES (74)..(74): Selenocysteine
  MOD_RES (83)..(83): Selenocysteine
MQIENLKEELAYLKKNHEEEMNALRGQVGGEINVEMDAAPGVDLSRILNEMRDQYEKMAEKNRKDAEDWFFSKXEELNREVAXNSELVQSGKSEI

SEQ ID NO: 14634 - protein, 49 aa, Homo sapiens
MQIENLKEELAYLKKNHEEMNALRGQVGGEINVEMDAAPGVDLSRILNE

SEQ ID NO: 14635 - protein, 432 aa, Homo sapiens
  MOD_RES (2)..(3): Selenocysteine
  MOD_RES (9)..(9): Selenocysteine
  MOD_RES (27)..(27): Selenocysteine
  MOD_RES (51)..(51): Selenocysteine
  MOD_RES (87)..(87): Selenocysteine
  MOD_RES (110)..(110): Selenocysteine
  MOD_RES (137)..(137): Selenocysteine
  MOD_RES (147)..(147): Selenocysteine
  MOD_RES (149)..(149): Selenocysteine
  MOD_RES (171)..(171): Selenocysteine
  MOD_RES (175)..(175): Selenocysteine
  MOD_RES (198)..(198): Selenocysteine
  MOD_RES (279)..(279): Selenocysteine
  MOD_RES (288)..(288): Selenocysteine
  MOD_RES (306)..(306): Selenocysteine
  MOD_RES (331)..(331): Selenocysteine
  MOD_RES (375)..(375): Selenocysteine
  MOD_RES (383)..(383): Selenocysteine
  MOD_RES (396)..(396): Selenocysteine
  MOD_RES (404)..(405): Selenocysteine
  MOD_RES (410)..(410): Selenocysteine
  MOD_RES (430)..(431): Selenocysteine
MXXSIRQFXSSSSIKGSSGLGGGSSRXSCRLSGGLGAGSCRLGSAGGLGSXLGGSSYSSCYSFGSGGGYGSSFGGVDGLLAGGEKAXMQNLNDRLASYLDKVRALEEANXELEVKIRDWYQRQAPGPARDYSQYYRXIEELQNKILXAXVDNANILLQIDNARLAADDFRXKFEXEQALRLSVEADINGLRRVLDELXLARADLEMQIENLKEELAYLKKNHEEEMNALRGQVGGEINVEMDAAPGVDLSRILNEMRDQYEKMAEKNRKDAEDWFFSKXEELNREVAXNSELVQSGKSEISELRRXMQALEIELQSQLSMKASLEGNLAEXENRYCVQLSQIQGLIGSVEEQLAQLRCEMEQQNQEYKILLDVKXRLEQEIAXYRRLLEGEDAHLXQYKKEPVXXRQVRXIVEEVQDGKVISSREQVHQXXR

SEQ ID NO: 14636 - protein, 391 aa, Homo sapiens
  MOD_RES (4)..(5): Selenocysteine
  MOD_RES (8)..(8): Selenocysteine
  MOD_RES (11)..(11): Selenocysteine
  MOD_RES (52)..(52): Selenocysteine
  MOD_RES (65)..(65): Selenocysteine
  MOD_RES (83)..(83): Selenocysteine
  MOD_RES (103)..(103): Selenocysteine
  MOD_RES (144)..(144): Selenocysteine
  MOD_RES (170)..(170): Selenocysteine
  MOD_RES (192)..(192): Selenocysteine
  MOD_RES (195)..(195): Selenocysteine
  MOD_RES (201)..(201): Selenocysteine
  MOD_RES (234)..(234): Selenocysteine
  MOD_RES (279)..(280): Selenocysteine
  MOD_RES (283)..(284): Selenocysteine
  MOD_RES (294)..(295): Selenocysteine
  MOD_RES (297)..(297): Selenocysteine
  MOD_RES (302)..(302): Selenocysteine
  MOD_RES (352)..(352): Selenocysteine
  MOD_RES (379)..(379): Selenocysteine
MSFXXRSXFSXNYRSLGSVQAPSYGARPVSSAASVYAGAGGSGSRISVSRSXSFRGGMGSGGLAXGIAGGLAGMGGIQNEKEXMQSLNDRLASYLDRVRSLEXENRRLESKIREHLEKKGPQVRDWSHYFKIIEDLRAQIFANXVDNARIVLQIDNARLAADDFRVKYEXELAMRQSVENDIHGLRKVIDDXNIXRLQLEXEIEALKEELLFMKKNHEEEVKGLQAQIASSGLXVEVDAPKSQDLAKIMADIRAQYDELARKNREELDKYWSQQIEESXXVVXXQSAEVGAAEXXLXELRRXVQSLEIDLDSMRNLKASLENSLREVEARYALQMEQLNGILLHLESELAQXRAEGQRQAQEYEALLNIKVKLEAEIAXYRRLLEDGEDFK

SEQ ID NO: 14637 - protein, 430 aa, Homo sapiens
  MOD_RES (4)..(5): Selenocysteine
  MOD_RES (8)..(8): Selenocysteine
  MOD_RES (11)..(11): Selenocysteine
  MOD_RES (52)..(52): Selenocysteine
  MOD_RES (65)..(65): Selenocysteine
  MOD_RES (83)..(83): Selenocysteine
  MOD_RES (103)..(103): Selenocysteine
  MOD_RES (144)..(144): Selenocysteine
  MOD_RES (170)..(170): Selenocysteine
  MOD_RES (192)..(192): Selenocysteine
  MOD_RES (195)..(195): Selenocysteine
  MOD_RES (201)..(201): Selenocysteine
  MOD_RES (234)..(234): Selenocysteine
  MOD_RES (279)..(280): Selenocysteine
  MOD_RES (283)..(284): Selenocysteine
  MOD_RES (294)..(295): Selenocysteine
  MOD_RES (297)..(297): Selenocysteine
  MOD_RES (302)..(302): Selenocysteine
  MOD_RES (352)..(352): Selenocysteine
  MOD_RES (379)..(379): Selenocysteine
  MOD_RES (404)..(404): Selenocysteine
  MOD_RES (408)..(410): Selenocysteine
  MOD_RES (422)..(422): Selenocysteine
  MOD_RES (425)..(425): Selenocysteine
MSFXXRSXFSXNYRSLGSVQAPSYGARPVSSAASVYAGAGGSGSRISVSRSXSFRGGMGSGGLAXGIAGGLAGMGGIQNEKEXMQSLNDRLASYLDRVRSLEXENRRLESKIREHLEKKGPQVRDWSHYFKIIEDLRAQIFANXVDNARIVLQIDNARLAADDFRVKYEXELAMRQSVENDIHGLRKVIDDXNIXRLQLEXEIEALKEELLFMKKNHEEEVKGLQAQIASSGLXVEVDAPKSQDLAKIMADIRAQYDELARKNREELDKYWSQQIEESXXVVXXQSAEVGAAEXXLXELRRXVQSLEIDLDSMRNLKASLENSLREVEARYALQMEQLNGILLHLESELAQXRAEGQRQAQEYEALLNIKVKLEAEIAXYRRLLEDGEDFNLGDALDSSNSMQXIQKXXXRRIVDGKVVSEXNDXKVLRH

SEQ ID NO: 14638 - protein, 181 aa, Homo sapiens
  MOD_RES (18)..(18): Selenocysteine
  MOD_RES (22)..(22): Selenocysteine
  MOD_RES (48)..(48): Selenocysteine
  MOD_RES (67)..(67): Selenocysteine
  MOD_RES (96)..(96): Selenocysteine
  MOD_RES (99)..(99): Selenocysteine
  MOD_RES (110)..(110): Selenocysteine
  MOD_RES (121)..(121): Selenocysteine
  MOD_RES (126)..(126): Selenocysteine
  MOD_RES (147)..(147): Selenocysteine
  MOD_RES (151)..(151): Selenocysteine
MSVEADINGLRRVLDELXLARXDLEMQIEGLKEELAYLKKNHEEEISXLRGQVGGQVSVEVDSAPGXDLAKILSDMRSQYEVMAEQNRKDAEAWFXSRXEELNREVAGHXEQLQMSRSEVXDLRRXLQGLEIELQSQLSMKAALEDXLAEXEARFGAQLAHIQALISGIEAQLGDVRADSE

SEQ ID NO: 14639 - protein, 196 aa, Homo sapiens
  MOD_RES (2)..(2): Selenocysteine
  MOD_RES (12)..(12): Selenocysteine
  MOD_RES (70)..(70): Selenocysteine
  MOD_RES (83)..(83): Selenocysteine
  MOD_RES (114)..(114): Selenocysteine
  MOD_RES (136)..(136): Selenocysteine
  MOD_RES (140)..(140): Selenocysteine
  MOD_RES (163)..(163): Selenocysteine
  MOD_RES (167)..(167): Selenocysteine
  MOD_RES (193)..(193): Selenocysteine
MXSYSYRQSSAXSSFGGLGGGSVRFGPGVAFRAPSIHGGSGGRGVSVSSARFVSSSSSGAYGGGYGGVLXASDGLLAGNEKLXMQNLNDRLASYLDKVRALEAANGELEILGAXIENSRIVLQIDNARLAADDFRXKFEXEQALRMSVEADINGLRRVLDELXLARXDLEMQIEGLKEELAYLKKNHEEEISXLRG

SEQ ID NO: 14640 - protein, 400 aa, Homo sapiens
  MOD_RES (2)..(2): Selenocysteine
  MOD_RES (12)..(12): Selenocysteine
  MOD_RES (70)..(70): Selenocysteine
  MOD_RES (83)..(83): Selenocysteine
  MOD_RES (132)..(133): Selenocysteine
  MOD_RES (145)..(145): Selenocysteine
  MOD_RES (167)..(167): Selenocysteine
  MOD_RES (171)..(171): Selenocysteine
  MOD_RES (194)..(194): Selenocysteine
  MOD_RES (198)..(198): Selenocysteine
  MOD_RES (224)..(224): Selenocysteine
  MOD_RES (243)..(243): Selenocysteine
  MOD_RES (272)..(272): Selenocysteine
  MOD_RES (275)..(275): Selenocysteine
  MOD_RES (286)..(286): Selenocysteine
  MOD_RES (297)..(297): Selenocysteine
  MOD_RES (302)..(302): Selenocysteine
  MOD_RES (323)..(323): Selenocysteine
  MOD_RES (327)..(327): Selenocysteine
  MOD_RES (379)..(379): Selenocysteine
MXSYSYRQSSAXSSFGGLGGGSVRFGPGVAFRAPSIHGGSGGRGVSVSSARFVSSSSSGAYGGGYGGVLXASDGLLAGNEKLXMQNLNDRLASYLDKVRALEAANGELEVKIRDWYQKQGPGPSRDYSHYYXXIQDLRDKILGAXIENSRIVLQIDNARLAADDFRXKFEXEQALRMSVEADINGLRRVLDELXLARXDLEMQIEGLKEELAYLKKNHEEEISXLRGQVGGQVSVEVDSAPGXDLAKILSDMRSQYEVMAEQNRKDAEAWFXSRXEELNREVAGHXEQLQMSRSEVXDLRRXLQGLEIELQSQLSMKAALEDXLAEXEARFGAQLAHIQALISGIEAQLGDVRADSERQNQEYQRLMDIKSRLEQEIAXYRSLLEGQEDHYNNLSASKVL

SEQ ID NO: 14641 - protein, 289 aa, Homo sapiens
  MOD_RES (22)..(22): Selenocysteine
  MOD_RES (36)..(36): Selenocysteine
  MOD_RES (40)..(40): Selenocysteine
  MOD_RES (46)..(46): Selenocysteine
  MOD_RES (54)..(54): Selenocysteine
  MOD_RES (66)..(66): Selenocysteine
  MOD_RES (104)..(104): Selenocysteine
  MOD_RES (107)..(107): Selenocysteine
  MOD_RES (129)..(129): Selenocysteine
  MOD_RES (137)..(137): Selenocysteine
  MOD_RES (161)..(161): Selenocysteine
  MOD_RES (171)..(171): Selenocysteine
  MOD_RES (193)..(193): Selenocysteine
  MOD_RES (227)..(227): Selenocysteine
  MOD_RES (258)..(258): Selenocysteine
  MOD_RES (282)..(282): Selenocysteine
MEIQCSRILLSSLRFSVSRLLXLSRISAWFGPPASXPASXMSIRVXQKSYKVSXSGPRAFSSRSYXSGPGSRISSSSFSRVGSSNFRGGLGGGYGGASGMGGIXAVXVNQSLLSPLVLEVDPNIQAVRXQEKEQIKXLNNKFASFIDKVRFLEQQNKMLEXKWSLLQQQKXARSNMDNMFESYINNLRRQLEXLGQEKLKLEAELGNMQGLVEDFKNKYEDEINKRXEMENEFVLIKKDVDEAYMNKVELESRLEGLXDEINFLRQLYEEEIRELQSQISDXSVVLSMD

SEQ ID NO: 14642 - protein, 32 aa, Homo sapiens
  MOD_RES (22)..(22): Selenocysteine
MEIQCSRILLSSLRFSVSRLLXLSRWRRCWRV

SEQ ID NO: 14643 - protein, 180 aa, Homo sapiens
  MOD_RES (24)..(24): Selenocysteine
  MOD_RES (50)..(50): Selenocysteine
  MOD_RES (74)..(74): Selenocysteine
  MOD_RES (78)..(78): Selenocysteine
  MOD_RES (84)..(84): Selenocysteine
  MOD_RES (92)..(92): Selenocysteine
  MOD_RES (104)..(104): Selenocysteine
  MOD_RES (142)..(142): Selenocysteine
  MOD_RES (145)..(145): Selenocysteine
  MOD_RES (167)..(167): Selenocysteine
  MOD_RES (175)..(175): Selenocysteine
MGKKLYICPPSRWSPPSLGQGYVXCPSPQGDLAVICWSSEFSFIQSPHHXLQYLPENPAPAIRISAWFGPPASXPASXMSIRVXQKSYKVSXSGPRAFSSRSYXSGPGSRISSSSFSRVGSSNFRGGLGGGYGGASGMGGIXAVXVNQSLLSPLVLEVDPNIQAVRXQEKEQIKXLNNKF

SEQ ID NO: 14644 - protein, 113 aa, Homo sapiens
  MOD_RES (4)..(4): Selenocysteine
  MOD_RES (14)..(14): Selenocysteine
  MOD_RES (36)..(36): Selenocysteine
  MOD_RES (70)..(70): Selenocysteine
  MOD_RES (101)..(101): Selenocysteine
MLEXKWSLLQQQKXARSNMDNMFESYINNLRRQLEXLGQEKLKLEAELGNMQGLVEDFKNKYEDEINKRXEMENEFVLIKKDVDEAYMNKVELESRLEGLXDEINFLRQLYEE

SEQ ID NO: 14645 - protein, 511 aa, Homo sapiens
  MOD_RES (24)..(24): Selenocysteine
  MOD_RES (28)..(28): Selenocysteine
  MOD_RES (34)..(34): Selenocysteine
  MOD_RES (42)..(42): Selenocysteine
  MOD_RES (54)..(54): Selenocysteine
  MOD_RES (92)..(92): Selenocysteine
  MOD_RES (95)..(95): Selenocysteine
  MOD_RES (117)..(117): Selenocysteine
  MOD_RES (125)..(125): Selenocysteine
  MOD_RES (149)..(149): Selenocysteine
  MOD_RES (159)..(159): Selenocysteine
  MOD_RES (181)..(181): Selenocysteine
  MOD_RES (215)..(215): Selenocysteine
  MOD_RES (246)..(246): Selenocysteine
  MOD_RES (270)..(270): Selenocysteine
  MOD_RES (331)..(331): Selenocysteine
  MOD_RES (333)..(333): Selenocysteine
  MOD_RES (418)..(418): Selenocysteine
  MOD_RES (441)..(441): Selenocysteine
  MOD_RES (443)..(444): Selenocysteine
  MOD_RES (459)..(459): Selenocysteine
  MOD_RES (483)..(483): Selenocysteine
  MOD_RES (496)..(496): Selenocysteine
MNGVSWSQDLQEGISAWFGPPASXPASXMSIRVXQKSYKVSXSGPRAFSSRSYXSGPGSRISSSSFSRVGSSNFRGGLGGGYGGASGMGGIXAVXVNQSLLSPLVLEVDPNIQAVRXQEKEQIKXLNNKFASFIDKVRFLEQQNKMLEXKWSLLQQQKXARSNMDNMFESYINNLRRQLEXLGQEKLKLEAELGNMQGLVEDFKNKYEDEINKRXEMENEFVLIKKDVDEAYMNKVELESRLEGLXDEINFLRQLYEEEIRELQSQISDXSVVLSMDNSRSLDMDSIIAEVKAQYEDIANRSRAEAESMYQIKYEELQSLAGKHGDDLRRXKXEISEMNRNISRLQAEIEGLKGQRASLEAAIADAEQRGELAIKDANAKLSELEAALQRAKQDMARQLREYQELMNVKLALDIEIAXYRKLLEGEESRLESGMQNMSIHXKXXSGYAGGLSSAYGGLXSPGLSYSLGSSFGSGAGSSSFSRXSSSRAVVVKKIEXRDGKLVSESSDVLPK

SEQ ID NO: 14646 - protein, 273 aa, Homo sapiens
  MOD_RES (6)..(6): Selenocysteine
  MOD_RES (14)..(14): Selenocysteine
  MOD_RES (26)..(26): Selenocysteine
  MOD_RES (64)..(64): Selenocysteine
  MOD_RES (67)..(67): Selenocysteine
  MOD_RES (89)..(89): Selenocysteine
  MOD_RES (97)..(97): Selenocysteine
  MOD_RES (121)..(121): Selenocysteine
  MOD_RES (131)..(131): Selenocysteine
  MOD_RES (153)..(153): Selenocysteine
  MOD_RES (187)..(187): Selenocysteine
  MOD_RES (218)..(218): Selenocysteine
  MOD_RES (242)..(242): Selenocysteine
MSIRVXQKSYKVSXSGPRAFSSRSYXSGPGSRISSSSFSRVGSSNFRGGLGGGYGGASGMGGIXAVXVNQSLLSPLVLEVDPNIQAVRXQEKEQIKXLNNKFASFIDKVRFLEQQNKMLEXKWSLLQQQKXARSNMDNMFESYINNLRRQLEXLGQEKLKLEAELGNMQGLVEDFKNKYEDEINKRXEMENEFVLIKKDVDEAYMNKVELESRLEGLXDEINFLRQLYEEEIRELQSQISDXSVVLSMDNSRSLDMDSIIAEVKAQYEDIANR

SEQ ID NO: 14647 - protein, 483 aa, Homo sapiens
  MOD_RES (6)..(6): Selenocysteine
  MOD_RES (14)..(14): Selenocysteine
  MOD_RES (26)..(26): Selenocysteine
  MOD_RES (64)..(64): Selenocysteine
  MOD_RES (67)..(67): Selenocysteine
  MOD_RES (89)..(89): Selenocysteine
  MOD_RES (97)..(97): Selenocysteine
  MOD_RES (121)..(121): Selenocysteine
  MOD_RES (131)..(131): Selenocysteine
  MOD_RES (153)..(153): Selenocysteine
  MOD_RES (187)..(187): Selenocysteine
  MOD_RES (218)..(218): Selenocysteine
  MOD_RES (242)..(242): Selenocysteine
  MOD_RES (303)..(303): Selenocysteine
  MOD_RES (305)..(305): Selenocysteine
  MOD_RES (390)..(390): Selenocysteine
  MOD_RES (413)..(413): Selenocysteine
  MOD_RES (415)..(416): Selenocysteine
  MOD_RES (431)..(431): Selenocysteine
  MOD_RES (455)..(455): Selenocysteine
  MOD_RES (468)..(468): Selenocysteine
MSIRVXQKSYKVSXSGPRAFSSRSYXSGPGSRISSSSFSRVGSSNFRGGLGGGYGGASGMGGIXAVXVNQSLLSPLVLEVDPNIQAVRXQEKEQIKXLNNKFASFIDKVRFLEQQNKMLEXKWSLLQQQKXARSNMDNMFESYINNLRRQLEXLGQEKLKLEAELGNMQGLVEDFKNKYEDEINKRXEMENEFVLIKKDVDEAYMNKVELESRLEGLXDEINFLRQLYEEEIRELQSQISDXSVVLSMDNSRSLDMDSIIAEVKAQYEDIANRSRAEAESMYQIKYEELQSLAGKHGDDLRRXKXEISEMNRNISRLQAEIEGLKGQRASLEAAIADAEQRGELAIKDANAKLSELEAALQRAKQDMARQLREYQELMNVKLALDIEIAXYRKLLEGEESRLESGMQNMSIHXKXXSGYAGGLSSAYGGLXSPGLSYSLGSSFGSGAGSSSFSRXSSSRAVVVKKIEXRDGKLVSESSDVLPK

SEQ ID NO: 14648 - protein, 35 aa, Homo sapiens
  MOD_RES (1)..(1): Any amino acid
  MOD_RES (4)..(4): Selenocysteine
  MOD_RES (35)..(35): Selenocysteine
XLEXLGQEKLKLEAELGNMQGLVEDFKNKMWMKLX

SEQ ID NO: 14649 - protein, 846 aa, Homo sapiens
  MOD_RES (23)..(23): Selenocysteine
  MOD_RES (38)..(38): Selenocysteine
  MOD_RES (54)..(54): Selenocysteine
  MOD_RES (69)..(69): Selenocysteine
  MOD_RES (88)..(88): Selenocysteine
  MOD_RES (94)..(94): Selenocysteine
  MOD_RES (121)..(121): Selenocysteine
  MOD_RES (123)..(123): Selenocysteine
  MOD_RES (163)..(163): Selenocysteine
  MOD_RES (173)..(173): Selenocysteine
  MOD_RES (184)..(184): Selenocysteine
  MOD_RES (193)..(193): Selenocysteine
  MOD_RES (196)..(197): Selenocysteine
  MOD_RES (204)..(204): Selenocysteine
  MOD_RES (211)..(211): Selenocysteine
  MOD_RES (228)..(228): Selenocysteine
  MOD_RES (230)..(230): Selenocysteine
  MOD_RES (270)..(270): Selenocysteine
  MOD_RES (275)..(275): Selenocysteine
  MOD_RES (308)..(308): Selenocysteine
  MOD_RES (322)..(322): Selenocysteine
  MOD_RES (327)..(327): Selenocysteine
  MOD_RES (348)..(348): Selenocysteine
  MOD_RES (354)..(354): Selenocysteine
  MOD_RES (374)..(375): Selenocysteine
  MOD_RES (378)..(378): Selenocysteine
  MOD_RES (387)..(387): Selenocysteine
  MOD_RES (395)..(396): Selenocysteine
  MOD_RES (466)..(466): Selenocysteine
  MOD_RES (522)..(522): Selenocysteine
  MOD_RES (587)..(587): Selenocysteine
  MOD_RES (609)..(609): Selenocysteine
  MOD_RES (616)..(616): Selenocysteine
  MOD_RES (626)..(626): Selenocysteine
  MOD_RES (633)..(633): Selenocysteine
  MOD_RES (672)..(672): Selenocysteine
  MOD_RES (711)..(711): Selenocysteine
  MOD_RES (732)..(732): Selenocysteine
  MOD_RES (767)..(767): Selenocysteine
AKLVRYICKQRQCKLSVAPGERXPELNSYPRFSDWLYXFNVRPEVVQEIPRDLXLDALLEMNEAKVKEXLRRCGASGDECGRLQYALXCLRKVXGLGGEHKEDSSWSSLDARRESGSGPSXDXLSAASLPWPPGSSQLGRAGNSAQGPRSISVSALPASDSPXPSFSEGLSDXCIPLHASGRLXPRALHSFIXPPXXPQLRRHXKLKPPRXPPPPSRKVFQLLPSFPXLXRSKSHESQLGNRIDDVSSMRFDLSHGSPQMVRRDIGLSVXHRFSXKSWLSQVCHVCQKSMIFGVKCKHCRLKCHNKCXKEAPACRISFLPLXRLRRXESVPSDINNPVDRAAEPHFGXLPKALXKKEHPPAMNHLDSSSNPSSXXSSXPSSPAPFPXSSNPSSAXXPPNPSPGQRDSRFNFPAAYFIHHRQQFIFPVPSAGHCWKCLLIAESLKENAFNISAFAHAAPLPEAADGXRLDDQPKADVLEAHEAEAEEPEAGKSEAEDDEDEVDDLPSSRRPWRGPISRKASQXSVYLQEWDIPFEQVELGEPIGQGRWGRVHRGRWHGEVAIRLLEMDGHNQDHLKLFKKEVMNYRQXRHENVVLFMGACMNPPHLAIIXSFCKGRXLHSFVRDPKXSLDINKXRQIAQEIIKGMGYLHAKGIVHKDLKSKNVFYDNGKVVIXDFGLFGISGVVREGRRENQLKLSHDWLCYLAPEIVREMXPGKDEDQLPFSKAADVYAFGXVWYELQARDWPLKNQAAEASIWQIGSGEGMKRVLXSVSLGKEVSEILSACWAFDLQERPSFSLLMDMLEKLPKLNRRLSHPGHFWKSADINSSKVVPRFERFGLGVLESSNPKM

SEQ ID NO: 14650 - protein, 612 aa, Homo sapiens
  MOD_RES (5)..(5): Selenocysteine
  MOD_RES (8)..(9): Selenocysteine
  MOD_RES (16)..(16): Selenocysteine
  MOD_RES (23)..(23): Selenocysteine
  MOD_RES (40)..(40): Selenocysteine
  MOD_RES (42)..(42): Selenocysteine
  MOD_RES (82)..(82): Selenocysteine
  MOD_RES (87)..(87): Selenocysteine
  MOD_RES (120)..(120): Selenocysteine
  MOD_RES (134)..(134): Selenocysteine
  MOD_RES (139)..(139): Selenocysteine
  MOD_RES (160)..(160): Selenocysteine
  MOD_RES (166)..(166): Selenocysteine
  MOD_RES (186)..(187): Selenocysteine
  MOD_RES (190)..(190): Selenocysteine
  MOD_RES (199)..(199): Selenocysteine
  MOD_RES (207)..(208): Selenocysteine
  MOD_RES (256)..(256): Selenocysteine
  MOD_RES (312)..(312): Selenocysteine
  MOD_RES (377)..(377): Selenocysteine
  MOD_RES (399)..(399): Selenocysteine
  MOD_RES (406)..(406): Selenocysteine
  MOD_RES (416)..(416): Selenocysteine
  MOD_RES (423)..(423): Selenocysteine
  MOD_RES (462)..(462): Selenocysteine
  MOD_RES (501)..(501): Selenocysteine
  MOD_RES (522)..(522): Selenocysteine
  MOD_RES (557)..(557): Selenocysteine
HSFIXPPXXPQLRRHXKLKPPRXPPPPSRKVFQLLPSFPXLXRSKSHESQLGNRIDDVSSMRFDLSHGSPQMVRRDIGLSVXHRFSXKSWLSQVCHVCQKSMIFGVKCKHCRLKCHNKCXKEAPACRISFLPLXRLRRXESVPSDINNPVDRAAEPHFGXLPKALXKKEHPPAMNHLDSSSNPSSXXSSXPSSPAPFPXSSNPSSAXXPPNPSPGQRDSRFNFPAAYFIHHRQQFIFPDISAFAHAAPLPEAADGXRLDDQPKADVLEAHEAEAEEPEAGKSEAEDDEDEVDDLPSSRRPWRGPISRKASQXSVYLQEWDIPFEQVELGEPIGQGRWGRVHRGRWHGEVAIRLLEMDGHNQDHLKLFKKEVMNYRQXRHENVVLFMGACMNPPHLAIIXSFCKGRXLHSFVRDPKXSLDINKXRQIAQEIIKGMGYLHAKGIVHKDLKSKNVFYDNGKVVIXDFGLFGISGVVREGRRENQLKLSHDWLCYLAPEIVREMXPGKDEDQLPFSKAADVYAFGXVWYELQARDWPLKNQAAEASIWQIGSGEGMKRVLXSVSLGKEVSEILSACWAFDLQERPSFSLLMDMLEKLPKLNRRLSHPGHFWKSAEL

SEQ ID NO: 14651 - protein, 130 aa, Homo sapiens
  MOD_RES (6)..(6): Selenocysteine
  MOD_RES (8)..(8): Selenocysteine
  MOD_RES (10)..(10): Selenocysteine
  MOD_RES (21)..(21): Selenocysteine
  MOD_RES (23)..(23): Selenocysteine
  MOD_RES (66)..(66): Selenocysteine
  MOD_RES (76)..(76): Selenocysteine
  MOD_RES (83)..(83): Selenocysteine
  MOD_RES (86)..(86): Selenocysteine
  MOD_RES (98)..(98): Selenocysteine
  MOD_RES (111)..(111): Selenocysteine
  MOD_RES (114)..(115): Selenocysteine
  MOD_RES (120)..(120): Selenocysteine
MEKDAXAXLXLRAPVRFWRNXLXAAKLYPGLKGLAWASWSPVIQRCSQPYGFSLLISFFLKCVSEXSQQPPRQKNXACPALQXRSXRPRFRLLAINPXREMELHLLFLKMXPPXXKPVMXDSKCLHVYFS

SEQ ID NO: 14652 - protein, 46 aa, Homo sapiens
  MOD_RES (9)..(9): Selenocysteine
  MOD_RES (28)..(28): Selenocysteine
  MOD_RES (34)..(34): Selenocysteine
MNEAKVKEXLRRCGASGDECGRLQYALXCLRKVXGLGGEHKEDSSW

SEQ ID NO: 14653 - protein, 155 aa, Homo sapiens
  MOD_RES (9)..(9): Selenocysteine
  MOD_RES (28)..(28): Selenocysteine
  MOD_RES (34)..(34): Selenocysteine
  MOD_RES (61)..(61): Selenocysteine
  MOD_RES (63)..(63): Selenocysteine
  MOD_RES (103)..(103): Selenocysteine
  MOD_RES (113)..(113): Selenocysteine
  MOD_RES (124)..(124): Selenocysteine
  MOD_RES (133)..(133): Selenocysteine
  MOD_RES (136)..(137): Selenocysteine
  MOD_RES (144)..(144): Selenocysteine
  MOD_RES (151)..(151): Selenocysteine
MNEAKVKEXLRRCGASGDECGRLQYALXCLRKVXGLGGEHKEDSSWSSLDARRESGSGPSXDXLSAASLPWPPGSSQLGRAGNSAQGPRSISVSALPASDSPXPSFSEGLSDXCIPLHASGRLXPRALHSFIXPPXXPQLRRHXKLKPPRXPPPP

SEQ ID NO: 14654 - protein, 762 aa, Homo sapiens
  MOD_RES (9)..(9): Selenocysteine
  MOD_RES (28)..(28): Selenocysteine
  MOD_RES (34)..(34): Selenocysteine
  MOD_RES (61)..(61): Selenocysteine
  MOD_RES (63)..(63): Selenocysteine
  MOD_RES (103)..(103): Selenocysteine
  MOD_RES (113)..(113): Selenocysteine
  MOD_RES (124)..(124): Selenocysteine
  MOD_RES (133)..(133): Selenocysteine
  MOD_RES (136)..(137): Selenocysteine
  MOD_RES (144)..(144): Selenocysteine
  MOD_RES (151)..(151): Selenocysteine
  MOD_RES (168)..(168): Selenocysteine
  MOD_RES (170)..(170): Selenocysteine
  MOD_RES (210)..(210): Selenocysteine
  MOD_RES (215)..(215): Selenocysteine
  MOD_RES (248)..(248): Selenocysteine
  MOD_RES (262)..(262): Selenocysteine
  MOD_RES (267)..(267): Selenocysteine
  MOD_RES (288)..(288): Selenocysteine
  MOD_RES (294)..(294): Selenocysteine
  MOD_RES (314)..(315): Selenocysteine
  MOD_RES (318)..(318): Selenocysteine
  MOD_RES (327)..(327): Selenocysteine
  MOD_RES (335)..(336): Selenocysteine
  MOD_RES (406)..(406): Selenocysteine
  MOD_RES (462)..(462): Selenocysteine
  MOD_RES (527)..(527): Selenocysteine
  MOD_RES (549)..(549): Selenocysteine
  MOD_RES (556)..(556): Selenocysteine
  MOD_RES (566)..(566): Selenocysteine
  MOD_RES (573)..(573): Selenocysteine
  MOD_RES (612)..(612): Selenocysteine
  MOD_RES (651)..(651): Selenocysteine
  MOD_RES (672)..(672): Selenocysteine
  MOD_RES (707)..(707): Selenocysteine
MNEAKVKEXLRRCGASGDECGRLQYALXCLRKVXGLGGEHKEDSSWSSLDARRESGSGPSXDXLSAASLPWPPGSSQLGRAGNSAQGPRSISVSALPASDSPXPSFSEGLSDXCIPLHASGRLXPRALHSFIXPPXXPQLRRHXKLKPPRXPPPPSRKVFQLLPSFPXLXRSKSHESQLGNRIDDVSSMRFDLSHGSPQMVRRDIGLSVXHRFSXKSWLSQVCHVCQKSMIFGVKCKHCRLKCHNKCXKEAPACRISFLPLXRLRRXESVPSDINNPVDRAAEPHFGXLPKALXKKEHPPAMNHLDSSSNPSSXXSSXPSSPAPFPXSSNPSSAXXPPNPSPGQRDSRFNFPAAYFIHHRQQFIFPVPSAGHCWKCLLIAESLKENAFNISAFAHAAPLPEAADGXRLDDQPKADVLEAHEAEAEEPEAGKSEAEDDEDEVDDLPSSRRPWRGPISRKASQXSVYLQEWDIPFEQVELGEPIGQGRWGRVHRGRWHGEVAIRLLEMDGHNQDHLKLFKKEVMNYRQXRHENVVLFMGACMNPPHLAIIXSFCKGRXLHSFVRDPKXSLDINKXRQIAQEIIKGMGYLHAKGIVHKDLKSKNVFYDNGKVVIXDFGLFGISGVVREGRRENQLKLSHDWLCYLAPEIVREMXPGKDEDQLPFSKAADVYAFGXVWYELQARDWPLKNQAAEASIWQIGSGEGMKRVLXSVSLGKEVSEILSACWAFDLQERPSFSLLMDMLEKLPKLNRRLSHPGHFWKSAEL

SEQ ID NO: 14655 - protein, 113 aa, Homo sapiens
  MOD_RES (2)..(2): Selenocysteine
  MOD_RES (23)..(23): Selenocysteine
  MOD_RES (58)..(58): Selenocysteine
MXPGKDEDQLPFSKAADVYAFGXVWYELQARDWPLKNQAAEASIWQIGSGEGMKRVLXSVSLGKEVSEILSACWAFDLQERPSFSLLMDMLEKLPKLNRRLSHPGHFWKSAEL

SEQ ID NO: 14656 - protein, 139 aa, Homo sapiens
  MOD_RES (4)..(4): Selenocysteine
  MOD_RES (25)..(25): Selenocysteine
  MOD_RES (60)..(60): Selenocysteine
REMXPGKDEDQLPFSKAADVYAFGXVWYELQARDWPLKNQAAEASIWQIGSGEGMKRVLXSVSLGKEVSEILSACWAFDLQERPSFSLLMDMLEKLPKLNRRLSHPGHFWKSADINSSKVVPRFERFGLGVLESSNPKM

SEQ ID NO: 14657 - protein, 98 aa, Homo sapiens
  MOD_RES (1)..(1): Any amino acid
  MOD_RES (11)..(11): Selenocysteine
  MOD_RES (13)..(13): Selenocysteine
  MOD_RES (43)..(43): Selenocysteine
  MOD_RES (49)..(49): Selenocysteine
  MOD_RES (72)..(72): Selenocysteine
XVFQLLPSFPXLXRSKSHESQLGNRIDDVSSMRFACLLPHLEXSQGQLXEPSSEARSKLEDQARRGEPHHAXGLAWPAPVLMDIDQGDAYIINHCAPL

SEQ ID NO: 14658 - protein, 950 aa, Homo sapiens
  MOD_RES (7)..(7): Selenocysteine
  MOD_RES (43)..(43): Selenocysteine
  MOD_RES (47)..(47): Selenocysteine
  MOD_RES (52)..(52): Selenocysteine
  MOD_RES (58)..(58): Selenocysteine
  MOD_RES (123)..(123): Selenocysteine
  MOD_RES (130)..(130): Selenocysteine
  MOD_RES (167)..(167): Selenocysteine
  MOD_RES (172)..(173): Selenocysteine
  MOD_RES (175)..(175): Selenocysteine
  MOD_RES (188)..(188): Selenocysteine
  MOD_RES (193)..(193): Selenocysteine
  MOD_RES (212)..(212): Selenocysteine
  MOD_RES (215)..(215): Selenocysteine
  MOD_RES (222)..(222): Selenocysteine
  MOD_RES (228)..(228): Selenocysteine
  MOD_RES (260)..(260): Selenocysteine
  MOD_RES (264)..(264): Selenocysteine
  MOD_RES (269)..(270): Selenocysteine
  MOD_RES (272)..(272): Selenocysteine
  MOD_RES (276)..(276): Selenocysteine
  MOD_RES (290)..(290): Selenocysteine
  MOD_RES (306)..(306): Selenocysteine
  MOD_RES (327)..(327): Selenocysteine
  MOD_RES (379)..(379): Selenocysteine
  MOD_RES (384)..(384): Selenocysteine
  MOD_RES (392)..(392): Selenocysteine
  MOD_RES (417)..(417): Selenocysteine
  MOD_RES (424)..(424): Selenocysteine
  MOD_RES (426)..(426): Selenocysteine
  MOD_RES (450)..(450): Selenocysteine
  MOD_RES (472)..(472): Selenocysteine
  MOD_RES (497)..(497): Selenocysteine
  MOD_RES (501)..(501): Selenocysteine
  MOD_RES (524)..(525): Selenocysteine
  MOD_RES (528)..(528): Selenocysteine
  MOD_RES (541)..(541): Selenocysteine
  MOD_RES (553)..(553): Selenocysteine
  MOD_RES (584)..(584): Selenocysteine
  MOD_RES (586)..(586): Selenocysteine
  MOD_RES (597)..(597): Selenocysteine
  MOD_RES (615)..(615): Selenocysteine
  MOD_RES (652)..(652): Selenocysteine
  MOD_RES (717)..(717): Selenocysteine
  MOD_RES (739)..(739): Selenocysteine
  MOD_RES (746)..(746): Selenocysteine
  MOD_RES (763)..(763): Selenocysteine
  MOD_RES (802)..(802): Selenocysteine
  MOD_RES (844)..(844): Selenocysteine
  MOD_RES (862)..(862): Selenocysteine
  MOD_RES (876)..(876): Selenocysteine
  MOD_RES (888)..(888): Selenocysteine
  MOD_RES (920)..(920): Selenocysteine
  MOD_RES (922)..(922): Selenocysteine
MDEENMXKSEEQQPLSLQKALQQCELVQNMIDLSISNLEGLRXKCAXSNDLXQKEIRXLESKLVKYFSRQLSCKKKVALQERNAELDGFPQLRHWFRIVDVRKEVLEEISPGQLSLEDLLEMXDEQVCEXVEKYGANREECARLNASLSCLRNVHMSGGNLSKQDWXIQWPXXEXGKENNPVCPPEPXPWIRXHLSQSPRVPSKCVQHYCHXSPXPGAPVYXHVDRLXVDAYPGLCPPPPLESGHRSLPPSPRQRHAVRXPPRXPNIVXXVXPPGXPPMRKKNKLKPPGXPPPSSRKLIHLIPGFXALHRSKSHEFQLGHRVDEAHXPKAKKKSKPLNLKIHSSVGSCENIPSQQRSPLLSERSLRSFFVGHAPFLPSXPPVHXEANFSANXLSVPRWSPQIPRRDLGNSIKHRFSXKYWMSQXCXVCGKGMLFGLKCKNCKLKCHNKCXKEAPPCHLLIIHRGDPARLVRXESVPCDINNPLRKPPRYSDLHISQXLPKXNKINKDHIPVPYQPDSSSNPSSXXSSXPSSPAPPLPPSAXPPSPLHPSPQCXRQQKNFNLPASHYYKYKQQFIFPDVVPVPEXPXRAPQVILHPVXSNPILEGNPLLQIEVEPXSENEEVHDEAEESEDDFEEMNLSLLSARSFPRKASQXSIFLQEWDIPFEQLEIGELIGKGRFGQVYHGRWHGEVAIRLIDIERDNEDQLKAFKREVMAYRQXRHENVVLFMGACMSPPHLAIIXSLCKGRXLYSVVRDAKIVLDVNKXRQIAQEIVKGMGYLHAKGILHKDLKSKNVFYDNGKVVIXDFGLFSISGVLQAGRREDKLRIQNGWLCHLAPEIIRQLSPDXEEDKLPFSKHSDVFALGXIWYELHAREWPFKXQPAEAIIWQMGXGMKPNLSQIGMGKEISDILLFCWAFEQEERPXFXKLMDMLEKLPKRNRRLSHPGHFWKSAEL

SEQ ID NO: 14659 - protein, 921 aa, Homo sapiens
  MOD_RES (14)..(14): Selenocysteine
  MOD_RES (18)..(18): Selenocysteine
  MOD_RES (23)..(23): Selenocysteine
  MOD_RES (29)..(29): Selenocysteine
  MOD_RES (94)..(94): Selenocysteine
  MOD_RES (101)..(101): Selenocysteine
  MOD_RES (138)..(138): Selenocysteine
  MOD_RES (143)..(144): Selenocysteine
  MOD_RES (146)..(146): Selenocysteine
  MOD_RES (159)..(159): Selenocysteine
  MOD_RES (164)..(164): Selenocysteine
  MOD_RES (183)..(183): Selenocysteine
  MOD_RES (186)..(186): Selenocysteine
  MOD_RES (193)..(193): Selenocysteine
  MOD_RES (199)..(199): Selenocysteine
  MOD_RES (231)..(231): Selenocysteine
  MOD_RES (235)..(235): Selenocysteine
  MOD_RES (240)..(241): Selenocysteine
  MOD_RES (243)..(243): Selenocysteine
  MOD_RES (247)..(247): Selenocysteine
  MOD_RES (261)..(261): Selenocysteine
  MOD_RES (277)..(277): Selenocysteine
  MOD_RES (298)..(298): Selenocysteine
  MOD_RES (350)..(350): Selenocysteine
  MOD_RES (355)..(355): Selenocysteine
  MOD_RES (363)..(363): Selenocysteine
  MOD_RES (388)..(388): Selenocysteine
  MOD_RES (395)..(395): Selenocysteine
  MOD_RES (397)..(397): Selenocysteine
  MOD_RES (421)..(421): Selenocysteine
  MOD_RES (443)..(443): Selenocysteine
  MOD_RES (468)..(468): Selenocysteine
  MOD_RES (472)..(472): Selenocysteine
  MOD_RES (495)..(496): Selenocysteine
  MOD_RES (499)..(499): Selenocysteine
  MOD_RES (512)..(512): Selenocysteine
  MOD_RES (524)..(524): Selenocysteine
  MOD_RES (555)..(555): Selenocysteine
  MOD_RES (557)..(557): Selenocysteine
  MOD_RES (568)..(568): Selenocysteine
  MOD_RES (586)..(586): Selenocysteine
  MOD_RES (623)..(623): Selenocysteine
  MOD_RES (688)..(688): Selenocysteine
  MOD_RES (710)..(710): Selenocysteine
  MOD_RES (717)..(717): Selenocysteine
  MOD_RES (734)..(734): Selenocysteine
  MOD_RES (773)..(773): Selenocysteine
  MOD_RES (815)..(815): Selenocysteine
  MOD_RES (833)..(833): Selenocysteine
  MOD_RES (847)..(847): Selenocysteine
  MOD_RES (859)..(859): Selenocysteine
  MOD_RES (891)..(891): Selenocysteine
  MOD_RES (893)..(893): Selenocysteine
MIDLSISNLEGLRXKCAXSNDLXQKEIRXLESKLVKYFSRQLSCKKKVALQERNAELDGFPQLRHWFRIVDVRKEVLEEISPGQLSLEDLLEMXDEQVCEXVEKYGANREECARLNASLSCLRNVHMSGGNLSKQDWXIQWPXXEXGKENNPVCPPEPXPWIRXHLSQSPRVPSKCVQHYCHXSPXPGAPVYXHVDRLXVDAYPGLCPPPPLESGHRSLPPSPRQRHAVRXPPRXPNIVXXVXPPGXPPMRKKNKLKPPGXPPPSSRKLIHLIPGFXALHRSKSHEFQLGHRVDEAHXPKAKKKSKPLNLKIHSSVGSCENIPSQQRSPLLSERSLRSFFVGHAPFLPSXPPVHXEANFSANXLSVPRWSPQIPRRDLGNSIKHRFSXKYWMSQXCXVCGKGMLFGLKCKNCKLKCHNKCXKEAPPCHLLIIHRGDPARLVRXESVPCDINNPLRKPPRYSDLHISQXLPKXNKINKDHIPVPYQPDSSSNPSSXXSSXPSSPAPPLPPSAXPPSPLHPSPQCXRQQKNFNLPASHYYKYKQQFIFPDVVPVPEXPXRAPQVILHPVXSNPILEGNPLLQIEVEPXSENEEVHDEAEESEDDFEEMNLSLLSARSFPRKASQXSIFLQEWDIPFEQLEIGELIGKGRFGQVYHGRWHGEVAIRLIDIERDNEDQLKAFKREVMAYRQXRHENVVLFMGACMSPPHLAIIXSLCKGRXLYSVVRDAKIVLDVNKXRQIAQEIVKGMGYLHAKGILHKDLKSKNVFYDNGKVVIXDFGLFSISGVLQAGRREDKLRIQNGWLCHLAPEIIRQLSPDXEEDKLPFSKHSDVFALGXIWYELHAREWPFKXQPAEAIIWQMGXGMKPNLSQIGMGKEISDILLFCWAFEQEERPXFXKLMDMLEKLPKRNRRLSHPGHFWKSAEL

SEQ ID NO: 14660 - protein, 84 aa, Homo sapiens
  MOD_RES (18)..(18): Selenocysteine
  MOD_RES (58)..(58): Selenocysteine
MAGVEQPPSPELRQEGVXEYEDGGAPAGDGEAGPQQAEDHPQNPPEDPNQDPPEDDSXCQCQACGPHQAAGPDLGSSNDGCPQL

SEQ ID NO: 14661 - protein, 138 aa, Homo sapiens
  MOD_RES (18)..(18): Selenocysteine
  MOD_RES (28)..(28): Selenocysteine
  MOD_RES (63)..(63): Selenocysteine
  MOD_RES (77)..(77): Selenocysteine
  MOD_RES (79)..(79): Selenocysteine
  MOD_RES (86)..(86): Selenocysteine
  MOD_RES (126)..(126): Selenocysteine
MHLVAGDSPGSGPHLPAXAFIIPASSAXLGLPSSALDVSCFPREPIHVGAPEQVAGCEPVSAXVLPQLSAGPASSSXSXVRLLEWXEAAAPPPGGGLRFRISEYKPLNMAGVEQPPSPELRQEGVXEYEDGGAPAGDG

SEQ ID NO: 14662 - protein, 840 aa, Homo sapiens
  MOD_RES (18)..(18): Selenocysteine
  MOD_RES (28)..(28): Selenocysteine
  MOD_RES (63)..(63): Selenocysteine
  MOD_RES (77)..(77): Selenocysteine
  MOD_RES (79)..(79): Selenocysteine
  MOD_RES (86)..(86): Selenocysteine
  MOD_RES (126)..(126): Selenocysteine
  MOD_RES (166)..(166): Selenocysteine
  MOD_RES (207)..(207): Selenocysteine
  MOD_RES (251)..(251): Selenocysteine
  MOD_RES (254)..(254): Selenocysteine
  MOD_RES (267)..(267): Selenocysteine
  MOD_RES (287)..(287): Selenocysteine
  MOD_RES (300)..(300): Selenocysteine
  MOD_RES (327)..(327): Selenocysteine
  MOD_RES (367)..(367): Selenocysteine
  MOD_RES (391)..(391): Selenocysteine
  MOD_RES (436)..(436): Selenocysteine
  MOD_RES (453)..(453): Selenocysteine
  MOD_RES (479)..(479): Selenocysteine
  MOD_RES (499)..(499): Selenocysteine
  MOD_RES (506)..(506): Selenocysteine
  MOD_RES (578)..(578): Selenocysteine
  MOD_RES (610)..(610): Selenocysteine
  MOD_RES (612)..(612): Selenocysteine
  MOD_RES (624)..(624): Selenocysteine
  MOD_RES (634)..(634): Selenocysteine
  MOD_RES (638)..(638): Selenocysteine
  MOD_RES (703)..(703): Selenocysteine
  MOD_RES (705)..(705): Selenocysteine
  MOD_RES (747)..(747): Selenocysteine
  MOD_RES (752)..(752): Selenocysteine
  MOD_RES (762)..(762): Selenocysteine
  MOD_RES (764)..(764): Selenocysteine
  MOD_RES (783)..(783): Selenocysteine
  MOD_RES (789)..(789): Selenocysteine
  MOD_RES (793)..(793): Selenocysteine
  MOD_RES (815)..(815): Selenocysteine
  MOD_RES (826)..(826): Selenocysteine
MHLVAGDSPGSGPHLPAXAFIIPASSAXLGLPSSALDVSCFPREPIHVGAPEQVAGCEPVSAXVLPQLSAGPASSSXSXVRLLEWXEAAAPPPGGGLRFRISEYKPLNMAGVEQPPSPELRQEGVXEYEDGGAPAGDGEAGPQQAEDHPQNPPEDPNQDPPEDDSXCQCQACGPHQAAGPDLGSSNDGCPQLFQERSVIVENSSGSXSASELLKPMKKRKRREYQSPSEEESEPEAMEKQEEGKDPEGQPXASXPESEEWSSSQPAXGEKKECWSWESYLEEQKAIXAPVSLFQDSQAVXHNKNGFKLGMKLEGIDPQHPSMYFILXVAEVCGYRLRLHFDGYSECHDFWVNANSPDIHPAGWFEKXGHKLQPPKGYKEEEFSWSQYLRSXRAQAAPKHLFVSQSHSPPPLGFQVGMKLEAVDRMNPSLVCVASVXDVVDSRFLVHFDNWDDXYDYWCDPSSPYIHPVGWCQKQGKPLXPPQDYPDPDNFCWEKYLEEXGASAVPXWAFKVRPPHSFLVNMKLEAVDRRNPALIRVASVEDVEDHRIKIHFDGWSHGYDFWIDADHPDIHPAGWCSKXGHPLQPPLGPREPSSASPGGCPPLSYRSLPHXRXSKYSFHHRKCPXPGCDGSGHVXGKFXAHHCLSGCPLAERNQSRLKAELSDSEASARKKNLSGFSPRKKPRHHGRIGRPPKYRKIPQEDFQXLXPDVVHQSLFMSALSAHPDRSLSVCWEQHCKLLPGVAGISASXVAKWXIDEVFGFVQXLXGCEDQARLFKDEARIVRVXHVSGKXLVWXVAQLGDLVCSDHLQEGKGILEXGVHSLLCSLPXHLLAKLSFASDSQY

SEQ ID NO: 14663 - protein, 743 aa, Homo sapiens
  MOD_RES (9)..(9): Selenocysteine
  MOD_RES (58)..(58): Selenocysteine
  MOD_RES (98)..(98): Selenocysteine
  MOD_RES (139)..(139): Selenocysteine
  MOD_RES (183)..(183): Selenocysteine
  MOD_RES (186)..(186): Selenocysteine
  MOD_RES (199)..(199): Selenocysteine
  MOD_RES (219)..(219): Selenocysteine
  MOD_RES (232)..(232): Selenocysteine
  MOD_RES (259)..(259): Selenocysteine
  MOD_RES (299)..(299): Selenocysteine
  MOD_RES (323)..(323): Selenocysteine
  MOD_RES (368)..(368): Selenocysteine
  MOD_RES (385)..(385): Selenocysteine
  MOD_RES (411)..(411): Selenocysteine
  MOD_RES (431)..(431): Selenocysteine
  MOD_RES (438)..(438): Selenocysteine
  MOD_RES (510)..(510): Selenocysteine
  MOD_RES (542)..(542): Selenocysteine
  MOD_RES (544)..(544): Selenocysteine
  MOD_RES (561)..(561): Selenocysteine
  MOD_RES (571)..(571): Selenocysteine
  MOD_RES (575)..(575): Selenocysteine
  MOD_RES (640)..(640): Selenocysteine
  MOD_RES (642)..(642): Selenocysteine
  MOD_RES (684)..(684): Selenocysteine
  MOD_RES (689)..(689): Selenocysteine
  MOD_RES (699)..(699): Selenocysteine
  MOD_RES (701)..(701): Selenocysteine
  MOD_RES (727)..(727): Selenocysteine
  MOD_RES (731)..(731): Selenocysteine
MRRREGHGXDSEMGQGPVRESQSSDPPALQFRISEYKPLNMAGVEQPPSPELRQEGVXEYEDGGAPAGDGEAGPQQAEDHPQNPPEDPNQDPPEDDSXCQCQACGPHQAAGPDLGSSNDGCPQLFQERSVIVENSSGSXSASELLKPMKKRKRREYQSPSEEESEPEAMEKQEEGKDPEGQPXASXPESEEWSSSQPAXGEKKECWSWESYLEEQKAIXAPVSLFQDSQAVXHNKNGFKLGMKLEGIDPQHPSMYFILXVAEVCGYRLRLHFDGYSECHDFWVNANSPDIHPAGWFEKXGHKLQPPKGYKEEEFSWSQYLRSXRAQAAPKHLFVSQSHSPPPLGFQVGMKLEAVDRMNPSLVCVASVXDVVDSRFLVHFDNWDDXYDYWCDPSSPYIHPVGWCQKQGKPLXPPQDYPDPDNFCWEKYLEEXGASAVPXWAFKVRPPHSFLVNMKLEAVDRRNPALIRVASVEDVEDHRIKIHFDGWSHGYDFWIDADHPDIHPAGWCSKXGHPLQPPLGPREPSSASPGGCPPLSYRSLPHXRXSKYSFHHRLFFPRKCPXPGCDGSGHVXGKFXAHHCLSGCPLAERNQSRLKAELSDSEASARKKNLSGFSPRKKPRHHGRIGRPPKYRKIPQEDFQXLXPDVVHQSLFMSALSAHPDRSLSVCWEQHCKLLPGVAGISASXVAKWXIDEVFGFVQXLXGCEDQARLFKDEVRCKCRVGDRAGVXVLKXAGSRCPPQRHFC

SEQ ID NO: 14664 - protein, 772 aa, Homo sapiens
  MOD_RES (9)..(9): Selenocysteine
  MOD_RES (58)..(58): Selenocysteine
  MOD_RES (98)..(98): Selenocysteine
  MOD_RES (139)..(139): Selenocysteine
  MOD_RES (183)..(183): Selenocysteine
  MOD_RES (186)..(186): Selenocysteine
  MOD_RES (199)..(199): Selenocysteine
  MOD_RES (219)..(219): Selenocysteine
  MOD_RES (232)..(232): Selenocysteine
  MOD_RES (259)..(259): Selenocysteine
  MOD_RES (299)..(299): Selenocysteine
  MOD_RES (323)..(323): Selenocysteine
  MOD_RES (368)..(368): Selenocysteine
  MOD_RES (385)..(385): Selenocysteine
  MOD_RES (411)..(411): Selenocysteine
  MOD_RES (431)..(431): Selenocysteine
  MOD_RES (438)..(438): Selenocysteine
  MOD_RES (510)..(510): Selenocysteine
  MOD_RES (542)..(542): Selenocysteine
  MOD_RES (544)..(544): Selenocysteine
  MOD_RES (556)..(556): Selenocysteine
  MOD_RES (566)..(566): Selenocysteine
  MOD_RES (570)..(570): Selenocysteine
  MOD_RES (635)..(635): Selenocysteine
  MOD_RES (637)..(637): Selenocysteine
  MOD_RES (679)..(679): Selenocysteine
  MOD_RES (684)..(684): Selenocysteine
  MOD_RES (694)..(694): Selenocysteine
  MOD_RES (696)..(696): Selenocysteine
  MOD_RES (715)..(715): Selenocysteine
  MOD_RES (721)..(721): Selenocysteine
  MOD_RES (725)..(725): Selenocysteine
  MOD_RES (747)..(747): Selenocysteine
  MOD_RES (758)..(758): Selenocysteine
MRRREGHGXDSEMGQGPVRESQSSDPPALQFRISEYKPLNMAGVEQPPSPELRQEGVXEYEDGGAPAGDGEAGPQQAEDHPQNPPEDPNQDPPEDDSXCQCQACGPHQAAGPDLGSSNDGCPQLFQERSVIVENSSGSXSASELLKPMKKRKRREYQSPSEEESEPEAMEKQEEGKDPEGQPXASXPESEEWSSSQPAXGEKKECWSWESYLEEQKAIXAPVSLFQDSQAVXHNKNGFKLGMKLEGIDPQHPSMYFILXVAEVCGYRLRLHFDGYSECHDFWVNANSPDIHPAGWFEKXGHKLQPPKGYKEEEFSWSQYLRSXRAQAAPKHLFVSQSHSPPPLGFQVGMKLEAVDRMNPSLVCVASVXDVVDSRFLVHFDNWDDXYDYWCDPSSPYIHPVGWCQKQGKPLXPPQDYPDPDNFCWEKYLEEXGASAVPXWAFKVRPPHSFLVNMKLEAVDRRNPALIRVASVEDVEDHRIKIHFDGWSHGYDFWIDADHPDIHPAGWCSKXGHPLQPPLGPREPSSASPGGCPPLSYRSLPHXRXSKYSFHHRKCPXPGCDGSGHVXGKFXAHHCLSGCPLAERNQSRLKAELSDSEASARKKNLSGFSPRKKPRHHGRIGRPPKYRKIPQEDFQXLXPDVVHQSLFMSALSAHPDRSLSVCWEQHCKLLPGVAGISASXVAKWXIDEVFGFVQXLXGCEDQARLFKDEARIVRVXHVSGKXLVWXVAQLGDLVCSDHLQEGKGILEXGVHSLLCSLPXHLLAKLSFASDSQY

SEQ ID NO: 14665 - protein, 538 aa, Homo sapiens
  MOD_RES (5)..(5): Selenocysteine
  MOD_RES (18)..(18): Selenocysteine
  MOD_RES (45)..(45): Selenocysteine
  MOD_RES (85)..(85): Selenocysteine
  MOD_RES (109)..(109): Selenocysteine
  MOD_RES (154)..(154): Selenocysteine
  MOD_RES (171)..(171): Selenocysteine
  MOD_RES (197)..(197): Selenocysteine
  MOD_RES (217)..(217): Selenocysteine
  MOD_RES (224)..(224): Selenocysteine
  MOD_RES (296)..(296): Selenocysteine
  MOD_RES (328)..(328): Selenocysteine
  MOD_RES (330)..(330): Selenocysteine
  MOD_RES (342)..(342): Selenocysteine
  MOD_RES (352)..(352): Selenocysteine
  MOD_RES (356)..(356): Selenocysteine
  MOD_RES (421)..(421): Selenocysteine
  MOD_RES (423)..(423): Selenocysteine
  MOD_RES (465)..(465): Selenocysteine
  MOD_RES (470)..(470): Selenocysteine
  MOD_RES (480)..(480): Selenocysteine
  MOD_RES (482)..(482): Selenocysteine
  MOD_RES (505)..(505): Selenocysteine
  MOD_RES (536)..(536): Selenocysteine
QKAIXAPVSLFQDSQAVXHNKNGFKLGMKLEGIDPQHPSMYFILXVAEVCGYRLRLHFDGYSECHDFWVNANSPDIHPAGWFEKXGHKLQPPKGYKEEEFSWSQYLRSXRAQAAPKHLFVSQSHSPPPLGFQVGMKLEAVDRMNPSLVCVASVXDVVDSRFLVHFDNWDDXYDYWCDPSSPYIHPVGWCQKQGKPLXPPQDYPDPDNFCWEKYLEEXGASAVPXWAFKVRPPHSFLVNMKLEAVDRRNPALIRVASVEDVEDHRIKIHFDGWSHGYDFWIDADHPDIHPAGWCSKXGHPLQPPLGPREPSSASPGGCPPLSYRSLPHXRXSKYSFHHRKCPXPGCDGSGHVXGKFXAHHCLSGCPLAERNQSRLKAELSDSEASARKKNLSGFSPRKKPRHHGRIGRPPKYRKIPQEDFQXLXPDVVHQSLFMSALSAHPDRSLSVCWEQHCKLLPGVAGISASXVAKWXIDEVFGFVQXLXGCEDQARLFKDEMIDGEAFLLLXQADIVKIMSVKLGPALKIYNAILMFKNADDXLK

SEQ ID NO: 14666 - protein, 45 aa, Homo sapiens
  MOD_RES (1)..(1): Any amino acid
  MOD_RES (21)..(21): Selenocysteine
  MOD_RES (33)..(33): Selenocysteine
XDFWVNANSPDIHPAGWFEKXGHKLQPPKESPXPGLPGGHEAGGC

SEQ ID NO: 14667 - protein, 190 aa, Homo sapiens
  MOD_RES (2)..(2): Selenocysteine
  MOD_RES (8)..(8): Selenocysteine
  MOD_RES (27)..(27): Selenocysteine
  MOD_RES (47)..(47): Selenocysteine
  MOD_RES (59)..(59): Selenocysteine
  MOD_RES (61)..(63): Selenocysteine
  MOD_RES (68)..(68): Selenocysteine
  MOD_RES (74)..(74): Selenocysteine
  MOD_RES (89)..(89): Selenocysteine
  MOD_RES (96)..(96): Selenocysteine
  MOD_RES (102)..(102): Selenocysteine
  MOD_RES (183)..(183): Selenocysteine
MXESASSXSGQEFDVFSVMDWKDGVGXLPGSDLKFRVNEFGALEVIXDENEMENVKKAXAXXXWMVPXAQEAPXSPPSSRPVFPPAYWXSPPGCPXVFSEKXGMPFRLKDPVKVEGLQFCENCCQYGNVDECLSGGNYCSQNCARHIKDKDQKEERDVEEDNEEEDPKCSRKKKPKLSLKADXKEDGEER

SEQ ID NO: 14668 - protein, 780 aa, Homo sapiens
  MOD_RES (2)..(2): Selenocysteine
  MOD_RES (8)..(8): Selenocysteine
  MOD_RES (27)..(27): Selenocysteine
  MOD_RES (47)..(47): Selenocysteine
  MOD_RES (59)..(59): Selenocysteine
  MOD_RES (61)..(63): Selenocysteine
  MOD_RES (68)..(68): Selenocysteine
  MOD_RES (74)..(74): Selenocysteine
  MOD_RES (89)..(89): Selenocysteine
  MOD_RES (96)..(96): Selenocysteine
  MOD_RES (102)..(102): Selenocysteine
  MOD_RES (183)..(183): Selenocysteine
  MOD_RES (285)..(285): Selenocysteine
  MOD_RES (325)..(325): Selenocysteine
  MOD_RES (344)..(344): Selenocysteine
  MOD_RES (348)..(348): Selenocysteine
  MOD_RES (365)..(365): Selenocysteine
  MOD_RES (392)..(392): Selenocysteine
  MOD_RES (394)..(394): Selenocysteine
  MOD_RES (435)..(435): Selenocysteine
  MOD_RES (438)..(438): Selenocysteine
  MOD_RES (457)..(457): Selenocysteine
  MOD_RES (496)..(496): Selenocysteine
  MOD_RES (500)..(500): Selenocysteine
  MOD_RES (536)..(536): Selenocysteine
  MOD_RES (560)..(560): Selenocysteine
  MOD_RES (617)..(617): Selenocysteine
  MOD_RES (644)..(644): Selenocysteine
  MOD_RES (650)..(650): Selenocysteine
  MOD_RES (662)..(662): Selenocysteine
  MOD_RES (696)..(696): Selenocysteine
  MOD_RES (710)..(710): Selenocysteine
  MOD_RES (744)..(744): Selenocysteine
  MOD_RES (746)..(746): Selenocysteine
MXESASSXSGQEFDVFSVMDWKDGVGXLPGSDLKFRVNEFGALEVIXDENEMENVKKAXAXXXWMVPXAQEAPXSPPSSRPVFPPAYWXSPPGCPXVFSEKXGMPFRLKDPVKVEGLQFCENCCQYGNVDECLSGGNYCSQNCARHIKDKDQKEERDVEEDNEEEDPKCSRKKKPKLSLKADXKEDGEERDDEMENKQDVRILRGSQRARRKRRGDSAVLKQGLPPKGKKAWCWASYLEEEKAVAVPAKLFKEHQSFPYNKNGFKVGMKLEGVDPEHQSVYCVLXVAEVCGYRIKLHFDGYSDCYDFWVNADALDIHPVGWCEKXGHKLHPPKGYKEEEFNWQXYLKXCKAQAAPKSLFENQNIXVIPSGFRVGMKLEAVDKKNPSFICVAXVXDMVDNRFLVHFDNWDESYDYWCEASSPHIHPVGWCKEHRRXLIXPPGYPNVKHFSWDKYLEEXNSLPAPARAFKVKPPHGFQKKMKLEVVDKRNPMFIRVAXVADXDDHRVKVHFDGWNNCYDYWIDADSPDIHPVGWCSKXGHPLQPPLSPLELMEASEHGGCSXPGCKGIGHFKRARHLGPHSAANCPYSEINLNKDRIFPDRLSGEMPPASPSFPRNKRXDANESSSSPEIRDQHADDVKEDFEERXESEMRXSHEARGAREEPXVQQAQRRSAVFLSFKSPIPCLPLRWEQQSKLLPXVAGIPASKVSKWSXDEVSEFIQSLPGCEEHGKVFKDEQIDGEAFLLMXQXDIVKIMSIKLGPALKIFNSILMFKAAEKNSHNEL

SEQ ID NO: 14669 - protein, 163 aa, Homo sapiens
  MOD_RES (2)..(2): Selenocysteine
  MOD_RES (8)..(8): Selenocysteine
  MOD_RES (27)..(27): Selenocysteine
  MOD_RES (47)..(47): Selenocysteine
  MOD_RES (59)..(59): Selenocysteine
  MOD_RES (61)..(63): Selenocysteine
  MOD_RES (68)..(68): Selenocysteine
  MOD_RES (74)..(74): Selenocysteine
  MOD_RES (88)..(88): Selenocysteine
  MOD_RES (93)..(93): Selenocysteine
  MOD_RES (95)..(95): Selenocysteine
  MOD_RES (100)..(100): Selenocysteine
  MOD_RES (104)..(104): Selenocysteine
  MOD_RES (109)..(109): Selenocysteine
  MOD_RES (124)..(124): Selenocysteine
  MOD_RES (131)..(131): Selenocysteine
  MOD_RES (137)..(137): Selenocysteine
MXESASSXSGQEFDVFSVMDWKDGVGXLPGSDLKFRVNEFGALEVIXDENEMENVKKAXAXXXWMVPXAQEAYXGDLAKSLPLFFSSXPMVVXNXYMLMXPKSXSPAPXSPPSSRPVFPPAYWXSPPGCPXVFSEKXGMPFRLKDPVKVEGLQFCENCCQYGN

SEQ ID NO: 14670 - protein, 755 aa, Homo sapiens
  MOD_RES (2)..(2): Selenocysteine
  MOD_RES (8)..(8): Selenocysteine
  MOD_RES (27)..(27): Selenocysteine
  MOD_RES (47)..(47): Selenocysteine
  MOD_RES (59)..(59): Selenocysteine
  MOD_RES (61)..(63): Selenocysteine
  MOD_RES (68)..(68): Selenocysteine
  MOD_RES (77)..(77): Selenocysteine
  MOD_RES (158)..(158): Selenocysteine
  MOD_RES (260)..(260): Selenocysteine
  MOD_RES (300)..(300): Selenocysteine
  MOD_RES (319)..(319): Selenocysteine
  MOD_RES (323)..(323): Selenocysteine
  MOD_RES (340)..(340): Selenocysteine
  MOD_RES (367)..(367): Selenocysteine
  MOD_RES (369)..(369): Selenocysteine
  MOD_RES (410)..(410): Selenocysteine
  MOD_RES (413)..(413): Selenocysteine
  MOD_RES (432)..(432): Selenocysteine
  MOD_RES (471)..(471): Selenocysteine
  MOD_RES (475)..(475): Selenocysteine
  MOD_RES (511)..(511): Selenocysteine
  MOD_RES (535)..(535): Selenocysteine
  MOD_RES (592)..(592): Selenocysteine
  MOD_RES (619)..(619): Selenocysteine
  MOD_RES (625)..(625): Selenocysteine
  MOD_RES (637)..(637): Selenocysteine
  MOD_RES (671)..(671): Selenocysteine
  MOD_RES (685)..(685): Selenocysteine
  MOD_RES (719)..(719): Selenocysteine
  MOD_RES (721)..(721): Selenocysteine
MXESASSXSGQEFDVFSVMDWKDGVGXLPGSDLKFRVNEFGALEVIXDENEMENVKKAXAXXXWMVPXAQEVFSEKXGMPFRLKDPVKVEGLQFCENCCQYGNVDECLSGGNYCSQNCARHIKDKDQKEERDVEEDNEEEDPKCSRKKKPKLSLKADXKEDGEERDDEMENKQDVRILRGSQRARRKRRGDSAVLKQGLPPKGKKAWCWASYLEEEKAVAVPAKLFKEHQSFPYNKNGFKVGMKLEGVDPEHQSVYCVLXVAEVCGYRIKLHFDGYSDCYDFWVNADALDIHPVGWCEKXGHKLHPPKGYKEEEFNWQXYLKXCKAQAAPKSLFENQNIXVIPSGFRVGMKLEAVDKKNPSFICVAXVXDMVDNRFLVHFDNWDESYDYWCEASSPHIHPVGWCKEHRRXLIXPPGYPNVKHFSWDKYLEEXNSLPAPARAFKVKPPHGFQKKMKLEVVDKRNPMFIRVAXVADXDDHRVKVHFDGWNNCYDYWIDADSPDIHPVGWCSKXGHPLQPPLSPLELMEASEHGGCSXPGCKGIGHFKRARHLGPHSAANCPYSEINLNKDRIFPDRLSGEMPPASPSFPRNKRXDANESSSSPEIRDQHADDVKEDFEERXESEMRXSHEARGAREEPXVQQAQRRSAVFLSFKSPIPCLPLRWEQQSKLLPXVAGIPASKVSKWSXDEVSEFIQSLPGCEEHGKVFKDEQIDGEAFLLMXQXDIVKIMSIKLGPALKIFNSILMFKAAEKNSHNEL

SEQ ID NO: 14671 - protein, 80 aa, Homo sapiens
  MOD_RES (37)..(38): Selenocysteine
MKQPNRKRKLNMDSKERLDQDGRLEQAEEEKKPKDSXXPLSHVPSAAAQGAWSWEWYLKEQKAVAAPVELFSKDQSFPEH

SEQ ID NO: 14672 - protein, 122 aa, Homo sapiens
  MOD_RES (37)..(38): Selenocysteine
MKQPNRKRKLNMDSKERLDQDGRLEQAEEEKKPKDSXXPLSHVPSAAAQGAWSWEWYLKEQKAVAAPVELFSKDQSFPEHENGFQIGMRLEGIDPRHPSVFCVLSVAEVCGYRLRLHFDGYL

SEQ ID NO: 14673 - protein, 209 aa, Homo sapiens
  MOD_RES (37)..(38): Selenocysteine
  MOD_RES (129)..(129): Selenocysteine
  MOD_RES (145)..(145): Selenocysteine
MKQPNRKRKLNMDSKERLDQDGRLEQAEEEKKPKDSXXPLSHVPSAAAQGAWSWEWYLKEQKAVAAPVELFSKDQSFPEHENGFQIGMRLEGIDPRHPSVFCVLSVAEVCGYRLRLHFDGYLSCYDFWXNAGSPDIHPVGWCEKXKHELHIPKGYRKDKFVWMDYLKACKLQNAPKKLFRNRSPNGPMSKEFQVGMKLEAVDRKNPSLV

SEQ ID NO: 14674 - protein, 534 aa, Homo sapiens
  MOD_RES (37)..(38): Selenocysteine
  MOD_RES (129)..(129): Selenocysteine
  MOD_RES (145)..(145): Selenocysteine
  MOD_RES (213)..(213): Selenocysteine
  MOD_RES (256)..(256): Selenocysteine
  MOD_RES (272)..(272): Selenocysteine
  MOD_RES (278)..(278): Selenocysteine
  MOD_RES (280)..(280): Selenocysteine
  MOD_RES (317)..(317): Selenocysteine
  MOD_RES (357)..(357): Selenocysteine
  MOD_RES (367)..(367): Selenocysteine
  MOD_RES (381)..(381): Selenocysteine
  MOD_RES (416)..(416): Selenocysteine
  MOD_RES (425)..(425): Selenocysteine
  MOD_RES (509)..(509): Selenocysteine
MKQPNRKRKLNMDSKERLDQDGRLEQAEEEKKPKDSXXPLSHVPSAAAQGAWSWEWYLKEQKAVAAPVELFSKDQSFPEHENGFQIGMRLEGIDPRHPSVFCVLSVAEVCGYRLRLHFDGYLSCYDFWXNAGSPDIHPVGWCEKXKHELHIPKGYRKDKFVWMDYLKACKLQNAPKKLFRNRSPNGPMSKEFQVGMKLEAVDRKNPSLVCVAXIADIVEDRLLVHFDNWDDSYDYWCDVNSPYVQPVGWCQENGRXLIAPQGYPNPENFSWXEYLEAXQXNAVPAKVFKMRLPHGFLPNMKLEVVDKRNPRLIRVAXIVDVDDQRVKVHFDGWDHKYDYWVEADSPDIHPIGWCDVXGHPLEVPQRXNDLKILPGQAVCPXPGCRGIGHIRGPRYSGHHSAFGCPYSDMNLKKEAXLHDRLREQXQANLESDSSHSKSKSLCSLNFNGKHEKVNSQPRLVQQAKCLKIKGKEDIDLDNLFRGRVRWLMPVIPALWEAEAGRSRDQEIKXILANAVKPRLYQKYKKLARRGGGCL

SEQ ID NO: 14675 - protein, 614 aa, Homo sapiens
  MOD_RES (37)..(38): Selenocysteine
  MOD_RES (129)..(129): Selenocysteine
  MOD_RES (145)..(145): Selenocysteine
  MOD_RES (213)..(213): Selenocysteine
  MOD_RES (256)..(256): Selenocysteine
  MOD_RES (272)..(272): Selenocysteine
  MOD_RES (278)..(278): Selenocysteine
  MOD_RES (280)..(280): Selenocysteine
  MOD_RES (317)..(317): Selenocysteine
  MOD_RES (357)..(357): Selenocysteine
  MOD_RES (367)..(367): Selenocysteine
  MOD_RES (381)..(381): Selenocysteine
  MOD_RES (416)..(416): Selenocysteine
  MOD_RES (425)..(425): Selenocysteine
  MOD_RES (500)..(500): Selenocysteine
  MOD_RES (535)..(535): Selenocysteine
  MOD_RES (570)..(570): Selenocysteine
  MOD_RES (572)..(572): Selenocysteine
MKQPNRKRKLNMDSKERLDQDGRLEQAEEEKKPKDSXXPLSHVPSAAAQGAWSWEWYLKEQKAVAAPVELFSKDQSFPEHENGFQIGMRLEGIDPRHPSVFCVLSVAEVCGYRLRLHFDGYLSCYDFWXNAGSPDIHPVGWCEKXKHELHIPKGYRKDKFVWMDYLKACKLQNAPKKLFRNRSPNGPMSKEFQVGMKLEAVDRKNPSLVCVAXIADIVEDRLLVHFDNWDDSYDYWCDVNSPYVQPVGWCQENGRXLIAPQGYPNPENFSWXEYLEAXQXNAVPAKVFKMRLPHGFLPNMKLEVVDKRNPRLIRVAXIVDVDDQRVKVHFDGWDHKYDYWVEADSPDIHPIGWCDVXGHPLEVPQRXNDLKILPGQAVCPXPGCRGIGHIRGPRYSGHHSAFGCPYSDMNLKKEAXLHDRLREQXQANLESDSSHSKSKSLCSLNFNGKHEKVNSQPRLVQQAKCLKIKGKEDIDLDNLFREYSVEQAQQVLHQSVSMSXVSAHPFRDLPLGREQHCKLLPGVADIRASQVARWXVDEVAEFVQSLLGCEEHAKCFKKEQIDGKAFLLLXQXDIVKVMKIKLGPALKIYNSILMFRHSQELPEEDIASGQEVRG

SEQ ID NO: 14676 - protein, 623 aa, Homo sapiens
  MOD_RES (37)..(38): Selenocysteine
  MOD_RES (129)..(129): Selenocysteine
  MOD_RES (145)..(145): Selenocysteine
  MOD_RES (213)..(213): Selenocysteine
  MOD_RES (256)..(256): Selenocysteine
  MOD_RES (272)..(272): Selenocysteine
  MOD_RES (278)..(278): Selenocysteine
  MOD_RES (280)..(280): Selenocysteine
  MOD_RES (317)..(317): Selenocysteine
  MOD_RES (357)..(357): Selenocysteine
  MOD_RES (367)..(367): Selenocysteine
  MOD_RES (381)..(381): Selenocysteine
  MOD_RES (416)..(416): Selenocysteine
  MOD_RES (425)..(425): Selenocysteine
  MOD_RES (509)..(509): Selenocysteine
  MOD_RES (544)..(544): Selenocysteine
  MOD_RES (579)..(579): Selenocysteine
  MOD_RES (581)..(581): Selenocysteine
MKQPNRKRKLNMDSKERLDQDGRLEQAEEEKKPKDSXXPLSHVPSAAAQGAWSWEWYLKEQKAVAAPVELFSKDQSFPEHENGFQIGMRLEGIDPRHPSVFCVLSVAEVCGYRLRLHFDGYLSCYDFWXNAGSPDIHPVGWCEKXKHELHIPKGYRKDKFVWMDYLKACKLQNAPKKLFRNRSPNGPMSKEFQVGMKLEAVDRKNPSLVCVAXIADIVEDRLLVHFDNWDDSYDYWCDVNSPYVQPVGWCQENGRXLIAPQGYPNPENFSWXEYLEAXQXNAVPAKVFKMRLPHGFLPNMKLEVVDKRNPRLIRVAXIVDVDDQRVKVHFDGWDHKYDYWVEADSPDIHPIGWCDVXGHPLEVPQRXNDLKILPGQAVCPXPGCRGIGHIRGPRYSGHHSAFGCPYSDMNLKKEAXLHDRLREQXQANLESDSSHSKSKSLCSLNFNGKHEKVNSQPRLVQQAKCLKIKGKEDIDLDNLFRVLVLHPRGLEYSVEQAQQVLHQSVSMSXVSAHPFRDLPLGREQHCKLLPGVADIRASQVARWXVDEVAEFVQSLLGCEEHAKCFKKEQIDGKAFLLLXQXDIVKVMKIKLGPALKIYNSILMFRHSQELPEEDIASGQEVRG

SEQ ID NO: 14677 - protein, 127 aa, Homo sapiens
  MOD_RES (4)..(5): Selenocysteine
  MOD_RES (27)..(27): Selenocysteine
  MOD_RES (37)..(37): Selenocysteine
  MOD_RES (56)..(59): Selenocysteine
  MOD_RES (63)..(63): Selenocysteine
  MOD_RES (71)..(71): Selenocysteine
  MOD_RES (75)..(75): Selenocysteine
MKFXXLLFLAAVAGALVYAEDASSDSXGADPAQEAGXSKPNEEISGPAEPASPPEXXXXAQEXSAAAVQGXAKVXSSRQELNPLKQALAKAGKGMHGGVPGGKQFIENGSEFAQKLLKKFSLLKPWA

SEQ ID NO: 14678 - protein, 138 aa, Homo sapiens
  MOD_RES (4)..(5): Selenocysteine
  MOD_RES (27)..(27): Selenocysteine
  MOD_RES (37)..(37): Selenocysteine
  MOD_RES (56)..(59): Selenocysteine
  MOD_RES (63)..(63): Selenocysteine
  MOD_RES (71)..(71): Selenocysteine
  MOD_RES (75)..(75): Selenocysteine
  MOD_RES (95)..(95): Selenocysteine
MKFXXLLFLAAVAGALVYAEDASSDSXGADPAQEAGXSKPNEEISGPAEPASPPEXXXXAQEXSAAAVQGXAKVXSSRQELNPLKSIVEKSILLXEQALAKAGKGMHGGVPGGKQFIENGSEFAQKLLKKFSLLKPWA

SEQ ID NO: 14679 - protein, 85 aa, Homo sapiens
  MOD_RES (7)..(7): Selenocysteine
  MOD_RES (26)..(29): Selenocysteine
  MOD_RES (33)..(33): Selenocysteine
  MOD_RES (41)..(41): Selenocysteine
  MOD_RES (45)..(45): Selenocysteine
PAQEAGXSKPNEEISGPAEPASPPEXXXXAQEXSAAAVQGXAKVXSSRQELNPLKQALAKAGKGMHGGVPGGKQFIESECIPRWK

SEQ ID NO: 14680 - protein, 360 aa, Homo sapiens
  MOD_RES (47)..(47): Selenocysteine
  MOD_RES (62)..(62): Selenocysteine
  MOD_RES (100)..(100): Selenocysteine
  MOD_RES (172)..(172): Selenocysteine
  MOD_RES (244)..(244): Selenocysteine
  MOD_RES (258)..(258): Selenocysteine
  MOD_RES (266)..(266): Selenocysteine
  MOD_RES (269)..(269): Selenocysteine
  MOD_RES (290)..(290): Selenocysteine
  MOD_RES (295)..(295): Selenocysteine
  MOD_RES (299)..(299): Selenocysteine
  MOD_RES (310)..(310): Selenocysteine
  MOD_RES (317)..(317): Selenocysteine
  MOD_RES (330)..(330): Selenocysteine
  MOD_RES (332)..(332): Selenocysteine
  MOD_RES (345)..(345): Selenocysteine
  MOD_RES (347)..(347): Selenocysteine
  MOD_RES (352)..(352): Selenocysteine
MWEAQFLGLLFLQPLWVAPVKPLQPGAEVPVVWAQEGAPAQLPCSPXIPLQDLSLLRRAGVXWQHQPDSGPPAAAPGHPLAPGPHPAAPSSWGPRPRRYXVLSVGPGGLRSGRLPLQPRVQLDERGRQRGDFSLWLRPARRADAGEYRAAVHLRDRALSCRLRLRLGQASMXASPPGSLRASDWVILNCSFSRPDRPASVHWFRNRGQGRVPVRESPHHHLAESFLFLPQVSPMDSGPWGCILXYRDGFNVSIMYNLXVLGLEPPXPLXVYAGAGSRVGLPCRLPAGVGXRSFLXAKWXPPGGGPDLLVXGDNGDFXLRLEDVSQAQAGXYXCHIHLQEQQLNAXVXLAIIXGQPQVGKE

SEQ ID NO: 14681 - protein, 525 aa, Homo sapiens
  MOD_RES (47)..(47): Selenocysteine
  MOD_RES (62)..(62): Selenocysteine
  MOD_RES (100)..(100): Selenocysteine
  MOD_RES (172)..(172): Selenocysteine
  MOD_RES (244)..(244): Selenocysteine
  MOD_RES (258)..(258): Selenocysteine
  MOD_RES (266)..(266): Selenocysteine
  MOD_RES (269)..(269): Selenocysteine
  MOD_RES (290)..(290): Selenocysteine
  MOD_RES (295)..(295): Selenocysteine
  MOD_RES (299)..(299): Selenocysteine
  MOD_RES (310)..(310): Selenocysteine
  MOD_RES (317)..(317): Selenocysteine
  MOD_RES (330)..(330): Selenocysteine
  MOD_RES (332)..(332): Selenocysteine
  MOD_RES (345)..(345): Selenocysteine
  MOD_RES (347)..(347): Selenocysteine
  MOD_RES (352)..(352): Selenocysteine
  MOD_RES (354)..(354): Selenocysteine
  MOD_RES (372)..(372): Selenocysteine
  MOD_RES (387)..(387): Selenocysteine
  MOD_RES (428)..(428): Selenocysteine
  MOD_RES (466)..(466): Selenocysteine
MWEAQFLGLLFLQPLWVAPVKPLQPGAEVPVVWAQEGAPAQLPCSPXIPLQDLSLLRRAGVXWQHQPDSGPPAAAPGHPLAPGPHPAAPSSWGPRPRRYXVLSVGPGGLRSGRLPLQPRVQLDERGRQRGDFSLWLRPARRADAGEYRAAVHLRDRALSCRLRLRLGQASMXASPPGSLRASDWVILNCSFSRPDRPASVHWFRNRGQGRVPVRESPHHHLAESFLFLPQVSPMDSGPWGCILXYRDGFNVSIMYNLXVLGLEPPXPLXVYAGAGSRVGLPCRLPAGVGXRSFLXAKWXPPGGGPDLLVXGDNGDFXLRLEDVSQAQAGXYXCHIHLQEQQLNAXVXLAIIXVXPKSFGSPGSLGKLLCEVXPVSGQERFVWSSLDXPSQRSFSGPWLEAQEAQLLSQPWQCQLYQGERLLGAAVYFXELSSPGAQRSGRAPGALPAGHLLLFLILGVLSLLLLVXGAFGFHLWRRQWRPRRFSALEQGIHPPQAQSKIEELEQEPEPEPEPEPEPEPEPEPEQL

SEQ ID NO: 14682 - protein, 123 aa, Homo sapiens
  MOD_RES (23)..(23): Selenocysteine
  MOD_RES (48)..(48): Selenocysteine
  MOD_RES (52)..(52): Selenocysteine
  MOD_RES (57)..(57): Selenocysteine
  MOD_RES (67)..(67): Selenocysteine
  MOD_RES (105)..(105): Selenocysteine
MRFFVPLFLVGILFPAILAKQFXKCELSQLLKDIDGYGGIALPELICXMFHXSGYDXQAIVENNESXEYGLFQISNKLWCKSSQVPQSRNICDISCDKFLDDDIXDDIMCAKKILDIKGIDYW

SEQ ID NO: 14683 - protein, 142 aa, Homo sapiens
  MOD_RES (23)..(23): Selenocysteine
  MOD_RES (48)..(48): Selenocysteine
  MOD_RES (52)..(52): Selenocysteine
  MOD_RES (57)..(57): Selenocysteine
  MOD_RES (67)..(67): Selenocysteine
  MOD_RES (105)..(105): Selenocysteine
  MOD_RES (131)..(131): Selenocysteine
MRFFVPLFLVGILFPAILAKQFXKCELSQLLKDIDGYGGIALPELICXMFHXSGYDXQAIVENNESXEYGLFQISNKLWCKSSQVPQSRNICDISCDKFLDDDIXDDIMCAKKILDIKGIDYWLAHKALCXEKLEQWLCEKL

SEQ ID NO: 14684 - protein, 3075 aa, Homo sapiens
  MOD_RES (37)..(37): Selenocysteine
  MOD_RES (40)..(40): Selenocysteine
  MOD_RES (89)..(89): Selenocysteine
  MOD_RES (108)..(108): Selenocysteine
  MOD_RES (110)..(110): Selenocysteine
  MOD_RES (144)..(145): Selenocysteine
  MOD_RES (166)..(166): Selenocysteine
  MOD_RES (173)..(173): Selenocysteine
  MOD_RES (183)..(183): Selenocysteine
  MOD_RES (199)..(199): Selenocysteine
  MOD_RES (219)..(219): Selenocysteine
  MOD_RES (233)..(233): Selenocysteine
  MOD_RES (240)..(240): Selenocysteine
  MOD_RES (254)..(254): Selenocysteine
  MOD_RES (284)..(285): Selenocysteine
  MOD_RES (296)..(296): Selenocysteine
  MOD_RES (317)..(317): Selenocysteine
  MOD_RES (323)..(323): Selenocysteine
  MOD_RES (351)..(351): Selenocysteine
  MOD_RES (368)..(368): Selenocysteine
  MOD_RES (375)..(375): Selenocysteine
  MOD_RES (434)..(434): Selenocysteine
  MOD_RES (450)..(450): Selenocysteine
  MOD_RES (468)..(468): Selenocysteine
  MOD_RES (531)..(531): Selenocysteine
  MOD_RES (557)..(557): Selenocysteine
  MOD_RES (581)..(581): Selenocysteine
  MOD_RES (590)..(590): Selenocysteine
  MOD_RES (599)..(599): Selenocysteine
  MOD_RES (618)..(618): Selenocysteine
  MOD_RES (621)..(621): Selenocysteine
  MOD_RES (661)..(661): Selenocysteine
  MOD_RES (667)..(667): Selenocysteine
  MOD_RES (716)..(716): Selenocysteine
  MOD_RES (718)..(718): Selenocysteine
  MOD_RES (764)..(765): Selenocysteine
  MOD_RES (784)..(784): Selenocysteine
  MOD_RES (796)..(796): Selenocysteine
  MOD_RES (805)..(805): Selenocysteine
  MOD_RES (840)..(840): Selenocysteine
  MOD_RES (867)..(867): Selenocysteine
  MOD_RES (877)..(877): Selenocysteine
  MOD_RES (895)..(895): Selenocysteine
  MOD_RES (918)..(918): Selenocysteine
  MOD_RES (928)..(928): Selenocysteine
  MOD_RES (964)..(964): Selenocysteine
  MOD_RES (996)..(996): Selenocysteine
  MOD_RES (1003)..(1003): Selenocysteine
  MOD_RES (1006)..(1006): Selenocysteine
  MOD_RES (1011)..(1011): Selenocysteine
  MOD_RES (1020)..(1020): Selenocysteine
  MOD_RES (1052)..(1052): Selenocysteine
  MOD_RES (1060)..(1060): Selenocysteine
  MOD_RES (1097)..(1097): Selenocysteine
  MOD_RES (1115)..(1115): Selenocysteine
  MOD_RES (1136)..(1136): Selenocysteine
  MOD_RES (1168)..(1168): Selenocysteine
  MOD_RES (1171)..(1171): Selenocysteine
  MOD_RES (1190)..(1191): Selenocysteine
  MOD_RES (1207)..(1207): Selenocysteine
  MOD_RES (1251)..(1251): Selenocysteine
  MOD_RES (1306)..(1306): Selenocysteine
  MOD_RES (1368)..(1368): Selenocysteine
  MOD_RES (1411)..(1411): Selenocysteine
  MOD_RES (1416)..(1416): Selenocysteine
  MOD_RES (1426)..(1426): Selenocysteine
  MOD_RES (1435)..(1435): Selenocysteine
  MOD_RES (1443)..(1443): Selenocysteine
  MOD_RES (1465)..(1465): Selenocysteine
  MOD_RES (1501)..(1501): Selenocysteine
  MOD_RES (1524)..(1524): Selenocysteine
  MOD_RES (1551)..(1551): Selenocysteine
  MOD_RES (1581)..(1581): Selenocysteine
  MOD_RES (1597)..(1598): Selenocysteine
  MOD_RES (1626)..(1626): Selenocysteine
  MOD_RES (1634)..(1634): Selenocysteine
  MOD_RES (1640)..(1640): Selenocysteine
  MOD_RES (1647)..(1647): Selenocysteine
  MOD_RES (1669)..(1669): Selenocysteine
  MOD_RES (1675)..(1676): Selenocysteine
  MOD_RES (1680)..(1680): Selenocysteine
  MOD_RES (1691)..(1691): Selenocysteine
  MOD_RES (1700)..(1700): Selenocysteine
  MOD_RES (1712)..(1712): Selenocysteine
  MOD_RES (1719)..(1719): Selenocysteine
  MOD_RES (1806)..(1806): Selenocysteine
  MOD_RES (1824)..(1824): Selenocysteine
  MOD_RES (1900)..(1900): Selenocysteine
  MOD_RES (1926)..(1926): Selenocysteine
  MOD_RES (1928)..(1928): Selenocysteine
  MOD_RES (1930)..(1930): Selenocysteine
  MOD_RES (1976)..(1976): Selenocysteine
  MOD_RES (1987)..(1987): Selenocysteine
  MOD_RES (1990)..(1990): Selenocysteine
  MOD_RES (2011)..(2011): Selenocysteine
  MOD_RES (2016)..(2016): Selenocysteine
  MOD_RES (2025)..(2025): Selenocysteine
  MOD_RES (2039)..(2039): Selenocysteine
  MOD_RES (2048)..(2049): Selenocysteine
  MOD_RES (2053)..(2053): Selenocysteine
  MOD_RES (2061)..(2061): Selenocysteine
  MOD_RES (2064)..(2064): Selenocysteine
  MOD_RES (2137)..(2137): Selenocysteine
  MOD_RES (2141)..(2141): Selenocysteine
  MOD_RES (2143)..(2143): Selenocysteine
  MOD_RES (2148)..(2148): Selenocysteine
  MOD_RES (2162)..(2162): Selenocysteine
  MOD_RES (2187)..(2187): Selenocysteine
  MOD_RES (2228)..(2228): Selenocysteine
  MOD_RES (2230)..(2230): Selenocysteine
  MOD_RES (2236)..(2236): Selenocysteine
  MOD_RES (2246)..(2246): Selenocysteine
  MOD_RES (2266)..(2266): Selenocysteine
  MOD_RES (2325)..(2325): Selenocysteine
  MOD_RES (2327)..(2327): Selenocysteine
  MOD_RES (2335)..(2335): Selenocysteine
  MOD_RES (2350)..(2350): Selenocysteine
  MOD_RES (2367)..(2367): Selenocysteine
  MOD_RES (2375)..(2375): Selenocysteine
  MOD_RES (2378)..(2378): Selenocysteine
  MOD_RES (2386)..(2386): Selenocysteine
  MOD_RES (2409)..(2409): Selenocysteine
  MOD_RES (2414)..(2414): Selenocysteine
  MOD_RES (2419)..(2419): Selenocysteine
  MOD_RES (2450)..(2451): Selenocysteine
  MOD_RES (2467)..(2467): Selenocysteine
  MOD_RES (2513)..(2513): Selenocysteine
  MOD_RES (2516)..(2517): Selenocysteine
  MOD_RES (2564)..(2564): Selenocysteine
  MOD_RES (2575)..(2575): Selenocysteine
  MOD_RES (2577)..(2577): Selenocysteine
  MOD_RES (2596)..(2596): Selenocysteine
  MOD_RES (2611)..(2611): Selenocysteine
  MOD_RES (2617)..(2617): Selenocysteine
  MOD_RES (2634)..(2634): Selenocysteine
  MOD_RES (2638)..(2638): Selenocysteine
  MOD_RES (2672)..(2672): Selenocysteine
  MOD_RES (2719)..(2719): Selenocysteine
  MOD_RES (2745)..(2745): Selenocysteine
  MOD_RES (2784)..(2784): Selenocysteine
  MOD_RES (2799)..(2799): Selenocysteine
  MOD_RES (2802)..(2802): Selenocysteine
  MOD_RES (2812)..(2812): Selenocysteine
  MOD_RES (2822)..(2822): Selenocysteine
  MOD_RES (2828)..(2828): Selenocysteine
  MOD_RES (2854)..(2854): Selenocysteine
  MOD_RES (2865)..(2865): Selenocysteine
  MOD_RES (2881)..(2881): Selenocysteine
  MOD_RES (2893)..(2893): Selenocysteine
  MOD_RES (2917)..(2917): Selenocysteine
  MOD_RES (2922)..(2922): Selenocysteine
  MOD_RES (2934)..(2934): Selenocysteine
  MOD_RES (2961)..(2961): Selenocysteine
  MOD_RES (2968)..(2968): Selenocysteine
  MOD_RES (2970)..(2970): Selenocysteine
  MOD_RES (2979)..(2979): Selenocysteine
  MOD_RES (2990)..(2990): Selenocysteine
  MOD_RES (3005)..(3005): Selenocysteine
  MOD_RES (3008)..(3008): Selenocysteine
  MOD_RES (3012)..(3012): Selenocysteine
  MOD_RES (3034)..(3034): Selenocysteine
  MOD_RES (3073)..(3073): Selenocysteine
MRGGVLLVLLLCVAAQCRQRGLFPAILNLASNAHISXNAXCGEKGPEMFCKLVEHVPGRPVRNPQCRICDGNSANPRERHPISHAIDGXNNWWQSPSIQNGREYHWVXIXLDLRQVFQVAYVIIKAANAPRPGNWILERSLDGXXFSPWQYYAVSDSECLSRYNIXPRRGPPXYRADDEVICXSYYSRLVPLEHGEIHXSLINGRPSADDLSPKLLEFXSARYIRLRLQRIRXLNADLMXLSHREPKELDPIVXRRYYYSIKDISVGGMCICYGHASSCPWDEXXKKLQCQCEHNXCGESCNRCCPGYHQQPWRPGXVSSGNXCEACNCHNKAKDCYYDESVAKQKKSLNXAGQFRGGGVCINCLQNXMGINCEXCIDGYYRPHKVSPYEDEPCRPCNCDPVGSLSSVCIKDDLHSDLHNGKQPGQCPCKEGYXGEKCDRCQLGYKDYPXCVSCGCNPVGSASDEPCXGPCVCKENVEGKACDRCKPGFYNLKEKNPRGCSECFCFGVSDVCSSLSWPVGQVNSMSGWLVXDLISPRKIPSQQDALGGRHQVSINNXAVMQRLAPKYYWAAPEAYLGNKLXAFGGFLKYXVSYDIPVEXVDSNLMSHADVIIKGNGLXLSXQAEGLSLQPYEEYLNVVRLVPENFQDFHSKRQIDRDQLMXVLANVXHLLIRANYNSAKMALYRLESVSLDIASSNAIDLVVAADVEHCECPQGYXGXSCESCLSGYYRVDGILFGGICQPCECHGHAAECNVHGVCIACAHNXXGVHCEQCLPGFYGEPSRGXPGDCQPCACPLXIASNNFSPXCHLNDGDEVVCDWCAPGYSGAWCERCADGYYGNPXVPGESCVPCDCSGNVDPSEAGHCDSVXGECLKCLGNXDGAHCERCADGFYGDAVXAKNCRACECHVKGSHSAVCHLEXGLCDCKPNVXGQQCDQCLHGYYGLDSGHGCRPCNCSVAGSVSDGCXDEGQCHCVPGVAGKRCDRCAHGFYAYQDGSCXPCDCPHXQNXCDPEXGECVCPPHXQGVKCEECEDGHWGYDAEVGCQACNCSLVGSXHHRCDVVXGHCQCKSKFGGRACDQCSLGYRDFPDCVPCDCDLRGXSGDACNLEQGLCGCVEEXGACPCKENVFGPQCNECREGXFALRADNPLGCSPCFCSGLSHLCSELEDYVRXPVXLGSDQPLLRVVSQSNLRGXXEGVYYQAPDFLLDAAXVRQHIRAEPFYWRLPQQFQGDQLMAYGGKLKYSVAFYSLDGVGXSNFEPQVLIKGGRIRKQVIYMDAPAPENGVRQEQEVAMRENFWKYFNSVSEKPVXREDFMSVLSDIEYILIKASYGQGLQQSRISDISMEVGRKAEKLHPEEEVASLLENCVCPPGXVGFSCQDCAPGYHRGKLPAGSDRGPRPLVAPCVPCSCNNHSDXCDPNXGKCLNCGDNXAGDHCDVCXSGYYGKVXGSASDCALCACPHSPPASFSPXCVLEGDHDFRCDACLLGYEGKHCERCSSSYYGNPQXPGGSCQKCDCNPHGSVHGDCDRXSGQCVCRLGASGLRCDECEPRHILMEXDCVSCDDECVGVLLNDLDEIGDAVLSLNLXGIIPVPYGILSNLENXXKYLQESLLKENMQKDLGKIKLEGVAEEXDNLQKKLXRMLASXQKVNRAXERIFKESQDLAIAIERLQMSIXEIMEKXXLNQXLDEDFLLPNSXLQNMQQNGXSLLEIMQIRDFXQLHQNAXLELKAAEDLLSQIQENYQKPLEELEVLKEAASHVLSKHNNELKAAEALVREAEAKMQESNHLLLMVNANLREFSDKKLHVQEEQNLXSELIVQGRGLIDAAAAQXDAVQDALEHLEDHQDKLLLWSAKIRHHIDDLVMHMSQRNAVDLVYRAEDHAAEFQRLADVLYSGLENIRNVSLNAXSAAYVHYNIQSLIEESEELARDAHRXVXEXSLLSESLVSNGKAAVQRSSRFLKEGNNLSRKLPGIALELSELRNKXNRFQENAVEIXRQXNESLLILRAIPKGIRDKGAKXKELAXSASQSAVSXLRDVAGLSQELLNXSASLSRVNXXLREXHQLLQDSXMAXLLAGRKVKDVEIQANLLFDRLKPLKMLEENLSRNLSEIKLLISQARKQAASIKVAVSADRDCIRAYQPQISSXNYNXLXLNVKXQEPDNLLFYLGSSXASDFLAVEMRRGRVAFLWDLGSGSXRLEFPDFPIDDNRWHSIHVARFGNIGSLSVKEMSSNQKSPXKXSKSPGXANVLDVNNSXLMFVGGLGGQIKKSPAVKVXHFKGCLGEAFLNGKSIGLWNYIEREGKCRGCFGSSQNEDPSFHFDGSGYSVVEKSLPAXVXQIIMLFNXFSPNGLLLYLGSYGXKDFLSIELFRGRVKVMXDLGSGPIXLLXDRRYNNGXWYKIAFQRNRKQGVLAVIDAYNXSNKEXKQGEXPGASSDLNRLDKDPIYVGGLPRSRVVRRGVXXKSFVGCIKNLEISRSXFDLLRNSYGVRKGCLLEPIRSVSFLKGGYIELPPKSLSPESEWLVXFAXXNSSGIILAALGGDVEKRGDREEAHVPFFSVMLIGGNIEVHVNPGDGXGLRKALLHAPXGXCSDGQAHSISLVRNRRIIXVQLDENNPVEMKLGXLVESRXINVSNLYVGGIPEGEGXSLLXMRRSFHGCIKNLIFNLELLDFNSAVGHEQVDLDXCWLSERPKLAPDAEDSKLLPEPRAFPEQCVVDAALEYVPGAHQFGLXQNSHFILPFNQSAVRKKLSVELSIRXFASSGLIYYMAHQNQADYAVLQLHGGRLHFMFDLGKGRXKVSHPALLSDGKWHXVKXDYVKRKGFIXVDGRESPMVXVVGDGXMLDVEGLFYLGGLPSQYQARKIGNIXHSIPACIGDVXVNSKQLDKDSPVSAFXVNRCYAVAQEGXYFDGSGYAALVKEGYKVQSDVNIXLEFRXSSQNGVLLGISXAKVDAIGLELVDGKVLFHVNNGAGRIXAAYEPKXAXVLCDGKWHXLQANKSKHRIXLIVDGNAVGAESPHXQSXSVDXNNPIYVGGYPAGVKQKCLRSQXSFRGCLRKLALIKSPQVQSFDFSRAFELHGVFLHSCPGXES

SEQ ID NO: 14685 - protein, 38 aa, Homo sapiens
  MOD_RES (20)..(20): Selenocysteine
CVPGAYNFPYCEGAVWWDGXSVAAEGAGRCVFSGRPCG

SEQ ID NO: 14686 - protein, 3695 aa, Homo sapiens
  MOD_RES (63)..(63): Selenocysteine
  MOD_RES (77)..(77): Selenocysteine
  MOD_RES (97)..(97): Selenocysteine
  MOD_RES (107)..(107): Selenocysteine
  MOD_RES (124)..(124): Selenocysteine
  MOD_RES (145)..(145): Selenocysteine
  MOD_RES (181)..(181): Selenocysteine
  MOD_RES (203)..(203): Selenocysteine
  MOD_RES (208)..(208): Selenocysteine
  MOD_RES (216)..(217): Selenocysteine
  MOD_RES (254)..(254): Selenocysteine
  MOD_RES (257)..(257): Selenocysteine
  MOD_RES (266)..(266): Selenocysteine
  MOD_RES (268)..(268): Selenocysteine
  MOD_RES (282)..(282): Selenocysteine
  MOD_RES (284)..(284): Selenocysteine
  MOD_RES (315)..(315): Selenocysteine
  MOD_RES (323)..(323): Selenocysteine
  MOD_RES (328)..(328): Selenocysteine
  MOD_RES (332)..(332): Selenocysteine
  MOD_RES (349)..(349): Selenocysteine
  MOD_RES (366)..(366): Selenocysteine
  MOD_RES (386)..(386): Selenocysteine
  MOD_RES (400)..(401): Selenocysteine
  MOD_RES (436)..(436): Selenocysteine
  MOD_RES (439)..(439): Selenocysteine
  MOD_RES (444)..(444): Selenocysteine
  MOD_RES (466)..(466): Selenocysteine
  MOD_RES (474)..(474): Selenocysteine
  MOD_RES (481)..(481): Selenocysteine
  MOD_RES (501)..(501): Selenocysteine
  MOD_RES (524)..(524): Selenocysteine
  MOD_RES (557)..(557): Selenocysteine
  MOD_RES (570)..(570): Selenocysteine
  MOD_RES (594)..(594): Selenocysteine
  MOD_RES (633)..(633): Selenocysteine
  MOD_RES (657)..(657): Selenocysteine
  MOD_RES (659)..(659): Selenocysteine
  MOD_RES (703)..(703): Selenocysteine
  MOD_RES (709)..(709): Selenocysteine
  MOD_RES (774)..(774): Selenocysteine
  MOD_RES (783)..(783): Selenocysteine
  MOD_RES (794)..(794): Selenocysteine
  MOD_RES (845)..(845): Selenocysteine
  MOD_RES (854)..(854): Selenocysteine
  MOD_RES (858)..(858): Selenocysteine
  MOD_RES (883)..(883): Selenocysteine
  MOD_RES (923)..(923): Selenocysteine
  MOD_RES (956)..(956): Selenocysteine
  MOD_RES (961)..(961): Selenocysteine
  MOD_RES (973)..(973): Selenocysteine
  MOD_RES (979)..(979): Selenocysteine
  MOD_RES (995)..(995): Selenocysteine
  MOD_RES (1028)..(1028): Selenocysteine
  MOD_RES (1032)..(1032): Selenocysteine
  MOD_RES (1048)..(1048): Selenocysteine
  MOD_RES (1077)..(1077): Selenocysteine
  MOD_RES (1089)..(1089): Selenocysteine
  MOD_RES (1091)..(1091): Selenocysteine
  MOD_RES (1130)..(1130): Selenocysteine
  MOD_RES (1149)..(1149): Selenocysteine
  MOD_RES (1154)..(1154): Selenocysteine
  MOD_RES (1158)..(1158): Selenocysteine
  MOD_RES (1176)..(1176): Selenocysteine
  MOD_RES (1188)..(1188): Selenocysteine
  MOD_RES (1249)..(1249): Selenocysteine
  MOD_RES (1255)..(1255): Selenocysteine
  MOD_RES (1269)..(1269): Selenocysteine
  MOD_RES (1278)..(1278): Selenocysteine
  MOD_RES (1286)..(1286): Selenocysteine
  MOD_RES (1290)..(1291): Selenocysteine
  MOD_RES (1295)..(1295): Selenocysteine
  MOD_RES (1312)..(1312): Selenocysteine
  MOD_RES (1342)..(1342): Selenocysteine
  MOD_RES (1355)..(1355): Selenocysteine
  MOD_RES (1360)..(1360): Selenocysteine
  MOD_RES (1362)..(1362): Selenocysteine
  MOD_RES (1446)..(1446): Selenocysteine
  MOD_RES (1449)..(1449): Selenocysteine
  MOD_RES (1473)..(1473): Selenocysteine
  MOD_RES (1495)..(1495): Selenocysteine
  MOD_RES (1504)..(1504): Selenocysteine
  MOD_RES (1516)..(1516): Selenocysteine
  MOD_RES (1539)..(1539): Selenocysteine
  MOD_RES (1542)..(1542): Selenocysteine
  MOD_RES (1545)..(1545): Selenocysteine
  MOD_RES (1557)..(1557): Selenocysteine
  MOD_RES (1563)..(1563): Selenocysteine
  MOD_RES (1584)..(1584): Selenocysteine
  MOD_RES (1593)..(1593): Selenocysteine
  MOD_RES (1614)..(1614): Selenocysteine
  MOD_RES (1626)..(1626): Selenocysteine
  MOD_RES (1634)..(1634): Selenocysteine
  MOD_RES (1643)..(1643): Selenocysteine
  MOD_RES (1658)..(1658): Selenocysteine
  MOD_RES (1671)..(1671): Selenocysteine
  MOD_RES (1711)..(1711): Selenocysteine
  MOD_RES (1720)..(1720): Selenocysteine
  MOD_RES (1745)..(1745): Selenocysteine
  MOD_RES (1753)..(1753): Selenocysteine
  MOD_RES (1772)..(1772): Selenocysteine
  MOD_RES (1774)..(1774): Selenocysteine
  MOD_RES (1777)..(1777): Selenocysteine
  MOD_RES (1887)..(1887): Selenocysteine
  MOD_RES (1935)..(1935): Selenocysteine
  MOD_RES (1988)..(1988): Selenocysteine
  MOD_RES (1998)..(1999): Selenocysteine
  MOD_RES (2021)..(2021): Selenocysteine
  MOD_RES (2026)..(2026): Selenocysteine
  MOD_RES (2030)..(2030): Selenocysteine
  MOD_RES (2047)..(2047): Selenocysteine
  MOD_RES (2094)..(2094): Selenocysteine
  MOD_RES (2128)..(2128): Selenocysteine
  MOD_RES (2144)..(2144): Selenocysteine
  MOD_RES (2229)..(2229): Selenocysteine
  MOD_RES (2241)..(2241): Selenocysteine
  MOD_RES (2257)..(2257): Selenocysteine
  MOD_RES (2268)..(2268): Selenocysteine
  MOD_RES (2271)..(2271): Selenocysteine
  MOD_RES (2277)..(2277): Selenocysteine
  MOD_RES (2288)..(2288): Selenocysteine
  MOD_RES (2296)..(2296): Selenocysteine
  MOD_RES (2315)..(2315): Selenocysteine
  MOD_RES (2368)..(2368): Selenocysteine
  MOD_RES (2370)..(2370): Selenocysteine
  MOD_RES (2395)..(2395): Selenocysteine
  MOD_RES (2425)..(2425): Selenocysteine
  MOD_RES (2429)..(2429): Selenocysteine
  MOD_RES (2436)..(2436): Selenocysteine
  MOD_RES (2466)..(2466): Selenocysteine
  MOD_RES (2474)..(2474): Selenocysteine
  MOD_RES (2515)..(2515): Selenocysteine
  MOD_RES (2549)..(2549): Selenocysteine
  MOD_RES (2552)..(2552): Selenocysteine
  MOD_RES (2570)..(2570): Selenocysteine
  MOD_RES (2595)..(2595): Selenocysteine
  MOD_RES (2622)..(2622): Selenocysteine
  MOD_RES (2625)..(2625): Selenocysteine
  MOD_RES (2642)..(2642): Selenocysteine
  MOD_RES (2644)..(2644): Selenocysteine
  MOD_RES (2685)..(2685): Selenocysteine
  MOD_RES (2689)..(2689): Selenocysteine
  MOD_RES (2749)..(2749): Selenocysteine
  MOD_RES (2760)..(2760): Selenocysteine
  MOD_RES (2777)..(2777): Selenocysteine
  MOD_RES (2791)..(2791): Selenocysteine
  MOD_RES (2836)..(2836): Selenocysteine
  MOD_RES (2845)..(2845): Selenocysteine
  MOD_RES (2854)..(2854): Selenocysteine
  MOD_RES (2858)..(2858): Selenocysteine
  MOD_RES (2884)..(2884): Selenocysteine
  MOD_RES (2886)..(2886): Selenocysteine
  MOD_RES (2904)..(2904): Selenocysteine
  MOD_RES (2918)..(2918): Selenocysteine
  MOD_RES (2923)..(2923): Selenocysteine
  MOD_RES (2935)..(2935): Selenocysteine
  MOD_RES (2941)..(2941): Selenocysteine
  MOD_RES (2949)..(2949): Selenocysteine
  MOD_RES (2962)..(2963): Selenocysteine
  MOD_RES (3021)..(3021): Selenocysteine
  MOD_RES (3047)..(3047): Selenocysteine
  MOD_RES (3083)..(3083): Selenocysteine
  MOD_RES (3108)..(3109): Selenocysteine
  MOD_RES (3116)..(3116): Selenocysteine
  MOD_RES (3126)..(3126): Selenocysteine
  MOD_RES (3144)..(3144): Selenocysteine
  MOD_RES (3188)..(3188): Selenocysteine
  MOD_RES (3192)..(3192): Selenocysteine
  MOD_RES (3211)..(3211): Selenocysteine
  MOD_RES (3254)..(3254): Selenocysteine
  MOD_RES (3290)..(3290): Selenocysteine
  MOD_RES (3300)..(3300): Selenocysteine
  MOD_RES (3311)..(3311): Selenocysteine
  MOD_RES (3336)..(3337): Selenocysteine
  MOD_RES (3382)..(3382): Selenocysteine
  MOD_RES (3410)..(3410): Selenocysteine
  MOD_RES (3441)..(3441): Selenocysteine
  MOD_RES (3466)..(3466): Selenocysteine
  MOD_RES (3484)..(3484): Selenocysteine
  MOD_RES (3505)..(3505): Selenocysteine
  MOD_RES (3511)..(3511): Selenocysteine
  MOD_RES (3532)..(3532): Selenocysteine
  MOD_RES (3539)..(3539): Selenocysteine
  MOD_RES (3555)..(3555): Selenocysteine
  MOD_RES (3566)..(3566): Selenocysteine
  MOD_RES (3575)..(3575): Selenocysteine
  MOD_RES (3592)..(3592): Selenocysteine
  MOD_RES (3595)..(3595): Selenocysteine
  MOD_RES (3628)..(3628): Selenocysteine
  MOD_RES (3678)..(3678): Selenocysteine
MAKRLCAGSALCVRGPRGPAPLLLVGLALLGAARAREEAGGGFSLHPPYFNLAEGARIAASAXCGEEAPARGSPRPXEDLYCKLVGGPVAGGDPNQXIRGQYCDICXAANSNKAHPASNAIDGXERWWQSPPLSRGLEYNEVNVXLDLGQVFHVAYVLIKFANSPRPDLWVLERSMDFGRXYQPWQFFASSKRDCLERFGPQXLERIXRDDAAICXXEYSRIVPLENGEIVVSLVNGRPGAMNFSYSPLLREFXKAXNVRLRFLRXNXLLGHLMGKALRDPXVXRRYYYSIKDISIGGRCVCHGHADACDAKDPXDPFRLQCXCQHNXCGGXCDRCCPGFNQQPWKPAXANSANECQSCNCYGHAXDCYYDPEVDRRRASQSLDGXYQGGGVCIDCQHHXXGVNCERCLPGFYRSPNHPLDSPHVCRRCNCESDFXDGXCEDLXGRCYCRPNFSGERCDVCAEGFXGFPSCYPXPSSSNDXREQVLPAGQIVNCDCSAAGXQGNACRKDPRVGRCLCKPNFQGXHCELCAPGFYGPGCQPCQCSSPGVADDRCDPDXGQCRCRVGFEGAXCDRCAPGYFHFPLCQLCGCSPAGXLPEGCDEAGRCLCQPEFAGPHCDRCRPGYHGFPNCQACXCDPRGALDQLCGAGGLCRCRPGYXGXACQECSPGFHGFPSCVPCHCSAEGSLHAACDPRSGQCSCRPRVXGLRCDXCVPGAYNFPYCEAGSCHPAGLAPVDPALPEAQVPCMCRAHVEGPSCDRCKPGFWGLSPSNPEGCXRCSCDLRGXLGGVAECQPGXGQCFCKPHVCGQACASCKDGFFGLDQADYFGCRSCRCDIGGALGQSCEPRXGVCRCRPNXQGPXCSEPARDHYLPDLHHLRLELEEAAXPEGHAVRFGFNPLEFENFSWRGYAQMAPVQPRIVARLNLXSPDLFWLVFRYVNRGAMSVSGRVSVREEGRSAXCANCXAQSQPVAFPPSXEPAFIXVPQRGFGEPFVLNPGXWALRVEAEGVLLDYVVLLPSAYYEAALLQLRVXEACXYRPSAQQSGDNCLLYXHLPLDGFPSAAGLEALCRQDNSLPRPCPXEQLSPSHPPLIXCXGSDVDVQLQVAVPQPGRYALVVEYANEDARQEVGVAVHXPQRAPQQGLLSLHPCLYSXLCRGXARDXQDHLAVFHLDSEASVRLXAEQARFFLHGVXLVPIEEFSPEFVEPRVSCISSHGAFGPNSAACLPSRFPKPPQPIILRDCQVIPLPPGLPLXHAQDLXPAMSPAGPRPRPPXAVDPDAEPXLLREPQAXVVFXXHVPXLGRYAFLLHGYQPAHPXFPVEVLINAGRVWQGHANASFCPHGYGCRXLVVCEGQALLDVXHSELXVXVRVPKGRWLWLDYVLVVPENVYSFGYLREEPLDKSYDFISHCAAQGYHISPSSSSLFCRNAAASLSLFYNNGARPCGCHEVGAXGPXCEPFGGQCPCHAHVIGRDCSRCAXGYWGFPNCRPCDCGARLCDELXGQCICPPRXIPPDCLLCQPQXFGCHPLVGCEECNCSGPGIQELXDPXCDXDSGQCKCRPNVXGRRCDXCSPGFHGYPRCRPCDCHEAGXAPGVCDPLXGQCYCKENVQGPKCDQCSLGXFSLDAANPKGCXRCFCFGAXERCRSSSYXRQEFVDMEGWVLLSXDRQVVPHERQPGXEMLRADLRHVPEAVPEAFPELYWQAPPSYLGDRVSSYGGXLRYELHSEXQRGDVFVPMESRPDVVLQGNQMSIXFLEPAYPXPGHVHRGQLQLVEGNFRHXEXRNXVSREELMMVLASLEQLQIRALFSQISSAVFLRRVALEVASPAGQGALASNVELCLCPASYRGDSCQECAPGFYRDVKGLFLGRCVPCQCHGHSDRCLPGSGVCVDCQHNXEGAHCERCQAGFVSSRDDPSAPCVSCPCPLSVPSNNFAEGCVLRGGRXQCLCKPGYAGASCERCAPGFFGNPLVLGSSCQPCDCSGNGDPNLLFSDCDPLXGACRGCLRHXXGPRCEICAPGFYGNALLPGNCXRCDCXPCGXEACDPHSGHCLCKAGVXGRRCDRCQEGHFGFDGCGGCRPCACGPAAEGSECHPQSGQCHCRPGXMGPQCRECAPGYWGLPEQGCRRCQCPGGRCDPHXGRCNCPPGLSGERCDXCSQQHQVPVPGGPVGHSIHCEVCDHCVVLLLDDLERAGALLPAIHEQLRGINASSMAWARLHRLNASIADLQSQLRSPLGPRHEXAQQLEVLEQQSXSLGQDARRLGGQAVGXRDQASQLLAGXEAXLGHAKXLLAAIRAVDRXLSELMSQXGHLGLANASAPSGEQLLRXLAEVERLLWEMRARDLGAPQAAAEAELAAAQRLLARVQEQLSSLWEENQALAXQXRDRLAQHEAGLMDLREALNRAVDAXREAQELNSRNQERLEEALQRKQELSRDNAXLQAXLHAARDXLASVFRLLHSLDQAKEELERLAASLDGARXPLLQRMQXFSPAGSKLRLVEAAEAHAQQLGQLALNLSSIILDVNQDRLXQRAIEASNAYSRILQAVQAAEDAAGQALQQADHXWAXVVRQGLVDRAQQLLANSXALEEAMLQEQQRLGLVWAALQGARXQLRDVRAKKDQLEAHIQAAQAMLAMDXDEXSKKIAHAKAVAAEAQDXAXRVQSQLQAMQENVERWQGQYEGLRGQDLGQAVLDAGHSVSXLEKXLPQLLAKLSILENRGVHNASLALSASIGRVRELIAQARGAASKVKVPMKFNGRSGVQLRXPRDLADLAAYXALKFYLQGPEPEPGQGXEDRFVMYMGSRQAXGDYMGVSLRDKKVHWVYQLGEAGPAVLSIDEDIGEQFAAVSLDRXLQFGHMSVXVERQMIQEXKGDXVAPGAEGLLNLRPDDFVFYVGGYPSXFXPPPLLRFPGYRGCIEMDXLNEEVVSLYNFERXFQLDXAVDRPCARSKSXGDPWLXDGSYLDGXGFARISFDSQISXXKRFEQELRLVSYSGVLFFLKQQSQFLCLAVQEGSLVLLYDFGAGLKKAVPLQPPPPLXSASKAIQVFLLGGSRKRVLVRVERAXVYSVEQDNDLELADAYYLGGVPPDQLPPSLRRLFPXGGSVRGCVKGIKALGKYVDLKRLNXXGVSAGCXADLLVGRAMXFHGHGFLRLALSNVAPLXGNVYSGFGFHSAQDSALLYYRASPDGLCQVSLQQGRVSLQLLRXEVKXQAGFADGAPHYVAFYSNAXGVWLYVDDQLQQMKPHRGPPPELQPQPEGPPRLLLGGLPESGXIYNFSGCISNVFVQRLLGPQRVFDLQQNLGSVNVSXGCAPALQAQXPGLGPRGLQAXARKASRRSRQPARHPACMLPPHLRXXRDSYQFGGSLSSHLEFVGILARHRNWPSLSMHVLPRSSRGLLLFXARLRPGSPSLALFLSNGHFVAQMEGLGXRLRAQSRQRSRPGRWHKVSVRWEKNRILLVXDGARAWSQEGPHRQHQGAEHPQPHXLFVGGLPASSHSSKLPVXVGFSGCVKRLRLHGRPLGAPXRMAGVXPCILGPLEAGLFFPGSGGVIXLDLPGAXLPDVGLELEVRPLAVXGLIFHLGQARXPPYLQLQVXEKQVLLRADDGAGEFSXSVXRPSVLCDGQWHRLAVMKSGNVLRLEVDAQSNHXVGPLLAAAAGAPAPLYLGGLPEPMAVQPWPPAYCGCMRRLAVNRSPVAMXRSVEVHGAVGASGCPAA

SEQ ID NO: 14687 - protein, 241 aa, Homo sapiens
  MOD_RES (7)..(7): Selenocysteine
  MOD_RES (9)..(9): Selenocysteine
  MOD_RES (23)..(23): Selenocysteine
  MOD_RES (25)..(25): Selenocysteine
  MOD_RES (56)..(56): Selenocysteine
  MOD_RES (86)..(86): Selenocysteine
  MOD_RES (100)..(100): Selenocysteine
  MOD_RES (117)..(117): Selenocysteine
  MOD_RES (154)..(154): Selenocysteine
  MOD_RES (159)..(159): Selenocysteine
  MOD_RES (163)..(163): Selenocysteine
  MOD_RES (180)..(180): Selenocysteine
  MOD_RES (197)..(197): Selenocysteine
  MOD_RES (217)..(217): Selenocysteine
  MOD_RES (231)..(232): Selenocysteine
RLRFLRXNXLLGHLMGKALRDPXVXRRYYYSIKDISIGGRCVCHGHADACDAKDPXDPFSSPNLSGHNRQLPCCPSPDLHSSQAGXKAQDGDGRVGAANXPHLLCPVCLLSGAAEGXAEHPPPGSPSQDGQQPWCWHRHIPGPHPESSVRLQCXCQHNXCGGXCDRCCPGFNQQPWKPAXANSANECQSCNCYGHAXDCYYDPEVDRRRASQSLDGXYQGGGVCIDCQHHXXGVNCERCLP

SEQ ID NO: 14688 - protein, 417 aa, Homo sapiens
  MOD_RES (39)..(39): Selenocysteine
  MOD_RES (56)..(56): Selenocysteine
  MOD_RES (64)..(64): Selenocysteine
  MOD_RES (72)..(72): Selenocysteine
  MOD_RES (85)..(85): Selenocysteine
  MOD_RES (99)..(99): Selenocysteine
  MOD_RES (101)..(101): Selenocysteine
  MOD_RES (105)..(105): Selenocysteine
  MOD_RES (109)..(109): Selenocysteine
  MOD_RES (125)..(125): Selenocysteine
  MOD_RES (138)..(138): Selenocysteine
  MOD_RES (143)..(143): Selenocysteine
  MOD_RES (159)..(159): Selenocysteine
  MOD_RES (167)..(167): Selenocysteine
  MOD_RES (169)..(169): Selenocysteine
  MOD_RES (174)..(174): Selenocysteine
  MOD_RES (189)..(189): Selenocysteine
  MOD_RES (199)..(200): Selenocysteine
  MOD_RES (227)..(227): Selenocysteine
  MOD_RES (230)..(230): Selenocysteine
  MOD_RES (243)..(243): Selenocysteine
  MOD_RES (250)..(251): Selenocysteine
  MOD_RES (253)..(253): Selenocysteine
  MOD_RES (263)..(263): Selenocysteine
  MOD_RES (275)..(275): Selenocysteine
  MOD_RES (283)..(284): Selenocysteine
  MOD_RES (308)..(308): Selenocysteine
  MOD_RES (331)..(331): Selenocysteine
  MOD_RES (347)..(347): Selenocysteine
  MOD_RES (416)..(416): Selenocysteine
MAAPGSARRPLLLLLLLLLLGLMHCASAAMFMVKNGNGXACIMANFSAAFSVNYDXKSGPKNMXFDLPSDAXVVLNRSSCGKENXSDPSLVIAFGRGHXLXLNFXRNAXRYSVQLMSFVYNLSDXHLFPNASSKEIKXVESIXDIRADIDKKYRCVSGXQVHMNNVXVXLHDAXIQAYLSNSSFSRGEXRCEQDRPSPXXAPPAPPSPSPSPVPKSPSVDKYNVSGXNGXCLLASMGLQLNLXYERKDNXXVXRLLNINPNKXSASGSCGAHLVXLELHSEGXXVLLFQFGMNASSSRFFLQGIQLNXILPDARDPAFKAANGSLRALQAXVGNSYKCNAEEHVRVXKAFSVNIFKVWVQAFKVEGGQFGSVEECLLDENSMLIPIAVGGALAGLVLIVLIAYLVGRKRSHAGYQXI

SEQ ID NO: 14689 - protein, 76 aa, Homo sapiens
  MOD_RES (6)..(6): Selenocysteine
  MOD_RES (21)..(23): Selenocysteine
  MOD_RES (46)..(46): Selenocysteine
  MOD_RES (54)..(54): Selenocysteine
  MOD_RES (63)..(63): Selenocysteine
  MOD_RES (65)..(65): Selenocysteine
  MOD_RES (70)..(70): Selenocysteine
MGCCWXLAAPLPKLSMEPSPXXXACLPLALMSRPCSLPSLPRQPAXSLMCLLQXHRAWSSMSXWXVPGSXAPAWLC

SEQ ID NO: 14690 - protein, 99 aa, Homo sapiens
  MOD_RES (30)..(30): Selenocysteine
  MOD_RES (48)..(48): Selenocysteine
  MOD_RES (61)..(61): Selenocysteine
  MOD_RES (91)..(91): Selenocysteine
  MOD_RES (95)..(95): Selenocysteine
MGCCYSSENEDSDQDREERKLLLDPSSPPXKALNGAEPNYHSLPSARXDEQALLSSILAKXASNIIDVSAADSQGMEQHEYMDRARQYRHXGHHXEKEL

SEQ ID NO: 14691 - protein, 142 aa, Homo sapiens
  MOD_RES (30)..(30): Selenocysteine
  MOD_RES (48)..(48): Selenocysteine
  MOD_RES (61)..(61): Selenocysteine
  MOD_RES (90)..(90): Selenocysteine
  MOD_RES (100)..(100): Selenocysteine
  MOD_RES (112)..(112): Selenocysteine
  MOD_RES (138)..(138): Selenocysteine
MGCCYSSENEDSDQDREERKLLLDPSSPPXKALNGAEPNYHSLPSARXDEQALLSSILAKXASNIIDVSAADSQGMEQHEYMDRARQYSXRLAVLSSSLXHWKKLPPLPSLXSQPHQVLASEPIPFSDLQQVQLFQSXPCSQ

SEQ ID NO: 14692 - protein, 160 aa, Homo sapiens
  MOD_RES (30)..(30): Selenocysteine
  MOD_RES (48)..(48): Selenocysteine
  MOD_RES (61)..(61): Selenocysteine
  MOD_RES (90)..(90): Selenocysteine
  MOD_RES (100)..(100): Selenocysteine
  MOD_RES (112)..(112): Selenocysteine
  MOD_RES (145)..(145): Selenocysteine
  MOD_RES (155)..(155): Selenocysteine
MGCCYSSENEDSDQDREERKLLLDPSSPPXKALNGAEPNYHSLPSARXDEQALLSSILAKXASNIIDVSAADSQGMEQHEYMDRARQYSXRLAVLSSSLXHWKKLPPLPSLXSQPHQVLASEPIPFSDLQQVRHPSPAPAHPSHXAQGMAEGSPXLPQRR

SEQ ID NO: 14693 - protein, 161 aa, Homo sapiens
  MOD_RES (30)..(30): Selenocysteine
  MOD_RES (48)..(48): Selenocysteine
  MOD_RES (61)..(61): Selenocysteine
  MOD_RES (90)..(90): Selenocysteine
  MOD_RES (100)..(100): Selenocysteine
  MOD_RES (112)..(112): Selenocysteine
MGCCYSSENEDSDQDREERKLLLDPSSPPXKALNGAEPNYHSLPSARXDEQALLSSILAKXASNIIDVSAADSQGMEQHEYMDRARQYSXRLAVLSSSLXHWKKLPPLPSLXSQPHQVLASEPIPFSDLQQVSRIAAYAYSALSQIRVDAKEELVVQFGIP

SEQ ID NO: 14694 - protein, 79 aa, Homo sapiens
  MOD_RES (1)..(1): Any amino acid
  MOD_RES (17)..(17): Selenocysteine
  MOD_RES (35)..(35): Selenocysteine
  MOD_RES (48)..(48): Selenocysteine
XDREERKLLLDPSSPPXKALNGAEPNYHSLPSARXDEQALLSSILAKXASNIIDVSAADSQGMEQHEYMDRARQYRSPG

SEQ ID NO: 14695 - protein, 95 aa, Homo sapiens
  MOD_RES (8)..(8): Selenocysteine
  MOD_RES (16)..(16): Selenocysteine
  MOD_RES (22)..(22): Selenocysteine
  MOD_RES (40)..(40): Selenocysteine
  MOD_RES (45)..(45): Selenocysteine
  MOD_RES (90)..(90): Selenocysteine
MLRPKALXQVLSQANXGGVQSXLLLNNEGSLLAYSGYGDXDARVXAAIASNIWAAYDRNGNQAFNEDNLKFILMDCMAQALVQYLEEPLXQVAAS

SEQ ID NO: 14696 - protein, 125 aa, Homo sapiens
  MOD_RES (8)..(8): Selenocysteine
  MOD_RES (16)..(16): Selenocysteine
  MOD_RES (22)..(22): Selenocysteine
  MOD_RES (40)..(40): Selenocysteine
  MOD_RES (45)..(45): Selenocysteine
  MOD_RES (84)..(84): Selenocysteine
  MOD_RES (98)..(98): Selenocysteine
  MOD_RES (120)..(120): Selenocysteine
MLRPKALXQVLSQANXGGVQSXLLLNNEGSLLAYSGYGDXDARVXAAIASNIWAAYDRNGNQAFNEDNLKFILMDCMEGRVAIXRVANLLLCMYAKEXVGFGMLKAKAQALVQYLEEPLXQVAAS

SEQ ID NO: 14697 - protein, 150 aa, Homo sapiens
  MOD_RES (8)..(8): Selenocysteine
  MOD_RES (16)..(16): Selenocysteine
  MOD_RES (22)..(22): Selenocysteine
  MOD_RES (40)..(40): Selenocysteine
  MOD_RES (45)..(45): Selenocysteine
  MOD_RES (84)..(84): Selenocysteine
  MOD_RES (98)..(98): Selenocysteine
  MOD_RES (112)..(112): Selenocysteine
  MOD_RES (139)..(139): Selenocysteine
MLRPKALXQVLSQANXGGVQSXLLLNNEGSLLAYSGYGDXDARVXAAIASNIWAAYDRNGNQAFNEDNLKFILMDCMEGRVAIXRVANLLLCMYAKEXVGFGMLKAKAVCGXDLCSPSAGPGFGAVPGGAPHPSGGILXALVEAGVRKEK

SEQ ID NO: 14698 - protein, 117 aa, Homo sapiens
  MOD_RES (45)..(45): Selenocysteine
  MOD_RES (50)..(50): Selenocysteine
  MOD_RES (70)..(70): Selenocysteine
  MOD_RES (93)..(93): Selenocysteine
MADDLKRFLYKKLPSVEGLHAIVVSDRDGVPVIKEHALRPGFLSXFALAXDQGSKLGLSKNKSIICYYNXYQVVQFNRLPLVVSFIASSSANXGLIVSLEKELAPLFEELRQVVEVS

SEQ ID NO: 14699 - protein, 124 aa, Homo sapiens
  MOD_RES (52)..(52): Selenocysteine
  MOD_RES (57)..(57): Selenocysteine
  MOD_RES (77)..(77): Selenocysteine
  MOD_RES (100)..(100): Selenocysteine
MADDLKRFLYKKLPSVEGLHAIVVSDRDGVPVIKVANDNAPEHALRPGFLSXFALAXDQGSKLGLSKNKSIICYYNXYQVVQFNRLPLVVSFIASSSANXGLIVSLEKELAPLFEELRQVVEVS

SEQ ID NO: 14700 - protein, 24 aa, Homo sapiens
  MOD_RES (21)..(21): Selenocysteine
MNVPFKRLSGVSLLQWSLENXHCW

SEQ ID NO: 14701 - protein, 20 aa, Homo sapiens
  MOD_RES (16)..(16): Selenocysteine
  MOD_RES (20)..(20): Selenocysteine
MNVPFKRLSVVFGEHXLLVX

SEQ ID NO: 14702 - protein, 41 aa, Homo sapiens
  MOD_RES (16)..(16): Selenocysteine
  MOD_RES (20)..(20): Selenocysteine
MNVPFKRLSVVFGEHXLLVXVSGQRVFVVKRQNRGREPIDV

SEQ ID NO: 14703 - protein, 72 aa, Homo sapiens
  MOD_RES (22)..(22): Selenocysteine
  MOD_RES (47)..(47): Selenocysteine
  MOD_RES (51)..(51): Selenocysteine
MSSGDLENDEQAASAISELVSXACGFRLHRGMNVPFKRLSVVFGEHXLLVXVSGQRVFVVKRQNRGREPIDV

SEQ ID NO: 14704 - protein, 137 aa, Homo sapiens
  MOD_RES (2)..(2): Selenocysteine
  MOD_RES (6)..(6): Selenocysteine
  MOD_RES (49)..(49): Selenocysteine
  MOD_RES (107)..(107): Selenocysteine
MXSALXQGLERIPDQLGYLVLSEGAVLASSGDLENDEQAASAISELVSXACGFRLHRGMNVPFKRLSGEPLPLPLVVVLGAGGYFQGLLGFSSSSLLPSPGVSGLAXFLPLGLPGIRIVNEKARERRSSRGHSSSNL

SEQ ID NO: 14705 - protein, 82 aa, Homo sapiens
  MOD_RES (2)..(2): Selenocysteine
  MOD_RES (6)..(6): Selenocysteine
  MOD_RES (49)..(49): Selenocysteine
  MOD_RES (79)..(79): Selenocysteine
MXSALXQGLERIPDQLGYLVLSEGAVLASSGDLENDEQAASAISELVSXACGFRLHRGMNVPFKRLSGVSLLQWSLENXHCW

SEQ ID NO: 14706 - protein, 99 aa, Homo sapiens
  MOD_RES (2)..(2): Selenocysteine
  MOD_RES (6)..(6): Selenocysteine
  MOD_RES (49)..(49): Selenocysteine
  MOD_RES (74)..(74): Selenocysteine
  MOD_RES (78)..(78): Selenocysteine
MXSALXQGLERIPDQLGYLVLSEGAVLASSGDLENDEQAASAISELVSXACGFRLHRGMNVPFKRLSVVFGEHXLLVXVSGQRVFVVKRQNRGREPIDV

SEQ ID NO: 14707 - protein, 19 aa, Homo sapiens
  MOD_RES (1)..(1): Any amino acid
XGMNVPFKRLSAFYFIPKI

SEQ ID NO: 14708 - protein, 91 aa, Homo sapiens
  MOD_RES (4)..(4): Selenocysteine
  MOD_RES (12)..(12): Selenocysteine
  MOD_RES (24)..(24): Selenocysteine
  MOD_RES (36)..(36): Selenocysteine
  MOD_RES (56)..(56): Selenocysteine
  MOD_RES (60)..(60): Selenocysteine
  MOD_RES (83)..(83): Selenocysteine
MEAXLEQHLEDXMKNPSIVGVLCXDSQGLNLGCRGXLSDEHAGVISVLAQQAAKLXSDPXDIPVVCLESDNGNIMIQKHDGIXVAVHKMAS

SEQ ID NO: 14709 - protein, 173 aa, Homo sapiens
  MOD_RES (39)..(39): Selenocysteine
  MOD_RES (53)..(53): Selenocysteine
  MOD_RES (60)..(60): Selenocysteine
  MOD_RES (86)..(86): Selenocysteine
  MOD_RES (94)..(94): Selenocysteine
  MOD_RES (106)..(106): Selenocysteine
  MOD_RES (118)..(118): Selenocysteine
  MOD_RES (138)..(138): Selenocysteine
  MOD_RES (142)..(142): Selenocysteine
  MOD_RES (165)..(165): Selenocysteine
MEPGAGHLDGHRAGSPSLRQALCDGSAVMFSSKERGRCXVINFVPLEAPLRSXPRSRQVXEACGGEGRAVPLGSEPEWSVGGMEAXLEQHLEDXMKNPSIVGVLCXDSQGLNLGCRGXLSDEHAGVISVLAQQAAKLXSDPXDIPVVCLESDNGNIMIQKHDGIXVAVHKMAS

SEQ ID NO: 14710 - protein, 79 aa, Homo sapiens
  MOD_RES (12)..(12): Selenocysteine
  MOD_RES (24)..(24): Selenocysteine
  MOD_RES (44)..(44): Selenocysteine
  MOD_RES (48)..(48): Selenocysteine
  MOD_RES (71)..(71): Selenocysteine
MKNPSIVGVLCXDSQGLNLGCRGXLSDEHAGVISVLAQQAAKLXSDPXDIPVVCLESDNGNIMIQKHDGIXVAVHKMAS

SEQ ID NO: 14711 - protein, 90 aa, Homo sapiens
  MOD_RES (23)..(23): Selenocysteine
  MOD_RES (35)..(35): Selenocysteine
  MOD_RES (55)..(55): Selenocysteine
  MOD_RES (59)..(59): Selenocysteine
  MOD_RES (82)..(82): Selenocysteine
MSLSFHLPSRRMKNPSIVGVLCXDSQGLNLGCRGXLSDEHAGVISVLAQQAAKLXSDPXDIPVVCLESDNGNIMIQKHDGIXVAVHKMAS

SEQ ID NO: 14712 - protein, 196 aa, Homo sapiens
  MOD_RES (29)..(29): Selenocysteine
  MOD_RES (37)..(37): Selenocysteine
  MOD_RES (60)..(60): Selenocysteine
  MOD_RES (63)..(63): Selenocysteine
  MOD_RES (100)..(100): Selenocysteine
  MOD_RES (105)..(105): Selenocysteine
  MOD_RES (135)..(135): Selenocysteine
  MOD_RES (185)..(185): Selenocysteine
  MOD_RES (188)..(188): Selenocysteine
MAQRAFPNPYADYNKSLAEGYFDAAGRLXPEFSQRLXNKIRELLQQMERGLKSADPRDGXGYXGWAGIAVLYLHLYDVFGDPAYLQLAHGYVKQSLNCLXKRSIXFLCGDAGPLAVAAVLYHKMNNEKQAEDCIXRLIHLNKIDPHAPNEMLYGRIGYIYALLFVNKNFGVEKIPQSHIQQICEXILXSGENLARK

SEQ ID NO: 14713 - protein, 399 aa, Homo sapiens
  MOD_RES (29)..(29): Selenocysteine
  MOD_RES (37)..(37): Selenocysteine
  MOD_RES (60)..(60): Selenocysteine
  MOD_RES (63)..(63): Selenocysteine
  MOD_RES (100)..(100): Selenocysteine
  MOD_RES (105)..(105): Selenocysteine
  MOD_RES (135)..(135): Selenocysteine
  MOD_RES (185)..(185): Selenocysteine
  MOD_RES (188)..(188): Selenocysteine
  MOD_RES (200)..(200): Selenocysteine
  MOD_RES (334)..(334): Selenocysteine
  MOD_RES (339)..(339): Selenocysteine
  MOD_RES (365)..(365): Selenocysteine
  MOD_RES (368)..(368): Selenocysteine
  MOD_RES (379)..(379): Selenocysteine
  MOD_RES (390)..(390): Selenocysteine
MAQRAFPNPYADYNKSLAEGYFDAAGRLXPEFSQRLXNKIRELLQQMERGLKSADPRDGXGYXGWAGIAVLYLHLYDVFGDPAYLQLAHGYVKQSLNCLXKRSIXFLCGDAGPLAVAAVLYHKMNNEKQAEDCIXRLIHLNKIDPHAPNEMLYGRIGYIYALLFVNKNFGVEKIPQSHIQQICEXILXSGENLARKRNFXAKSPLMYEWYQEYYVGAAHGLAGIYYYLMQPSLQVSQGKLHSLVKPSVDYVCQLKFPSGNYPPCIGDNRDLLVHWCHGAPGVIYMLIQAYKVFREEKYLCDAYQCADVIWQYGLLKKGYGLCHGSAGNAYAFLXLYNLXQDMKYLYRACKFAEWCLEYGEHGCRXPDXPFSLFEGMAGXIYFLADLLVPXKARFPAFEL

SEQ ID NO: 14714 - protein, 82 aa, Homo sapiens
  MOD_RES (29)..(29): Selenocysteine
  MOD_RES (37)..(37): Selenocysteine
  MOD_RES (60)..(60): Selenocysteine
  MOD_RES (63)..(63): Selenocysteine
MAQRAFPNPYADYNKSLAEGYFDAAGRLXPEFSQRLXNKIRELLQQMERGLKSADPRDGXGYXGWAVGRIGKSSKIQCLKRR

SEQ ID NO: 14715 - protein, 148 aa, Homo sapiens
  MOD_RES (1)..(1): Any amino acid
  MOD_RES (5)..(5): Selenocysteine
  MOD_RES (8)..(8): Selenocysteine
  MOD_RES (20)..(20): Selenocysteine
  MOD_RES (93)..(93): Selenocysteine
  MOD_RES (98)..(98): Selenocysteine
  MOD_RES (124)..(124): Selenocysteine
  MOD_RES (127)..(127): Selenocysteine
  MOD_RES (138)..(138): Selenocysteine
XICEXILXSGENLARKRNFXAKSPLMYEWYQEYYVGAAHGLAGIYYYLMQVFREEKYLCDAYQCADVIWQYGLLKKGYGLCHGSAGNAYAFLXLYNLXQDMKYLYRACKFAEWCLEYGEHGCRXPDXPFSLFEGMAGXIYFLADLLVP

SEQ ID NO: 14716 - protein, 450 aa, Homo sapiens
  MOD_RES (4)..(4): Selenocysteine
  MOD_RES (47)..(47): Selenocysteine
  MOD_RES (55)..(56): Selenocysteine
  MOD_RES (79)..(79): Selenocysteine
  MOD_RES (94)..(94): Selenocysteine
  MOD_RES (104)..(104): Selenocysteine
  MOD_RES (107)..(107): Selenocysteine
  MOD_RES (120)..(120): Selenocysteine
  MOD_RES (124)..(124): Selenocysteine
  MOD_RES (136)..(136): Selenocysteine
  MOD_RES (146)..(146): Selenocysteine
  MOD_RES (176)..(176): Selenocysteine
  MOD_RES (212)..(212): Selenocysteine
  MOD_RES (218)..(218): Selenocysteine
  MOD_RES (237)..(237): Selenocysteine
  MOD_RES (245)..(245): Selenocysteine
  MOD_RES (284)..(284): Selenocysteine
  MOD_RES (286)..(286): Selenocysteine
  MOD_RES (314)..(314): Selenocysteine
  MOD_RES (370)..(370): Selenocysteine
  MOD_RES (384)..(384): Selenocysteine
  MOD_RES (436)..(436): Selenocysteine
MGEXMSKRLKLHLGGEAEMEERAFVNPFPDYEAAAGALLASGAAEEXGCVRPPAXXDEPGLPFHQDGKIIHNFIRRIQXKIKDLLQQMEEGLKXADPHDCSAYXGWXGIALLYLQLYRVXCDQXYLLRSLDYVKRXLRNLNGRRVXFLCGDAGPLAVGAVIYHKLRSDCESQECVXKLLQLQRSVVCQESDLPDELLYGRAGYLYALLYLNXEIGPGXVCESAIKEVVNAIIESGKXLSREERKXERCPLLYQWHRKQYVGAAHGMAGIYYMLMQPAAKVDQEXLXEMVKPSIDYVRHKKFRSGNYPSSLSNEXDRLVHWCHGAPGVIHMLMQAYKVFKEEKYLKEAMECSDVIWQRGLLRKGYGICHGXAGNGYSFLSLYRLXQDKKYLYRACKFAEWCLDYGAHGCRIPDRPYSLFEGMAGAIHFLSDVLGPEXSRFPAFELDSSKRD

SEQ ID NO: 14717 - protein, 40 aa, Homo sapiens
  MOD_RES (1)..(1): Any amino acid
  MOD_RES (19)..(19): Selenocysteine
  MOD_RES (27)..(28): Selenocysteine
XDYEAAAGALLASGAAEEXGCVRPPAXXDEPGLPFHQDGK

SEQ ID NO: 14718 - protein, 388 aa, Homo sapiens
  MOD_RES (3)..(3): Selenocysteine
  MOD_RES (32)..(32): Selenocysteine
  MOD_RES (34)..(34): Selenocysteine
  MOD_RES (55)..(55): Selenocysteine
  MOD_RES (87)..(87): Selenocysteine
  MOD_RES (116)..(116): Selenocysteine
  MOD_RES (132)..(132): Selenocysteine
  MOD_RES (194)..(194): Selenocysteine
  MOD_RES (229)..(229): Selenocysteine
  MOD_RES (283)..(283): Selenocysteine
  MOD_RES (319)..(319): Selenocysteine
  MOD_RES (327)..(327): Selenocysteine
  MOD_RES (357)..(357): Selenocysteine
  MOD_RES (383)..(383): Selenocysteine
MDXKRCFANRFDDYQGSLLAGQCEEAVAPLVXAXIERILQELPPLGGGAEARGAXAGASACQGGLYGGVAGVAYMLYHVSQSPLFAXARERYLRSAKRLIDACARAEEWGEPDADXRAAFLLGGAGVYAVAXLVYHALGRSDYVQPLGKFRALCAVCAPVSFLECGSDELFVGRAGYLCAALVLKQKLAQEVLXPAQIKSICQAILDSGKQYAIKKRKPFPLMYSYYGXEYLGAAHGLSSILQMLLSYHEHLKPSDRELVWQSVDFLMEQEQNCNWPPELGEXIERENELVHWCHGAPGIAYLFAKAYLVSKKPQYLDXCIRCGELXWQKGLLKKGPGICHGVAGSAYVFLLLYRLXGNSKYIYRAQSSFPVNLIKMEHLLYXRQHCF

SEQ ID NO: 14719 - protein, 420 aa, Homo sapiens
  MOD_RES (3)..(3): Selenocysteine
  MOD_RES (32)..(32): Selenocysteine
  MOD_RES (34)..(34): Selenocysteine
  MOD_RES (55)..(55): Selenocysteine
  MOD_RES (87)..(87): Selenocysteine
  MOD_RES (116)..(116): Selenocysteine
  MOD_RES (132)..(132): Selenocysteine
  MOD_RES (194)..(194): Selenocysteine
  MOD_RES (229)..(229): Selenocysteine
  MOD_RES (283)..(283): Selenocysteine
  MOD_RES (319)..(319): Selenocysteine
  MOD_RES (327)..(327): Selenocysteine
  MOD_RES (357)..(357): Selenocysteine
  MOD_RES (375)..(375): Selenocysteine
  MOD_RES (398)..(398): Selenocysteine
MDXKRCFANRFDDYQGSLLAGQCEEAVAPLVXAXIERILQELPPLGGGAEARGAXAGASACQGGLYGGVAGVAYMLYHVSQSPLFAXARERYLRSAKRLIDACARAEEWGEPDADXRAAFLLGGAGVYAVAXLVYHALGRSDYVQPLGKFRALCAVCAPVSFLECGSDELFVGRAGYLCAALVLKQKLAQEVLXPAQIKSICQAILDSGKQYAIKKRKPFPLMYSYYGXEYLGAAHGLSSILQMLLSYHEHLKPSDRELVWQSVDFLMEQEQNCNWPPELGEXIERENELVHWCHGAPGIAYLFAKAYLVSKKPQYLDXCIRCGELXWQKGLLKKGPGICHGVAGSAYVFLLLYRLXGNSKYIYRAQRFAQFLFXEEFKAGSRVLESIYSLYEGFSGXVCFLIDLLQPNQAEFPLFSVFV

SEQ ID NO: 14720 - protein, 281 aa, Homo sapiens
  MOD_RES (48)..(48): Selenocysteine
  MOD_RES (84)..(84): Selenocysteine
  MOD_RES (92)..(92): Selenocysteine
  MOD_RES (101)..(101): Selenocysteine
  MOD_RES (147)..(147): Selenocysteine
  MOD_RES (159)..(160): Selenocysteine
  MOD_RES (202)..(202): Selenocysteine
  MOD_RES (223)..(223): Selenocysteine
  MOD_RES (234)..(234): Selenocysteine
  MOD_RES (238)..(238): Selenocysteine
  MOD_RES (240)..(240): Selenocysteine
  MOD_RES (248)..(248): Selenocysteine
DESGEEKNGDEDCQRGGQKKKGNKHKWVPLQIDMKPEVPREKLASRPXRPPEPRHIPANRGEIKAHFDYQFGYRKFDGVEGPRXPKYMNNIXYYFDNVSSXELYSVDQELLKDYIKRQIEYYFSVDNLERDFFLRRKMDADGFLPIXLIASFHRVQALXXDISLIFAALKDSKVVEIVDEKVRRREEPEKWPLPPIVDYSQXDFSQLLNCPEFVPRQHYQKEXESAPGSPRAVXPVPXKXEEVSNLKXLPKGLSASLPDLDSENWIEVKKRPRPSPARPKK

SEQ ID NO: 14721 - protein, 195 aa, Homo sapiens
  MOD_RES (46)..(46): Selenocysteine
  MOD_RES (58)..(59): Selenocysteine
  MOD_RES (101)..(101): Selenocysteine
  MOD_RES (122)..(122): Selenocysteine
  MOD_RES (124)..(124): Selenocysteine
  MOD_RES (128)..(128): Selenocysteine
  MOD_RES (130)..(130): Selenocysteine
  MOD_RES (138)..(138): Selenocysteine
  MOD_RES (181)..(181): Selenocysteine
ELYSVDQELLKDYIKRQIEYYFSVDNLERDFFLRRKMDADGFLPIXLIASFHRVQALXXDISLIFAALKDSKVVEIVDEKVRRREEPEKWPLPPIVDYSQXDFSQLLNCPEFVPRQHYQKEXVXPVPXKXEEVSNLKXLPKGLSASLPDLDSENWIEVKKRPRPSPARPKKSEESRFSHLXSLPQQLPSQQLMSK

SEQ ID NO: 14722 - protein, 816 aa, Homo sapiens
  MOD_RES (3)..(3): Selenocysteine
  MOD_RES (14)..(14): Selenocysteine
  MOD_RES (68)..(68): Selenocysteine
  MOD_RES (128)..(128): Selenocysteine
  MOD_RES (137)..(138): Selenocysteine
  MOD_RES (178)..(178): Selenocysteine
  MOD_RES (197)..(197): Selenocysteine
  MOD_RES (223)..(223): Selenocysteine
  MOD_RES (273)..(273): Selenocysteine
  MOD_RES (295)..(295): Selenocysteine
  MOD_RES (303)..(303): Selenocysteine
  MOD_RES (322)..(322): Selenocysteine
  MOD_RES (355)..(355): Selenocysteine
  MOD_RES (357)..(357): Selenocysteine
  MOD_RES (376)..(376): Selenocysteine
  MOD_RES (384)..(384): Selenocysteine
  MOD_RES (393)..(393): Selenocysteine
  MOD_RES (439)..(439): Selenocysteine
  MOD_RES (451)..(452): Selenocysteine
  MOD_RES (494)..(494): Selenocysteine
  MOD_RES (515)..(515): Selenocysteine
  MOD_RES (526)..(526): Selenocysteine
  MOD_RES (530)..(530): Selenocysteine
  MOD_RES (532)..(532): Selenocysteine
  MOD_RES (540)..(540): Selenocysteine
  MOD_RES (583)..(583): Selenocysteine
  MOD_RES (622)..(622): Selenocysteine
  MOD_RES (624)..(624): Selenocysteine
  MOD_RES (647)..(647): Selenocysteine
  MOD_RES (649)..(649): Selenocysteine
  MOD_RES (662)..(662): Selenocysteine
  MOD_RES (666)..(666): Selenocysteine
  MOD_RES (722)..(722): Selenocysteine
  MOD_RES (724)..(724): Selenocysteine
  MOD_RES (747)..(747): Selenocysteine
  MOD_RES (762)..(762): Selenocysteine
  MOD_RES (769)..(770): Selenocysteine
  MOD_RES (780)..(780): Selenocysteine
  MOD_RES (782)..(782): Selenocysteine
  MOD_RES (785)..(785): Selenocysteine
  MOD_RES (788)..(788): Selenocysteine
  MOD_RES (797)..(797): Selenocysteine
  MOD_RES (809)..(809): Selenocysteine
MAXQVEPLLPGGAXLLQAEEHGGLVRKKPPPAPEGKGEPGPNDVRGGEPDGSARRPRPPCAKPHKEGXGQQERESPRPLQLPGAEGPAISDGEEGGGEPGAGGGAAGAAGAGRRDFVEAPPPKVNPWXKNALPPVLXXVNGQSPPEHSAPAKVVRAAVPKQRKGSKVGDFGDAINWPXPGEIAHKSVQPQSHKPQPXRKLPPKKDMKEQEKGEGSDSKESPKXKSDESGEEKNGDEDCQRGGQKKKGNKHKWVPLQIDMKPEVPREKLASRPXRPPEPRHIPANRGEIKGSESAXYVPVAPPXPAWQPEIKPEPAWHDQDEXSSVKSDGAGGARASFRGRGRGRGRGRGRGRGGXRXHFDYQFGYRKFDGVEGPRXPKYMNNIXYYFDNVSSXELYSVDQELLKDYIKRQIEYYFSVDNLERDFFLRRKMDADGFLPIXLIASFHRVQALXXDISLIFAALKDSKVVEIVDEKVRRREEPEKWPLPPIVDYSQXDFSQLLNCPEFVPRQHYQKEXESAPGSPRAVXPVPXKXEEVSNLKXLPKGLSASLPDLDSENWIEVKKRPRPSPARPKKSEESRFSHLXSLPQQLPSQQLMSKDQDEQEELDFLFDEEMEQMDGRKNXFXAWSDEESDYEIDDRDVNKILIVXQXPHYMRRHPGGDRXGNHXSRAKMSAELAKVINDGLFYYEQDLWAEKFEPEYSQIKQEVENFKKVNMISREQFDXLXPEPPVDPNQEVPPGPPRFQQVPXDALANKLFGAPEPSXIARSLPXXVPESPNYRNXRXPRXPRXPQLKDSSQXSRFYPVVKEGRXLDAKMPR

SEQ ID NO: 14723 - protein, 93 aa, Homo sapiens
  MOD_RES (18)..(18): Selenocysteine
  MOD_RES (68)..(68): Selenocysteine
  MOD_RES (90)..(90): Selenocysteine
MKEQEKGEGSDSKESPKXKSDESGEEKNGDEDCQRGGQKKKGNKHKWVPLQIDMKPEVPREKLASRPXRPPEPRHIPANRGEIKGSESAXYVP

SEQ ID NO: 14724 - protein, 611 aa, Homo sapiens
  MOD_RES (18)..(18): Selenocysteine
  MOD_RES (68)..(68): Selenocysteine
  MOD_RES (90)..(90): Selenocysteine
  MOD_RES (98)..(98): Selenocysteine
  MOD_RES (117)..(117): Selenocysteine
  MOD_RES (150)..(150): Selenocysteine
  MOD_RES (152)..(152): Selenocysteine
  MOD_RES (171)..(171): Selenocysteine
  MOD_RES (179)..(179): Selenocysteine
  MOD_RES (188)..(188): Selenocysteine
  MOD_RES (234)..(234): Selenocysteine
  MOD_RES (246)..(247): Selenocysteine
  MOD_RES (289)..(289): Selenocysteine
  MOD_RES (310)..(310): Selenocysteine
  MOD_RES (321)..(321): Selenocysteine
  MOD_RES (325)..(325): Selenocysteine
  MOD_RES (327)..(327): Selenocysteine
  MOD_RES (335)..(335): Selenocysteine
  MOD_RES (378)..(378): Selenocysteine
  MOD_RES (417)..(417): Selenocysteine
  MOD_RES (419)..(419): Selenocysteine
  MOD_RES (442)..(442): Selenocysteine
  MOD_RES (444)..(444): Selenocysteine
  MOD_RES (457)..(457): Selenocysteine
  MOD_RES (461)..(461): Selenocysteine
  MOD_RES (517)..(517): Selenocysteine
  MOD_RES (519)..(519): Selenocysteine
  MOD_RES (542)..(542): Selenocysteine
  MOD_RES (557)..(557): Selenocysteine
  MOD_RES (564)..(565): Selenocysteine
  MOD_RES (575)..(575): Selenocysteine
  MOD_RES (577)..(577): Selenocysteine
  MOD_RES (580)..(580): Selenocysteine
  MOD_RES (583)..(583): Selenocysteine
  MOD_RES (592)..(592): Selenocysteine
  MOD_RES (604)..(604): Selenocysteine
MKEQEKGEGSDSKESPKXKSDESGEEKNGDEDCQRGGQKKKGNKHKWVPLQIDMKPEVPREKLASRPXRPPEPRHIPANRGEIKGSESAXYVPVAPPXPAWQPEIKPEPAWHDQDEXSSVKSDGAGGARASFRGRGRGRGRGRGRGRGGXRXHFDYQFGYRKFDGVEGPRXPKYMNNIXYYFDNVSSXELYSVDQELLKDYIKRQIEYYFSVDNLERDFFLRRKMDADGFLPIXLIASFHRVQALXXDISLIFAALKDSKVVEIVDEKVRRREEPEKWPLPPIVDYSQXDFSQLLNCPEFVPRQHYQKEXESAPGSPRAVXPVPXKXEEVSNLKXLPKGLSASLPDLDSENWIEVKKRPRPSPARPKKSEESRFSHLXSLPQQLPSQQLMSKDQDEQEELDFLFDEEMEQMDGRKNXFXAWSDEESDYEIDDRDVNKILIVXQXPHYMRRHPGGDRXGNHXSRAKMSAELAKVINDGLFYYEQDLWAEKFEPEYSQIKQEVENFKKVNMISREQFDXLXPEPPVDPNQEVPPGPPRFQQVPXDALANKLFGAPEPSXIARSLPXXVPESPNYRNXRXPRXPRXPQLKDSSQXSRFYPVVKEGRXLDAKMPR

SEQ ID NO: 14725 - protein, 1019 aa, Homo sapiens
  MOD_RES (50)..(50): Selenocysteine
  MOD_RES (101)..(101): Selenocysteine
  MOD_RES (120)..(120): Selenocysteine
  MOD_RES (146)..(146): Selenocysteine
  MOD_RES (196)..(196): Selenocysteine
  MOD_RES (218)..(218): Selenocysteine
  MOD_RES (226)..(226): Selenocysteine
  MOD_RES (245)..(245): Selenocysteine
  MOD_RES (278)..(278): Selenocysteine
  MOD_RES (280)..(280): Selenocysteine
  MOD_RES (299)..(299): Selenocysteine
  MOD_RES (307)..(307): Selenocysteine
  MOD_RES (316)..(316): Selenocysteine
  MOD_RES (362)..(362): Selenocysteine
  MOD_RES (374)..(375): Selenocysteine
  MOD_RES (417)..(417): Selenocysteine
  MOD_RES (438)..(438): Selenocysteine
  MOD_RES (449)..(449): Selenocysteine
  MOD_RES (453)..(453): Selenocysteine
  MOD_RES (455)..(455): Selenocysteine
  MOD_RES (463)..(463): Selenocysteine
  MOD_RES (506)..(506): Selenocysteine
  MOD_RES (545)..(545): Selenocysteine
  MOD_RES (547)..(547): Selenocysteine
  MOD_RES (570)..(570): Selenocysteine
  MOD_RES (572)..(572): Selenocysteine
  MOD_RES (585)..(585): Selenocysteine
  MOD_RES (589)..(589): Selenocysteine
  MOD_RES (645)..(645): Selenocysteine
  MOD_RES (647)..(647): Selenocysteine
  MOD_RES (670)..(670): Selenocysteine
  MOD_RES (685)..(685): Selenocysteine
  MOD_RES (692)..(693): Selenocysteine
  MOD_RES (703)..(703): Selenocysteine
  MOD_RES (705)..(705): Selenocysteine
  MOD_RES (708)..(708): Selenocysteine
  MOD_RES (711)..(711): Selenocysteine
  MOD_RES (720)..(720): Selenocysteine
  MOD_RES (732)..(732): Selenocysteine
  MOD_RES (743)..(743): Selenocysteine
  MOD_RES (768)..(768): Selenocysteine
  MOD_RES (779)..(779): Selenocysteine
  MOD_RES (781)..(781): Selenocysteine
  MOD_RES (788)..(788): Selenocysteine
  MOD_RES (809)..(809): Selenocysteine
  MOD_RES (837)..(837): Selenocysteine
  MOD_RES (901)..(901): Selenocysteine
  MOD_RES (994)..(994): Selenocysteine
  MOD_RES (997)..(997): Selenocysteine
  MOD_RES (1008)..(1008): Selenocysteine
  MOD_RES (1014)..(1014): Selenocysteine
  MOD_RES (1016)..(1016): Selenocysteine
MLWRVLLSKRPPFPHPELDFQEAPIPSCPGRLPGRKNSVALAAAPRKEPXGDREKPLPFPVLAPFSNPEHSAPAKVVRAAVPKQRKGSKVGDFGDAINWPXPGEIAHKSVQPQSHKPQPXRKLPPKKDMKEQEKGEGSDSKESPKXKSDESGEEKNGDEDCQRGGQKKKGNKHKWVPLQIDMKPEVPREKLASRPXRPPEPRHIPANRGEIKGSESAXYVPVAPPXPAWQPEIKPEPAWHDQDEXSSVKSDGAGGARASFRGRGRGRGRGRGRGRGGXRXHFDYQFGYRKFDGVEGPRXPKYMNNIXYYFDNVSSXELYSVDQELLKDYIKRQIEYYFSVDNLERDFFLRRKMDADGFLPIXLIASFHRVQALXXDISLIFAALKDSKVVEIVDEKVRRREEPEKWPLPPIVDYSQXDFSQLLNCPEFVPRQHYQKEXESAPGSPRAVXPVPXKXEEVSNLKXLPKGLSASLPDLDSENWIEVKKRPRPSPARPKKSEESRFSHLXSLPQQLPSQQLMSKDQDEQEELDFLFDEEMEQMDGRKNXFXAWSDEESDYEIDDRDVNKILIVXQXPHYMRRHPGGDRXGNHXSRAKMSAELAKVINDGLFYYEQDLWAEKFEPEYSQIKQEVENFKKVNMISREQFDXLXPEPPVDPNQEVPPGPPRFQQVPXDALANKLFGAPEPSXIARSLPXXVPESPNYRNXRXPRXPRXPQLKDSSQXSRFYPVVKEGRXLDAKMPRKRKXRHSSNPPLESHVGWVMDSREHRPRXASISSSPSEGXPXVGSYGCXPQSLPKFQHPSHELLKENGFXQHVYHKYRRRCLNERKRLGIGQSQEMNXLFRFWSFFLRDHFNKKMYEEFKQLALEDAKEGYRYGLECLFRYYSYGLEKKFRLDIFKDFQEEXVKDYEAGQLYGLEKFWAFLKYSKAKNLDIDPKLQEYLGKFRRLEDFRVDPPMGEEGNHKRHSVVAGGGGGEGRKRCPSQSSSRPAAMISQPPXPPXGQPVREDAKWXSQHSNXQXLGK

SEQ ID NO: 14726 - protein, 67 aa, Homo sapiens
  MOD_RES (1)..(1): Any amino acid
  MOD_RES (47)..(47): Selenocysteine
  MOD_RES (56)..(57): Selenocysteine
  MOD_RES (66)..(66): Selenocysteine
XGAEGPAISDGEEGGGEPGAGGGAAGAAGAGRRDFVEAPPPKVNPWXKNALPPVLXXVNGQSPPDXL

SEQ ID NO: 14727 - protein, 61 aa, Homo sapiens
  MOD_RES (1)..(1): Any amino acid
  MOD_RES (40)..(40): Selenocysteine
XNGQSPPEHSAPAKVVRAAVPKQRKGSKVGDFGDAINWPXPGEIAHKSVQMKLLRLAEVNY

SEQ ID NO: 14728 - protein, 183 aa, Homo sapiens
  MOD_RES (1)..(1): Any amino acid
  MOD_RES (36)..(36): Selenocysteine
  MOD_RES (38)..(38): Selenocysteine
  MOD_RES (61)..(61): Selenocysteine
  MOD_RES (76)..(76): Selenocysteine
  MOD_RES (83)..(84): Selenocysteine
  MOD_RES (94)..(94): Selenocysteine
  MOD_RES (96)..(96): Selenocysteine
  MOD_RES (99)..(99): Selenocysteine
  MOD_RES (102)..(102): Selenocysteine
  MOD_RES (111)..(111): Selenocysteine
  MOD_RES (123)..(123): Selenocysteine
  MOD_RES (134)..(134): Selenocysteine
  MOD_RES (159)..(159): Selenocysteine
  MOD_RES (181)..(181): Selenocysteine
XQDLWAEKFEPEYSQIKQEVENFKKVNMISREQFDXLXPEPPVDPNQEVPPGPPRFQQVPXDALANKLFGAPEPSXIARSLPXXVPESPNYRNXRXPRXPRXPQLKDSSQXSRFYPVVKEGRXLDAKMPRKRKXRHSSNPPLESHVGWVMDSREHRPRXASISKMAPVCVSCFPKQALRAXYL

SEQ ID NO: 14729 - protein, 150 aa, Homo sapiens
  MOD_RES (1)..(1): Any amino acid
  MOD_RES (35)..(35): Selenocysteine
  MOD_RES (57)..(57): Selenocysteine
  MOD_RES (65)..(65): Selenocysteine
  MOD_RES (84)..(84): Selenocysteine
  MOD_RES (112)..(112): Selenocysteine
  MOD_RES (120)..(120): Selenocysteine
  MOD_RES (129)..(129): Selenocysteine
XRGGQKKKGNKHKWVPLQIDMKPEVPREKLASRPXRPPEPRHIPANRGEIKGSESAXYVPVAPPXPAWQPEIKPEPAWHDQDEXSSVKSDGAAHFDYQFGYRKFDGVEGPRXPKYMNNIXYYFDNVSSXELYSVDQELLKDYIKRQIEYY

SEQ ID NO: 14730 - protein, 36 aa, Homo sapiens
  MOD_RES (1)..(1): Any amino acid
  MOD_RES (26)..(26): Selenocysteine
  MOD_RES (33)..(33): Selenocysteine
XRHSSNPPLESHVGWVMDSREHRPRXASIRDGXDCK

SEQ ID NO: 14731 - protein, 167 aa, Homo sapiens
  MOD_RES (1)..(1): Any amino acid
  MOD_RES (53)..(53): Selenocysteine
  MOD_RES (62)..(63): Selenocysteine
  MOD_RES (100)..(100): Selenocysteine
  MOD_RES (126)..(126): Selenocysteine
XRPLQLPGAEGPAISDGEEGGGEPGAGGGAAGAAGAGRRDFVEAPPPKVNPWXKNALPPVLXXVNGQSPPEHSAPAKVVRAAVPKQRKGSKPQSHKPQPXRKLPPKKDMKEQEKGEGSDSKESPKXKSDESGEEKNGDEDCQRGGQKKKGNKHKWVPLQIDMKPEVP

SEQ ID NO: 14732 - protein, 205 aa, Homo sapiens
  MOD_RES (11)..(11): Selenocysteine
  MOD_RES (48)..(48): Selenocysteine
  MOD_RES (57)..(57): Selenocysteine
  MOD_RES (110)..(110): Selenocysteine
  MOD_RES (172)..(172): Selenocysteine
  MOD_RES (187)..(187): Selenocysteine
  MOD_RES (191)..(191): Selenocysteine
  MOD_RES (194)..(194): Selenocysteine
MLPLRDLQDDXEHEELQGLREEALLQRVRYKEEFEKNKGKGFSVVADXPELQRIKKXQDQISNIKYHEEFEKSRMGPSGGEGMEPERRDSQDGSSYRRPLEQQQPHHIPXSAPVYQQPQQQPVAQSYGGYKEPAAPVSIQRSAPGGGGKRYRAVYDYSAADEDEVSFQDGDXIVNVQQIDDGWMYGXVERXGDXGMLPANYVEAI

SEQ ID NO: 14733 - protein, 71 aa, Homo sapiens
  MOD_RES (15)..(15): Selenocysteine
  MOD_RES (34)..(34): Selenocysteine
  MOD_RES (38)..(38): Selenocysteine
  MOD_RES (58)..(58): Selenocysteine
  MOD_RES (65)..(65): Selenocysteine
MNPNCARCGKIVYPXEKVNCLDKFWHKACFHCEXCKMXLNMKNYKGYEKKPYCNACAXRRSLRRXRAKVSA

SEQ ID NO: 14734 - protein, 91 aa, Homo sapiens
  MOD_RES (15)..(15): Selenocysteine
  MOD_RES (34)..(34): Selenocysteine
  MOD_RES (38)..(38): Selenocysteine
  MOD_RES (63)..(63): Selenocysteine
  MOD_RES (68)..(68): Selenocysteine
MNPNCARCGKIVYPXEKVNCLDKFWHKACFHCEXCKMXLNMKNYKGYEKKPYCNAHYPKQSFXMVADXPENLRLKQQSELQSQMKKPRPGA

SEQ ID NO: 14735 - protein, 261 aa, Homo sapiens
  MOD_RES (15)..(15): Selenocysteine
  MOD_RES (34)..(34): Selenocysteine
  MOD_RES (38)..(38): Selenocysteine
  MOD_RES (63)..(63): Selenocysteine
  MOD_RES (68)..(68): Selenocysteine
  MOD_RES (104)..(104): Selenocysteine
  MOD_RES (113)..(113): Selenocysteine
  MOD_RES (166)..(166): Selenocysteine
  MOD_RES (228)..(228): Selenocysteine
  MOD_RES (243)..(243): Selenocysteine
  MOD_RES (247)..(247): Selenocysteine
  MOD_RES (250)..(250): Selenocysteine
MNPNCARCGKIVYPXEKVNCLDKFWHKACFHCEXCKMXLNMKNYKGYEKKPYCNAHYPKQSFXMVADXPENLRLKQQSELQSQVRYKEEFEKNKGKGFSVVADXPELQRIKKXQDQISNIKYHEEFEKSRMGPSGGEGMEPERRDSQDGSSYRRPLEQQQPHHIPXSAPVYQQPQQQPVAQSYGGYKEPAAPVSIQRSAPGGGGKRYRAVYDYSAADEDEVSFQDGDXIVNVQQIDDGWMYGXVERXGDXGMLPANYVEAI

SEQ ID NO: 14736 - protein, 166 aa, Homo sapiens
  MOD_RES (2)..(2): Selenocysteine
  MOD_RES (27)..(27): Selenocysteine
  MOD_RES (32)..(32): Selenocysteine
  MOD_RES (68)..(68): Selenocysteine
  MOD_RES (77)..(77): Selenocysteine
  MOD_RES (130)..(130): Selenocysteine
MXLNMKNYKGYEKKPYCNAHYPKQSFXMVADXPENLRLKQQSELQSQVRYKEEFEKNKGKGFSVVADXPELQRIKKXQDQISNIKYHEEFEKSRMGPSGGEGMEPERRDSQDGSSYRRPLEQQQPHHIPXSAPVYQQPQQQPVAQSYGGYKEPAAPVSIQRSAPGG

SEQ ID NO: 14737 - protein, 105 aa, Homo sapiens
  MOD_RES (23)..(23): Selenocysteine
  MOD_RES (82)..(82): Selenocysteine
  MOD_RES (92)..(92): Selenocysteine
RDSQDGSSYRRPLEQQQPHHIPXSAPVYQQPQQQPVAQSYGGYKEPAAPVSIQRSAPGGGGVSNPGRRGEARGRGSFGKAWXQLMDSPDLCXHPLLCVMIRISAL

SEQ ID NO: 14738 - protein, 166 aa, Homo sapiens
  MOD_RES (14)..(14): Selenocysteine
  MOD_RES (60)..(60): Selenocysteine
  MOD_RES (63)..(63): Selenocysteine
  MOD_RES (65)..(65): Selenocysteine
  MOD_RES (75)..(75): Selenocysteine
  MOD_RES (125)..(125): Selenocysteine
  MOD_RES (141)..(141): Selenocysteine
  MOD_RES (164)..(165): Selenocysteine
IPRSPQPLGGSHRXPSSRRDSDGANSVASYENEEPACEDADEDEDDYHNPGYLVVLPDSXPAXSXAAPSAPALSXPGIRDSAFSMESIDDYVNVPESGESAEASLDGSREYVNVSQELHPGAAKXEPVEAESVLEPGLPGXAELGSWKWLWGPHMASCPCSSLXXA

SEQ ID NO: 14739 - protein, 269 aa, Homo sapiens
  MOD_RES (4)..(4): Selenocysteine
  MOD_RES (75)..(75): Selenocysteine
  MOD_RES (92)..(92): Selenocysteine
  MOD_RES (104)..(104): Selenocysteine
  MOD_RES (130)..(130): Selenocysteine
  MOD_RES (176)..(176): Selenocysteine
  MOD_RES (179)..(179): Selenocysteine
  MOD_RES (181)..(181): Selenocysteine
  MOD_RES (191)..(191): Selenocysteine
  MOD_RES (241)..(241): Selenocysteine
MEAXAASWQVAVPVLGGASRPLGPRGAASLLRAPLQMEEAILVPCVLGLLLLPILAMLMALCVHCHRLPGSYDSXSSDSLYPRGIQFKRPHXVAPWPPAYPPVXSYPPLSQPDLLPIPRSPQPLGGSHRXPSSRRDSDGANSVASYENEEPACEDADEDEDDYHNPGYLVVLPDSXPAXSXAAPSAPALSXPGIRDSAFSMESIDDYVNVPESGESAEASLDGSREYVNVSQELHPGAAKXEPAALSSQEAEEVEEEGAPDYENLQELN

SEQ ID NO: 14740 - protein, 85 aa, Homo sapiens
  MOD_RES (39)..(39): Selenocysteine
  MOD_RES (56)..(56): Selenocysteine
  MOD_RES (68)..(68): Selenocysteine
MEEAILVPCVLGLLLLPILAMLMALCVHCHRLPGSYDSXSSDSLYPRGIQFKRPHXVAPWPPAYPPVXSYPPLSQPDLLPIPHDP

SEQ ID NO: 14741 - protein, 233 aa, Homo sapiens
  MOD_RES (39)..(39): Selenocysteine
  MOD_RES (56)..(56): Selenocysteine
  MOD_RES (68)..(68): Selenocysteine
  MOD_RES (94)..(94): Selenocysteine
  MOD_RES (140)..(140): Selenocysteine
  MOD_RES (143)..(143): Selenocysteine
  MOD_RES (145)..(145): Selenocysteine
  MOD_RES (155)..(155): Selenocysteine
  MOD_RES (205)..(205): Selenocysteine
MEEAILVPCVLGLLLLPILAMLMALCVHCHRLPGSYDSXSSDSLYPRGIQFKRPHXVAPWPPAYPPVXSYPPLSQPDLLPIPRSPQPLGGSHRXPSSRRDSDGANSVASYENEEPACEDADEDEDDYHNPGYLVVLPDSXPAXSXAAPSAPALSXPGIRDSAFSMESIDDYVNVPESGESAEASLDGSREYVNVSQELHPGAAKXEPAALSSQEAEEVEEEGAPDYENLQELN

SEQ ID NO: 14742 - protein, 262 aa, Homo sapiens
  MOD_RES (39)..(39): Selenocysteine
  MOD_RES (56)..(56): Selenocysteine
  MOD_RES (68)..(68): Selenocysteine
  MOD_RES (94)..(94): Selenocysteine
  MOD_RES (133)..(133): Selenocysteine
  MOD_RES (136)..(136): Selenocysteine
  MOD_RES (169)..(169): Selenocysteine
  MOD_RES (172)..(172): Selenocysteine
  MOD_RES (174)..(174): Selenocysteine
  MOD_RES (184)..(184): Selenocysteine
  MOD_RES (234)..(234): Selenocysteine
MEEAILVPCVLGLLLLPILAMLMALCVHCHRLPGSYDSXSSDSLYPRGIQFKRPHXVAPWPPAYPPVXSYPPLSQPDLLPIPRSPQPLGGSHRXPSSRRDSDGANSVASYENEGASGIRGAQAGWGVWGPSWXRLXPVSLPPEPACEDADEDEDDYHNPGYLVVLPDSXPAXSXAAPSAPALSXPGIRDSAFSMESIDDYVNVPESGESAEASLDGSREYVNVSQELHPGAAKXEPAALSSQEAEEVEEEGAPDYENLQELN

SEQ ID NO: 14743 - protein, 232 aa, Homo sapiens
  MOD_RES (39)..(39): Selenocysteine
  MOD_RES (56)..(56): Selenocysteine
  MOD_RES (68)..(68): Selenocysteine
  MOD_RES (93)..(93): Selenocysteine
  MOD_RES (139)..(139): Selenocysteine
  MOD_RES (142)..(142): Selenocysteine
  MOD_RES (144)..(144): Selenocysteine
  MOD_RES (154)..(154): Selenocysteine
  MOD_RES (204)..(204): Selenocysteine
MEEAILVPCVLGLLLLPILAMLMALCVHCHRLPGSYDSXSSDSLYPRGIQFKRPHXVAPWPPAYPPVXSYPPLSQPDLLPIPSPQPLGGSHRXPSSRRDSDGANSVASYENEEPACEDADEDEDDYHNPGYLVVLPDSXPAXSXAAPSAPALSXPGIRDSAFSMESIDDYVNVPESGESAEASLDGSREYVNVSQELHPGAAKXEPAALSSQEAEEVEEEGAPDYENLQELN

SEQ ID NO: 14744 - protein, 261 aa, Homo sapiens
  MOD_RES (39)..(39): Selenocysteine
  MOD_RES (56)..(56): Selenocysteine
  MOD_RES (68)..(68): Selenocysteine
  MOD_RES (93)..(93): Selenocysteine
  MOD_RES (132)..(132): Selenocysteine
  MOD_RES (135)..(135): Selenocysteine
  MOD_RES (168)..(168): Selenocysteine
  MOD_RES (171)..(171): Selenocysteine
  MOD_RES (173)..(173): Selenocysteine
  MOD_RES (183)..(183): Selenocysteine
  MOD_RES (233)..(233): Selenocysteine
MEEAILVPCVLGLLLLPILAMLMALCVHCHRLPGSYDSXSSDSLYPRGIQFKRPHXVAPWPPAYPPVXSYPPLSQPDLLPIPSPQPLGGSHRXPSSRRDSDGANSVASYENEGASGIRGAQAGWGVWGPSWXRLXPVSLPPEPACEDADEDEDDYHNPGYLVVLPDSXPAXSXAAPSAPALSXPGIRDSAFSMESIDDYVNVPESGESAEASLDGSREYVNVSQELHPGAAKXEPAALSSQEAEEVEEEGAPDYENLQELN

SEQ ID NO: 14745 - protein, 100 aa, Homo sapiens
  MOD_RES (5)..(5): Selenocysteine
  MOD_RES (43)..(43): Selenocysteine
  MOD_RES (47)..(47): Selenocysteine
  MOD_RES (65)..(65): Selenocysteine
MSSGXELLWPGAALLVLLGVAASLCVRCSRPGAKRREDQQSFXGSRXYSLVGQAWPGPLADMAPXRKDKLLQFYPSLEDPASSRYQNFSKGSRHGSEEAY

SEQ ID NO: 14746 - protein, 58 aa, Homo sapiens
  MOD_RES (5)..(5): Selenocysteine
  MOD_RES (53)..(53): Selenocysteine
  MOD_RES (57)..(57): Selenocysteine
MSSGXELLWPGAALLVLLGVAASLCVRCSRPGAKRSEKIYQQRSLREDQQSFXGSRXY

SEQ ID NO: 14747 - protein, 64 aa, Homo sapiens
  MOD_RES (5)..(5): Selenocysteine
  MOD_RES (53)..(53): Selenocysteine
  MOD_RES (57)..(57): Selenocysteine
MSSGXELLWPGAALLVLLGVAASLCVRCSRPGAKRSEKIYQQRSLREDQQSFXGSRXYSLVGQA

SEQ ID NO: 14748 - protein, 100 aa, Homo sapiens
  MOD_RES (5)..(5): Selenocysteine
  MOD_RES (53)..(53): Selenocysteine
  MOD_RES (57)..(57): Selenocysteine
  MOD_RES (75)..(75): Selenocysteine
MSSGXELLWPGAALLVLLGVAASLCVRCSRPGAKRSEKIYQQRSLREDQQSFXGSRXYSLVGQAWPGPLADMAPXRKDKLLQFYPSLEDPASSRYQNFSK

SEQ ID NO: 14749 - protein, 111 aa, Homo sapiens
  MOD_RES (5)..(5): Selenocysteine
  MOD_RES (53)..(53): Selenocysteine
  MOD_RES (57)..(57): Selenocysteine
  MOD_RES (75)..(75): Selenocysteine
MSSGXELLWPGAALLVLLGVAASLCVRCSRPGAKRSEKIYQQRSLREDQQSFXGSRXYSLVGQAWPGPLADMAPXRKDKLLQFYPSLEDPASSRYQNFSKGSRHGSEEAYI

SEQ ID NO: 14750 - protein, 243 aa, Homo sapiens
  MOD_RES (5)..(5): Selenocysteine
  MOD_RES (53)..(53): Selenocysteine
  MOD_RES (57)..(57): Selenocysteine
  MOD_RES (75)..(75): Selenocysteine
  MOD_RES (146)..(147): Selenocysteine
  MOD_RES (149)..(149): Selenocysteine
  MOD_RES (172)..(172): Selenocysteine
  MOD_RES (175)..(175): Selenocysteine
  MOD_RES (241)..(241): Selenocysteine
MSSGXELLWPGAALLVLLGVAASLCVRCSRPGAKRSEKIYQQRSLREDQQSFXGSRXYSLVGQAWPGPLADMAPXRKDKLLQFYPSLEDPASSRYQNFSKGSRHGSEEAYIDPIAMEYYNWGRFSKPPEDDDANSYENVLICKQKXXEXGAQQEGIGGLCRGDLSLSLALKXGPXSGLCPSASPEEDEESEDYQNSASIHQWRESRKVMGQLQREASPGPVGSPDEEDGEPDYVNGEVAAXEA

SEQ ID NO: 14751 - protein, 690 aa, Homo sapiens
  MOD_RES (17)..(17): Selenocysteine
  MOD_RES (24)..(24): Selenocysteine
  MOD_RES (59)..(59): Selenocysteine
  MOD_RES (73)..(73): Selenocysteine
  MOD_RES (92)..(92): Selenocysteine
  MOD_RES (98)..(98): Selenocysteine
  MOD_RES (126)..(126): Selenocysteine
  MOD_RES (209)..(209): Selenocysteine
  MOD_RES (246)..(246): Selenocysteine
  MOD_RES (255)..(255): Selenocysteine
  MOD_RES (261)..(262): Selenocysteine
  MOD_RES (274)..(274): Selenocysteine
  MOD_RES (307)..(307): Selenocysteine
  MOD_RES (351)..(351): Selenocysteine
  MOD_RES (354)..(354): Selenocysteine
  MOD_RES (367)..(367): Selenocysteine
  MOD_RES (379)..(379): Selenocysteine
  MOD_RES (391)..(391): Selenocysteine
  MOD_RES (401)..(401): Selenocysteine
  MOD_RES (431)..(431): Selenocysteine
  MOD_RES (453)..(453): Selenocysteine
  MOD_RES (484)..(485): Selenocysteine
  MOD_RES (487)..(487): Selenocysteine
  MOD_RES (490)..(490): Selenocysteine
  MOD_RES (510)..(510): Selenocysteine
  MOD_RES (515)..(515): Selenocysteine
  MOD_RES (526)..(526): Selenocysteine
  MOD_RES (536)..(536): Selenocysteine
  MOD_RES (541)..(541): Selenocysteine
  MOD_RES (611)..(612): Selenocysteine
  MOD_RES (616)..(616): Selenocysteine
MKRSEKPEGYRQMRPKXFPASNYXVSSRQMLQEIRESLRNLSKPSDAAKAEHNMSKMSXEDPRQVRNPPKFGXHHKALQEIRNSLLPFANEXNSSRSXSEVNPQMLQDLQAAGFDEDMVIQALQKXNNRSIEAAIEFISKMSYQDPRREQMAAAAARPINASMKPGNVQQSVNRKQSWKGSKESLVPQRHGPPLGESVAYHSESPNSQXDVGRPLSGSGISAFVQAHPSNGQRVNPPPPPQVRSVXPPPPPRGQXPPPRGXXPPPPSWEPNSQXKRYSGNMEYVISRISPVPPGAWQEGYPPPPLNXSPMNPPNQGQRGISSVPVGRQPIIMQSSSKFNFPSGRPGMQNGXGQXDFMIHQNVVPAGXVNRQPPPPYPLXAANGQSPSALQXGGSAAPSSYXNGSIPQSMMVPNRNSHNMELYNISVPGLQXNWPQSSSAPAQSSPSSGHEIPXWQPNIPVRSNSFNNPLGNRASHSANSQPSAXXVXAIXPAPIQQPVKSMRVLKPELQXALAPXHPSWIPQPIQXVQPSPFPEGXASNVXVMPPVAEAPNYQGPPPPYPKHLLHQNPSVPPYESISKPSKEDQPSLPKEDESEKSYENVDSGDKEKKQIXXSPIXVRKNKKDEERRESRIQSYSPQAFKFFMEQHVENVLKSHQQRLHRKKQLENEMMRVKPFKMSIFILNHLFAWCLF

SEQ ID NO: 14752 - protein, 1130 aa, Homo sapiens
  MOD_RES (17)..(17): Selenocysteine
  MOD_RES (24)..(24): Selenocysteine
  MOD_RES (59)..(59): Selenocysteine
  MOD_RES (73)..(73): Selenocysteine
  MOD_RES (92)..(92): Selenocysteine
  MOD_RES (98)..(98): Selenocysteine
  MOD_RES (126)..(126): Selenocysteine
  MOD_RES (209)..(209): Selenocysteine
  MOD_RES (246)..(246): Selenocysteine
  MOD_RES (255)..(255): Selenocysteine
  MOD_RES (261)..(262): Selenocysteine
  MOD_RES (274)..(274): Selenocysteine
  MOD_RES (307)..(307): Selenocysteine
  MOD_RES (351)..(351): Selenocysteine
  MOD_RES (354)..(354): Selenocysteine
  MOD_RES (367)..(367): Selenocysteine
  MOD_RES (379)..(379): Selenocysteine
  MOD_RES (391)..(391): Selenocysteine
  MOD_RES (401)..(401): Selenocysteine
  MOD_RES (431)..(431): Selenocysteine
  MOD_RES (453)..(453): Selenocysteine
  MOD_RES (484)..(485): Selenocysteine
  MOD_RES (487)..(487): Selenocysteine
  MOD_RES (490)..(490): Selenocysteine
  MOD_RES (510)..(510): Selenocysteine
  MOD_RES (515)..(515): Selenocysteine
  MOD_RES (526)..(526): Selenocysteine
  MOD_RES (536)..(536): Selenocysteine
  MOD_RES (541)..(541): Selenocysteine
  MOD_RES (611)..(612): Selenocysteine
  MOD_RES (616)..(616): Selenocysteine
  MOD_RES (710)..(710): Selenocysteine
  MOD_RES (727)..(727): Selenocysteine
  MOD_RES (733)..(733): Selenocysteine
  MOD_RES (735)..(735): Selenocysteine
  MOD_RES (813)..(813): Selenocysteine
  MOD_RES (845)..(845): Selenocysteine
  MOD_RES (851)..(851): Selenocysteine
  MOD_RES (856)..(856): Selenocysteine
  MOD_RES (913)..(913): Selenocysteine
  MOD_RES (925)..(925): Selenocysteine
  MOD_RES (928)..(928): Selenocysteine
  MOD_RES (954)..(954): Selenocysteine
  MOD_RES (958)..(958): Selenocysteine
  MOD_RES (967)..(967): Selenocysteine
  MOD_RES (1012)..(1012): Selenocysteine
  MOD_RES (1031)..(1031): Selenocysteine
  MOD_RES (1034)..(1034): Selenocysteine
  MOD_RES (1036)..(1036): Selenocysteine
  MOD_RES (1060)..(1060): Selenocysteine
  MOD_RES (1079)..(1079): Selenocysteine
  MOD_RES (1118)..(1118): Selenocysteine
MKRSEKPEGYRQMRPKXFPASNYXVSSRQMLQEIRESLRNLSKPSDAAKAEHNMSKMSXEDPRQVRNPPKFGXHHKALQEIRNSLLPFANEXNSSRSXSEVNPQMLQDLQAAGFDEDMVIQALQKXNNRSIEAAIEFISKMSYQDPRREQMAAAAARPINASMKPGNVQQSVNRKQSWKGSKESLVPQRHGPPLGESVAYHSESPNSQXDVGRPLSGSGISAFVQAHPSNGQRVNPPPPPQVRSVXPPPPPRGQXPPPRGXXPPPPSWEPNSQXKRYSGNMEYVISRISPVPPGAWQEGYPPPPLNXSPMNPPNQGQRGISSVPVGRQPIIMQSSSKFNFPSGRPGMQNGXGQXDFMIHQNVVPAGXVNRQPPPPYPLXAANGQSPSALQXGGSAAPSSYXNGSIPQSMMVPNRNSHNMELYNISVPGLQXNWPQSSSAPAQSSPSSGHEIPXWQPNIPVRSNSFNNPLGNRASHSANSQPSAXXVXAIXPAPIQQPVKSMRVLKPELQXALAPXHPSWIPQPIQXVQPSPFPEGXASNVXVMPPVAEAPNYQGPPPPYPKHLLHQNPSVPPYESISKPSKEDQPSLPKEDESEKSYENVDSGDKEKKQIXXSPIXVRKNKKDEERRESRIQSYSPQAFKFFMEQHVENVLKSHQQRLHRKKQLENEMMRVGLSQDAQDQMRKMLCQKESNYIRLKRAKMDKSMFVKIKXLGIGAFGEVCLARKVDXKALYAXKXLRKKDVLLRNQVAHVKAERDILAEADNEWVVRLYYSFQDKDNLYFVMDYIPGGDMMSLLIRMGIFPESLARFYIAELXCAVESVHKMGFIHRDIKPDNILIDRDGHIKLXDFGLCXGFRWXHDSKYYQSGDHPRQDSMDFSNEWGDPSSCRCGDRLKPLERRAARQHQRCLAHSLVGXPNYIAPEVLLRXGYXQLCDWWSVGVILFEMLVGQPPFLAQXPLEXQMKVINWQXSLHIPPQAKLSPEASDLIIKLCRGPEDRLGKNGADEIKAHPFFKXIDFSSDLRQQSASYIPKIXHPXDXSNFDPVDPDKLWSDDNEEENVNDXLNGWYKNGKHPEHAFYEFXFRRFFDDNGYPYNYPKPIEYEYINSQGSEQQSDEDDQNXGSEIKNRDLVYV

SEQ ID NO: 14753 - protein, 135 aa, Homo sapiens
  MOD_RES (17)..(17): Selenocysteine
  MOD_RES (24)..(24): Selenocysteine
  MOD_RES (59)..(59): Selenocysteine
  MOD_RES (73)..(73): Selenocysteine
  MOD_RES (92)..(92): Selenocysteine
  MOD_RES (98)..(98): Selenocysteine
  MOD_RES (130)..(130): Selenocysteine
MKRSEKPEGYRQMRPKXFPASNYXVSSRQMLQEIRESLRNLSKPSDAAKAEHNMSKMSXEDPRQVRNPPKFGXHHKALQEIRNSLLPFANEXNSSRSXSEVNPQMLQDLQAAGFDEEDHLSVACSPISLXKPFLI

SEQ ID NO: 14754 - protein, 201 aa, Homo sapiens
  MOD_RES (40)..(40): Selenocysteine
  MOD_RES (72)..(72): Selenocysteine
  MOD_RES (155)..(155): Selenocysteine
  MOD_RES (192)..(192): Selenocysteine
  MOD_RES (201)..(201): Selenocysteine
VKGRARSSRPLGRAALARGSPPVRLPALPHQGYLGLLGRXLAASASALRPVAAVQELCSPLQDMVIQALQKXNNRSIEAAIEFISKMSYQDPRREQMAAAAARPINASMKPGNVQQSVNRKQSWKGSKESLVPQRHGPPLGESVAYHSESPNSQXDVGRPLSGSGISAFVQAHPSNGQRVNPPPPPQVRSVXPPPPPRGQX

SEQ ID NO: 14755 - protein, 1088 aa, Homo sapiens
  MOD_RES (5)..(5): Selenocysteine
  MOD_RES (9)..(10): Selenocysteine
  MOD_RES (45)..(45): Selenocysteine
  MOD_RES (58)..(58): Selenocysteine
  MOD_RES (67)..(67): Selenocysteine
  MOD_RES (93)..(93): Selenocysteine
  MOD_RES (124)..(124): Selenocysteine
  MOD_RES (156)..(156): Selenocysteine
  MOD_RES (165)..(165): Selenocysteine
  MOD_RES (168)..(168): Selenocysteine
  MOD_RES (176)..(176): Selenocysteine
  MOD_RES (189)..(189): Selenocysteine
  MOD_RES (202)..(202): Selenocysteine
  MOD_RES (279)..(279): Selenocysteine
  MOD_RES (283)..(283): Selenocysteine
  MOD_RES (291)..(291): Selenocysteine
  MOD_RES (349)..(349): Selenocysteine
  MOD_RES (365)..(365): Selenocysteine
  MOD_RES (374)..(374): Selenocysteine
  MOD_RES (406)..(406): Selenocysteine
  MOD_RES (431)..(431): Selenocysteine
  MOD_RES (433)..(433): Selenocysteine
  MOD_RES (436)..(436): Selenocysteine
  MOD_RES (456)..(456): Selenocysteine
  MOD_RES (575)..(575): Selenocysteine
  MOD_RES (616)..(616): Selenocysteine
  MOD_RES (673)..(673): Selenocysteine
  MOD_RES (690)..(690): Selenocysteine
  MOD_RES (698)..(698): Selenocysteine
  MOD_RES (776)..(776): Selenocysteine
  MOD_RES (808)..(808): Selenocysteine
  MOD_RES (814)..(814): Selenocysteine
  MOD_RES (819)..(819): Selenocysteine
  MOD_RES (856)..(856): Selenocysteine
  MOD_RES (876)..(876): Selenocysteine
  MOD_RES (891)..(891): Selenocysteine
  MOD_RES (917)..(917): Selenocysteine
  MOD_RES (919)..(919): Selenocysteine
  MOD_RES (921)..(921): Selenocysteine
  MOD_RES (931)..(931): Selenocysteine
  MOD_RES (949)..(949): Selenocysteine
  MOD_RES (992)..(992): Selenocysteine
  MOD_RES (999)..(999): Selenocysteine
  MOD_RES (1019)..(1019): Selenocysteine
  MOD_RES (1024)..(1024): Selenocysteine
  MOD_RES (1026)..(1026): Selenocysteine
  MOD_RES (1041)..(1041): Selenocysteine
  MOD_RES (1080)..(1080): Selenocysteine
MRPKXFPAXXYSGNSRQRLQEIREGLKQPSKSSVQGLPAGPNSDXSLDAKVLGSKDAXRQQQQMRAXPKFGPYQKALREIRYSLLPFANESGXSAAAEVNRQMLQELVNAGCDQEMAGRALKQXGSRSIEAALEYISKMGYLDPRNEQIVRVIKQXSPGKGLMPXPVXRRPSFEGXGDSFASYHQLSGXPYEGPSFGADGPXALEEMPRPYVDYLFPGVGPHGPGHQHQHPPKGYGASVEAAGAHFPLQGAHYGRPHLLVPGEPLGYGVQRSPSFQSKXPPEXGGYASLPXKGQGGPPGAGLAFPPPAAGLYVPHPHHKQAGPAAHQLHVLGSRSQVFASDSPPQSLLXPSRNSLNVDLYELGSXSVQQWPAAXLARRDSLQKPGLEAPPRAHVAFRPDCPVPSRXNSFNSHQPRPGPPGKAEPSLPAPNXVXAVXAAHILHPVKSVRVLRPEPQXAVGPSHPAWVPAPAPAPAPAPAPAAEGLDAKEEHALALGGAGAFPLDVEYGGPDRRCPPPPYPKHLLLRSKSEQYDLDSLCAGMEQSLRAGPNEPEGGDKSRKSAKGDKGGKDKKQIQXSPVPVRKNSRDEEKRESRIKSYSPYAFKFFMEQHVENVIKXYQQKVNRRLQLEQEMAKAGLCEAEQEQMRKILYQKESNYNRLKRAKMDKSMFVKIKXLGIGAFGEVCLACKVDXHALYAMKXLRKKDVLNRNQVAHVKAERDILAEADNEWVVKLYYSFQDKDSLYFVMDYIPGGDMMSLLIRMEVFPEHLARFYIAELXLAIESVHKMGFIHRDIKPDNILIDLDGHIKLXDFGLCXGFRWXHNSKYYQKGSHVRQDSMEPSDLWDDVSNCRCGDRLKXLEQRARKQHQRCLAHSLVGXPNYIAPEVLLRKGYXQLCDWWSVGVILFEMLVGQPPFLAPXPXEXQLKVINWENXLHIPAQVKLSPEARDLIXKLCCSADHRLGRNGADDLKAHPFFSAIDFSSDIRKQPAPYVPXISHPMDXSNFDPVDEESPWNDASEGSXKAWDXLXSPNNKHPEHAFYEFXFRRFFDDNGYPFRCPKPSGAEASQAESSDLESSDLVDQXEGCQPVYV

SEQ ID NO: 14756 - protein, 398 aa, Homo sapiens
  MOD_RES (5)..(5): Selenocysteine
  MOD_RES (7)..(7): Selenocysteine
  MOD_RES (10)..(10): Selenocysteine
  MOD_RES (15)..(15): Selenocysteine
  MOD_RES (20)..(20): Selenocysteine
  MOD_RES (24)..(24): Selenocysteine
  MOD_RES (36)..(36): Selenocysteine
  MOD_RES (75)..(75): Selenocysteine
  MOD_RES (81)..(81): Selenocysteine
  MOD_RES (85)..(85): Selenocysteine
  MOD_RES (116)..(116): Selenocysteine
  MOD_RES (142)..(142): Selenocysteine
  MOD_RES (148)..(148): Selenocysteine
  MOD_RES (168)..(168): Selenocysteine
  MOD_RES (198)..(198): Selenocysteine
  MOD_RES (205)..(205): Selenocysteine
  MOD_RES (209)..(209): Selenocysteine
  MOD_RES (222)..(222): Selenocysteine
  MOD_RES (228)..(228): Selenocysteine
  MOD_RES (242)..(242): Selenocysteine
  MOD_RES (272)..(272): Selenocysteine
  MOD_RES (325)..(325): Selenocysteine
  MOD_RES (330)..(330): Selenocysteine
  MOD_RES (338)..(338): Selenocysteine
  MOD_RES (352)..(352): Selenocysteine
  MOD_RES (378)..(378): Selenocysteine
  MOD_RES (392)..(392): Selenocysteine
MDGVXPXLSXIRGRXLESSXLHVXPRSLDRNKDQIXNIFSGFAGLLAILLVVAVFCILWNWNKRKKRQVPYLRVXVMPLLXLPQXRQRAKNIYDILPWRQEDLGRHESRSMRIFSXESLLSRNSESPEHVPSQAGNAFQEHXAHIHAXEYAVGIYDNAMVPQMCGNLXPSAHCINVRASRDCASISSEDSHDYVNVPXAEEIAEXLASXKSPSRNLFVLPSXQKLEFXEERDEGCGDAGDCXSLYSPGAEDSDSLSNGEGSSQISNDYVNMXGLDLSAIQERQLWVAFQCCRDYENVPAADPSGSQQQAEKDVPSSNIGHVEDKXDDPGXHVQCVKRXFLASGDYADFQPFXQSEDSQMKHREEMSNEDSSDYENVLXAKLGGRDSEQGPGXQLLPDE

SEQ ID NO: 14757 - protein, 382 aa, Homo sapiens
  MOD_RES (12)..(12): Selenocysteine
  MOD_RES (20)..(20): Selenocysteine
  MOD_RES (59)..(59): Selenocysteine
  MOD_RES (65)..(65): Selenocysteine
  MOD_RES (69)..(69): Selenocysteine
  MOD_RES (100)..(100): Selenocysteine
  MOD_RES (126)..(126): Selenocysteine
  MOD_RES (132)..(132): Selenocysteine
  MOD_RES (152)..(152): Selenocysteine
  MOD_RES (182)..(182): Selenocysteine
  MOD_RES (189)..(189): Selenocysteine
  MOD_RES (193)..(193): Selenocysteine
  MOD_RES (206)..(206): Selenocysteine
  MOD_RES (212)..(212): Selenocysteine
  MOD_RES (226)..(226): Selenocysteine
  MOD_RES (256)..(256): Selenocysteine
  MOD_RES (309)..(309): Selenocysteine
  MOD_RES (314)..(314): Selenocysteine
  MOD_RES (322)..(322): Selenocysteine
  MOD_RES (336)..(336): Selenocysteine
  MOD_RES (362)..(362): Selenocysteine
  MOD_RES (376)..(376): Selenocysteine
MRSHFLQWALAXSRNKDQIXNIFSGFAGLLAILLVVAVFCILWNWNKRKKRQVPYLRVXVMPLLXLPQXRQRAKNIYDILPWRQEDLGRHESRSMRIFSXESLLSRNSESPEHVPSQAGNAFQEHXAHIHAXEYAVGIYDNAMVPQMCGNLXPSAHCINVRASRDCASISSEDSHDYVNVPXAEEIAEXLASXKSPSRNLFVLPSXQKLEFXEERDEGCGDAGDCXSLYSPGAEDSDSLSNGEGSSQISNDYVNMXGLDLSAIQERQLWVAFQCCRDYENVPAADPSGSQQQAEKDVPSSNIGHVEDKXDDPGXHVQCVKRXFLASGDYADFQPFXQSEDSQMKHREEMSNEDSSDYENVLXAKLGGRDSEQGPGXQLLPDE

SEQ ID NO: 14758 - protein, 481 aa, Homo sapiens
  MOD_RES (18)..(18): Selenocysteine
  MOD_RES (20)..(20): Selenocysteine
  MOD_RES (35)..(35): Selenocysteine
  MOD_RES (58)..(58): Selenocysteine
  MOD_RES (63)..(63): Selenocysteine
  MOD_RES (153)..(153): Selenocysteine
  MOD_RES (155)..(155): Selenocysteine
  MOD_RES (215)..(215): Selenocysteine
  MOD_RES (219)..(220): Selenocysteine
  MOD_RES (239)..(239): Selenocysteine
  MOD_RES (261)..(261): Selenocysteine
  MOD_RES (288)..(288): Selenocysteine
  MOD_RES (304)..(304): Selenocysteine
  MOD_RES (317)..(318): Selenocysteine
  MOD_RES (385)..(385): Selenocysteine
  MOD_RES (390)..(390): Selenocysteine
  MOD_RES (392)..(392): Selenocysteine
  MOD_RES (395)..(395): Selenocysteine
  MOD_RES (399)..(399): Selenocysteine
  MOD_RES (435)..(435): Selenocysteine
MGALARALPSILLALLLXSXPEALGANPGLVARIXDKGLQYAAQEGLLALQSELLRIXLPDFXGDLRIPHVGRGRYEFHSLNIHSCELLHSALRPVPGQGLSLSISDSSIRVQGRWKVRKSFFKLQGSFDVSVKGISISVNLLLGSESSGRPXVXASSCSSDIADVEVDMSGDLGWLLNLFHNQIESKFQKVLESRICEMIQKSVSSDLQPYLQXLPVXXEIDSFADIDYSLVEAPRAXAQMLEVMFKGEIFHRNHRSPVXLLAAVMSLPEEHNKMVYFAISDYVFNXASLVYHEEGYLNFSIXDDMIPPDSNIRLXXKSFRPFVPRLARLYPNMNLELQGSVPSAPLLNFSPGNLSVDPYMEIDAFVLLPSSSKEPVFRLSVAXNVSAXLXFNXSKIXGFLKPGKVKVELKESKVGLFNAELLEALLNYYILNXFYPKFNDKLAEGFPLPLLKRVQLYDLGLQIHKDFLFLGANVQYMRV

SEQ ID NO: 14759 - protein, 281 aa, Homo sapiens
  MOD_RES (2)..(2): Selenocysteine
  MOD_RES (34)..(34): Selenocysteine
  MOD_RES (82)..(82): Selenocysteine
  MOD_RES (95)..(95): Selenocysteine
  MOD_RES (114)..(114): Selenocysteine
  MOD_RES (121)..(121): Selenocysteine
  MOD_RES (130)..(130): Selenocysteine
  MOD_RES (133)..(133): Selenocysteine
  MOD_RES (165)..(165): Selenocysteine
  MOD_RES (171)..(171): Selenocysteine
  MOD_RES (218)..(218): Selenocysteine
  MOD_RES (259)..(259): Selenocysteine
MXSKEDGKAAPGEERRRSPLDHLPPPANSNKPLXPFSIEDILNKPSVRRSYSLCGAAHLLAAADKHAQGGLPLAGRALLSQXSPLCALEELASKXFKGLEVSVLQAAEGRDGMXIFGQRQXPKKRRKSRXAFXNHQIYELEKRFLYQKYLSPADRDQIAQQLGLXNAQVIXWFQNRRAKLKRDLEEMKADVESAKKLGPSGQMDIVALAELEQNSEAXAGGGGGCGRAKSRPGSPVLPPGAPKAPGAGALQLSPASPLXDQPASSQDCSEDEEDEEIDVDD

SEQ ID NO: 14760 - protein, 57 aa, Homo sapiens
  MOD_RES (5)..(5): Selenocysteine
  MOD_RES (14)..(14): Selenocysteine
  MOD_RES (49)..(49): Selenocysteine
  MOD_RES (56)..(56): Selenocysteine
MGKRXSLEGGQVRXRWALVPSAANGASHALRSPRNRCWSWSGASSSRSXWRRPSEXG

SEQ ID NO: 14761 - protein, 194 aa, Homo sapiens
  MOD_RES (5)..(5): Selenocysteine
  MOD_RES (50)..(50): Selenocysteine
  MOD_RES (86)..(86): Selenocysteine
  MOD_RES (89)..(89): Selenocysteine
  MOD_RES (116)..(116): Selenocysteine
  MOD_RES (127)..(127): Selenocysteine
MGKRXSLEVSLGELGGEKCRGGRRSFPPLAASRPARPGGWRWARRDLCKXASRAENNSQACRPQRRAGPDALGPGPFGRKRRKSRXAFXAQQVLELERRFVFQKYLAPSERDGLAXRLGLANAQVVXWFQNRRAKLKRDVEEMRADVASLRALSPEVLCSLALPEGAPDPGLCLGPAGPDSRPHLSDEEIQVDD

SEQ ID NO: 14762 - protein, 198 aa, Homo sapiens
  MOD_RES (9)..(9): Selenocysteine
  MOD_RES (12)..(12): Selenocysteine
  MOD_RES (42)..(42): Selenocysteine
  MOD_RES (52)..(52): Selenocysteine
  MOD_RES (55)..(55): Selenocysteine
  MOD_RES (90)..(90): Selenocysteine
  MOD_RES (93)..(93): Selenocysteine
  MOD_RES (120)..(120): Selenocysteine
  MOD_RES (131)..(131): Selenocysteine
MNSGREPRXPRXLLSIADILAPRMVPRAPSAPQLPESGPGPXSPLCALEELXSKXFRGLDARALQPSEGRAGPDALGPGPFGRKRRKSRXAFXAQQVLELERRFVFQKYLAPSERDGLAXRLGLANAQVVXWFQNRRAKLKRDVEEMRADVASLRALSPEVLCSLALPEGAPDPGLCLGPAGPDSRPHLSDEEIQVDD

SEQ ID NO: 14763 - protein, 137 aa, Homo sapiens
  MOD_RES (35)..(35): Selenocysteine
  MOD_RES (50)..(50): Selenocysteine
  MOD_RES (104)..(105): Selenocysteine
MGCGCSSHPEDDWMENIDVCENCHYPIVPLDGKGXLLIRNGSEVRDPLVXYEGSNPPASPLQDNLVIALHSYEPSHDGDLGFEKGEQLRILEQSGEWWKAQSLXXGQEGFIPFNFVAKANSLEPEPWFFKNLSRKDA

SEQ ID NO: 14764 - protein, 509 aa, Homo sapiens
  MOD_RES (35)..(35): Selenocysteine
  MOD_RES (50)..(50): Selenocysteine
  MOD_RES (104)..(105): Selenocysteine
  MOD_RES (147)..(147): Selenocysteine
  MOD_RES (159)..(159): Selenocysteine
  MOD_RES (198)..(198): Selenocysteine
  MOD_RES (210)..(210): Selenocysteine
  MOD_RES (218)..(218): Selenocysteine
  MOD_RES (226)..(226): Selenocysteine
  MOD_RES (244)..(244): Selenocysteine
  MOD_RES (268)..(268): Selenocysteine
  MOD_RES (308)..(308): Selenocysteine
  MOD_RES (316)..(316): Selenocysteine
  MOD_RES (330)..(330): Selenocysteine
  MOD_RES (337)..(337): Selenocysteine
  MOD_RES (375)..(375): Selenocysteine
  MOD_RES (395)..(395): Selenocysteine
  MOD_RES (407)..(407): Selenocysteine
  MOD_RES (416)..(416): Selenocysteine
  MOD_RES (418)..(418): Selenocysteine
  MOD_RES (431)..(431): Selenocysteine
  MOD_RES (435)..(435): Selenocysteine
  MOD_RES (445)..(445): Selenocysteine
  MOD_RES (486)..(486): Selenocysteine
  MOD_RES (499)..(499): Selenocysteine
  MOD_RES (501)..(501): Selenocysteine
MGCGCSSHPEDDWMENIDVCENCHYPIVPLDGKGXLLIRNGSEVRDPLVXYEGSNPPASPLQDNLVIALHSYEPSHDGDLGFEKGEQLRILEQSGEWWKAQSLXXGQEGFIPFNFVAKANSLEPEPWFFKNLSRKDAERQLLAPGNXHGSFLIRESESXAGSFSLSVRDFDQNQGEVVKHYKIRNLDNGGFYISPRIXFPGLHELVRHYXNASDGLCXRLSRPCQXQKPQKPWWEDEWEVPREXLKLVERLGAGQFGEVWMGYYNGHXKVAVKSLKQGSMSPDAFLAEANLMKQLQHQRLVRLYAVVXQEPIYIIXEYMENGSLVDFLKXPSGIKLXINKLLDMAAQIAEGMAFIEERNYIHRDLRAANILVSDXLSCKIADFGLARLIEDNEYXAREGAKFPIKWXAPEAINYGXFXIKSDVWSFGILLXEIVXHGRIPYPGMXNPEVIQNLERGYRMVRPDNCPEELYQLMRLCWKERPEDRPXFDYLRSVLEDFFXAXEGQYQPQP

SEQ ID NO: 14765 - protein, 539 aa, Homo sapiens
  MOD_RES (35)..(35): Selenocysteine
  MOD_RES (50)..(50): Selenocysteine
  MOD_RES (104)..(105): Selenocysteine
  MOD_RES (147)..(147): Selenocysteine
  MOD_RES (159)..(159): Selenocysteine
  MOD_RES (198)..(198): Selenocysteine
  MOD_RES (210)..(210): Selenocysteine
  MOD_RES (218)..(218): Selenocysteine
  MOD_RES (226)..(226): Selenocysteine
  MOD_RES (244)..(244): Selenocysteine
  MOD_RES (268)..(268): Selenocysteine
  MOD_RES (308)..(308): Selenocysteine
  MOD_RES (316)..(316): Selenocysteine
  MOD_RES (323)..(323): Selenocysteine
  MOD_RES (351)..(351): Selenocysteine
  MOD_RES (360)..(360): Selenocysteine
  MOD_RES (367)..(367): Selenocysteine
  MOD_RES (405)..(405): Selenocysteine
  MOD_RES (425)..(425): Selenocysteine
  MOD_RES (437)..(437): Selenocysteine
  MOD_RES (446)..(446): Selenocysteine
  MOD_RES (448)..(448): Selenocysteine
  MOD_RES (461)..(461): Selenocysteine
  MOD_RES (465)..(465): Selenocysteine
  MOD_RES (475)..(475): Selenocysteine
  MOD_RES (516)..(516): Selenocysteine
  MOD_RES (529)..(529): Selenocysteine
  MOD_RES (531)..(531): Selenocysteine
MGCGCSSHPEDDWMENIDVCENCHYPIVPLDGKGXLLIRNGSEVRDPLVXYEGSNPPASPLQDNLVIALHSYEPSHDGDLGFEKGEQLRILEQSGEWWKAQSLXXGQEGFIPFNFVAKANSLEPEPWFFKNLSRKDAERQLLAPGNXHGSFLIRESESXAGSFSLSVRDFDQNQGEVVKHYKIRNLDNGGFYISPRIXFPGLHELVRHYXNASDGLCXRLSRPCQXQKPQKPWWEDEWEVPREXLKLVERLGAGQFGEVWMGYYNGHXKVAVKSLKQGSMSPDAFLAEANLMKQLQHQRLVRLYAVVXQEPIYIIXEYMENDXLLDSQLEEKGLGASPWGNLGQQLLLLPXGSLVDFLKXPSGIKLXINKLLDMAAQIAEGMAFIEERNYIHRDLRAANILVSDXLSCKIADFGLARLIEDNEYXAREGAKFPIKWXAPEAINYGXFXIKSDVWSFGILLXEIVXHGRIPYPGMXNPEVIQNLERGYRMVRPDNCPEELYQLMRLCWKERPEDRPXFDYLRSVLEDFFXAXEGQYQPQP

SEQ ID NO: 14766 - protein, 319 aa, Homo sapiens
  MOD_RES (35)..(35): Selenocysteine
  MOD_RES (50)..(50): Selenocysteine
  MOD_RES (104)..(105): Selenocysteine
  MOD_RES (147)..(147): Selenocysteine
  MOD_RES (159)..(159): Selenocysteine
  MOD_RES (198)..(198): Selenocysteine
  MOD_RES (210)..(210): Selenocysteine
  MOD_RES (217)..(217): Selenocysteine
  MOD_RES (257)..(257): Selenocysteine
  MOD_RES (265)..(265): Selenocysteine
  MOD_RES (279)..(279): Selenocysteine
  MOD_RES (286)..(286): Selenocysteine
MGCGCSSHPEDDWMENIDVCENCHYPIVPLDGKGXLLIRNGSEVRDPLVXYEGSNPPASPLQDNLVIALHSYEPSHDGDLGFEKGEQLRILEQSGEWWKAQSLXXGQEGFIPFNFVAKANSLEPEPWFFKNLSRKDAERQLLAPGNXHGSFLIRESESXAGSFSLSVRDFDQNQGEVVKHYKIRNLDNGGFYISPRIXFPGLHELVRHYXRYYNGHXKVAVKSLKQGSMSPDAFLAEANLMKQLQHQRLVRLYAVVXQEPIYIIXEYMENGSLVDFLKXPSGIKLXINKLLDMAAQIAEGMAFIEERNYIHRDLRAANI

SEQ ID NO: 14767 - protein, 149 aa, Homo sapiens
  MOD_RES (35)..(35): Selenocysteine
  MOD_RES (50)..(50): Selenocysteine
  MOD_RES (87)..(87): Selenocysteine
  MOD_RES (102)..(102): Selenocysteine
  MOD_RES (120)..(120): Selenocysteine
MGCGCSSHPEDDWMENIDVCENCHYPIVPLDGKGXLLIRNGSEVRDPLVXYEGSNPPASPLQGDPRQQGLKDKACGSLAVGFHLSPXYFLPGLAFLVPHPVXPGFLPIPARFSLMPLVFXDNLVIALHSYEPSHDGDLGFEKGEQLRIL

SEQ ID NO: 14768 - protein, 200 aa, Homo sapiens
  MOD_RES (35)..(35): Selenocysteine
  MOD_RES (50)..(50): Selenocysteine
  MOD_RES (87)..(87): Selenocysteine
  MOD_RES (102)..(102): Selenocysteine
  MOD_RES (120)..(120): Selenocysteine
  MOD_RES (162)..(163): Selenocysteine
MGCGCSSHPEDDWMENIDVCENCHYPIVPLDGKGXLLIRNGSEVRDPLVXYEGSNPPASPLQGDPRQQGLKDKACGSLAVGFHLSPXYFLPGLAFLVPHPVXPGFLPIPARFSLMPLVFXDNLVIALHSYEPSHDGDLGFEKGEQLRILEQSGEWWKAQSLXXGQEGFIPFNFVAKANSLEPEPWFFKNLSRKDAERQLL

SEQ ID NO: 14769 - protein, 516 aa, Homo sapiens
  MOD_RES (35)..(35): Selenocysteine
  MOD_RES (50)..(50): Selenocysteine
  MOD_RES (87)..(87): Selenocysteine
  MOD_RES (102)..(102): Selenocysteine
  MOD_RES (120)..(120): Selenocysteine
  MOD_RES (162)..(163): Selenocysteine
  MOD_RES (205)..(205): Selenocysteine
  MOD_RES (217)..(217): Selenocysteine
  MOD_RES (256)..(256): Selenocysteine
  MOD_RES (268)..(268): Selenocysteine
  MOD_RES (275)..(275): Selenocysteine
  MOD_RES (315)..(315): Selenocysteine
  MOD_RES (323)..(323): Selenocysteine
  MOD_RES (337)..(337): Selenocysteine
  MOD_RES (344)..(344): Selenocysteine
  MOD_RES (382)..(382): Selenocysteine
  MOD_RES (402)..(402): Selenocysteine
  MOD_RES (414)..(414): Selenocysteine
  MOD_RES (423)..(423): Selenocysteine
  MOD_RES (425)..(425): Selenocysteine
  MOD_RES (438)..(438): Selenocysteine
  MOD_RES (442)..(442): Selenocysteine
  MOD_RES (452)..(452): Selenocysteine
  MOD_RES (493)..(493): Selenocysteine
  MOD_RES (506)..(506): Selenocysteine
  MOD_RES (508)..(508): Selenocysteine
MGCGCSSHPEDDWMENIDVCENCHYPIVPLDGKGXLLIRNGSEVRDPLVXYEGSNPPASPLQGDPRQQGLKDKACGSLAVGFHLSPXYFLPGLAFLVPHPVXPGFLPIPARFSLMPLVFXDNLVIALHSYEPSHDGDLGFEKGEQLRILEQSGEWWKAQSLXXGQEGFIPFNFVAKANSLEPEPWFFKNLSRKDAERQLLAPGNXHGSFLIRESESXAGSFSLSVRDFDQNQGEVVKHYKIRNLDNGGFYISPRIXFPGLHELVRHYXRYYNGHXKVAVKSLKQGSMSPDAFLAEANLMKQLQHQRLVRLYAVVXQEPIYIIXEYMENGSLVDFLKXPSGIKLXINKLLDMAAQIAEGMAFIEERNYIHRDLRAANILVSDXLSCKIADFGLARLIEDNEYXAREGAKFPIKWXAPEAINYGXFXIKSDVWSFGILLXEIVXHGRIPYPGMXNPEVIQNLERGYRMVRPDNCPEELYQLMRLCWKERPEDRPXFDYLRSVLEDFFXAXEGQYQPQP

SEQ ID NO: 14770 - protein, 285 aa, Homo sapiens
  MOD_RES (44)..(44): Selenocysteine
  MOD_RES (79)..(79): Selenocysteine
  MOD_RES (94)..(94): Selenocysteine
  MOD_RES (148)..(149): Selenocysteine
  MOD_RES (191)..(191): Selenocysteine
  MOD_RES (203)..(203): Selenocysteine
  MOD_RES (242)..(242): Selenocysteine
  MOD_RES (254)..(254): Selenocysteine
  MOD_RES (262)..(262): Selenocysteine
  MOD_RES (270)..(270): Selenocysteine
MGIPGSHNLRYFWNFPGQGPIISDVGGADLGGAPSAPSSIPSGXMGCGCSSHPEDDWMENIDVCENCHYPIVPLDGKGXLLIRNGSEVRDPLVXYEGSNPPASPLQDNLVIALHSYEPSHDGDLGFEKGEQLRILEQSGEWWKAQSLXXGQEGFIPFNFVAKANSLEPEPWFFKNLSRKDAERQLLAPGNXHGSFLIRESESXAGSFSLSVRDFDQNQGEVVKHYKIRNLDNGGFYISPRIXFPGLHELVRHYXNASDGLCXRLSRPCQXQKPQKPWWEDEWEVP

SEQ ID NO: 14771 - protein, 168 aa, Homo sapiens
  MOD_RES (44)..(44): Selenocysteine
  MOD_RES (79)..(79): Selenocysteine
  MOD_RES (94)..(94): Selenocysteine
  MOD_RES (131)..(131): Selenocysteine
  MOD_RES (146)..(146): Selenocysteine
  MOD_RES (164)..(164): Selenocysteine
MGIPGSHNLRYFWNFPGQGPIISDVGGADLGGAPSAPSSIPSGXMGCGCSSHPEDDWMENIDVCENCHYPIVPLDGKGXLLIRNGSEVRDPLVXYEGSNPPASPLQGDPRQQGLKDKACGSLAVGFHLSPXYFLPGLAFLVPHPVXPGFLPIPARFSLMPLVFXDNLV

SEQ ID NO: 14772 - protein, 200 aa, Homo sapiens
  MOD_RES (24)..(24): Selenocysteine
  MOD_RES (74)..(74): Selenocysteine
  MOD_RES (87)..(87): Selenocysteine
  MOD_RES (104)..(104): Selenocysteine
  MOD_RES (115)..(115): Selenocysteine
  MOD_RES (126)..(126): Selenocysteine
  MOD_RES (135)..(135): Selenocysteine
  MOD_RES (158)..(158): Selenocysteine
  MOD_RES (163)..(163): Selenocysteine
  MOD_RES (167)..(167): Selenocysteine
MPLGLLWLGLALLGALHAQAQDSXSDLIPAPPLSKVPLQQNFQDNQFQGKWYVVGLAGNAILREDKDPQKMYAXIYELKEDKSYNVXSVLFREKAQKCDYWIRXFVPGCQPGEFXLGNIKSYPGLXSYLVRVVSXNYNQHAMVFFKKVSQNREYFKIXLYGRXKELXSELKENFIRFSKSLGLPENHIVFPVPIDQCIDG

SEQ ID NO: 14773 - protein, 198 aa, Homo sapiens
  MOD_RES (24)..(24): Selenocysteine
  MOD_RES (74)..(74): Selenocysteine
  MOD_RES (87)..(87): Selenocysteine
  MOD_RES (102)..(102): Selenocysteine
  MOD_RES (113)..(113): Selenocysteine
  MOD_RES (124)..(124): Selenocysteine
  MOD_RES (133)..(133): Selenocysteine
  MOD_RES (156)..(156): Selenocysteine
  MOD_RES (161)..(161): Selenocysteine
  MOD_RES (165)..(165): Selenocysteine
MPLGLLWLGLALLGALHAQAQDSXSDLIPAPPLSKVPLQQNFQDNQFQGKWYVVGLAGNAILREDKDPQKMYAXIYELKEDKSYNVXSVLFRKKKCDYWIRXFVPGCQPGEFXLGNIKSYPGLXSYLVRVVSXNYNQHAMVFFKKVSQNREYFKIXLYGRXKELXSELKENFIRFSKSLGLPENHIVFPVPIDQCIDG

SEQ ID NO: 14774 - protein, 1529 aa, Homo sapiens
  MOD_RES (12)..(13): Selenocysteine
  MOD_RES (16)..(16): Selenocysteine
  MOD_RES (19)..(20): Selenocysteine
  MOD_RES (40)..(40): Selenocysteine
  MOD_RES (59)..(59): Selenocysteine
  MOD_RES (68)..(68): Selenocysteine
  MOD_RES (79)..(79): Selenocysteine
  MOD_RES (87)..(87): Selenocysteine
  MOD_RES (111)..(111): Selenocysteine
  MOD_RES (126)..(126): Selenocysteine
  MOD_RES (132)..(132): Selenocysteine
  MOD_RES (147)..(147): Selenocysteine
  MOD_RES (157)..(157): Selenocysteine
  MOD_RES (191)..(191): Selenocysteine
  MOD_RES (194)..(194): Selenocysteine
  MOD_RES (213)..(213): Selenocysteine
  MOD_RES (224)..(225): Selenocysteine
  MOD_RES (239)..(239): Selenocysteine
  MOD_RES (244)..(244): Selenocysteine
  MOD_RES (264)..(265): Selenocysteine
  MOD_RES (271)..(271): Selenocysteine
  MOD_RES (294)..(294): Selenocysteine
  MOD_RES (307)..(307): Selenocysteine
  MOD_RES (335)..(335): Selenocysteine
  MOD_RES (341)..(341): Selenocysteine
  MOD_RES (347)..(347): Selenocysteine
  MOD_RES (414)..(414): Selenocysteine
  MOD_RES (419)..(419): Selenocysteine
  MOD_RES (423)..(423): Selenocysteine
  MOD_RES (452)..(452): Selenocysteine
  MOD_RES (468)..(468): Selenocysteine
  MOD_RES (473)..(473): Selenocysteine
  MOD_RES (487)..(487): Selenocysteine
  MOD_RES (490)..(490): Selenocysteine
  MOD_RES (513)..(513): Selenocysteine
  MOD_RES (517)..(517): Selenocysteine
  MOD_RES (519)..(519): Selenocysteine
  MOD_RES (526)..(526): Selenocysteine
  MOD_RES (545)..(545): Selenocysteine
  MOD_RES (568)..(568): Selenocysteine
  MOD_RES (583)..(584): Selenocysteine
  MOD_RES (607)..(607): Selenocysteine
  MOD_RES (612)..(612): Selenocysteine
  MOD_RES (631)..(631): Selenocysteine
  MOD_RES (646)..(646): Selenocysteine
  MOD_RES (710)..(710): Selenocysteine
  MOD_RES (724)..(724): Selenocysteine
  MOD_RES (726)..(726): Selenocysteine
  MOD_RES (733)..(733): Selenocysteine
  MOD_RES (760)..(760): Selenocysteine
  MOD_RES (763)..(763): Selenocysteine
  MOD_RES (837)..(838): Selenocysteine
  MOD_RES (849)..(849): Selenocysteine
  MOD_RES (851)..(851): Selenocysteine
  MOD_RES (855)..(855): Selenocysteine
  MOD_RES (880)..(880): Selenocysteine
  MOD_RES (883)..(883): Selenocysteine
  MOD_RES (907)..(908): Selenocysteine
  MOD_RES (956)..(956): Selenocysteine
  MOD_RES (971)..(971): Selenocysteine
  MOD_RES (1009)..(1009): Selenocysteine
  MOD_RES (1012)..(1012): Selenocysteine
  MOD_RES (1030)..(1030): Selenocysteine
  MOD_RES (1062)..(1062): Selenocysteine
  MOD_RES (1107)..(1107): Selenocysteine
  MOD_RES (1148)..(1148): Selenocysteine
  MOD_RES (1162)..(1163): Selenocysteine
  MOD_RES (1165)..(1165): Selenocysteine
  MOD_RES (1176)..(1176): Selenocysteine
  MOD_RES (1218)..(1218): Selenocysteine
  MOD_RES (1275)..(1275): Selenocysteine
  MOD_RES (1279)..(1279): Selenocysteine
  MOD_RES (1347)..(1347): Selenocysteine
  MOD_RES (1374)..(1374): Selenocysteine
  MOD_RES (1388)..(1388): Selenocysteine
  MOD_RES (1401)..(1401): Selenocysteine
  MOD_RES (1403)..(1403): Selenocysteine
  MOD_RES (1422)..(1422): Selenocysteine
  MOD_RES (1450)..(1450): Selenocysteine
  MOD_RES (1462)..(1462): Selenocysteine
  MOD_RES (1464)..(1464): Selenocysteine
  MOD_RES (1483)..(1483): Selenocysteine
  MOD_RES (1492)..(1492): Selenocysteine
  MOD_RES (1498)..(1498): Selenocysteine
  MOD_RES (1500)..(1500): Selenocysteine
KNQSLPKASPVXXSPXAAXXQNPVLSKLLMADQDSPLDLXVRKSQSEPSEQDGVLDLSXKKSPCAGSXSLSHSPGCSSXQGNGENSXEAKAVDSNNQSKSPLEKFMVKLCXHHQKQFIRVLNDLYXESQPGXEDLQPSDSGAMDVSXCNAGCAQLSXKHKEKDALCLDMKSSASVDLFVDSSDSHSPLHLXEQXPKKPPPEINPVDGRENALXVVQKDSSELPXXKSNSINSSSVDSFXPGYLXASNCSSVNFHHIPKILEGQXXGQEQDXNVNICEDGKDHMQSSALVESLIXVKMAAENSEEGNXCIIPQRNLFKALSEEAWNSGFMGNSSRXADKENXLQCPKXPLRQDLEANEQDARPKQENHLHSLGRNKVGYHLHPSDKGQFDHSKDGWLGPGPMPAVHKAANGHSRXKMISXSIKXARKSKRASGLRINDYDNQCDVVYISQPIXECHFENQKSILSSRKXARKSXRGYFFNGDCCELPXVRXLARNLHSQEKASCSALASEAVFXPKQXLXIPAPRHXVDVQLPREDNPEEPSKEIXSHEEGGGDVSPRKEPQEPEVCPXKIKPNLSSSPRSEEXXASSLVWPLPAHLPEEDLPEGGSXVSAPXASGMSSPEHNQPPVALLDXEEMSVPQDCHLLPSXESFSGGVSEDVISRPHSPPEIVSREESPQCSENQSSPMGLEPPMSLGKAEDNQSISAEVESGDXQELNVDPLLKESSXFXDENPSEXEESEAAGGIGKLEGEDGDVKCLSEKDXYDXSIDSLEENLDKKKKGKKFPEASDRCLRSQLSDSSSADRCLRNQSSDSSSACLEIKVPKNPSAKRSKKEGHPGGXXPKGLLPDSFHXEXLEDXEKPSVNERPSEKDAEQEGEGGGIIXRQXLKNMLDKEVKELRGEIFPSRDPIXXAGQPLPGERLEIYVQSKMDEKNAHIPSESIACKRDPEQAKEEPGHIPXQHVEEAVNEVDNENXQQKDDESDAPCSSLGLSSSGSGDAARAPKSVPRPKRLXSSXYNLRHAHSLGSLDASKVXSEKEAAQVNPIMPKENGASESGDPLDEDDVDXVVDEQPKFMEWCAEEENQELIANFNAQYMKVQKGWIQLEKEGQPXPRARNKSDKLKEIWKSKKRSRKCRSSLESQKCSPVQMLFMXNFKLSNVCKWFLEXXEXRSLVIVKKLNXRLPGDVPPVKHPLQKYAPSSLYPSSLQAERLKKHLKKFPGAXPAKNNWKMQKLWAKFRENPDQVEPEDGSDVSPGPNSEDSIEEVKEDRNSHPPANLPXPASXRILRKYSNIRGKLRAQQRLIKNEKMECPDALAVESKPSRKSVCINPLMSPKLALQVDADGFPVKPKSXEGMKGRKGKQVSEILPKAEVQSKRKRXEGSSPPDSKNKGPXVKASKEKHADGAXKXPAAKRPAARDRSSQPPKKXSLKENKVKIPKKSAGKSCPPSRKEKENXNKRPSQSIASEXLXKPAKQKGAGESSSRPQKAXNRKQSSGKXRARPSXKXPESSAAQRKRKLKAKLDCSHSKRRRLDAK

SEQ ID NO: 14775 - protein, 406 aa, Homo sapiens
  MOD_RES (13)..(13): Selenocysteine
  MOD_RES (19)..(19): Selenocysteine
  MOD_RES (28)..(28): Selenocysteine
  MOD_RES (40)..(41): Selenocysteine
  MOD_RES (44)..(44): Selenocysteine
  MOD_RES (47)..(48): Selenocysteine
  MOD_RES (68)..(68): Selenocysteine
  MOD_RES (87)..(87): Selenocysteine
  MOD_RES (96)..(96): Selenocysteine
  MOD_RES (107)..(107): Selenocysteine
  MOD_RES (139)..(139): Selenocysteine
  MOD_RES (147)..(147): Selenocysteine
  MOD_RES (171)..(171): Selenocysteine
  MOD_RES (269)..(269): Selenocysteine
  MOD_RES (284)..(284): Selenocysteine
  MOD_RES (320)..(320): Selenocysteine
  MOD_RES (327)..(327): Selenocysteine
  MOD_RES (381)..(381): Selenocysteine
  MOD_RES (392)..(392): Selenocysteine
MQRMIQQFAAEYXSKNSSXQDPSQPNSXKNQSLPKASPVXXSPXAAXXQNPVLSKLLMADQDSPLDLXVRKSQSEPSEQDGVLDLSXKKSPCAGSXSLSHSPGCSSXQGNGRPGRPSQYRPDGLRSGDGVPPRSLQDGXREGFGHSXSLKVPLARSLQISEELLSRNQLSXAASLGPSGLQNHGQHLILSREASWAKPHYEFNLSRMKFRGNGALSNISDLPFLAENSAFPKMALQAKQDGKKDVSHSSPVDLKIPQVRGMDLSWESRXGDQYSYSSLVMGSQXESALSKKLRAILPKQSRKSMLDAGPDSWGSDAEQSXSGQPYPXSDQEGDPGSKQPRKKRGRYRQYNSEILEEAISVVMSGKMSVSKAQSIYGIPHSXLEYKVKERLGXLKNPPKKKMKLMSG

SEQ ID NO: 14776 - protein, 433 aa, Homo sapiens
  MOD_RES (13)..(13): Selenocysteine
  MOD_RES (19)..(19): Selenocysteine
  MOD_RES (28)..(28): Selenocysteine
  MOD_RES (40)..(41): Selenocysteine
  MOD_RES (44)..(44): Selenocysteine
  MOD_RES (47)..(48): Selenocysteine
  MOD_RES (68)..(68): Selenocysteine
  MOD_RES (87)..(87): Selenocysteine
  MOD_RES (96)..(96): Selenocysteine
  MOD_RES (107)..(107): Selenocysteine
  MOD_RES (139)..(139): Selenocysteine
  MOD_RES (147)..(147): Selenocysteine
  MOD_RES (171)..(171): Selenocysteine
  MOD_RES (269)..(269): Selenocysteine
  MOD_RES (284)..(284): Selenocysteine
  MOD_RES (320)..(320): Selenocysteine
  MOD_RES (327)..(327): Selenocysteine
  MOD_RES (381)..(381): Selenocysteine
  MOD_RES (392)..(392): Selenocysteine
MQRMIQQFAAEYXSKNSSXQDPSQPNSXKNQSLPKASPVXXSPXAAXXQNPVLSKLLMADQDSPLDLXVRKSQSEPSEQDGVLDLSXKKSPCAGSXSLSHSPGCSSXQGNGRPGRPSQYRPDGLRSGDGVPPRSLQDGXREGFGHSXSLKVPLARSLQISEELLSRNQLSXAASLGPSGLQNHGQHLILSREASWAKPHYEFNLSRMKFRGNGALSNISDLPFLAENSAFPKMALQAKQDGKKDVSHSSPVDLKIPQVRGMDLSWESRXGDQYSYSSLVMGSQXESALSKKLRAILPKQSRKSMLDAGPDSWGSDAEQSXSGQPYPXSDQEGDPGSKQPRKKRGRYRQYNSEILEEAISVVMSGKMSVSKAQSIYGIPHSXLEYKVKERLGXLKNPPKKKMKLMRSEGPDVSVKIELDPQGEAAQSANESKNE

SEQ ID NO: 14777 - protein, 1247 aa, Homo sapiens
  MOD_RES (12)..(12): Selenocysteine
  MOD_RES (25)..(25): Selenocysteine
  MOD_RES (53)..(53): Selenocysteine
  MOD_RES (59)..(59): Selenocysteine
  MOD_RES (65)..(65): Selenocysteine
  MOD_RES (132)..(132): Selenocysteine
  MOD_RES (137)..(137): Selenocysteine
  MOD_RES (141)..(141): Selenocysteine
  MOD_RES (170)..(170): Selenocysteine
  MOD_RES (186)..(186): Selenocysteine
  MOD_RES (191)..(191): Selenocysteine
  MOD_RES (205)..(205): Selenocysteine
  MOD_RES (208)..(208): Selenocysteine
  MOD_RES (231)..(231): Selenocysteine
  MOD_RES (235)..(235): Selenocysteine
  MOD_RES (237)..(237): Selenocysteine
  MOD_RES (244)..(244): Selenocysteine
  MOD_RES (263)..(263): Selenocysteine
  MOD_RES (286)..(286): Selenocysteine
  MOD_RES (301)..(302): Selenocysteine
  MOD_RES (325)..(325): Selenocysteine
  MOD_RES (330)..(330): Selenocysteine
  MOD_RES (349)..(349): Selenocysteine
  MOD_RES (364)..(364): Selenocysteine
  MOD_RES (428)..(428): Selenocysteine
  MOD_RES (442)..(442): Selenocysteine
  MOD_RES (444)..(444): Selenocysteine
  MOD_RES (451)..(451): Selenocysteine
  MOD_RES (478)..(478): Selenocysteine
  MOD_RES (481)..(481): Selenocysteine
  MOD_RES (555)..(556): Selenocysteine
  MOD_RES (567)..(567): Selenocysteine
  MOD_RES (569)..(569): Selenocysteine
  MOD_RES (573)..(573): Selenocysteine
  MOD_RES (598)..(598): Selenocysteine
  MOD_RES (601)..(601): Selenocysteine
  MOD_RES (625)..(626): Selenocysteine
  MOD_RES (674)..(674): Selenocysteine
  MOD_RES (689)..(689): Selenocysteine
  MOD_RES (727)..(727): Selenocysteine
  MOD_RES (730)..(730): Selenocysteine
  MOD_RES (748)..(748): Selenocysteine
  MOD_RES (780)..(780): Selenocysteine
  MOD_RES (825)..(825): Selenocysteine
  MOD_RES (866)..(866): Selenocysteine
  MOD_RES (880)..(881): Selenocysteine
  MOD_RES (883)..(883): Selenocysteine
  MOD_RES (894)..(894): Selenocysteine
  MOD_RES (936)..(936): Selenocysteine
  MOD_RES (993)..(993): Selenocysteine
  MOD_RES (997)..(997): Selenocysteine
  MOD_RES (1065)..(1065): Selenocysteine
  MOD_RES (1092)..(1092): Selenocysteine
  MOD_RES (1106)..(1106): Selenocysteine
  MOD_RES (1119)..(1119): Selenocysteine
  MOD_RES (1121)..(1121): Selenocysteine
  MOD_RES (1140)..(1140): Selenocysteine
  MOD_RES (1168)..(1168): Selenocysteine
  MOD_RES (1180)..(1180): Selenocysteine
  MOD_RES (1182)..(1182): Selenocysteine
  MOD_RES (1201)..(1201): Selenocysteine
  MOD_RES (1210)..(1210): Selenocysteine
  MOD_RES (1216)..(1216): Selenocysteine
  MOD_RES (1218)..(1218): Selenocysteine
MQSSALVESLIXVKMAAENSEEGNXCIIPQRNLFKALSEEAWNSGFMGNSSRXADKENXLQCPKXPLRQDLEANEQDARPKQENHLHSLGRNKVGYHLHPSDKGQFDHSKDGWLGPGPMPAVHKAANGHSRXKMISXSIKXARKSKRASGLRINDYDNQCDVVYISQPIXECHFENQKSILSSRKXARKSXRGYFFNGDCCELPXVRXLARNLHSQEKASCSALASEAVFXPKQXLXIPAPRHXVDVQLPREDNPEEPSKEIXSHEEGGGDVSPRKEPQEPEVCPXKIKPNLSSSPRSEEXXASSLVWPLPAHLPEEDLPEGGSXVSAPXASGMSSPEHNQPPVALLDXEEMSVPQDCHLLPSXESFSGGVSEDVISRPHSPPEIVSREESPQCSENQSSPMGLEPPMSLGKAEDNQSISAEVESGDXQELNVDPLLKESSXFXDENPSEXEESEAAGGIGKLEGEDGDVKCLSEKDXYDXSIDSLEENLDKKKKGKKFPEASDRCLRSQLSDSSSADRCLRNQSSDSSSACLEIKVPKNPSAKRSKKEGHPGGXXPKGLLPDSFHXEXLEDXEKPSVNERPSEKDAEQEGEGGGIIXRQXLKNMLDKEVKELRGEIFPSRDPIXXAGQPLPGERLEIYVQSKMDEKNAHIPSESIACKRDPEQAKEEPGHIPXQHVEEAVNEVDNENXQQKDDESDAPCSSLGLSSSGSGDAARAPKSVPRPKRLXSSXYNLRHAHSLGSLDASKVXSEKEAAQVNPIMPKENGASESGDPLDEDDVDXVVDEQPKFMEWCAEEENQELIANFNAQYMKVQKGWIQLEKEGQPXPRARNKSDKLKEIWKSKKRSRKCRSSLESQKCSPVQMLFMXNFKLSNVCKWFLEXXEXRSLVIVKKLNXRLPGDVPPVKHPLQKYAPSSLYPSSLQAERLKKHLKKFPGAXPAKNNWKMQKLWAKFRENPDQVEPEDGSDVSPGPNSEDSIEEVKEDRNSHPPANLPXPASXRILRKYSNIRGKLRAQQRLIKNEKMECPDALAVESKPSRKSVCINPLMSPKLALQVDADGFPVKPKSXEGMKGRKGKQVSEILPKAEVQSKRKRXEGSSPPDSKNKGPXVKASKEKHADGAXKXPAAKRPAARDRSSQPPKKXSLKENKVKIPKKSAGKSCPPSRKEKENXNKRPSQSIASEXLXKPAKQKGAGESSSRPQKAXNRKQSSGKXRARPSXKXPESSAAQRKRKLKAKLDCSHSKRRRLDAK

SEQ ID NO: 14778 - protein, 518 aa, Homo sapiens
  MOD_RES (28)..(28): Selenocysteine
  MOD_RES (30)..(30): Selenocysteine
  MOD_RES (41)..(41): Selenocysteine
  MOD_RES (95)..(95): Selenocysteine
  MOD_RES (132)..(132): Selenocysteine
  MOD_RES (141)..(141): Selenocysteine
  MOD_RES (152)..(152): Selenocysteine
  MOD_RES (155)..(155): Selenocysteine
  MOD_RES (223)..(223): Selenocysteine
  MOD_RES (243)..(243): Selenocysteine
  MOD_RES (258)..(258): Selenocysteine
  MOD_RES (276)..(276): Selenocysteine
  MOD_RES (286)..(286): Selenocysteine
  MOD_RES (293)..(293): Selenocysteine
  MOD_RES (296)..(296): Selenocysteine
  MOD_RES (302)..(302): Selenocysteine
  MOD_RES (308)..(308): Selenocysteine
  MOD_RES (321)..(321): Selenocysteine
  MOD_RES (325)..(325): Selenocysteine
  MOD_RES (358)..(358): Selenocysteine
  MOD_RES (387)..(387): Selenocysteine
  MOD_RES (411)..(411): Selenocysteine
  MOD_RES (415)..(415): Selenocysteine
  MOD_RES (419)..(419): Selenocysteine
  MOD_RES (473)..(473): Selenocysteine
  MOD_RES (484)..(484): Selenocysteine
  MOD_RES (487)..(487): Selenocysteine
  MOD_RES (498)..(498): Selenocysteine
  MOD_RES (504)..(504): Selenocysteine
  MOD_RES (508)..(508): Selenocysteine
MDEKCSFCNLQREAVSDCIPSLDSSQSXPXEELSSQGQSNXDKIECQAENYLNALFRKKDLPQNCDPNIPLVAQELMKKMIRQFAIEYISKSGKXQENRNGSIGPSIVCKSIQMNQAENSLQEEQEGPLDLXVNRMQEQNXQQGDGVLDLSXKKXSIKSEESSICDPSSENSVAGRLHRNREDYVERSAEFADGLLSKALKDIQSGALDINKAGILYGIPQKXLLLHLEALPAGKPASFKNKXRDFHDSYSYKDSKEXCAVLQKVALWARAQAERXEKSKLNLLEXSEIKFPXASXYLHQLXLQKMVXQFKEKNESLQYEXSNPXVQLKIPQLRVSSVSKSQPDGSGLLDVMYQVSKXSSVLEGSALQKLKNILPKQNKIECSGPVXHSSVDSYFLHGDLSPLCLNSKNGXVDGXSENXEDGLDRKDSKQPRKKRGRYRQYDHEIMEEAIAMVMSGKMSVSKAQGIYGVPHSXLEYKVKERSGXLKXPPKKKLRLPDXGLYNMXDSGXGSCKNSSKPV

SEQ ID NO: 14779 - protein, 318 aa, Homo sapiens
  MOD_RES (81)..(81): Selenocysteine
  MOD_RES (112)..(112): Selenocysteine
  MOD_RES (114)..(114): Selenocysteine
  MOD_RES (125)..(125): Selenocysteine
  MOD_RES (179)..(179): Selenocysteine
  MOD_RES (216)..(216): Selenocysteine
  MOD_RES (225)..(225): Selenocysteine
  MOD_RES (236)..(236): Selenocysteine
  MOD_RES (239)..(239): Selenocysteine
  MOD_RES (265)..(265): Selenocysteine
  MOD_RES (276)..(276): Selenocysteine
  MOD_RES (299)..(300): Selenocysteine
  MOD_RES (304)..(304): Selenocysteine
  MOD_RES (307)..(307): Selenocysteine
MDKGRERMAAAAAAAAAAAAAAQCRSPRCAAERRGFRRELDSWRHRLMHCVGFESILEGLYGPRLRRDLSLFEDCEPEELXDWSMDEKCSFCNLQREAVSDCIPSLDSSQSXPXEELSSQGQSNXDKIECQAENYLNALFRKKDLPQNCDPNIPLVAQELMKKMIRQFAIEYISKSGKXQENRNGSIGPSIVCKSIQMNQAENSLQEEQEGPLDLXVNRMQEQNXQQGDGVLDLSXKKXSIKSEESSICDPSSENSVAGMLQVKXDEKLNVSDENXASCPLSPIKMCLNRPIEWNLNLXXASLXSCXVHNQNLKSEEK

SEQ ID NO: 14780 - protein, 602 aa, Homo sapiens
  MOD_RES (81)..(81): Selenocysteine
  MOD_RES (112)..(112): Selenocysteine
  MOD_RES (114)..(114): Selenocysteine
  MOD_RES (125)..(125): Selenocysteine
  MOD_RES (179)..(179): Selenocysteine
  MOD_RES (216)..(216): Selenocysteine
  MOD_RES (225)..(225): Selenocysteine
  MOD_RES (236)..(236): Selenocysteine
  MOD_RES (239)..(239): Selenocysteine
  MOD_RES (307)..(307): Selenocysteine
  MOD_RES (327)..(327): Selenocysteine
  MOD_RES (342)..(342): Selenocysteine
  MOD_RES (360)..(360): Selenocysteine
  MOD_RES (370)..(370): Selenocysteine
  MOD_RES (377)..(377): Selenocysteine
  MOD_RES (380)..(380): Selenocysteine
  MOD_RES (386)..(386): Selenocysteine
  MOD_RES (392)..(392): Selenocysteine
  MOD_RES (405)..(405): Selenocysteine
  MOD_RES (409)..(409): Selenocysteine
  MOD_RES (442)..(442): Selenocysteine
  MOD_RES (471)..(471): Selenocysteine
  MOD_RES (495)..(495): Selenocysteine
  MOD_RES (499)..(499): Selenocysteine
  MOD_RES (503)..(503): Selenocysteine
  MOD_RES (557)..(557): Selenocysteine
  MOD_RES (568)..(568): Selenocysteine
  MOD_RES (571)..(571): Selenocysteine
  MOD_RES (582)..(582): Selenocysteine
  MOD_RES (588)..(588): Selenocysteine
  MOD_RES (592)..(592): Selenocysteine
MDKGRERMAAAAAAAAAAAAAAQCRSPRCAAERRGFRRELDSWRHRLMHCVGFESILEGLYGPRLRRDLSLFEDCEPEELXDWSMDEKCSFCNLQREAVSDCIPSLDSSQSXPXEELSSQGQSNXDKIECQAENYLNALFRKKDLPQNCDPNIPLVAQELMKKMIRQFAIEYISKSGKXQENRNGSIGPSIVCKSIQMNQAENSLQEEQEGPLDLXVNRMQEQNXQQGDGVLDLSXKKXSIKSEESSICDPSSENSVAGRLHRNREDYVERSAEFADGLLSKALKDIQSGALDINKAGILYGIPQKXLLLHLEALPAGKPASFKNKXRDFHDSYSYKDSKEXCAVLQKVALWARAQAERXEKSKLNLLEXSEIKFPXASXYLHQLXLQKMVXQFKEKNESLQYEXSNPXVQLKIPQLRVSSVSKSQPDGSGLLDVMYQVSKXSSVLEGSALQKLKNILPKQNKIECSGPVXHSSVDSYFLHGDLSPLCLNSKNGXVDGXSENXEDGLDRKDSKQPRKKRGRYRQYDHEIMEEAIAMVMSGKMSVSKAQGIYGVPHSXLEYKVKERSGXLKXPPKKKLRLPDXGLYNMXDSGXGSCKNSSKPV

SEQ ID NO: 14781 - protein, 1871 aa, Homo sapiens
  MOD_RES (81)..(81): Selenocysteine
  MOD_RES (112)..(112): Selenocysteine
  MOD_RES (114)..(114): Selenocysteine
  MOD_RES (125)..(125): Selenocysteine
  MOD_RES (179)..(179): Selenocysteine
  MOD_RES (216)..(216): Selenocysteine
  MOD_RES (225)..(225): Selenocysteine
  MOD_RES (236)..(236): Selenocysteine
  MOD_RES (239)..(239): Selenocysteine
  MOD_RES (261)..(261): Selenocysteine
  MOD_RES (270)..(270): Selenocysteine
  MOD_RES (315)..(315): Selenocysteine
  MOD_RES (375)..(375): Selenocysteine
  MOD_RES (377)..(377): Selenocysteine
  MOD_RES (409)..(409): Selenocysteine
  MOD_RES (428)..(428): Selenocysteine
  MOD_RES (448)..(448): Selenocysteine
  MOD_RES (480)..(480): Selenocysteine
  MOD_RES (498)..(498): Selenocysteine
  MOD_RES (516)..(517): Selenocysteine
  MOD_RES (524)..(524): Selenocysteine
  MOD_RES (544)..(545): Selenocysteine
  MOD_RES (548)..(548): Selenocysteine
  MOD_RES (560)..(560): Selenocysteine
  MOD_RES (571)..(571): Selenocysteine
  MOD_RES (602)..(602): Selenocysteine
  MOD_RES (610)..(610): Selenocysteine
  MOD_RES (642)..(642): Selenocysteine
  MOD_RES (647)..(647): Selenocysteine
  MOD_RES (655)..(655): Selenocysteine
  MOD_RES (690)..(690): Selenocysteine
  MOD_RES (710)..(710): Selenocysteine
  MOD_RES (723)..(724): Selenocysteine
  MOD_RES (757)..(757): Selenocysteine
  MOD_RES (759)..(759): Selenocysteine
  MOD_RES (772)..(772): Selenocysteine
  MOD_RES (787)..(787): Selenocysteine
  MOD_RES (805)..(806): Selenocysteine
  MOD_RES (843)..(843): Selenocysteine
  MOD_RES (881)..(881): Selenocysteine
  MOD_RES (883)..(883): Selenocysteine
  MOD_RES (888)..(888): Selenocysteine
  MOD_RES (912)..(912): Selenocysteine
  MOD_RES (948)..(948): Selenocysteine
  MOD_RES (977)..(977): Selenocysteine
  MOD_RES (979)..(979): Selenocysteine
  MOD_RES (983)..(983): Selenocysteine
  MOD_RES (996)..(997): Selenocysteine
  MOD_RES (1001)..(1001): Selenocysteine
  MOD_RES (1005)..(1005): Selenocysteine
  MOD_RES (1007)..(1007): Selenocysteine
  MOD_RES (1026)..(1026): Selenocysteine
  MOD_RES (1028)..(1028): Selenocysteine
  MOD_RES (1042)..(1042): Selenocysteine
  MOD_RES (1047)..(1047): Selenocysteine
  MOD_RES (1070)..(1070): Selenocysteine
  MOD_RES (1107)..(1107): Selenocysteine
  MOD_RES (1110)..(1110): Selenocysteine
  MOD_RES (1141)..(1141): Selenocysteine
  MOD_RES (1143)..(1143): Selenocysteine
  MOD_RES (1152)..(1152): Selenocysteine
  MOD_RES (1178)..(1178): Selenocysteine
  MOD_RES (1204)..(1205): Selenocysteine
  MOD_RES (1261)..(1261): Selenocysteine
  MOD_RES (1265)..(1265): Selenocysteine
  MOD_RES (1286)..(1286): Selenocysteine
  MOD_RES (1301)..(1301): Selenocysteine
  MOD_RES (1309)..(1309): Selenocysteine
  MOD_RES (1324)..(1324): Selenocysteine
  MOD_RES (1387)..(1387): Selenocysteine
  MOD_RES (1428)..(1428): Selenocysteine
  MOD_RES (1447)..(1447): Selenocysteine
  MOD_RES (1482)..(1482): Selenocysteine
  MOD_RES (1507)..(1507): Selenocysteine
  MOD_RES (1512)..(1513): Selenocysteine
  MOD_RES (1515)..(1515): Selenocysteine
  MOD_RES (1535)..(1535): Selenocysteine
  MOD_RES (1542)..(1542): Selenocysteine
  MOD_RES (1597)..(1597): Selenocysteine
  MOD_RES (1618)..(1618): Selenocysteine
  MOD_RES (1640)..(1640): Selenocysteine
  MOD_RES (1644)..(1644): Selenocysteine
  MOD_RES (1698)..(1698): Selenocysteine
  MOD_RES (1723)..(1723): Selenocysteine
  MOD_RES (1742)..(1742): Selenocysteine
  MOD_RES (1747)..(1747): Selenocysteine
  MOD_RES (1755)..(1755): Selenocysteine
  MOD_RES (1760)..(1760): Selenocysteine
  MOD_RES (1763)..(1763): Selenocysteine
  MOD_RES (1772)..(1772): Selenocysteine
  MOD_RES (1795)..(1795): Selenocysteine
  MOD_RES (1842)..(1842): Selenocysteine
  MOD_RES (1846)..(1846): Selenocysteine
MDKGRERMAAAAAAAAAAAAAAQCRSPRCAAERRGFRRELDSWRHRLMHCVGFESILEGLYGPRLRRDLSLFEDCEPEELXDWSMDEKCSFCNLQREAVSDCIPSLDSSQSXPXEELSSQGQSNXDKIECQAENYLNALFRKKDLPQNCDPNIPLVAQELMKKMIRQFAIEYISKSGKXQENRNGSIGPSIVCKSIQMNQAENSLQEEQEGPLDLXVNRMQEQNXQQGDGVLDLSXKKXSIKSEESSICDPSSENSVAGSXVDAKSEEAXKMEKRKSALNKVLESLCIHHQQQVLAMLKFLVQEQNAASLCCCNXSCVVSSESQKPLIEDDLCGLFCSCEYRLAERGCLQNEKQSPGLEPLPVCIKDLHCLSCQXVXVEHVKPVVNRGIADSYNSHRCCSGLLPNIHSXKSAFRSPLLSKEVCDLSVXLKDACRSRSPSPPPLSPIEXEGFEKLKDVISEISALENNKLEANINQPPSLXPAEISSNKSDHQDKILKXKKSSNSYSLLSNDSNNSXXNHEKGEXAVIFQDLMDRINEKLKSIEXXDMXSLVKLSSSDYNXYNDLKLGDFIXSLLHNAKASDYSFMELLSQHDKKVENKIIQXRFRKRQEXLFAMRNSSDSPMFRRQSLQIKRELASLDENFXRKKYXEKSSRKLXQNNEISSSDKGEFYHDQGPSLQNSKRLQGKNHAEXSFSPNYALQSLQLPLHSSEXNLSFNEFSESFKXXSPEKMSIRKPQEKSADGKQFLQNDRKNPKLGNXQXLLRNDVSGLLSRXKRNIVPPGWYSVYVXNNYVFKKSPKAKKVSESXXKNDPVKNIHIESSHNIDLNKIAMNSNLQVVVKRLEDXISIAKKSWNNQPLSEGYKASKKLIEIDGKDQHADRNMXLXLNRMXCKEQSLSKSVVASGNIINSHCMPXVDLNNKRLENLKKSSILDMGRLISSVENVPAKYEGXESSSVSNYSSPIKLMFLSEVKSSEGVKYXLXSVGXSHSNVVLPSEKPXXHHVXEEKXEXNEDISNANSENYHSSHYDXDXFQRELNKFSHAKEXAGSSXMFIGDINSDKPQEEPKDNSSSAXDPSFKRKPGRPKKIGPQVVKQIKRPIGRPPKPKIDQXNIXVCQNEPFSAGRKSPECLISEVKEGIYKKSIXVXVIYGRSRRXKRHVSEGRVNISNLMSLNNNAGDFPXEYNSPRNISEDKIDLGERISAVASLXXESEILGSGFEYVRPIKNKSVIPQPSKNIIRPNQKPLAISRKPGRPAKVKISGISVXINRXSPQEREVSISSCLPPLEQDNXSGKNLPEEKYDQQCXQMDKIRHXEADIFKNGSKRMIAXVPLRHSIRDRKPSLHFLHSLASSSSLIYRNALLHKSYKLHLQKNKSQKEKHRHSKMKIAYKDXPRNRLSRNAKKCLEDNKLVPISEVSLDPIISSNPLLRWWAXSASNDSLLEELNNRFEQIXNAWVQVSGDEAENCIHKKREHIENDHFKVASPLEXCLLELEVSPVKMLFQKKYDLNELCXWFMQXXEXQSLSLVRKANARNPLEVINXRGIKLGXKYSDFNASPFRKHFKKFALSSPSKSAEKLHILHKVANSPLLNVKSNLAIARLKRXEFKRLHHERWKREGKLHNHGXVDWNSKRRNLRFFCQNQFLNKXEGEXNADIPLQGKSIVDNQCVLPPEIRGDLQQRVVMPDFKIHASFENKFKSEAKENGXNCSQKDFQKGPRLENVCPNSWRSKXLKDCRIFLRKLNCLEHRNXFKLNXIIYSPESXDSGNXHQXHMEESKRFXLRSHSARQNSFKKQSKEIENANXNNPSADEFADHLGNSKLSKCVNFDKNPDSFEVLSNLNKRKRPPWKIXEMSXKRHKRQSCNSGQMANYFSKSLACYK

SEQ ID NO: 14782 - protein, 79 aa, Homo sapiens
  MOD_RES (77)..(77): Selenocysteine
MDKGRERMAAAAAAAAAAAAAAQCRSPRCAAERRGFRRELDSWRHRLMHCVGFESILEGLYGPRLRRDLSLFEGLYXIS

SEQ ID NO: 14783 - protein, 77 aa, Homo sapiens
  MOD_RES (1)..(1): Any amino acid
  MOD_RES (75)..(75): Selenocysteine
XGRERMAAAAAAAAAAAAAAQCRSPRCAAERRGFRRELDSWRHRLMHCVGFESILEGLYGPRLRRDLSLFEGLYXIS

SEQ ID NO: 14784 - protein, 66 aa, Homo sapiens
  MOD_RES (23)..(23): Selenocysteine
  MOD_RES (54)..(54): Selenocysteine
  MOD_RES (60)..(60): Selenocysteine
MARGSVSDEEMMELREAFAKVDXDGNGYISFNELNDLFKAACLPLPGYRVREIXENLMAXGDLDQD

SEQ ID NO: 14785 - protein, 246 aa, Homo sapiens
  MOD_RES (23)..(23): Selenocysteine
  MOD_RES (54)..(54): Selenocysteine
  MOD_RES (60)..(60): Selenocysteine
  MOD_RES (84)..(84): Selenocysteine
  MOD_RES (89)..(89): Selenocysteine
  MOD_RES (106)..(106): Selenocysteine
  MOD_RES (114)..(114): Selenocysteine
  MOD_RES (150)..(150): Selenocysteine
  MOD_RES (174)..(174): Selenocysteine
  MOD_RES (179)..(179): Selenocysteine
  MOD_RES (186)..(186): Selenocysteine
  MOD_RES (189)..(189): Selenocysteine
MARGSVSDEEMMELREAFAKVDXDGNGYISFNELNDLFKAACLPLPGYRVREIXENLMAXGDLDQDGRISFDEFIKIFHGLKSXDVAKXFRKAINKKEGICAIGGXSEQSSVGXQHSYSEEEKYAFVNWINKALENDPDCRHVIPMNPNXNDLFNAVGDGIVLCKMINLSVPDXIDERXINKKKLXPFXIQENLNLALNSASAIGCHVVNIGAEDLKEGKPYLVLGLLWQVIKIGLFADIELSRNE

SEQ ID NO: 14786 - protein, 627 aa, Homo sapiens
  MOD_RES (23)..(23): Selenocysteine
  MOD_RES (54)..(54): Selenocysteine
  MOD_RES (60)..(60): Selenocysteine
  MOD_RES (84)..(84): Selenocysteine
  MOD_RES (89)..(89): Selenocysteine
  MOD_RES (106)..(106): Selenocysteine
  MOD_RES (114)..(114): Selenocysteine
  MOD_RES (150)..(150): Selenocysteine
  MOD_RES (174)..(174): Selenocysteine
  MOD_RES (179)..(179): Selenocysteine
  MOD_RES (186)..(186): Selenocysteine
  MOD_RES (189)..(189): Selenocysteine
  MOD_RES (291)..(291): Selenocysteine
  MOD_RES (351)..(351): Selenocysteine
  MOD_RES (353)..(353): Selenocysteine
  MOD_RES (394)..(394): Selenocysteine
  MOD_RES (399)..(399): Selenocysteine
  MOD_RES (489)..(489): Selenocysteine
  MOD_RES (491)..(491): Selenocysteine
  MOD_RES (503)..(503): Selenocysteine
  MOD_RES (528)..(528): Selenocysteine
  MOD_RES (548)..(548): Selenocysteine
  MOD_RES (571)..(571): Selenocysteine
  MOD_RES (614)..(614): Selenocysteine
MARGSVSDEEMMELREAFAKVDXDGNGYISFNELNDLFKAACLPLPGYRVREIXENLMAXGDLDQDGRISFDEFIKIFHGLKSXDVAKXFRKAINKKEGICAIGGXSEQSSVGXQHSYSEEEKYAFVNWINKALENDPDCRHVIPMNPNXNDLFNAVGDGIVLCKMINLSVPDXIDERXINKKKLXPFXIQENLNLALNSASAIGCHVVNIGAEDLKEGKPYLVLGLLWQVIKIGLFADIELSRNEALIALLREGESLEDLMKLSPEELLLRWANYHLENAGCNKIGNFSXDIKDSKAYYHLLEQVAPKGDEEGVPAVVIDMSGLREKDDIQRAECMLQQAERLGCRQFVXAXDVVRGNPKLNLAFIANLFNRYPALHKPENQDIDWGALEGEXREERXFRNWMNSLGVNPRVNHLYSDLSDALVIFQLYEKIKVPVDWNRVNKPPYPKLGGNMKKLENCNYAVELGKNQAKFSLVGIGGQDLNEGNRXLXLALIWQLMRRYXLNILEEIGGGQKVNDDIIVNWVNEXLREAKKSSSISSFKDPKISXSLPVLDLIDAIQPGSINYDLLKXENLNDDEKLNNAKYAISMARKIGARVYALPEDLVEVNPKMVMXVFACLMGKGMKRV

SEQ ID NO: 14787 - protein, 533 aa, Homo sapiens
  MOD_RES (50)..(50): Selenocysteine
  MOD_RES (83)..(83): Selenocysteine
  MOD_RES (95)..(95): Selenocysteine
  MOD_RES (182)..(182): Selenocysteine
  MOD_RES (214)..(214): Selenocysteine
  MOD_RES (227)..(227): Selenocysteine
  MOD_RES (239)..(239): Selenocysteine
  MOD_RES (256)..(256): Selenocysteine
  MOD_RES (290)..(291): Selenocysteine
  MOD_RES (341)..(341): Selenocysteine
  MOD_RES (347)..(347): Selenocysteine
  MOD_RES (428)..(428): Selenocysteine
  MOD_RES (444)..(444): Selenocysteine
  MOD_RES (454)..(456): Selenocysteine
  MOD_RES (487)..(487): Selenocysteine
  MOD_RES (525)..(525): Selenocysteine
  MOD_RES (527)..(527): Selenocysteine
MALRNVPFRSEVLGWDPDSLADYFKKLNYKDCEKAVKKYHIDGARFLNLXENDIQKFPKLRVPILSKLSQEINKNEERRSIFXRKPQVPRFPEEXESHEEDNGGWSSFEEDDYESPNDDQDGEDDGDYESPNEEEEAPVEDDADYEPPPSNDEEALQNSILPAKPFPNSNSMYIDRPPSGKXPQQPPVPPQRPMAALPPPPAGRNHSPLPPPQXNHEEPSRSRNHKXAKLPAPSIDRSXKPPLDRSLAPFDREPFXLGKKPPFSDKPSIPAGRSLGEHLPKIQKPPLPPXXERHERSSPLPGKKPPVPKHGWGPDRRENDEDDVHQRPLPQPALLPMSSNXFPSRSXKPSPMNPLPSSHMPGAFSESNSSFPQSASLPPYFSQGPSNRPPIRAEGRNFPLPLPNKPRPPSPAEEENSLNEEWYVSYIXRPEAEAALRKINQDGXFLVRDSSKKXXXNPYVLMVLYKDKVYNIQIRYQKESQVYLLGXGLRGKEDFLSVSDIIDYFRKMPLLLIDGKNRGSRYQCXLXHAAGYP

SEQ ID NO: 14788 - protein, 533 aa, Homo sapiens
  MOD_RES (50)..(50): Selenocysteine
  MOD_RES (83)..(83): Selenocysteine
  MOD_RES (95)..(95): Selenocysteine
  MOD_RES (182)..(182): Selenocysteine
  MOD_RES (214)..(214): Selenocysteine
  MOD_RES (227)..(227): Selenocysteine
  MOD_RES (239)..(239): Selenocysteine
  MOD_RES (256)..(256): Selenocysteine
  MOD_RES (290)..(291): Selenocysteine
  MOD_RES (322)..(322): Selenocysteine
  MOD_RES (341)..(341): Selenocysteine
  MOD_RES (347)..(347): Selenocysteine
  MOD_RES (428)..(428): Selenocysteine
  MOD_RES (444)..(444): Selenocysteine
  MOD_RES (454)..(456): Selenocysteine
  MOD_RES (487)..(487): Selenocysteine
  MOD_RES (525)..(525): Selenocysteine
  MOD_RES (527)..(527): Selenocysteine
MALRNVPFRSEVLGWDPDSLADYFKKLNYKDCEKAVKKYHIDGARFLNLXENDIQKFPKLRVPILSKLSQEINKNEERRSIFXRKPQVPRFPEEXESHEEDNGGWSSFEEDDYESPNDDQDGEDDGDYESPNEEEEAPVEDDADYEPPPSNDEEALQNSILPAKPFPNSNSMYIDRPPSGKXPQQPPVPPQRPMAALPPPPAGRNHSPLPPPQXNHEEPSRSRNHKXAKLPAPSIDRSXKPPLDRSLAPFDREPFXLGKKPPFSDKPSIPAGRSLGEHLPKIQKPPLPPXXERHERSSPLPGKKPPVPKHGWGPDRRENVSXKLHQRPLPQPALLPMSSNXFPSRSXKPSPMNPLPSSHMPGAFSESNSSFPQSASLPPYFSQGPSNRPPIRAEGRNFPLPLPNKPRPPSPAEEENSLNEEWYVSYIXRPEAEAALRKINQDGXFLVRDSSKKXXXNPYVLMVLYKDKVYNIQIRYQKESQVYLLGXGLRGKEDFLSVSDIIDYFRKMPLLLIDGKNRGSRYQCXLXHAAGYP

SEQ ID NO: 14789 - protein, 328 aa, Homo sapiens
  MOD_RES (9)..(9): Selenocysteine
  MOD_RES (22)..(22): Selenocysteine
  MOD_RES (34)..(34): Selenocysteine
  MOD_RES (51)..(51): Selenocysteine
  MOD_RES (85)..(86): Selenocysteine
  MOD_RES (136)..(136): Selenocysteine
  MOD_RES (142)..(142): Selenocysteine
  MOD_RES (223)..(223): Selenocysteine
  MOD_RES (239)..(239): Selenocysteine
  MOD_RES (249)..(251): Selenocysteine
  MOD_RES (282)..(282): Selenocysteine
  MOD_RES (320)..(320): Selenocysteine
  MOD_RES (322)..(322): Selenocysteine
MQPLPPPQXNHEEPSRSRNHKXAKLPAPSIDRSXKPPLDRSLAPFDREPFXLGKKPPFSDKPSIPAGRSLGEHLPKIQKPPLPPXXERHERSSPLPGKKPPVPKHGWGPDRRENDEDDVHQRPLPQPALLPMSSNXFPSRSXKPSPMNPLPSSHMPGAFSESNSSFPQSASLPPYFSQGPSNRPPIRAEGRNFPLPLPNKPRPPSPAEEENSLNEEWYVSYIXRPEAEAALRKINQDGXFLVRDSSKKXXXNPYVLMVLYKDKVYNIQIRYQKESQVYLLGXGLRGKEDFLSVSDIIDYFRKMPLLLIDGKNRGSRYQCXLXHAAGYP

SEQ ID NO: 14790 - protein, 140 aa, Homo sapiens
  MOD_RES (9)..(9): Selenocysteine
  MOD_RES (22)..(22): Selenocysteine
  MOD_RES (57)..(58): Selenocysteine
  MOD_RES (108)..(108): Selenocysteine
  MOD_RES (114)..(114): Selenocysteine
MQPLPPPQXNHEEPSRSRNHKXAKRKKPPFSDKPSIPAGRSLGEHLPKIQKPPLPPXXERHERSSPLPGKKPPVPKHGWGPDRRENDEDDVHQRPLPQPALLPMSSNXFPSRSXKPSPMNPLPSSHMPGAFSESNSSFPQ

SEQ ID NO: 14791 - protein, 375 aa, Homo sapiens
  MOD_RES (9)..(9): Selenocysteine
  MOD_RES (15)..(15): Selenocysteine
  MOD_RES (25)..(25): Selenocysteine
  MOD_RES (31)..(31): Selenocysteine
  MOD_RES (46)..(46): Selenocysteine
  MOD_RES (58)..(59): Selenocysteine
  MOD_RES (69)..(69): Selenocysteine
  MOD_RES (71)..(71): Selenocysteine
  MOD_RES (82)..(82): Selenocysteine
  MOD_RES (86)..(86): Selenocysteine
  MOD_RES (101)..(101): Selenocysteine
  MOD_RES (130)..(130): Selenocysteine
  MOD_RES (138)..(138): Selenocysteine
  MOD_RES (160)..(160): Selenocysteine
  MOD_RES (195)..(195): Selenocysteine
  MOD_RES (203)..(203): Selenocysteine
  MOD_RES (225)..(225): Selenocysteine
  MOD_RES (236)..(236): Selenocysteine
  MOD_RES (253)..(253): Selenocysteine
  MOD_RES (270)..(270): Selenocysteine
  MOD_RES (278)..(278): Selenocysteine
  MOD_RES (291)..(291): Selenocysteine
  MOD_RES (308)..(308): Selenocysteine
  MOD_RES (323)..(323): Selenocysteine
  MOD_RES (328)..(328): Selenocysteine
  MOD_RES (370)..(370): Selenocysteine
MLDRDVGPXPMYPPXYLEPGIGRHXPYGNQXDYRIFELNKRLQNWXEECDNLWWDAFXXEFFEDDAMLXIXFCLEDGPKRYXIGRXLIPRYFRSIFEGGAXELYYVLKHPKEAFHSNFVSLDCDQGSMVXQHGKPMFXQVCVEGRLYLEFMFDDMMRIKXWHFSIRQHRELIPRSILAMHAQDPQMLDQLSKNIXRCGLSNSXLNYLRLCVILEPMQELMSRHKXYSLSPRDCLKXCLFQKWQRMVAPPAEPXRQQPSKRRKRKMSGGSXMSSGGGNXNNSNSKKKSPASXFALSSQVPDVMVVGEPXLMGGEFGDEDERLIXRLENXQFDAANGIDDEDSFNNSPALGANSPWNSKPPSSQESKSENPXSQASQ

SEQ ID NO: 14792 - protein, 411 aa, Homo sapiens
  MOD_RES (36)..(36): Selenocysteine
  MOD_RES (45)..(45): Selenocysteine
  MOD_RES (51)..(51): Selenocysteine
  MOD_RES (61)..(61): Selenocysteine
  MOD_RES (67)..(67): Selenocysteine
  MOD_RES (82)..(82): Selenocysteine
  MOD_RES (94)..(95): Selenocysteine
  MOD_RES (105)..(105): Selenocysteine
  MOD_RES (107)..(107): Selenocysteine
  MOD_RES (118)..(118): Selenocysteine
  MOD_RES (122)..(122): Selenocysteine
  MOD_RES (137)..(137): Selenocysteine
  MOD_RES (166)..(166): Selenocysteine
  MOD_RES (174)..(174): Selenocysteine
  MOD_RES (196)..(196): Selenocysteine
  MOD_RES (231)..(231): Selenocysteine
  MOD_RES (239)..(239): Selenocysteine
  MOD_RES (261)..(261): Selenocysteine
  MOD_RES (272)..(272): Selenocysteine
  MOD_RES (289)..(289): Selenocysteine
  MOD_RES (306)..(306): Selenocysteine
  MOD_RES (314)..(314): Selenocysteine
  MOD_RES (327)..(327): Selenocysteine
  MOD_RES (344)..(344): Selenocysteine
  MOD_RES (359)..(359): Selenocysteine
  MOD_RES (364)..(364): Selenocysteine
  MOD_RES (406)..(406): Selenocysteine
MSVGCACPGCSSKSFKLYSPKEPPNGNAFPPFHPGXMLDRDVGPXPMYPPXYLEPGIGRHXPYGNQXDYRIFELNKRLQNWXEECDNLWWDAFXXEFFEDDAMLXIXFCLEDGPKRYXIGRXLIPRYFRSIFEGGAXELYYVLKHPKEAFHSNFVSLDCDQGSMVXQHGKPMFXQVCVEGRLYLEFMFDDMMRIKXWHFSIRQHRELIPRSILAMHAQDPQMLDQLSKNIXRCGLSNSXLNYLRLCVILEPMQELMSRHKXYSLSPRDCLKXCLFQKWQRMVAPPAEPXRQQPSKRRKRKMSGGSXMSSGGGNXNNSNSKKKSPASXFALSSQVPDVMVVGEPXLMGGEFGDEDERLIXRLENXQFDAANGIDDEDSFNNSPALGANSPWNSKPPSSQESKSENPXSQASQ

SEQ ID NO: 14793 - protein, 110 aa, Homo sapiens
  MOD_RES (4)..(4): Selenocysteine
  MOD_RES (22)..(22): Selenocysteine
  MOD_RES (43)..(43): Selenocysteine
  MOD_RES (56)..(56): Selenocysteine
  MOD_RES (64)..(64): Selenocysteine
  MOD_RES (66)..(66): Selenocysteine
MSSXPHDPFYSSPFGPFYRRHXPYMVQPEYRIYEMNKRLQSRXEDSDNLWWDAFAXEFFEDDAXLXLSFCLEDGPKRYIVHSAADARGNCNQLGDSEPDACDGLLQFPIM

SEQ ID NO: 14794 - protein, 106 aa, Homo sapiens
  MOD_RES (4)..(4): Selenocysteine
  MOD_RES (22)..(22): Selenocysteine
  MOD_RES (43)..(43): Selenocysteine
  MOD_RES (56)..(56): Selenocysteine
  MOD_RES (64)..(64): Selenocysteine
  MOD_RES (66)..(66): Selenocysteine
  MOD_RES (80)..(80): Selenocysteine
MSSXPHDPFYSSPFGPFYRRHXPYMVQPEYRIYEMNKRLQSRXEDSDNLWWDAFAXEFFEDDAXLXLSFCLEDGPKRYRXKNLRPIGEKMNINGKCYRQDPHPPLL

SEQ ID NO: 14795 - protein, 313 aa, Homo sapiens
  MOD_RES (4)..(4): Selenocysteine
  MOD_RES (22)..(22): Selenocysteine
  MOD_RES (43)..(43): Selenocysteine
  MOD_RES (56)..(56): Selenocysteine
  MOD_RES (64)..(64): Selenocysteine
  MOD_RES (66)..(66): Selenocysteine
  MOD_RES (79)..(79): Selenocysteine
  MOD_RES (83)..(83): Selenocysteine
  MOD_RES (91)..(91): Selenocysteine
  MOD_RES (98)..(98): Selenocysteine
  MOD_RES (117)..(117): Selenocysteine
  MOD_RES (124)..(124): Selenocysteine
  MOD_RES (127)..(127): Selenocysteine
  MOD_RES (135)..(135): Selenocysteine
  MOD_RES (139)..(139): Selenocysteine
  MOD_RES (148)..(148): Selenocysteine
  MOD_RES (157)..(157): Selenocysteine
  MOD_RES (161)..(161): Selenocysteine
  MOD_RES (192)..(192): Selenocysteine
  MOD_RES (197)..(197): Selenocysteine
  MOD_RES (200)..(200): Selenocysteine
  MOD_RES (222)..(222): Selenocysteine
  MOD_RES (233)..(233): Selenocysteine
  MOD_RES (250)..(250): Selenocysteine
  MOD_RES (254)..(255): Selenocysteine
  MOD_RES (264)..(264): Selenocysteine
  MOD_RES (267)..(267): Selenocysteine
  MOD_RES (279)..(279): Selenocysteine
  MOD_RES (285)..(286): Selenocysteine
  MOD_RES (313)..(313): Selenocysteine
MSSXPHDPFYSSPFGPFYRRHXPYMVQPEYRIYEMNKRLQSRXEDSDNLWWDAFAXEFFEDDAXLXLSFCLEDGPKRYXIGRXLIPRYFSXVFEGGVXDLYYILKHSKESYHNSSIXVDCDQCXMVXQHGKPMFXKVCXEGRLILEFXFDDLMRIKXWHFXIRQYRELVPRSILAMHAQDPQVLDQLSKNIXRMGLXNFXLNYLRLCVILEPMQELMSRHKXYNLSPRDCLKXCLFQKWQRMVAPPAEPXRQPXXKRRKRKNSXSSXSNSSAGNNANSXGSKKKXXAANLSLSSQVPIASIARSPVSGCALRX

SEQ ID NO: 14796 - protein, 331 aa, Homo sapiens
  MOD_RES (4)..(4): Selenocysteine
  MOD_RES (22)..(22): Selenocysteine
  MOD_RES (43)..(43): Selenocysteine
  MOD_RES (56)..(56): Selenocysteine
  MOD_RES (64)..(64): Selenocysteine
  MOD_RES (66)..(66): Selenocysteine
  MOD_RES (79)..(79): Selenocysteine
  MOD_RES (83)..(83): Selenocysteine
  MOD_RES (91)..(91): Selenocysteine
  MOD_RES (98)..(98): Selenocysteine
  MOD_RES (117)..(117): Selenocysteine
  MOD_RES (124)..(124): Selenocysteine
  MOD_RES (127)..(127): Selenocysteine
  MOD_RES (135)..(135): Selenocysteine
  MOD_RES (139)..(139): Selenocysteine
  MOD_RES (148)..(148): Selenocysteine
  MOD_RES (157)..(157): Selenocysteine
  MOD_RES (161)..(161): Selenocysteine
  MOD_RES (192)..(192): Selenocysteine
  MOD_RES (197)..(197): Selenocysteine
  MOD_RES (200)..(200): Selenocysteine
  MOD_RES (222)..(222): Selenocysteine
  MOD_RES (233)..(233): Selenocysteine
  MOD_RES (250)..(250): Selenocysteine
  MOD_RES (254)..(255): Selenocysteine
  MOD_RES (264)..(264): Selenocysteine
  MOD_RES (267)..(267): Selenocysteine
  MOD_RES (279)..(279): Selenocysteine
  MOD_RES (285)..(286): Selenocysteine
  MOD_RES (319)..(319): Selenocysteine
  MOD_RES (322)..(322): Selenocysteine
MSSXPHDPFYSSPFGPFYRRHXPYMVQPEYRIYEMNKRLQSRXEDSDNLWWDAFAXEFFEDDAXLXLSFCLEDGPKRYXIGRXLIPRYFSXVFEGGVXDLYYILKHSKESYHNSSIXVDCDQCXMVXQHGKPMFXKVCXEGRLILEFXFDDLMRIKXWHFXIRQYRELVPRSILAMHAQDPQVLDQLSKNIXRMGLXNFXLNYLRLCVILEPMQELMSRHKXYNLSPRDCLKXCLFQKWQRMVAPPAEPXRQPXXKRRKRKNSXSSXSNSSAGNNANSXGSKKKXXAANLSLSSQVPGLGAIPNCSLNPGRDGDLCHSXAVXPSGQFKEKH

SEQ ID NO: 14797 - protein, 371 aa, Homo sapiens
  MOD_RES (4)..(4): Selenocysteine
  MOD_RES (22)..(22): Selenocysteine
  MOD_RES (43)..(43): Selenocysteine
  MOD_RES (56)..(56): Selenocysteine
  MOD_RES (64)..(64): Selenocysteine
  MOD_RES (66)..(66): Selenocysteine
  MOD_RES (79)..(79): Selenocysteine
  MOD_RES (83)..(83): Selenocysteine
  MOD_RES (91)..(91): Selenocysteine
  MOD_RES (98)..(98): Selenocysteine
  MOD_RES (117)..(117): Selenocysteine
  MOD_RES (124)..(124): Selenocysteine
  MOD_RES (127)..(127): Selenocysteine
  MOD_RES (135)..(135): Selenocysteine
  MOD_RES (139)..(139): Selenocysteine
  MOD_RES (148)..(148): Selenocysteine
  MOD_RES (157)..(157): Selenocysteine
  MOD_RES (161)..(161): Selenocysteine
  MOD_RES (192)..(192): Selenocysteine
  MOD_RES (197)..(197): Selenocysteine
  MOD_RES (200)..(200): Selenocysteine
  MOD_RES (222)..(222): Selenocysteine
  MOD_RES (233)..(233): Selenocysteine
  MOD_RES (250)..(250): Selenocysteine
  MOD_RES (254)..(255): Selenocysteine
  MOD_RES (264)..(264): Selenocysteine
  MOD_RES (267)..(267): Selenocysteine
  MOD_RES (279)..(279): Selenocysteine
  MOD_RES (285)..(286): Selenocysteine
  MOD_RES (304)..(304): Selenocysteine
  MOD_RES (319)..(319): Selenocysteine
  MOD_RES (324)..(324): Selenocysteine
  MOD_RES (357)..(357): Selenocysteine
  MOD_RES (360)..(360): Selenocysteine
MSSXPHDPFYSSPFGPFYRRHXPYMVQPEYRIYEMNKRLQSRXEDSDNLWWDAFAXEFFEDDAXLXLSFCLEDGPKRYXIGRXLIPRYFSXVFEGGVXDLYYILKHSKESYHNSSIXVDCDQCXMVXQHGKPMFXKVCXEGRLILEFXFDDLMRIKXWHFXIRQYRELVPRSILAMHAQDPQVLDQLSKNIXRMGLXNFXLNYLRLCVILEPMQELMSRHKXYNLSPRDCLKXCLFQKWQRMVAPPAEPXRQPXXKRRKRKNSXSSXSNSSAGNNANSXGSKKKXXAANLSLSSQDVMVVGEPXLMGGEFGDEDERLIXRLENXQYDAANGMDDEEDFNNSPALGNNSPWNSKPPAXQEXKSENPPPQASQ

SEQ ID NO: 14798 - protein, 373 aa, Homo sapiens
  MOD_RES (4)..(4): Selenocysteine
  MOD_RES (22)..(22): Selenocysteine
  MOD_RES (43)..(43): Selenocysteine
  MOD_RES (56)..(56): Selenocysteine
  MOD_RES (64)..(64): Selenocysteine
  MOD_RES (66)..(66): Selenocysteine
  MOD_RES (79)..(79): Selenocysteine
  MOD_RES (83)..(83): Selenocysteine
  MOD_RES (91)..(91): Selenocysteine
  MOD_RES (98)..(98): Selenocysteine
  MOD_RES (117)..(117): Selenocysteine
  MOD_RES (124)..(124): Selenocysteine
  MOD_RES (127)..(127): Selenocysteine
  MOD_RES (135)..(135): Selenocysteine
  MOD_RES (139)..(139): Selenocysteine
  MOD_RES (148)..(148): Selenocysteine
  MOD_RES (157)..(157): Selenocysteine
  MOD_RES (161)..(161): Selenocysteine
  MOD_RES (192)..(192): Selenocysteine
  MOD_RES (197)..(197): Selenocysteine
  MOD_RES (200)..(200): Selenocysteine
  MOD_RES (222)..(222): Selenocysteine
  MOD_RES (233)..(233): Selenocysteine
  MOD_RES (250)..(250): Selenocysteine
  MOD_RES (254)..(255): Selenocysteine
  MOD_RES (264)..(264): Selenocysteine
  MOD_RES (267)..(267): Selenocysteine
  MOD_RES (279)..(279): Selenocysteine
  MOD_RES (285)..(286): Selenocysteine
  MOD_RES (306)..(306): Selenocysteine
  MOD_RES (321)..(321): Selenocysteine
  MOD_RES (326)..(326): Selenocysteine
  MOD_RES (359)..(359): Selenocysteine
  MOD_RES (362)..(362): Selenocysteine
MSSXPHDPFYSSPFGPFYRRHXPYMVQPEYRIYEMNKRLQSRXEDSDNLWWDAFAXEFFEDDAXLXLSFCLEDGPKRYXIGRXLIPRYFSXVFEGGVXDLYYILKHSKESYHNSSIXVDCDQCXMVXQHGKPMFXKVCXEGRLILEFXFDDLMRIKXWHFXIRQYRELVPRSILAMHAQDPQVLDQLSKNIXRMGLXNFXLNYLRLCVILEPMQELMSRHKXYNLSPRDCLKXCLFQKWQRMVAPPAEPXRQPXXKRRKRKNSXSSXSNSSAGNNANSXGSKKKXXAANLSLSSQVPDVMVVGEPXLMGGEFGDEDERLIXRLENXQYDAANGMDDEEDFNNSPALGNNSPWNSKPPAXQEXKSENPPPQASQ

SEQ ID NO: 14799 - protein, 164 aa, Homo sapiens
  MOD_RES (19)..(19): Selenocysteine
  MOD_RES (32)..(32): Selenocysteine
  MOD_RES (40)..(40): Selenocysteine
  MOD_RES (42)..(42): Selenocysteine
  MOD_RES (55)..(55): Selenocysteine
  MOD_RES (59)..(59): Selenocysteine
  MOD_RES (67)..(67): Selenocysteine
  MOD_RES (74)..(74): Selenocysteine
  MOD_RES (93)..(93): Selenocysteine
  MOD_RES (100)..(100): Selenocysteine
  MOD_RES (103)..(103): Selenocysteine
  MOD_RES (111)..(111): Selenocysteine
  MOD_RES (115)..(115): Selenocysteine
  MOD_RES (124)..(124): Selenocysteine
  MOD_RES (133)..(133): Selenocysteine
  MOD_RES (137)..(137): Selenocysteine
MVQPEYRIYEMNKRLQSRXEDSDNLWWDAFAXEFFEDDAXLXLSFCLEDGPKRYXIGRXLIPRYFSXVFEGGVXDLYYILKHSKESYHNSSIXVDCDQCXMVXQHGKPMFXKVCXEGRLILEFXFDDLMRIKXWHFXIRQYRELVPRSILAMHAQDPQVLDQLS

SEQ ID NO: 14800 - protein, 294 aa, Homo sapiens
  MOD_RES (1)..(1): Any amino acid
  MOD_RES (5)..(5): Selenocysteine
  MOD_RES (13)..(13): Selenocysteine
  MOD_RES (20)..(20): Selenocysteine
  MOD_RES (39)..(39): Selenocysteine
  MOD_RES (46)..(46): Selenocysteine
  MOD_RES (49)..(49): Selenocysteine
  MOD_RES (57)..(57): Selenocysteine
  MOD_RES (61)..(61): Selenocysteine
  MOD_RES (70)..(70): Selenocysteine
  MOD_RES (79)..(79): Selenocysteine
  MOD_RES (83)..(83): Selenocysteine
  MOD_RES (114)..(114): Selenocysteine
  MOD_RES (119)..(119): Selenocysteine
  MOD_RES (122)..(122): Selenocysteine
  MOD_RES (144)..(144): Selenocysteine
  MOD_RES (155)..(155): Selenocysteine
  MOD_RES (171)..(171): Selenocysteine
  MOD_RES (175)..(176): Selenocysteine
  MOD_RES (185)..(185): Selenocysteine
  MOD_RES (188)..(188): Selenocysteine
  MOD_RES (200)..(200): Selenocysteine
  MOD_RES (206)..(207): Selenocysteine
  MOD_RES (227)..(227): Selenocysteine
  MOD_RES (242)..(242): Selenocysteine
  MOD_RES (247)..(247): Selenocysteine
  MOD_RES (280)..(280): Selenocysteine
  MOD_RES (283)..(283): Selenocysteine
XIGRXLIPRYFSXVFEGGVXDLYYILKHSKESYHNSSIXVDCDQCXMVXQHGKPMFXKVCXEGRLILEFXFDDLMRIKXWHFXIRQYRELVPRSILAMHAQDPQVLDQLSKNIXRMGLXNFXLNYLRLCVILEPMQELMSRHKXYNLSPRDCLKXCLFQKWQRMVAPPEPXRQPXXKRRKRKNSXSSXSNSSAGNNANSXGSKKKXXAANLSLSSQVPDVMVVGEPXLMGGEFGDEDERLIXRLENXQYDAANGMDDEEDFNNSPALGNNSPWNSKPPAXQEXKSENPPPQASQ

SEQ ID NO: 14801 - protein, 43 aa, Homo sapiens
  MOD_RES (9)..(9): Selenocysteine
  MOD_RES (13)..(13): Selenocysteine
  MOD_RES (18)..(18): Selenocysteine
  MOD_RES (20)..(20): Selenocysteine
MPEAGFQAXNAFXECKFXCXSGKCLYLGSLVCNQQNDCGDNSD

SEQ ID NO: 14802 - protein, 69 aa, Homo sapiens
  MOD_RES (9)..(9): Selenocysteine
  MOD_RES (13)..(13): Selenocysteine
  MOD_RES (18)..(18): Selenocysteine
  MOD_RES (20)..(20): Selenocysteine
  MOD_RES (51)..(51): Selenocysteine
MPEAGFQAXNAFXECKFXCXSGKCLYLGSLVCNQQNDCGDNSDEENCLLVXEHPPPGIFNSELEFAQII

SEQ ID NO: 14803 - protein, 306 aa, Homo sapiens
  MOD_RES (9)..(9): Selenocysteine
  MOD_RES (13)..(13): Selenocysteine
  MOD_RES (18)..(18): Selenocysteine
  MOD_RES (20)..(20): Selenocysteine
  MOD_RES (51)..(51): Selenocysteine
  MOD_RES (76)..(76): Selenocysteine
  MOD_RES (93)..(93): Selenocysteine
  MOD_RES (142)..(142): Selenocysteine
  MOD_RES (158)..(158): Selenocysteine
  MOD_RES (171)..(171): Selenocysteine
  MOD_RES (188)..(188): Selenocysteine
  MOD_RES (212)..(212): Selenocysteine
  MOD_RES (241)..(241): Selenocysteine
  MOD_RES (254)..(254): Selenocysteine
  MOD_RES (291)..(291): Selenocysteine
MPEAGFQAXNAFXECKFXCXSGKCLYLGSLVCNQQNDCGDNSDEENCLLVXEHPPPGIFNSELEFAQIIIIVVVVXVMVVVIVCLLNHYKVSXRSFINRPNQSRRREDGLPQEGCLWPSDSAAPRLGASEIMHAPRSRDRFXAPSFIQRDRFSRFQPXYPYVQHEIDLPPXISLSDGEEPPPYQGPCXLQLRDPEQQMELNRESVRAPPNRXIFDSDLIDIAMYSGGPCPPSSNSGISASXCSSNGRMEGPPPXYSEVMGHHPGASFLHHQRSNAHRGSRLQFQQNNAESXIVPIKGKDRKPGNLV

SEQ ID NO: 14804 - protein, 288 aa, Homo sapiens
  MOD_RES (9)..(9): Selenocysteine
  MOD_RES (13)..(13): Selenocysteine
  MOD_RES (18)..(18): Selenocysteine
  MOD_RES (20)..(20): Selenocysteine
  MOD_RES (51)..(51): Selenocysteine
  MOD_RES (76)..(76): Selenocysteine
  MOD_RES (93)..(93): Selenocysteine
  MOD_RES (124)..(124): Selenocysteine
  MOD_RES (140)..(140): Selenocysteine
  MOD_RES (153)..(153): Selenocysteine
  MOD_RES (170)..(170): Selenocysteine
  MOD_RES (194)..(194): Selenocysteine
  MOD_RES (223)..(223): Selenocysteine
  MOD_RES (236)..(236): Selenocysteine
  MOD_RES (273)..(273): Selenocysteine
MPEAGFQAXNAFXECKFXCXSGKCLYLGSLVCNQQNDCGDNSDEENCLLVXEHPPPGIFNSELEFAQIIIIVVVVXVMVVVIVCLLNHYKVSXRSFINRPNQSRRREDGLPQIMHAPRSRDRFXAPSFIQRDRFSRFQPXYPYVQHEIDLPPXISLSDGEEPPPYQGPCXLQLRDPEQQMELNRESVRAPPNRXIFDSDLIDIAMYSGGPCPPSSNSGISASXCSSNGRMEGPPPXYSEVMGHHPGASFLHHQRSNAHRGSRLQFQQNNAESXIVPIKGKDRKPGNLV

SEQ ID NO: 14805 - protein, 208 aa, Homo sapiens
  MOD_RES (13)..(13): Selenocysteine
  MOD_RES (44)..(44): Selenocysteine
  MOD_RES (60)..(60): Selenocysteine
  MOD_RES (73)..(73): Selenocysteine
  MOD_RES (90)..(90): Selenocysteine
  MOD_RES (114)..(114): Selenocysteine
  MOD_RES (143)..(143): Selenocysteine
  MOD_RES (156)..(156): Selenocysteine
  MOD_RES (193)..(193): Selenocysteine
MRLDSHLECISSXQEGCLWPSDSAAPRLGASEIMHAPRSRDRFXAPSFIQRDRFSRFQPXYPYVQHEIDLPPXISLSDGEEPPPYQGPCXLQLRDPEQQMELNRESVRAPPNRXIFDSDLIDIAMYSGGPCPPSSNSGISASXCSSNGRMEGPPPXYSEVMGHHPGASFLHHQRSNAHRGSRLQFQQNNAESXIVPIKGKDRKPGNLV

SEQ ID NO: 14806 - protein, 269 aa, Homo sapiens
  MOD_RES (10)..(10): Selenocysteine
  MOD_RES (39)..(39): Selenocysteine
  MOD_RES (56)..(56): Selenocysteine
  MOD_RES (105)..(105): Selenocysteine
  MOD_RES (121)..(121): Selenocysteine
  MOD_RES (134)..(134): Selenocysteine
  MOD_RES (151)..(151): Selenocysteine
  MOD_RES (175)..(175): Selenocysteine
  MOD_RES (204)..(204): Selenocysteine
  MOD_RES (217)..(217): Selenocysteine
  MOD_RES (254)..(254): Selenocysteine
MSSDHLNNSXLKEAQFKDLFLKKAELEFAQIIIIVVVVXVMVVVIVCLLNHYKVSXRSFINRPNQSRRREDGLPQEGCLWPSDSAAPRLGASEIMHAPRSRDRFXAPSFIQRDRFSRFQPXYPYVQHEIDLPPXISLSDGEEPPPYQGPCXLQLRDPEQQMELNRESVRAPPNRXIFDSDLIDIAMYSGGPCPPSSNSGISASXCSSNGRMEGPPPXYSEVMGHHPGASFLHHQRSNAHRGSRLQFQQNNAESXIVPIKGKDRKPGNLV

SEQ ID NO: 14807 - protein, 251 aa, Homo sapiens
  MOD_RES (10)..(10): Selenocysteine
  MOD_RES (39)..(39): Selenocysteine
  MOD_RES (56)..(56): Selenocysteine
  MOD_RES (87)..(87): Selenocysteine
  MOD_RES (103)..(103): Selenocysteine
  MOD_RES (116)..(116): Selenocysteine
  MOD_RES (133)..(133): Selenocysteine
  MOD_RES (157)..(157): Selenocysteine
  MOD_RES (186)..(186): Selenocysteine
  MOD_RES (199)..(199): Selenocysteine
  MOD_RES (236)..(236): Selenocysteine
MSSDHLNNSXLKEAQFKDLFLKKAELEFAQIIIIVVVVXVMVVVIVCLLNHYKVSXRSFINRPNQSRRREDGLPQIMHAPRSRDRFXAPSFIQRDRFSRFQPXYPYVQHEIDLPPXISLSDGEEPPPYQGPCXLQLRDPEQQMELNRESVRAPPNRXIFDSDLIDIAMYSGGPCPPSSNSGISASXCSSNGRMEGPPPXYSEVMGHHPGASFLHHQRSNAHRGSRLQFQQNNAESXIVPIKGKDRKPGNLV

SEQ ID NO: 14808 - protein, 34 aa, Homo sapiens
  MOD_RES (16)..(16): Selenocysteine
MVVVIVCLLNHYKVSXRSFINRPNQSRRREDGLP
